United States Patent Application Publication US 2015/0052636 A1 - sequence listing, part 24

SEQ ID NO: 83880 - DNA, 425 bp, Citrus clementina
  Intron number 2 from transcript clementine0.9_016472m (loc us clementine0.9_015402m.g) derived from phytozome v7.0 (c hr-ID scaffold_63; pos 382824 to 383248)
agtggcccctctagaggtagctccagtcatcgcaggttagtagtgtttatttccatgtaatttacgtcagttctgttgaatgataacttattagaagtattagttggaaattcatttttctaattatatagtgatccactgaaaggggaatctaactttcataggtttatacattttaacttgccttctacaatctttgaatcaacttctgattggattagtttccatggcctaggcgattttctcagagttcaatgtgtatcaaactaaggatttatacgaagctagtttcttttgattgatgtttctagattccccaaaatattattttcagcttattagttccattgactcatgatctgtataatttgatgcatggtcttcctgtgtatttcacagttcccggagacgccgttcccgcttct

SEQ ID NO: 83881 - DNA, 665 bp, Citrus clementina; identical to SEQ ID NO: 79768
  Intron number 1 from transcript clementine0.9_010182m (loc us clementine0.9_010182m.g) derived from phytozome v7.0 (c hr-ID scaffold_1; pos 10756589 to 10757253)

SEQ ID NO: 83882 - DNA, 659 bp, Citrus clementina
  Intron number 1 from transcript clementine0.9_000549m (loc us clementine0.9_000549m.g) derived from phytozome v7.0 (c hr-ID scaffold_143; pos 223760 to 224418 reverse strand)
gcctcgagcacttcaaagacgccttgatttatcaggtagttgctacctgggtttctttcttcctttttcttatttaattttttgtgatatttgtataattttaattgcttggggtttaatttaatgtttattaggtgctcatttgttgtcaggcacgtattaagttacaggctctatgatttttaacttgtatggaagttttaaagagctgtttgtaaaagtaacagcacttctcaaatgcctgcttattcaaaacgagttttacaatgggactcattaagtgcttcttgaaagagtactgcaagtgatccgacaattcacttttatgcatacccaaacactgccaagaaaaataaggataataaaaatagataaagaagcacatttagctgtttgaatgctcttgtagcaccagcctattagaaatggtggttgtagtttgtttgatataatgatatctgaaagacaacaacaaaggttaagtatcttgataatttttgtgatttgataaaagtttaattgttggtattgcactcccgttttgtatcattagcagttactgttctggtgcgatataggcctcgtaagtgaatgaattttgtatatgttattagtgattatttttcgtttatagaaaaaacatctagagctagccaagg

SEQ ID NO: 83883 - DNA, 493 bp, Citrus clementina
  Intron number 1 from transcript clementine0.9_003022m (loc us clementine0.9_003022m.g) derived from phytozome v7.0 (c hr-ID scaffold_1; pos 10538950 to 10539442)
tctgagtcctctacttctgccgatctgaaactgaggtttgttctttttcttcttcttttctttcttccgtcacttttatgtcatttacattgtatatattctcatttattgctatcgttgttgaaattcgaatcaaatgcaatgtcgtttaaataaatttctatttgctactcccgttaattgtagcgagtcagctttgacatacttttggtgaataattatttcatttaatgtccaatttagctgcgtcgccccatttgttgtcttctgaatatggcaagatttgatgaaaattgaaatggcaagttgttagtattataatcgtgtttttataatatttacgctgaaaatgacacttaaagaaaaaaaatggtagctactagtttcaacaaattctttggtttcttttagatatttcctcagcgcatgtgaagttcgactaatttttgaatgttgcatttttactctcaacagcagtaggcagctttatttt

SEQ ID NO: 83884 - DNA, 428 bp, Citrus clementina
  Intron number 3 from transcript clementine0.9_003022m (loc us clementine0.9_003022m.g) derived from phytozome v7.0 (c hr-ID scaffold_1; pos 10539950 to 10540377)
aaggtaattccgttaaactcatattggttttattcatacttatctttatttactcatatactatttttcctacaaagggaatagagatagtgataattttaaggtgttggcatattcttggtgctttcccaaagggttcttgataagatttcctaaacttaaaagacaaaacaaggatatcttttttatgaacttaatctggtaatatggttaaatttacactgtacttcacaatctagattctcagttaaacctgcgaaatcctgaaaatttttagttcttccagatgtctgtgcaattattgatggttttgatattcttctcattcttgttggtttgtcattgagctttgcttctatatagtcaaatgagagctaaaatctaaaacatagtggcatctgtttgagttgcagcacctgagctcggtt

SEQ ID NO: 83885 - DNA, 635 bp, Citrus clementina
  Intron number 4 from transcript clementine0.9_003022m (loc us clementine0.9_003022m.g) derived from phytozome v7.0 (c hr-ID scaffold_1; pos 10540516 to 10541150)
aggtagcagtctctccttttccctctctcactgagatataaacaccccttttttgtttttttgtttttgaaaaagaaagagaatgggaaaacctgcaagaaataatggatgaggagattgtctattgaataaaagcagttcaaatcaaacaattaaggacaagaataataaagatctcaacaaaaacaaagcaggaaatagaattcaccgtagactataatctctatggaagatctcttaggtaatagctcccctcttgggaaggatatcatcaattggcttgttacatcttgagatgaggcctttcatatcatcattggaaagacgatgcatattttattccttatgggtgggggatgcaaatgttgagcaacggtaatgaagcttattaaattttagttgggcaataacattagaatcatttgatttgttgcaagtttacaagttgaataattctattcagaatttaggaaggaagactactatgaaatgttcatgcagttataattggttttaaatagcaatatgttccttttgaccattggaatttagtatttatgatatcatatcttgggtatcgatgtaacatttcatttacagggtctacctacttctgctgttattttgaagtttga

SEQ ID NO: 83886 - DNA, 828 bp, Citrus clementina
  Intron number 2 from transcript clementine0.9_035414m (loc us clementine0.9_035414m.g) derived from phytozome v7.0 (c hr-ID scaffold_29; pos 325536 to 326363)
cacccaaggccgtttttccttcggtgagtttagtgtcacttctttctctcacttttgaccgcaacatacttctttgacttactttttttttccctctctcttgactccattgcacctcattttgacttcaatttcgaagtattgctcactgttgtatggatttttgcagaattatttagtttcctgttatctgctatcgtctgtctatgttgttaaaaatttatttatattgaagtgctttttttttttcctggaaaaaaaagcacttggaagctggatgcactttacatcactgcaagtcatttcaagtgctttgcttctgcaaagtacttctggcactctgaagcattttgaatctcaagaatcattttttttttatgtaatttatataactgaatgaatattaaatataaaagggatattcgatgcttaaaatcagttttggtaacatccaatagcatctgtaaacataacagtgataagcatgaaaatgaaagcttctataagtacgggtaccaccagtacatgaaaactcattgcccatggataaataaaaacggtttcaacatcaaaaacaacaaaaattagagcaaacttatgataccagattcgaaattgtaaccaagcatcggccaaggttcacaaagtgtgatactttagcattctggttctttaggaagatttaggagaattttatgatatttgttgtatagcaggagctacttgctcaagttcttcctatttgttatattatgtttttgaaagctattgaattgtaatttgaattttatctttatttttcttaaggttgttggggcgattgaccaa

SEQ ID NO: 83887 - DNA, 933 bp, Citrus clementina
  Intron number 2 from transcript clementine0.9_005804m (loc us clementine0.9_004360m.g) derived from phytozome v7.0 (c hr-ID scaffold_23; pos 2366625 to 2367557 reverse strand)
gaggcacgacagaaacagcagctccagtccatcaggtttaatttacacacgcaatacaccttataataaaatgaaaaacgttttagacttttgagacttgaatcaataattattatcattcttcccaaaagcacccccccacacccaaaaaaaaaaaagaaaaagactaattattaattcaagaaacgggaccacagtttctgtttccagtaatatcacggtggtgattaacaacggacaagttgaaacacatataaatattaacttcaatgccgaagcgtttgttttgaagtaatttatataagatgcgggtatgtagtgaagtcgttgcagcctttgctttgtcccaaaaatccgattgaaatatataaagagtaatgttattggcacattaaattgtacacactacacaagataataaatgtattttatattgaaagataattaattttttctttttatataaatgattttatttaatttgttataattttttaatatgtattttttagggtaaataatatttttttaacgtataaattcatacgattgctttaatttaaaatacgggtaagtgggtcttacctggtgacgccggcaagggcaatctcgttaatgtgtagaactttgaggtggtgtgtttctcttgttatgccatgtatgtactcgtgtttacaacttttgactaacaacgtaatttccttataagtttccacagaaaagaaagcgtggagcggtggacgtgctaataaataataatacttttagcaaattatattttatgataggaagattttttttttaacaaaaaaaaaactttgcccaaaaatattaattaacaagaatttcctagcttttgttttgaatatctcaatttaatgatttgcgggtgaaacagtgcatcgttggcgtcactgacaagagaaacagggc

SEQ ID NO: 83888 - DNA, 681 bp, Citrus clementina
  Intron number 5 from transcript clementine0.9_019453m (loc us clementine0.9_018195m.g) derived from phytozome v7.0 (c hr-ID scaffold_1; pos 2821114 to 2821794 reverse strand)
gaactgtcactacaaggtgttgtttttacttctcagattcaaagcctatcttgaactctgtttcctttaaaatctttgttttatatcttcttggctggttgaacatctgcattttcatgtgatttttccttcatgattattgtttgccttacgttgagagaataatagagttctgacatcataaagaaatgaggatatgaatgaaaaactgcaaaagttctcccatctccactctttcttgaaagatctatacagagcaaagtgccctacctattgatgaaaaaaatccttggtaatgcagcttacctttcactctattttcaatgtgactgaaccagcctttaccgatcttgtggaggatatggtgcttcccctagtgactagaaggggcagcagtcagtcgagtcttttgctttccttaattaagcatggattctcaggatggaatcctgaataaatgagtgatatttgaagttactaggtttaggttcatgcataattttcttattcttcttttatttatttgagtttgattatcctctgctttgtggatgtttttattcgacaaatgtggttattgacttatccatgatgattgtacatgtgattacattttttttttttatacaaaactcaatatttaaaaaccttgtagggaagttgttgtgcaattcaacgctg

SEQ ID NO: 83889 - DNA, 825 bp, Citrus clementina
  Intron number 2 from transcript clementine0.9_019453m (loc us clementine0.9_018195m.g) derived from phytozome v7.0 (c hr-ID scaffold_1; pos 2822456 to 2823280 reverse strand)
ctgcatttttgctgctgacttgtgggttaattgtggtatgtaactttatatataaatattacttattcatcacgcttgcgggtgcttatggatatgattgttgtaaatgatatggctttcgattgtaaatattggtttcccataaataatgaaagtgaaggcatgtacttaaggtgtgagatgaatatattgttgtcccaagaatgcgacttgtgagtgcattatatctgttttttaaatggcttagttgagcaatttatgttttctttttcaataatttgttattattattattgttataggatcattgatatatgacttgtcggttaatatgaacatagattcatgtttaatgttcatttctctgacttgtgatggtttctcgataattctagatttgatggcttgaaatttgttctccacaaaaagaaatgttaaacctatgtcggatttgttattcttcgctatactttgtatgtgccaatagtctcaggttaccagaatctacttcagttagtaattgtgatcactaaaacagataggtacttgcattcattctattcgtagttttccactaatacattttgtaattgctatctgacgaagcattgagtttggagttctctctttttattcaatatgcaaatatagtgtgaattatcaatttactagctggaaacaaattagttaagggaaacatgggaactgtttgaatcatctgctgtttgttatgctttttatgaaacaagagacaaaaatagaggcaattaatcaaataacaaatgtttttctctttctgatttcagacaccactgctttcctttt

SEQ ID NO: 83890 - DNA, 727 bp, Citrus clementina
  Intron number 2 from transcript clementine0.9_004415m (loc us clementine0.9_004415m.g) derived from phytozome v7.0 (c hr-ID scaffold_29; pos 926815 to 927541 reverse strand)
gcaacttcggtaattatgatattcttttatgttgcctggataccattttaatattcatcttttaatgattccaaaatgagctttttgaatatagaggataaacaggtttgttttcggttcaaatcagagcctctattttcattgcacagactgtttataatattctttttgtagatgatagaataaagaagctcaatcgtgtactctaagcctattgtgggtcttcatatgaacccatgattaatagtagccaaggcattgttgaaatgatctggatctcttgtcttcattgactagattttgtagataggccattatatttgccacccaccagggatttaagactatcaagaacttctttaaatgttgattgggcacaaaatgggtttgctattcattttatggggtggattatttatcgggaaattaaagtttattggagtttaaaatattcttcaaaccatccatatgcctaggctaacttagtttattcttttatctgttggcttcattggggatactaatagatttgttctttttttttttttttgcaattatcgtaaacttcttatgattgtagttttatttgaaattttatttaagtttgtttagctcctttgtattttccagatagatttttgagtatcatgattgaagatgagcgaaggatgcatggtaaacctctaattgctgtagtgttttgaaacagacccgcgcttgacagatt

SEQ ID NO: 83891 - DNA, 863 bp, Citrus clementina
  Intron number 1 from transcript clementine0.9_019530m (loc us clementine0.9_018171m.g) derived from phytozome v7.0 (c hr-ID scaffold_101; pos 110368 to 111230 reverse strand)
agttttgcagcagcgatcttgaagtttgtgagtcttttattattaatttttaatttcatctagatccattttatgatattgagaatttgaattttttctttttattttgaaatgtgagatcttagggttttgatttatcattttagggaaaaattatgcgtagatttagatctaattattgttgtttttgtagattcaattatcatcaatatgaatttaaagattatcatttctcgtaaaagggaaaattaaagaacaataaatagctttaaaatgtatatagcttgttgatcatacaggggctaagccgaaaattggtcattgttctatgtaaattgatttttgtttattccaattggacgtttctgagtttttgtattcttttgtagctttaaaatgtatgtagcttgttgatcatacaggtgtaagggaaaaaactggcattttttaatttcatttttgttgattccaataggtcgttattgggtttttgcattcttttgcagctgtcaaggtatatattaaaatggtgatgaattgtgatcccaatatatttgcatctcacttaaataagttttagctataacttttgtagctttagtctcaagatggctttgtttctttgtacattatgcaatgtttgtttctggtgaatcaataagagtagaatttacactttcttctttttctgttttgatgaaatcttattgcatgttgtcttttggtttgtgtttgctatatgatgtttagagtagaatttatactttcttcttttagtttttcaaattcgaattccttgtccttatccttttctttttatactaaccattaatcatgccaactggttaggtcttcttggaggc

SEQ ID NO: 83892 - DNA, 1005 bp, Citrus clementina
  Intron number 1 from transcript clementine0.9_015161m (loc us clementine0.9_015003m.g) derived from phytozome v7.0 (c hr-ID scaffold_1; pos 9762420 to 9763424 reverse strand)
atactgagactgaggtagcattctttttcttagattgctttaatttcgaattgatttgatggtatagtatgtgatgcatgttgaattcttgattttgggaaagtagttttggcctctttttgtatgttcgtgtgtctgtgtgtgtgtgggagaattgacagtatttattgggttttggaagaatagactgatttcatgcctggtgtgattgtgaattggcctggcgtgcatcattatttaatgagaccaggttaacatatgctagtgaaagtcaattgtagtgggttacccttggattcctgataattaaaggcatgtaaaaattggacagacgagtgtaactatgaaaagatggctagaagtctgaacggaaattcgagtgttatatactgaaggcttaaaatgtctttatctgatttttaaagataaacaaacggatcttcttgattgaattgtttattaactcacaatggtagctgttggtctttggctgtgaggaaacctccctgtcaactgcctttggttttagaattagaaacataaaatgtaatattaagggaattagtctgtggatatttaactctattgagaaagaaggactggttaaattttctacttattttcagaaacctttttctttctccctttggtgttggttgtaatgctgatgtactttggttacttgaaagtaacaaactgattggatgtatcaaacttgggaattgacttttatgacgattctgaagcttaataattatatgctttttgatacataaatagtcaagtgataggttctggtaaattagagatatgaggtggtgaatgcaaagggtgcagacggccttttttctcaagaaacatcgttcttataatcatatgccattctccttttttgtttttgtggtataattttttattctgtttcttgttagttggttaatattttggcttttcaaatctggaactgcagaagttggcaactaattctaaagaggagcctgacaa

SEQ ID NO: 83893 - DNA, 823 bp, Citrus clementina
  Intron number 3 from transcript clementine0.9_025357m (loc us clementine0.9_021533m.g) derived from phytozome v7.0 (c hr-ID scaffold_1; pos 1738419 to 1739241)
actgcaggccccaagtatggcatagtaaataaattgctgcgttcattttcttttatacttcgtttataagtgcggttacagtatattttcctatcagtaacaccagttttcttttttcaattacttttctttcaaatcatttggctgccttacatagtttttaagaaaatttgttgtctataaatagttaaaacccaatcagtaccctaaaatttaggactgcatggcgactcacctgtttatataattaaaaaggttttctttgtttctcctcagtttttactttcttttttagttcaagaaactgaaaatcaaatgaaaaaacactagagaatctgtattggggtttgctatagatggtcaagtttgaatgttttgaggattctctgactttggattagcattatgcactaaattcagaatgcactgtataatccactctgagaaacacgaaaggaatgttataatattttatatgctttcacgtgtctttccatttggactaatgttaagtttggatgagttataccctattcagtaaatagagttttgatgtgttaaaatatttgttgcatcatttcttttgtcccttttgaaatagagtgaggtagatttgaaaagtccaatccacatttattttttttctttttttggtttctttggttctatgttgtctgttatattttcctcttttcttgacttgttctgattaaaattaaggtgttcttgttcaatctgtaataaataactggctgttactattagcttcattattctatcttcttagacgtcatgactgataaagatgggaaacttcacagat

SEQ ID NO: 83894 - DNA, 670 bp, Citrus clementina
  Intron number 1 from transcript clementine0.9_016122m (loc us clementine0.9_016082m.g) derived from phytozome v7.0 (c hr-ID scaffold_53; pos 1341691 to 1342360)
ctctaagcgattgccaactccaagctggattttctgtaattattttttcactatttattttatatagttgttttctgctgctacgtgtatattaatttttatcgtttttaatattatgaatcgtatttcaagtacccatatgattgtttctctgatctgctctgctttgttcgaaaattaaccgctttttgttttgaagttcttgaacatctatgagagtaatccctgactgtaagggaacgttcctgctactatatttgactgtgcttttgtattgtggtgaacatggatgctgtttttgtgttaagctacattttctcattatgtgactttgtgattagagtgccaaggtttgattatgtttgtgtttctatgaaatataaggtcatatagctagtcatgccttgctctccttgtttttgaaagactctcatttaagttcaaaccttgttaagccctaggaaatgtggatcattttggtcattctctgtttctttcaattctaacaaagcgctatagtaccttcttgttgcaaaagtatctgtagattcttttttgttgtgtgaatttagctaagaatatgtcatgccttcatcatttactcatggaattaatgaggtttcatttattcgtaggttcgtgacccttccttaactgtgtataagggtta

SEQ ID NO: 83895 - DNA, 467 bp, Citrus clementina
  Intron number 1 from transcript clementine0.9_006091m (loc us clementine0.9_006091m.g) derived from phytozome v7.0 (c hr-ID scaffold_1; pos 7402530 to 7402996)
gtcttgttgttggtgacaggagtgtgcaggttaagctttaaaaaaattcatttgttgaatcaatattatgatcagttggaaaattctatgattttttttttttaaccgtaaaaagatgaagaaaagctaaaggatcagagaaagttgaagtgcttctgtttccaagcgatcaaccactgcaaacatttattttttttttgttttcattgaatttctttgatattatctttccaaattggattacagtgatagttgttgtcaaagtgctggttttggagtaatttttttcagcttggatattctcagtaaatgttgaatgagaggagatatgaaaatgggatactgtactgtcagcgataatcatgtttagttgtgagttgaaatactagtacatgaatttgatgttgttgttgttgttttttcacattatagagatcagggaaagttcctggtgttggattggtgca

SEQ ID NO: 83896 - DNA, 607 bp, Citrus clementina
  Intron number 1 from transcript clementine0.9_008215m (loc us clementine0.9_008215m.g) derived from phytozome v7.0 (c hr-ID scaffold_23; pos 1769686 to 1770292 reverse strand)
acgattttggtttgttatttctctatcaatgtgatcttattatatcgtaattttgcttttttgaaagtattagactatttcattctttaatgtatttacgattttgcttgtgatattaagggctccaaatgtaaccaatgaaaatgtattttcaagagctttaggcatttactatcccttctaaggcgtgttgtctttggattcccactcgtatgtgatctgtgaagcttgaaattccttaagcacaaatgaaattctattatcattttgatagaagtctggtcaattatcatggccaaatttgttttcctttgttgtttctcttttacgagatctatgcctgacattattacgttctgaactttttctttctatgctcatttatactcatatgccaagggctcaatattctaaatgcaaacagtgcatcaaacaagagttttgttgcttttggcacctgagaaactgatttgttttataaagaatccttttggttgggttaggtacaagagccactctattttcattgtgcatgactttttcttttccaagaaaaggagtcatcctgacatcagttgtgtttaatttgtttttttcagattttgac

SEQ ID NO: 83897 - DNA, 731 bp, Citrus clementina
  Intron number 2 from transcript clementine0.9_008534m (loc us clementine0.9_008534m.g) derived from phytozome v7.0 (c hr-ID scaffold_27; pos 128297 to 129027)
tgattcgtaagtttcaagaacaaagcttgtctccggtaaaattttgctttctttgttcagaattcatgtcctttttcttttcttgataagtaattcatatacttaagtgttcttttattcggttatttttttttcttaaagagaatctaaagattccattggttgaaaatgattatttatttgagcttggtatgatcgttgtttaagaagttcatacatggtttcatgaatatatttccatatccaaaacaaatctatgtgaatcaataactatcataattaggttgtttcgcaacatatatataaggaagcttggcagaacctttatttttgagtgattgttgttctgtatgggtttactgttgagattaaagtatgtagttttccaaacagtgattgaatatattcaattgcttgtcacacagagacaaacatagggctgattttatacacatggcccgttgatcgattaggttgtggaactatatgagacaacaattaattttgatgctccaagcttacagttaagggctcaaattattttgcattcaatcggcattacgatgttatttatagaaatcaatttaatggggttcttgcttttttgaatcacaaatgagaccacgtgtcaaatacggtttttttgcttgaagtttgtattgctaacttttagtgatttccaaaatggaattaatgacagctcatctgtgacatctacttgtctgctggaa

SEQ ID NO: 83898 - DNA, 849 bp, Citrus clementina
  Intron number 2 from transcript clementine0.9_020296m (loc us clementine0.9_017596m.g) derived from phytozome v7.0 (c hr-ID scaffold_20; pos 4021798 to 4022646)
aagaatttggatttatttgcctgtgtacaactctttatcccttctttagtattgcatctaaaatttatttgtacactaatcccttggttttgacatagtcttagcattgtggtgattattttttgagaatgagtcatccttctaaaagggttttcctttactcatggggaattaaatttttttgtgtctataatttttttttcgtctgataatttggatctttaactgatgtttgattggatctttgttttttgaggctttttctcatggcatcatgtcattgtgcttacaaaaatggttcatcggtggttcaactaaaactcttatcatttacttcttggaaaaaaaaattgaatatttctgcaataataaaacctctttttcaaattctccattaagtatgttggtgaaagtgtttgtcatgcagaccatcattagatttgttttatgctccaatatatatatgtgtatgtattcccgctttgcctttcctggttcatgttatttcagattactgggcatcatcttctgtctgaacattttttaatgtttttgaacactcatacagttgcccttaaaatactatccttagcattagagtcaacttctctgaaaaaagtgaaggatacatcatcgtcatgattttctttgctttaaatcagcattgccttctctctctctctctctctctctctctctcatatattatgtgcatcagtgaatctttattcttgttgatgctgatttctgagaggtttcttactttgttcggtaatttctgcactgtaacagattccattacggtgattcatgttgaatatgcaggtttatcctgaggggactcatcta

SEQ ID NO: 83899 - DNA, 1060 bp, Citrus clementina
  Intron number 1 from transcript clementine0.9_013525m (loc us clementine0.9_011818m.g) derived from phytozome v7.0 (c hr-ID scaffold_1; pos 9303666 to 9304725 reverse strand)
ccggctatctgatattgtttgtttctccatcaaaggtctttcatgcatatgctttttttgagtttgtttttgtttgagtgttggataaagggtcaaagggcatgttgtttggtttctgagaaagttgacaagaaaataagggaaatgaaaggaatgtttgatgtgtgatgaatgggaaaaataggtttttttttttttgagtgaaaaaagtttcttttttctttgctttgtttggtttccaacttccaagcaagttttgggagaaaaacaaggagaaaatgaaagtttcacagttgcatttcataataaatttatattttggattctcaaaatctaaatttgcttcaaaggtgggttaaaatttatttgatttttttttttaaatgatttggtaatcaaagattgtgtagctgaaaatatagagcaatgttttgattcttgatgagcttagctaagacttatgttgagcttctccttttcctcctttgttttcttaagaaacaaacaaaagggtcaccttaagtttggttgctggttacatggaagaaaatatgagaagacaaatttttaaaagtcatgctacttttttctcaggaagcaaacaatgcatagggctgctaagtttattttataacttttttcgtttgcttgctaaaaattctagatcatgagatattggaattccatgtcatgatgaatattctctgtgatgtctttcagattcatagctttttgtttttaacttttataaaattatgtttcacattcaccgtttcttgtttttactctattaaattgaaagattcttgcctttctgagtaggatcatgtctttttacttctgttttaattatctgtttgattcttaataaagtatttgatatgctttgattatctgtttggttcttaataaagaatttgttagaaataagaagaatattggaatcttcttttcttaggtatctcaatgcatttccttttaagctagattttgattgtgtgtgattattcttcattttcaaataggcagattttgagtctacataaagggaaagaagaag

SEQ ID NO: 83900 - DNA, 257 bp, Citrus clementina
  Intron number 2 from transcript clementine0.9_030213m (loc us clementine0.9_030213m.g) derived from phytozome v7.0 (c hr-ID scaffold_27; pos 2657441 to 2657697)
aaggacaaagctgtaagtataatttctcagacacagtatcaaattacaaaaacgtttgagcattgacgattaattatttaattaaaaaaccaaaaaaaaaaatgaagcatcttatttcttctgtggctaatttttgtgttgtagcttgctgcactcaaggttttgtatacgtaattctatctctatttgcatgcaactgcctcctctcatgcgtgtatagaggcaaactacgaaagaaatacggcttgcagggaaat

SEQ ID NO: 83901 - DNA, 856 bp, Citrus clementina
  Intron number 2 from transcript clementine0.9_031869m (loc us clementine0.9_031869m.g) derived from phytozome v7.0 (c hr-ID scaffold_20; pos 1254106 to 1254961 reverse strand)
acggcattcttggttgcccattgctcttaattgaagtgagtctattatttcctaaccattgaatttacttcacatgcatactcaaaaataaatagtttgaggatacatttatgtctctactaggtcactttcatcagttggataggttcattattgaaagtcaaagattatagcctaattttgtgtgcatgtatttttttttccttgtatagcatatatttatttttcctagtttcctatagcttccttatatagtctagtcaaactagtatataatgtaaagattgcaacttttatgaataagaaaaatatcttctcactattttttctcatggtatcagagcccaagttagggtttctgggcagttttttttttcaacaaattttcagtcgccaatacctttaggattttatcttacgctgtgactttaaaattctgatttaaaatgtcagatgtgagcgaatccagctctggtgtcacgttaaacatgttcaagccaataattctgttgacaatccgtcattacatattacaactcacaaattgaatggccagaattttctgtagtggtcacagtctgtgaagttgtatgtgaagggaaaaggtaaaatgggctatcttgatgggtcaacagacataccagaggttgacgacccttcgtataaaatctgggatgaacagaactctatggtaatgtcatggcttattaattcaatggatcctcacattagtcagtcatttcttttcttaccatcagcacgagatttatgggatgcagtcacagagacatattctgatcttggaaatactgcacagttgttactgcacagttgtacgaacttaagtgtcgtattc

SEQ ID NO: 83902 - DNA, 524 bp, Citrus clementina
  Intron number 1 from transcript clementine0.9_001721m (loc us clementine0.9_001721m.g) derived from phytozome v7.0 (c hr-ID scaffold_27; pos 1052606 to 1053129)
agatattggaggtttgcttcttgtgaacttctgttactttgattttgtgttgttgttttggtttctctaaaaatttatatttctttgtttatgattggtgattaaatttcataattaattagaagtaatggactatgaatgaaaccacttcaatgcactaaagtgtaaactgaaacatgtcagttggatttcatacctttgtaatggaaggatgttgaaggcctttgtcaagatttcttcaaaattaacctcttcttttgggagtaaatttttaatccatattcatgtttagcacaagcggtattcatatatgcatgattctcagtgctacgctgcagttcatgcaataatattgcatccatctttcaattgtcatccatacagagaaaaacactaacacatgtgcttcaagttaaataatttctgacatttttcattgtaatcaatcaattgattgaacttcctcctttgtttgtcttcattctttagagaaaaactggtggattggtgatttggagatctgg

SEQ ID NO: 83903 - DNA, 648 bp, Citrus clementina
  Intron number 1 from transcript clementine0.9_004689m (loc us clementine0.9_004689m.g) derived from phytozome v7.0 (c hr-ID scaffold_33; pos 1829526 to 1830173)
ttttcgttaaacagaagcgcttttctggtaatataaatcttgcccattctctcgttttcttcaagatcattatctttttcatttcgaaaattgattttttcttttattttgaattcttacagattgaaaatttatctttttaatcatttttcttctttttctttttcttttctttgggtgagttttcacttgatttgtgtttatggctaatctgttttgaggtcattattctctgttcctgcataatctttttatcttctctgacattaatgaaatttcaagtttttttttccttttctggtccattttagctgatttgtatatctgagtataaacaaactcaaaattcacattttcctgagaaaaacaaaaatctttgttcatgtatagttctgttcatattagctcttaatcgcaatcaaaatttcagttttagcttaacaaattaaaaaaaaaaagtttggataactaaatccttatttgggttatttatttttttccccctaagcatccacattaaaaaaattcaaaatttttaatttttttagcttcttgttgatatttcatattaagatatttaattaattttttttttttttttggtgttgatcagaataatcctgcgagcatatcaggctcgttccctga

SEQ ID NO: 83904 - DNA, 764 bp, Citrus clementina
  Intron number 2 from transcript clementine0.9_004689m (loc us clementine0.9_004689m.g) derived from phytozome v7.0 (c hr-ID scaffold_33; pos 1830382 to 1831145)
cagcctgtcaccccttggtctgtctcagttgctaggtaattatctcaggaatttgattgtttgtgtcagattaaattgaatttagagttatttatatgtacttttgatattttgtgtgttgtttgatggagttaattctgttgggattcatttgttaagtcatgtaatcttatactcaagtgcctatgcttttgttttgtagtgtcatttagttaaagagagagtaaaacctttttagttaaaccactcaatgactttttcatgggacttatgtcatcaatcccacggttggatcaactccaatttcactgaatgccaattacgtcatgtaaaatttttttttttttttaacacaatttcaattggattggccaacgtgatgagtgcaatgatttttataagaggaatggaattccaattgtttggttttgtgattcaataacaattggtgcaaactttctcaacttaattcaccagataattacatcaagaatatgattaattgtctggaccttgagattactatttttgacatttgtcatcatttttggagataggtataattcatttccagctgtgactggtaataatgtaaatgtaatgctctattgttgatgccataactccataagaagggtttcttacgttatctttaatttgttattgaagaatgatttgtaattttaccttccatttaatatatatatatatatttttcctttggattagtgggtattctttgttgagagatccacaccacaaca

SEQ ID NO: 83905 - DNA, 792 bp, Citrus clementina
  Intron number 2 from transcript clementine0.9_026485m (loc us clementine0.9_026485m.g) derived from phytozome v7.0 (c hr-ID scaffold_33; pos 1269323 to 1270114)
tgcttgtgcttaccccgctgctcgcaagagaacgtgtatgttttcttaaattttcttctttatatgcacattcaaagcaaattttttatcagtagattggtgtttgtgtttgtttatgcatttgggtgttggttttttttttttagctgttttggtttcttggttgaagtgagatactttactgcaattcgattgatctttagctctgtgtaagaatggattttgtatgctttatttctggtgattttttttggttacttcttttatctgcgagattacatagaactgatatatctctagtatattgttgattttgagctctaagcatttggttgtatgcgggtttgagatctcttgctccttgtttatattctggttttattctttgccagagttctaataaaacgggtgtgtttctaccgtcatgaaatttatctgtggtcaagctggtctatgttttcagtacttttgttgataattttttatttgaataagaaagcttatgtattattgcttgtagtatgtgttattgtattgaagtagaaccatgtttcagcttctgtgttcctattttttttttcagttaataatcaatgagattttatgtggatttgtggaaatatacttattcttcttgttgttctggattggcaaacttactttatcattgttcttatatgaaactatttttctgggtgtaaagtatatgtgcttgataaggtgcgatttggctaatgcaattaattatgaattttagataactggagtgtgaaggcaatccgaagaaagacc

SEQ ID NO: 83906 - DNA, 538 bp, Citrus clementina
  Intron number 1 from transcript clementine0.9_000547m (loc us clementine0.9_000547m.g) derived from phytozome v7.0 (c hr-ID scaffold_27; pos 2082138 to 2082675)
tcagctgtgtttcagctcactcccactcggacaaggtattttttttcccttttcattgtccaattttgacttattttttcatattgttactgattaaaatgtctacaaatttggttgatgaaatgggaaattttattttaattatttttttttgtgggaaatttatttagcgatctgtgttgtggttaatattttttatttgtttatttattttctgacattgatgtctctgtggttgaaggattggttttctttgctgggtttatgttatagaggtctttttaagtttgcatttctttgcaaaacatgtgtattttgttttttagataacggtctatgaattttgaaggagtggtattgccttttatttacatcatagaatggattttctggtttatcttgactcttcagagtaatctgtaatatatggtttgtcaagaatctatgtgcaaattcacttgtaatattcctcagcaatgcagctatgggaactgaattttcattttttttttcaggtgtgatttgctgatatctgcat

SEQ ID NO: 83907 - DNA, 742 bp, Citrus clementina
  Intron number 2 from transcript clementine0.9_000547m (loc us clementine0.9_000547m.g) derived from phytozome v7.0 (c hr-ID scaffold_27; pos 2082809 to 2083550)
gttcacaaagggaacactcgaaaggtttgtttgttgttgaatgctattttttaccattataaatgttgcaactggtggtacctaggtgatggttgattgccatattaaaaattattcatcctgttcttttacaaaagaaaaagaaaataatttctggaatgccggctaaatgatgccacattggttgcattttgttcttgcattatggagggcgcatattctaggcattggtgagaattcaaattttgacatgttgttggaatattgatctactacatcccttatagatcaagtcagtttgcttttgccacgaatggttgagagattgagacccatgatccattaactgtagcacagacgctgataaggctttggtctgtgaaagtgggagggtaattgttttagatgttgggtttagtacagtactaatagcctctggttatgagaatcacgacaaatgtatagaaaatattgccatgtcaacatatactagttaaatcatttaaatattgtcttgtttttgggttttgtattgcaagagaatcggtgttaagcagaagctcagaagattgaaaggatcgtggaactttctgtgtctttaacctgaatttattgttaactaatataagcaaatatgtactgtgactcttgagtaggtggagaaaatattttttgctacaatggactaaatattttatttaatataggtttgttcgctttgttagcactcctgaggtcctgg

SEQ ID NO: 83908 - DNA, 457 bp, Citrus clementina; identical to SEQ ID NO: 78813
  Intron number 1 from transcript clementine0.9_028056m (loc us clementine0.9_028056m.g) derived from phytozome v7.0 (c hr-ID scaffold_82; pos 1079213 to 1079669 reverse strand)

SEQ ID NO: 83909 - DNA, 622 bp, Citrus clementina
  Intron number 2 from transcript clementine0.9_007664m (loc us clementine0.9_007664m.g) derived from phytozome v7.0 (c hr-ID scaffold_53; pos 945871 to 946492 reverse strand)
agaaattagcagccgacgggaaagaggtacctaacaaaatttacgactccttccccccccccccccccccccccacccacaaaaaaaaccccccgccatggagtatatttattgaacttacatcaaaattacatcaaagattacaactatatacagaaccaatattttggcaagctaaattgtttgttcatttaaatatcatctctttctctctatcatacacatgcatacatatacaaacacttgcatccacaaactttcaatttggccttcttttgatattagtgagatgtttcatatgtagacatggctcatgtgcattatgcatgaataataaattaattatataatatatgtatgttcgtcgagaagaattctaattgttgtggcgaataacttcatcacttttgtttgctgcatatgtgcgcgcaatgttgtgcgcgttaggtagatctgaatgttcatgatttctattcccaattaatctccaaattaattataagataattaaatatacttttcttagggaccttattttggttaatttgttacaaatattataagatggatgggtggatattaatttgttattgattttttttttccaattgatcttaggagg

SEQ ID NO: 83910 - DNA, 381 bp, Citrus clementina
  Intron number 1 from transcript clementine0.9_007664m (loc us clementine0.9_007664m.g) derived from phytozome v7.0 (c hr-ID scaffold_53; pos 946535 to 946915 reverse strand)
aacatatttgcagccaagaagctagaaaggtacaaatacatatctatactatcatcaaatccccttgtgtgtcgatgactttttaaaaaaaaaaaaaaaaataaagagttgataatgttttagatgtcggatttaattatgagaatttacgtttcgatcttcatgaattggatttagatggaggagttctaccatttgacgatatagcaagtgaaagtcactcagtttctttgaatcttgaatttgtagaagctgtcatcattcttttttttcttcctttttgagtttcatgaagcactgaaataactaaggaaaaataaaccaattattaatatatgactgttgttcttctatttcaggtgggaattggaggacaaatat

SEQ ID NO: 83911 - DNA, 505 bp, Citrus clementina; identical to SEQ ID NO: 81625
  Intron number 6 from transcript clementine0.9_007670m (loc us clementine0.9_007670m.g) derived from phytozome v7.0 (c hr-ID scaffold_40; pos 121471 to 121975 reverse strand)

SEQ ID NO: 83912 - DNA, 585 bp, Citrus clementina
  Intron number 1 from transcript clementine0.9_031988m (loc us clementine0.9_031988m.g) derived from phytozome v7.0 (c hr-ID scaffold_1; pos 12774566 to 12775150)
gagtgccaacaaactcgattaagaagttattattttaaaagatagcttaataatacatgtttgatagtttaccaataagtggcagaatttgattagtttaccaatagttggtagaatgtggttaactattaagaaatccattacatatttatgtattcccatatatgtgtattcttctatagagaatgatagaaatactatttattttttttattatatagcacttgtactattcatgttgaattacatgcatgagaaacctttaatttgcaatagtcatctagattatcatataagattagattgaaacattgattgatatgttccgcttcctttatttttaatgaaaagatgaatttcccaacgattaagaagacaaaaacaatcagttgaattaaaagtgcaaattgatgaccagagcaaccgtattatctgaacaatttaagcgtgcttcatgattttgctctatataagaaagaccattcacgctatttcacgtgcgaatcgtatagagttttcagttcatcaaattataatttaagtaattaagaacggtcttcgaaaatcttaagacatatttgctta

SEQ ID NO: 83913 - DNA, 463 bp, Citrus clementina
  Intron number 1 from transcript clementine0.9_034336m (loc us clementine0.9_034336m.g) derived from phytozome v7.0 (c hr-ID scaffold_1; pos 6238278 to 6238740 reverse strand)
cagtatcaagctctctctctcgctcgtcaggtaattttatcacatacacagatagataccatacatacatgtacacgtgtcgaagagctgatggttgttattgttctttcagtattttgtatgtttaattcgtttgattaaatgtaattgttgaatgaaggagttttgcttatgatattaaacctggaggaagcttcttgttctagttcggtacaacttggtcataatgcttactatttagcttatctttgatgagattcaattcagaattaagggttcaatttgtagtcacgtatgtgattcatatccaattcactttgagcttatgatttgataatactagtgaagttattttataacgatttcatgtctcctctatggcattttctatgttgttttcagtctattactcgaagattttcgtatgattgatctttgagtttttttaatttatatattgcag

SEQ ID NO: 83914 - DNA, 908 bp, Citrus clementina
  Intron number 1 from transcript clementine0.9_034850m (loc us clementine0.9_034850m.g) derived from phytozome v7.0 (c hr-ID scaffold_40; pos 1936937 to 1937844)
gagctgaacaagggaacaaggtatccagaaagcctgttttggcagtttcatgttgtttgtcagttcaacaagcatgtatctagcatttatagtactggacttcatttcttgaaatcatattgatgcaaaatacaattttaattatggttaggatttattctgtatcagagcttagtagaattacttttcagagttcaagtggggttactcaactgtgttggtttggaataacttaattctgttagtcaattagttttggctgactgctgtttatgacaaccgttataagtaaacattttacattattttcaaaagaggcttgattagtgatagtagattttttctacaactctcacaaaaaggtaattcaatccccttcctctctgttcttctcacctctctagttcttttctactcctcaacccgaatttctgctctttattctttcctcacttctacagtcttccctcctattgtacatcacggaatcatctttgttaaaacatttcaagtattgtggatttgcagcaacagtagtcccttatatgctatcctatttgttttcaattatgtttgccaggctgatgaattcagctggtaagtcaactcaatgagtgttttctgttgaaatggttatattaccaggacctataaaagtttcactttttaattttagaaacttgatgctgcaaatttctgcatttctgcagaaatagatcagcctttagatataccgatttgcatgataattcagttttgattaagttttgtttcctgactctctttatatgtatcatatttcaactgagacaatgtttttatcgtgtatcagatatattctgtggtattttaatttctggttgtgaatagcaggaattacggaaagcaatagcagaaacatactataa

SEQ ID NO: 83915 - DNA, 971 bp, Citrus clementina
  Intron number 2 from transcript clementine0.9_012075m (loc us clementine0.9_012075m.g) derived from phytozome v7.0 (c hr-ID scaffold_27; pos 1968113 to 1969083 reverse strand)
cacattgctcaggtatgagattttgctggcaacggtgttattgtagtcaaacaccattaatctttcactttcttgagcatcccctacagcttgcatcactcctcatattatttgagctctactttaccttgtagttaattagtggaacctactggttatttagctactgctagtttgttagtttgaactgaatatgatttagggtctaagttgtaagtttgcaccattcgaattataattttttaaataccggtggcttgacatttgatagttatgagatgacttcttgaccttgtacttgggtaccagccctttgtgtaagcgcctgatatcaacccttctaggagaaaaaagagttgatgtaatgtagcaccaaacgtccattgaaatagcagacaaagaaaggggaagcaaatagaagaggggggtgggggggaatgatagaagtattattggaggaaacagaaaactagaggagaaagggagaaaatttagaaaaactatgaagggaacatcagaaactttatccaatgatcgtcgatacacgaaagtctccttcaaacatggagagcaatccctattttcagtggccaaactctacacaacacaggaactcaaaatcaaaagaaatgtacttcataataagtaatataaaacctacttaaataataaaactgtgattgttcataaacagtgctgacaattaatgtagcaggattagctagattttttaaagtaaaataaataagttcataatcatctatatgctccttgatatatatatatatattttttttttttttcctttattccttgatttcacatttattcttttttacgcttcacatcataggctcttatgtgatgatcaaatgctttaactctcattttctgtaatagttgttgtggttcgagcaagtttttgcctttctgtaacctgttatcgttatttgattgctgtacagggtgtt

SEQ ID NO: 83916 - DNA, 705 bp, Citrus clementina
  Intron number 1 from transcript clementine0.9_007494m (loc us clementine0.9_007494m.g) derived from phytozome v7.0 (c hr-ID scaffold_1; pos 11297936 to 11298640 reverse strand)
agcagtgggggttaaattttggcttattctgattggtaagcttcccatttcttgattcaaacgtgaacttagctcaaaatattctgtcaaatttcaattttgatatcttttcttatagatggaagtatcttttattgctggtaccaccaattaatcacgttggctaagaatttattgagccgggatttagtggtagatggcacaaacttggagagagcattataagaaaataaataacaacggtgactatagttgttgagtcggtaagagcagttagatattgcttgtcttgggtttgtctttctgtgcaatgctaggagttgatgatgactattcttcgaaattcgaattttgaatatctaatggggtcaaggaataagaaatgaaaataggaaatgagattgcttgtgggtttatataatataagcactgatgttttagttactgcatcatgatgcttagagtttttttgagggattttagcagatatgttgtgcagtctttacatttcatgattaactcattatccacaatttttatttcttccaatttaatggtttggcttcttttttttaaatgtttcattttctgaagaatcccctcgataaaaacaatgaatgatttagcataagcttgcatctaacagattcttactactactgttatttgttaggtaatgaagttctaaaaacggcaggagtttaa

SEQ ID NO: 83917 - DNA, 772 bp, Citrus clementina
  Intron number 1 from transcript clementine0.9_006959m (loc us clementine0.9_006959m.g) derived from phytozome v7.0 (c hr-ID scaffold_114; pos 105632 to 106403)
atcaagttgaggtaacatttattattgttattattattattattatcaggattcaaaatgttcttgcatcatcacttgtttattcatttgttgatattgcaacttgtttttattaattgttagttttgttaccttcattgtgaccatttgttgttaaagctaaatttcacatgtgaaatggggattctgcttcaagtggagattttatttgatttgttacaaccctgtttcgttgtttgtaatttgtaatatgcaattcgtgttcattcaaattcatttgtttcgaattttatattataactgcatttctggtgaatatggctgtacaattgctgaccattctctatgcgggggatttctggcttttgattgaataaattatctttgaattttactgaaatgaatgaaaagacaattcacttatattgaatgggtcactgcagcaatttgacaattccttgagtggtgataaagtctttgatgggtagcttctagaaaatccatgaaaatttcctctttctgaatcactatttttagatgaaatgtaaagtgagtgtagcacgattcacttgcaagtgtaaacatattaaatttctagactgttcattacatttctgttcgactgctataatcatattaatcagcattgaagtgcaaagtttcttcagagcaatttgaaatttttggattctctgtctttgtgagatgaaactgtttgcaaaatattattgatgcaggaaccacttgttacgccactttgtgagttggatac

SEQ ID NO: 83918 - DNA, 712 bp, Citrus clementina
  Intron number 1 from transcript clementine0.9_003219m (loc us clementine0.9_003132m.g) derived from phytozome v7.0 (c hr-ID scaffold_101; pos 551295 to 552006 reverse strand)
caattttgccggtccccttgaaccttcattttcaggttcatttattttgtttactctaatctcttcctttcatatataattcgtaaattaggttataaattacagtttttttgttttctttgtacttttcaaaatcttgatgcattttcatgattacaaagttatttaatgttacttttatgcaggatactttttttttctttattttgttgatgataaatgctaaaatgcccgttgctgaacaatcttgatgcgtttttatgattgcgaagttacttgatgttacttttatgcaggatattgtaattttaattttgtatcttgttgataataaatgttaaaatgttttttcccaaataatctttaggtttcaagtcggattacaaaaatactctcagagtgtttttggggaattgttgaatgtggttgtaaatctttagcggcttatgtgagaaaaacattgcaagatttctccacgtggtaatcttgaacctttttgtagagagtttggattatatggctgcattggtgcaaaatgattacttattcttgtattacaatttctgaatttttatttctggaattatgacgtttatattttgttttttaatttcgttttatgattcttctatttagtagagagctttctggctgatttgattatttgtgatattcagaaaatcaggagcagaaacaggttaggttcttggac

SEQ ID NO: 83919 - DNA, 755 bp, Citrus clementina
  Intron number 1 from transcript clementine0.9_001453m (loc us clementine0.9_001453m.g) derived from phytozome v7.0 (c hr-ID scaffold_53; pos 1362617 to 1363371)
ctcccgccaaacgccttgtccttttcgtgggtactgcctcaatctttgaaacgcaaaaccccaaaaataaataaaaataaataaataacagtttgttaaaatgtctcaatgcaaaagttgaatgtgtgtcaaatagtgtatgcggtgcagccgttttgaaatggaatcactaggtttcaagtaatccaggtgggtggttagttaaatatcagctgccgagtaaaagtaggcgtttcttgaacctctagctgtggtgctttcagaaatcggatacctgaatgactttaaactcaaatgagttgattatttttctctgtttgtgatcaaccattcgagttgagcttgcatgagatgcatcatataagttcttaattcataattttgaggttttggggttggttattatcatttcaagaggaatggactcattctagtttttggtttgtagggttaaaaagaggttgttttgacttgtttctcttgtatttccatattaagcttgagaaagtagtgatgagtgttgagattgtttacaaatacagtttttgcttttggtccatgggatgaaattgatactgaaccaaattcttagttagactttatggttggtgttcatttagaaaatttccgttattacagaatgaagaaattactgcaggatcttgttcaaaatttgtttttgttatcacttttatgactcaatttgtattcttttatatttttttaattttttgttgaaaatgttaatgcagcgg

SEQ ID NO: 83920 - DNA, 690 bp, Citrus clementina
  Intron number 1 from transcript clementine0.9_003992m (loc us clementine0.9_003992m.g) derived from phytozome v7.0 (c hr-ID scaffold_10; pos 3598915 to 3599604)
caacacaaccctttgaagatatttgcataattaaggtacttgcttctaaatccatcttctaatttttgtatgataattttcttttttaaaatttagttagctctattaatatcagcgtgtgtatacttttgctgagctcattctctgatctgtagtttaagggtttttaaagtttttggtacatgtcattatttaatacagaaattaacttcttggcaaatttagtgaactaaatgtgaatcaataaattgtcttgagcaaattagaatgtgatatgactgataaactgttttgcccctttttcttttttgaacttcaaagccttgtacagattatttgctgattttaatgctcattgctcttagtttcgtaaccttaagagaggatttttgagaagtgatttgtgagctatatttggcgaggggagaatgacgattgctaattgtgaactgaattgtgaattccttttttttgttttttgttgaaattttgactactacttgcaatatctcatgaactccaaactggatgctgcaaatcaacatcctgtgttctttcttgatccatgcctatttctgtcagtttcagtgctccctctcttctgcactagttgtatgagttcatataagaaattctcaatgcttatctatttttgtcatttcctaggctgcttaaccaaagaattgatca

SEQ ID NO: 83921 - DNA, 624 bp, Citrus clementina
  Intron number 2 from transcript clementine0.9_011719m (loc us clementine0.9_008450m.g) derived from phytozome v7.0 (c hr-ID scaffold_23; pos 3354820 to 3355443 reverse strand)
aggtatgcaggctaatgtagggttgatgtgctagataatagatgtatatgccaaacttggctatgttctggatgcaagatctaggaaatggtaaaatgtatagcaaaactcattttcttttttcaattgccgtggatgttatatgttcctatgcaagttttaaactcaatgcagcacgatggaaactcaggctcaataactttgtgaaaatctaaatcttttacgaattttatgatctcaagtttctgatatgaatcaaattttaatattttttattgcctctgattataaatggcacggccaagtgttcgtgaggaaggttccacttgtgtaaaaatgcacacaatcgctgtgcactcttttgacattgagttgcattgaggcatgaatcacatttatgtttctacatgcaatgttcatcccaaaattttttaacacattattctatatggatatgttttcttcttcttctttctttcccttttttctttgggtttctttggtaacagatttagtggatttctttgaaatttaagagcgttgaacttctagataagtgatactgaggattttcactttttacactgtgcagatcagcatctcagcactccaaggcagccaata

SEQ ID NO: 83922 - DNA, 798 bp, Citrus clementina
  Intron number 2 from transcript clementine0.9_031776m (loc us clementine0.9_031776m.g) derived from phytozome v7.0 (c hr-ID scaffold_1; pos 11573483 to 11574280 reverse strand)
actgcagtcacactttgcctgtcacttcccaagaggtgacgatgcatttccttgtctcatttataggtataagagctattgggaattatgtattaagcatactgtttcaacaggattctttatttgtgatgtatttgaaatgggtttgtgatcttttagttataacaatcttttcttaaaaaaatttcttagttgatataaaagatatgctatttcctttcatgtacatgcaacatatatactaccttggaagcacattagtttgtggtcttctgctgtgagcagcaaaagaaataaattgaatgtcctatttttatgtgatggtaaaattatcaaaatctggaaggaaatagtagtatgaacaagtagaggcgtcttgggcagaactttggatttgaatcatggatatttctgattagtaacttgtcttttatgaggatcagtgatctggcattcagataacctgtgtggtatagtacagctttttaaacaaattggtttggatgcagttgatgcatgtctttcatgcgattgattgttttatgattttgttatgatggaattgaggtattatagaatttggtaggtggcacgtgaatgcacaatatgaatttgcttgaatgcttatgcagttaacccctctacttaatgctctcattgaagtaggggaggctgtacatcaatatttttctcatctagtatgaggaaaaatctcttagatattatttatggatgatttgattcatctgaataccgtatgatgcaatattttccccagagaaaagcttgactggcaag

SEQ ID NO: 83923 - DNA, 811 bp, Citrus clementina
  Intron number 1 from transcript clementine0.9_000730m (loc us clementine0.9_000730m.g) derived from phytozome v7.0 (c hr-ID scaffold_82; pos 462678 to 463488 reverse strand)
tcaagttgtatcatcgatcgccattctcaaggaaggtaattgccgtttccatttctaaacgtctcactttattttccgacaaagtgcgggaaaaaataaaaattgaggttgtgcattttcttgtgtttctcaaatcaagtaccaaagctccgatctttctacgcgcagatgatgtaaaatgccgaaattgatttaaattatatgaaaccacacaattttgttaatcttttatcttatctgaagctactggtgttcaaagaggtgaaatgtgacctcttttttatgttttgctcttgaacaattgttactgttgaaggctgattgtgatttaaaccgatagagatataattttgacttaggtcagcattatcttctcattgatctagtgcagtttgatatttgttgttgggcttggttcatcgtagttgtagcggctgagaaactgtaagaaaagtgagtataatagattttatgctttctgcgtttttagagttatttagcttgcaatgaatgaatagtaatgggagctgactttttggttatactacattcttctgttcttagcaataacttcgttagctgttgtattgtagccttgtgttgatgactaataccaattggacataatattaaacccccctgaagttttctattgttatcatcaattatgctgttttattccattgtctgcattaactcaagtgttgaattggaatgtaattgtgaagatatcatgatagcaggttgtaattgatgcttttagttttttgcaccaggttttccttcgaagagttcactttatattatattt

SEQ ID NO: 83924 - DNA, 641 bp, Citrus clementina
  Intron number 1 from transcript clementine0.9_017734m (loc us clementine0.9_017734m.g) derived from phytozome v7.0 (c hr-ID scaffold_67; pos 1156498 to 1157138 reverse strand)
ggtcacgcccgtgctctcgagcaagccaaaaaactgtataaaatactataaatttcatgtcttttcctgtttgtttcatgagaaatgtttttcccgctaaaagttttcattgtttcttcgctcaacagaacccaagaacaaaattatggttaaactactgcatctcttcgtgtaacttggtttaatcttttaactgttattgcttaatttcattaatttaccttgttttgtacgcatcaaatgacgaaatctttttttatttttttttaaattggtgggcttttgattgtcaaaacttatgcggttcattttattttatttatttctctgggttttttttttccatttcattctttctgtttctttgtgggaactgtgtatcattccattcgtagcaaaaagaaaaaaaaatatcgtcttttctggttctcagttctcgaaatttgttatccgtattcgactttctaaatgttatgagttaagtttgataaaccttgaagctataaaagcaattccgtggaataggtatttgagtttaatacaattcttggcacagcctaaatgagcctattagtctactcaatttgatttgtaattcttggctgaaattgtaggtttccaaacacttacctgcttgttgg

SEQ ID NO: 83925 - DNA, 1027 bp, Citrus clementina
  Intron number 1 from transcript clementine0.9_030486m (loc us clementine0.9_030486m.g) derived from phytozome v7.0 (c hr-ID scaffold_51; pos 665607 to 666633)
aagctcgtttttggattaaatttgccgaagacaaggttcgcatcacaacttttcttgctaacacgtttataaatttaattaatcttgtcgggtttctttatatactttaatttttcattgtatatgagaaacatgactccctaaacattaatttttatctactattaatgctcaaactaatgtcctcgcatgtgcaaaatgcattcacggccgactaagctcaatgaaccttttattttacattagagaaaattatcaaaaaaattcggttaattactttaaattttttacctttagaaatttttcttaattaatcgtggattttactgcatcaagggtaaaatattaaaatataattgttttagcgatagggggaattttgaggactttcgaaacatgaaagcaaaattataatttactaaaacaataagaggattttttttttaatatttttccttttatatcattaagtatttgtttgatatgacttatttattactaataagtgtttatttaatcaaaaaatctcatttcaaatttttattattgtttagttttatttttagaagaacttttggggttaaataaattcttttacctatactagtaaaaatttaaatttaattttttggaaatagaagtttgaggattttttaaaaagttaaatagtttaaaatgttcatcatttattttataatattattttatttatttatttcataactttactttataaacttgtctattaaagttatttaaaaaaattaatgaaaattttcattaacaattaaattttactaacaaaaattctacttgaataagctctaaaagttataataaattagtctaaaaattagtgggtaaactcttctagatactttgacagtttgaaacgtctaggctttgaaagatactttgatgcgtgtgtacctattatctaatttctttttacctcgtttatattgttaatcatgtggtgataagaattagatataaaatcttgtggcagggagtagctgtttggaaa

SEQ ID NO: 83926 - DNA, 699 bp, Citrus clementina
  Intron number 2 from transcript clementine0.9_016958m (loc us clementine0.9_016958m.g) derived from phytozome v7.0 (c hr-ID scaffold_1; pos 8874998 to 8875696)
ccggcaggagcgggagatgtaagtcttttttcatcattatttttaatatttttaaagcagtaatgaataagaactttggtgtggataaggagaattagtttattgcgtccggagtttgcgttttgggattacatagtttgtggggacaaaaattaatgataggttcagatttcatagtgttttaatttacttcagctaggttaaacaatttgcaaaattcatcattagtagttggtattacttttgcagataaaaatttggatgcttgtaatgtaattaaagtttcagttttgtcttcgtttaccaagaggatagaaatattttgagaattgtatcgcaaaatagtgtcccatttctgttacataggttctacattgacttagcctcgctgtatgttgcaaatggggtgctgagtgatgaatgatgatttttgcaaactgtttgatctaactgaaataagttgaaacattatagcctgagcctttcattgattttttttttttttttaaacggtagtttgtgtgtagactgccccttcttgatgttattttcagatttccagattatatacctttctgaaatatttttatcatatttgatgcgcatacattttgaatcttatctcttttctctttctattgctgttctctttttgcgtttacaggtgttggtaacatcatttggcgagcttggtgagaa

SEQ ID NO: 83927 - DNA, 1049 bp, Citrus clementina
  Intron number 1 from transcript clementine0.9_000881m (loc us clementine0.9_000881m.g) derived from phytozome v7.0 (c hr-ID scaffold_20; pos 896437 to 897485)
gccaatatttctggccttgattctaatactgttaggtaatctcttctcaaagaataccctactgtctgcataaactcaatgtagcgaagcaactgtccacgtatgggtttgaagaaaaaaatatctttaactttaattgattgatagaaataaaatccttatggaaatggttgtgagttgattaaaaaaatgttaactgtgctcagttttacagaatgtgtgcttaggattgcatatttgagaatttgggataattttttgatgtatgggaaaattccgttaaaactacctaagcttttgtaaaatcaggatttactaccaaaagctatatttgtaaaatcaggattgcactgagggaagctgccaatatttctggctttgattctaatactgtcaggtaatctctcctcatggaatactctactgtctgcataaaataaatatagcaaagcaactgttcccgtatggctttgcataaaatgaatatggcaaagcaactgtcaatgtatgcttttgagacaaaaatatccttaactttaattgatggatagaaataaaatccttgtggaagtggttgcaaattgattaaaaaaatgttatctgtgctcagttttacagaatgatgtgcttaggattgcatatttgagaagttgggataagtttttgacgtatgggaaaattcccttaaaactaccgaagcttttgtaaaatcaggatttactaccaaaagctatatatgatacagaatcaatggataaaagcataagaaatttagttatattgtactgaataattgttatccacatgtctgtagatagtaaatgacattaaaacagatgattcatacaattgacatatatattaaactatatatgttaacggtaggtaattatcttgtgaaacttccatttgttatccctttggaacctaacatatattgcctttctctatttttttttttttcactttctattaatttatctgaactttctatttgctttcaatatttcttaggcctgaatctgtactcatagaggaactggtcaaag

SEQ ID NO: 83928 - DNA, 806 bp, Citrus clementina
  Intron number 5 from transcript clementine0.9_006874m (loc us clementine0.9_006249m.g) derived from phytozome v7.0 (c hr-ID scaffold_1; pos 11400776 to 11401581 reverse strand)
tttgggttctcctttcgtaatttctttgtgtgtgtctattaaacactgaagagcaaaaggaaattgcatgtgtcatggattgaatcaattgatcacacaataacaatttgctgtttcgttaatgaaatgtggtttggatatatattttaatgaaatgagttcgttatttatgtagtcccgcttgtagtaattggatgcaagtactgttatgctattctccccccatgaaattcatgtcttcattgcagtaccaaatcttgtttgtttcactagcataagaaaccataatttatgttgcttgcttagaaatttaatatttatgtatttttgttgtaatataacaaaaagaaaaaataaccaatctacactgcttttagtctttctctttttacatatatttagccttcactcttcatctttttactgtttgattctccagtgtgttgaacttattgggcttaataatttggttgtaatgcaagttccaaaactcctggctggaaattattgaaggttccttcattagtacaggcaaacagctctatatttgtacaactagaaaaaaatatgaaaccatataaaattatctcccggatgcaactcaatgggtcatggctacttgaatccttctaataatttttactcattgtgcctaagcaatatataaatgtaaaaaaaaatcagaaagattacagaacctaaatagattgcgatcatacaacttcttcaggaatgccttgtcaaatcctcagcgtaatctgatttatctccttaaaatccttcaggaaccccaaggccaccgtttg

SEQ ID NO: 83929 - DNA, 249 bp, Citrus clementina
  Intron number 3 from transcript clementine0.9_000658m (loc us clementine0.9_000658m.g) derived from phytozome v7.0 (c hr-ID scaffold_53; pos 685007 to 685255 reverse strand)
gtgtttctgttcattttcaggagatagttgatctggtaatctcttaagtctttcttatctggggtttcttgctatcaagcaatggttttgggcgattgtgacgcttgattatacaagctctttgtctaatatagccttttgatggtgaaatgttgaaacagaaattttgattttttgttttctttcatggtacctaaattcagctgtaaatgtcaaaattttctgaactaattttgcactgtatacagg

SEQ ID NO: 83930 - DNA, 918 bp, Citrus clementina
  Intron number 3 from transcript clementine0.9_034641m (loc us clementine0.9_034641m.g) derived from phytozome v7.0 (c hr-ID scaffold_45; pos 1537849 to 1538766 reverse strand)
gaagacccaccccaaggtattgcttgactcgtagtacattaatgggatatggatttatgacaggatttatgcttgctatcatacatatatttctgatgcttctctttctatattaggtcaagagctgtcttcttaaacagacttcaatacactcttgattgatatccctagtggatttcctcctgtctacttcttgtatttactttctcatcactacaatttatgtttcttaccaaaatacatgtattgacgggctcttgtgtaaaagcctcgtgcatccagcatttgtagcactactgacacttgcagtaaagcatatatgaaaacagtggtgatatgtaggttactccagattggggatcattttagggttcaagtccgagccaattcataacagtcctgactggacaatgccaactttaaggggagactagggatgggtcaatgtctttcaataccaacttgtagtggatgagggacaagatctgttggaaattgcacttccttttaccaccatattcactgctatgctgtctccattgtcgttaccatcagtacttcgtagctttacaatttgaccagcaccagttggccagtgccattgccatagtactgccttgttctactgaaagatctctttgttgaatctttgatgcttaatgactgatgtgtcacacttgcttaagttgagttaccgtagttttcagctttttgaaatgtcagcaaacatgatacttgaaatcattctaatctttatcacattcatgctgtgttgtggaatgttgtttccttgacaatatacaatattaatggccacttatgcgacaaactcttacagccttacctctgtatataatctgacaaatagtcttttagttctttctcctttttttatcttttttcatagatttgctgcat

SEQ ID NO: 83931 - DNA, 447 bp, Citrus clementina; identical to SEQ ID NO: 82233
  Intron number 1 from transcript clementine0.9_002997m (loc us clementine0.9_002997m.g) derived from phytozome v7.0 (c hr-ID scaffold_53; pos 632149 to 632595 reverse strand)

SEQ ID NO: 83932 - DNA, 485 bp, Citrus clementina
  Intron number 2 from transcript clementine0.9_026241m (loc us clementine0.9_025262m.g) derived from phytozome v7.0 (c hr-ID scaffold_23; pos 2805373 to 2805857 reverse strand)
tgtatcatattcttccttttcttcttttcaatttctgcgtttattctttttgttgatctcttctgttttatgttgctgctgcttatgtaggttgtgatttatatgtatacaaaagactcatcaaatgcatcttcttctgaaagcacttgcgctattttccattttcacccaaaacggtcttgtggtatttttatgttccaacaagtgatgattgaaatgtttcaaaataggcattcaatgctggatctcaacagttctaaaaacactcacaaataacaaataaaatgctctcttacatgtttgatgtgaatacattaaaattttggaaggcctcattccaatttttaagagtttgacgtctggttataggcaaaaaatgcaatcaaactattgtctcatattcagcatgcttttttcggtccgatcaagtaactgttcgagggaatgcaggagatcttctctagttggtctcacaaaactgacca

SEQ ID NO: 83933 - DNA, 565 bp, Citrus clementina
  Intron number 1 from transcript clementine0.9_011901m (loc us clementine0.9_011901m.g) derived from phytozome v7.0 (c hr-ID scaffold_20; pos 491403 to 491967)
cggcgttggtatcttcaccaaggtttgttttattcttcttcttcatttggatcactttgatggaggaaaagtgtttgtttaatttattggtaaaatgagtacacttggaaaaattttgtttgattcggtgaagcggatatgttcatgatgattgctgtctatagggagcatatggatcaaatcaaatttcaaccctcaattgagccttaactatgtagtgagtagtattgataagaattgtgtgacggttgctgcagcttactgcattctgggcgtaattatgcattgtttgagcaggttattttgaactgcagatctatgaaaacgcccctgtaaagaactgtcgtcctcgctcattatgatatgcagttatgccaaagtagaaattcattgttttgcttgatagtaataatgctttataatacaccacttcgatatgttttgctgtttctcactttgtgtgttgctctgaatttctctagtttagttaggcctacaaccttaaatttcatcaagggtaacacttttttcttttatctttcaattgcccagacagctgcagagt

SEQ ID NO: 83934 - DNA, 507 bp, Citrus clementina
  Intron number 1 from transcript clementine0.9_016353m (loc us clementine0.9_016353m.g) derived from phytozome v7.0 (c hr-ID scaffold_98; pos 359035 to 359541)
gagcaagcagccgctttttcacttcattgaagaaggtaagcgatatatccatttcgtccaattgatatttgtttccttttcagtgttcgggtagatcctttttgtcagtcaagttgaagaaatatgcacattcaaacagcaaaagagggcgagcaatacccatttcatgaatttaatcaaattttgggtgaaattgaataaatgttcatattcaagtagatagtgtttgtttgtaggaaagaaagattcatgagcataatttttctaggtagtgttagaaacagcaaagagagattatttttgttcaatttggtatgtagaagcgcttcaatttggacaaagttgaaaagcaattccaagttcataaatttgattcaattttggtctggttttagtattttaattggttaaagttcttactgatatagcttcaaatgcaaagaaagaactaattcattttcttctttgtttacttcaggtgagtgaaggacattccgagtttcaaag

SEQ ID NO: 83935 - DNA, 677 bp, Citrus clementina
  Intron number 1 from transcript clementine0.9_027848m (loc us clementine0.9_027848m.g) derived from phytozome v7.0 (c hr-ID scaffold_63; pos 1312890 to 1313566 reverse strand)
acctacacacagagaaatagaaggagaaaggggctgtgagacgaagggaaagagaaagtaatttgggtctgttgtgagacgaagagaaaacgaagagaaagagaattggggctgttgttgattttgtcccaaccaagctgaaacgaaggggaaaagggctgtgagatgaagacaaagagaaaccactttcggctgtaataattttgccaaaacgacgtcgttcagcttgaatgagagaaaaaaaaaagagattaaaacggcgtcgttcgtttattgatttcggggtttgacctgggacaaacggcagaactctagtgaaggtttgaatcttcccatccgaacattccaaaataaaatgcaaatgaaacggttataaatccaattcacttccagccgaattcgcacaacataaagcataattccgtatttttatttttttcctttttgttccattttgttttaaaacaccaacacacgcatttttgcgaactaagcacgttacgtgttgccacaaccttaatacactcaacataccactgtctattttgtcccacaccctctccgccgggaaaaaaaatgccgttattatccggtggcgggaaaagcaaatctgatggtttggtcattttttcattcaaattctattcgttgttgattcttgttactcaaaaatagtc

SEQ ID NO: 83936 - DNA, 807 bp, Citrus clementina
  Intron number 2 from transcript clementine0.9_033834m (loc us clementine0.9_033834m.g) derived from phytozome v7.0 (c hr-ID scaffold_27; pos 508060 to 508866 reverse strand)
cgacgaagaagacttgtttgaagcgattgataaacgtgcgtactctctctctctctctctctctctctcagctcgacgattctagtattttgtgcttcctcgtttgttttcttcgaaattcaatttgtttgcaaaacgtttgagtgatttgcgctatttgattgggaatgacaacgtcagcaacagatatcttcgatttaatatttatagttgtttcattctttccgattctcgattcgattatttgttttgcaacaattttgagaaattagttgtgctcgacgtctgagttcttttgaattgctatttggctcttttcttttgtattttagcggaattcaaattatgacaagcaatttttggtgcctctttatttatttatttatatatttttttttttggtgttgtattcataacgatgattcgctatgagatcgttcggttgctgtttgttcttcgcatctaattttacgatttacgaatttaatgaatctgttctgttttccagtgtaatctagacctccaactgattttgattttgattgcacttgtctgtttggaatttcagttgaatcaattgtatattatcagtcacttcagtcaaatatgtacgtaaaaaatcgtttgaaaaattattttgtacgaaatggttccctgatttgacatcgatcattaatttttagctaattcaagttaccttattgaaataaaagaccgaaaaaaaatgaattcaaggtctgttaatttgtcgattggttagttgacaatgtttatgcgcaatttcttcagtgatttctcaaggaatca

SEQ ID NO: 83937 - DNA, 1043 bp, Citrus clementina
  Intron number 1 from transcript clementine0.9_006254m (loc us clementine0.9_003910m.g) derived from phytozome v7.0 (c hr-ID scaffold_67; pos 537427 to 538469 reverse strand)
ctcatatttgacaaatatcttcgtagccttgacaagtatgaaatgttcattgatctttgttgattctttaagctccagtttttttgtattgttgaaaataacgtgtcaattcatgtaaatttaatggggcagtacatattcagattctttaaatacactgatatattatttcatgatgcttcttcccacatattatggaagttcgttagaaattctttttcctcttggcattttattaatttaccatctatattttaagcagttctctcctaattgttttcccctttttaatgcaatttgggctttcttttagattgaaattaatagaacaataaatttaacaaattcaagttcattttatgagtggtgtattccacaaacttctacatatcattttaaatcactaatacagattaatgcctcttttgttcgaacaagaagcagctgtttcagttgttttagattttctttttgtcgattagtgaagtaattatctcgttatgaaatgaaaggttcgataaaatctgccccattgtgctctggaggacttagttactgattattgagagtaagaaacagctaaacaggctgcatttcattctttatacttttcgaatttcagctttttgagggatgatatggccatatgtgtatggtttttctcctattttgcttaaatgaggggtgaggtttttatattcccattttgtttaagttttagttggcagtgattaaattgtggagctggtgaatgaaaatatattctttgagaaatatgtataagaggtgggaaaagattttaaaatccaaggcaaactcgtggaagtttattgttcataatttgaagtgttaattaagagggtttatgaactacataactgtattatgtgtagaccaagagggtaaggatgtacccgtatgtgattttgtagacttatttcttgtgtttgttgattgttttgattgtattttttatgaatagtgatactatctgaatttctctctcttttttcccatctgcagggttgtcaaggttgcaaaaa

SEQ ID NO: 83938 - DNA, 1001 bp, Citrus clementina
  Intron number 3 from transcript clementine0.9_003741m (loc us clementine0.9_001480m.g) derived from phytozome v7.0 (c hr-ID scaffold_10; pos 1496821 to 1497821 reverse strand)
ttccagtccatctgttcatcagcaggaggtaccttctagttattcttctgttacaggtaaaaattcactagcatattgaacttgcatgtgaagcttgtgctcaagaactgcttctatggacctcatccttttttaactaccccattttttatttctgttgatgcttgtcctcaatgcgacctttgctggagctatatttcggataaagttcaggatcttcagcatttcagacatcaaactttagcatatattgagtcttcttaatttgctttctcaattcagtccatttggtttgggcaaggtcattttctcttttagtaagttgatttggttattggaaagtagttgaaaagcaccatcacattcgtgaaatgaaattgtgactatttttttccttattttttattttttgagagtccctgtgtgataattatatgttacttgctctgtgtgctgtgccggttggccttgaatgacattttatgggttttgtgacacatgaatgccccatctctatccagtgcatagatatgcggaattagaatttgacccattgtttaaaaactctcgaattatggaaattgctcaccattctgtgatgcctgatgcctgattgatgccagctatttctgtgatagtccatgcacaaaggaaactgtgatacctgattgatgtcttattgagggtatataatagtctcattaccgtgtgtgggaggcatggcaatatcaattggttgctgatatattttgcctgtttaattaactacttttagattatccattgctgctgtaagtaaagggtagacgcttgttgcttttgtttgattcccagaaacttcagagatcaaattttgtctgcataacatctgaaaagcaaacaaatagtgtcaatttggattcctatgtgcttaagctttggtttattttatgtcttcgacctgcagttttgactctttataccgatggcaggtacagaagagaccgcatatcaaaaggagc

SEQ ID NO: 83939 - DNA, 888 bp, Citrus clementina
  Intron number 2 from transcript clementine0.9_022327m (loc us clementine0.9_021323m.g) derived from phytozome v7.0 (c hr-ID scaffold_90; pos 902432 to 903319)
aagacgtataatgtttgatttaatttcttctttatttattagtttccttttgttgttaattctgtttctggtttaattatttcttccacttgttggattgtatttgatttggctgtgaaatggaataaggggaatttgatggcgtaaaagattataaaaaaggaaaaaaaattgaaatttctattttctgattgtgtggtgctatggaacttttcaaatagttactttacattattatctaaaggtattgttatattatgaacaaaggaaataaatttgaaatttgtattttctgatggtgtgtgttatgaaaattttcaaatagttactttacattattatctaaagatattgttatattatgaacaggtttctgaagcaaagcaattgggttaaagaatgaaattttgatggataattgtttttttgttactaaatacataatattaggtttgttctgatttttggaatttcattgaaaaatatgtctttgtttgtttaatgacttttctaccttggattgagggaaggtaatgagtttgatatacaattccttgtttcttgttgcatgtattggtgtaatttcttgtttcattgttatgtttggtataagtgtttgtttatctccaaagaactgatatcttgatgatatttaagacccttttgaattattggaggctagtgatgattcttggtctggattatctttttttaaaattagccccggaattcatacatcttatgtgcttttatatattgtcacttgttcaattatgtattcactgagatgtacaagattgtgcttgttgttgctgttgttgtgtctctgtcttttgtcaattttcttaatcctagttctatatttgatgtgttgtgtagactcttgaa

SEQ ID NO: 83940 - DNA, 943 bp, Citrus clementina
  Intron number 1 from transcript clementine0.9_012554m (loc us clementine0.9_012554m.g) derived from phytozome v7.0 (c hr-ID scaffold_29; pos 1535624 to 1536566)
ggtataagttcaacctgtaagtgtataactcttttaaccctcttcatcaatgatgattttgcagttatggcttagataagatgtaaaggtttctgggtttgtcaccttattgtggcttggtattgatttgatcttgttatattttgacgcataatttggccattgtttttcttagtgtgtattatattgttgtgtgatggctaattgaccgtttcattgtgtataatttatctttgagttctttgttatgataacgatgtattcttgtttgaggttctttgaaagagcaatcgcgaattttaattgtgtttgtcgctttatatcatactgtttttttagatttgtcttcaattttggacatttattgttggacagataaagggtccttttgattacaacaaagtctaggacagttggactgaattacttgaccatatgctttctttaattcatcggtagatattgaatgtgccattatggtaagagaatgttgcattctatgatatgtatgtatgtatgtatgtatatatattaactcttttggttggatgaggaattgcaaacgttcattgtattctgaagcataaagatttattgctaatagaaactacatgatgtatcagtagtcctatgcaagcacggatgtacccttgcttaaaatcaactgttagtttataactccgaagcataaagtttctgtggcgatgccttttgatttcacaggtcaagaagaatagaacttttattaccccattggtagaataattttattatgttgtttcttcattttatatctgattaaaggggtagaattttcatattaggtttctgagctttacatatccatataatttgtttttttggtggatctaagtgattgactcattttaaacaatggcacttggcaggccctcttttatttctatcacttattgctggttgt

SEQ ID NO: 83941 - DNA, 836 bp, Citrus clementina; identical to SEQ ID NO: 79902
  Intron number 3 from transcript clementine0.9_024338m (loc us clementine0.9_024338m.g) derived from phytozome v7.0 (c hr-ID scaffold_63; pos 876855 to 877690)

SEQ ID NO: 83942 - DNA, 751 bp, Citrus clementina
  Intron number 3 from transcript clementine0.9_006345m (loc us clementine0.9_006345m.g) derived from phytozome v7.0 (c hr-ID scaffold_20; pos 3717081 to 3717831)
attggaatcaagaaggtattggatttttggtttctttgtctatatttgcatatgtccctcatttgttgtatttcttcaataacctatgtgctctgcatgttaaaacaaacctacatgttaaaataaaccacatagggtgaatgtaacagcatctcggattgtatctaaaggaaccttatggatggccattatgtttccaggtagtaaatattaagataattttgtcagttacatgagacctgtttctaagttgcaggctaaactgttgcttgtagtgtttcttcttattttaaaagttcatataagttttatgttctggcatgatgatatctgcagcacagagggttggggataagaaatatagattgtcaatttcttgataagctttatggcattgtttcttcttattatcccccctcgccattaatatctttcaatgttgccgattatgataagcttgctgcattttatttttctgttattattttgcttgtcttcacccgaacttcaataggaaatgagttaacactttgggccccattattttcaattttttggatgagaaacaaatacttgatttaaagttgaccatttcttatgttgtaaggcattatgtttttcttttgttttaagtttttatagccttattctctttaatattcttgtttgtaagattgttattggccggaaataatgttttgaatctagtctgacaggaaattggttgtttctacaggttccaggtggtacc

SEQ ID NO: 83943 - DNA, 897 bp, Citrus clementina
  Intron number 2 from transcript clementine0.9_025676m (loc us clementine0.9_025676m.g) derived from phytozome v7.0 (c hr-ID scaffold_90; pos 872355 to 873251)
gctggtcagtgactggtttcttggcttcttatccatgcccatttatcgaacatcatcgttttgttattctatcttcatttaaccatatttaagtagtctttttgagattgttctctagttattttttccttctttttatagttaagtaaatggggttgtgttagtcgaaatctatttgcatttgcattatttaattgaaaatttgatgcttttgagtagtgatagaccgtggaggattggaggtggatgatggtgagatggtggttctaggatgggtatttaggtcgttttaatggtgaatttggcaatcagttgtatttaggattcatattttcgcaacgttttctcaacatggacttgcagttggaatttggtggcttatgaggccaagcttggttcattagccattgcttttagttcttaagggtgtttgtaggagtgttgtggcagaggtgtacaattttcagcgtcagtgcctccccaaatttcgtatggttgaggcacttttaactttagagtgtacgtatattatgagaaacactttaactttagactgtacaaaatttatatcatattaggatcagatgacacatggagcttcttaaccgagctcgtagcagagaatggaagggctagtgttgtaggtgttagcattttatggctttttctgttaatgaataaactttttacaataagctgcctttgcagcttattgttgtcagaatgagagaacttttaagtgtgtcactgctccctttggtctgtgttgtgtttcttgcatcatgcgggattgcctttgcaatttttagtatcatggtaaagaacttgactaattttttgtgaaccgccattgtggaaatagtacattcaagaagaaagctccaaaagccattaagg

SEQ ID NO: 83944 - DNA, 773 bp, Citrus clementina
  Intron number 3 from transcript clementine0.9_028346m (loc us clementine0.9_028346m.g) derived from phytozome v7.0 (c hr-ID scaffold_33; pos 1891555 to 1892327 reverse strand)
ttttgggctgttacttccctattcatttcacacacgtaagcgtaattttatatcagccatattctattttatcttttgatagaattgtgtttgattttggaattggcatatgctatttcaaacagtttaaataccacaaggagagagttttattgggttaaccacacttagtttttatgtgggagaatgttcactttatataccattttgttcccaagccttccctttgtttgcacatgcttctgagattatttgtgttttgaacttgatatttcatgcatcttttacgatttcaacttaccttttaaattttaggatgtatgctatttttcaaaatctgctttgatgcaaatgttgctctttatgttatctgcaatcatgcacttgatatgcaagttcagctactatggagagatgtgcggttctatgtatctttctatatctattcactttttctttttgtcccctgactgttgaattaaattcgtacaaattttcttgatcaatttattcagggtcatattggtgcaagcataagttcatgacaataacttatatataattagttctacgtggttactttttccttctatgtcatatactaacttgcataagcaatattaactgtaaatatggccttatgttattgatttggggtgcatttatttgatctctttttttcttctgagggttactgtttcacattattttcactttgttgatctggcctgtgtgatttttttgtttattacagtctaaagctgaggactttg

SEQ ID NO: 83945 - DNA, 472 bp, Citrus clementina; identical to SEQ ID NO: 79797
  Intron number 1 from transcript clementine0.9_001486m (loc us clementine0.9_001486m.g) derived from phytozome v7.0 (c hr-ID scaffold_1; pos 11715304 to 11715775 reverse strand)

SEQ ID NO: 83946 - DNA, 872 bp, Citrus clementina; identical to SEQ ID NO: 79574
  Intron number 4 from transcript clementine0.9_001504m (loc us clementine0.9_001502m.g) derived from phytozome v7.0 (c hr-ID scaffold_63; pos 928572 to 929443 reverse strand)

SEQ ID NO: 83947 - DNA, 521 bp, Citrus clementina; identical to SEQ ID NO: 79575
  Intron number 1 from transcript clementine0.9_001504m (loc us clementine0.9_001502m.g) derived from phytozome v7.0 (c hr-ID scaffold_63; pos 930142 to 930662 reverse strand)

SEQ ID NO: 83948 - DNA, 561 bp, Citrus clementina
  Intron number 1 from transcript clementine0.9_029436m (loc us clementine0.9_029436m.g) derived from phytozome v7.0 (c hr-ID scaffold_27; pos 2126526 to 2127086)
gattgttattgttgaaaagtcaaagaagagcttgccaaattcaaggttggtagcacgatttggtacaccaacaattgtagagatttttcaagccgaaaagaaagaatggacaaaggggatggatttggaaaataataataattaaaaattatatttttaattattttattctttgtatagtaattcatttctcctataaatagctaaggatttcattcatttgaaatcatcccaaaattgttaagcttataagtttctaagcttttgagagaagtgagagaagtgtgtctggggaatttatctttcctgcagagtgtgagagtactgggtatatttgagtttctgggaagtgagattcgttactcaaatattgtactttattaattgttaaataaacaattattctttcttgcctccgtggaggtaggtttaattaccgaaccacgtaaattcttgtatcctttatttttctgtaattatttggtgcgcttgattccgcattccgcgcacaatagttatgaaaaagattttgaagaacatatacttcgggataccggtaat

SEQ ID NO: 83949 - DNA, 709 bp, Citrus clementina
  Intron number 2 from transcript clementine0.9_006449m (loc us clementine0.9_005904m.g) derived from phytozome v7.0 (c hr-ID scaffold_67; pos 564399 to 565107)
gtggaagaaaccggattccttcgcaaactttgcaggttagacttgacactgtagcgatagttgtttacttgtgatgccttgcatgccccatatccgtttcttttcttgtttgattggctatgacatattagagcattgttatttttcttccctgttataaataaagatgatgcagaagaaaagggcatgattgttttgtcttgagattcctttttggcagcttgcttaatgcaaaggttgtgctcgatggtgaaatattttgtttgaatatgtgtgtttaggaaattattaatggaacttgggatgtttgttggtaacttagttgattaatatgaaatggttagtattttgcaaacattggtgaggaggtgagagttaaaagaaattctggagttcaagttgtgctcatgttggacaatgatatccatgaggggcacttattatagagtggaaacagtttccttatgaagatagatggtgtcttatttataacctcttaatttttttatcattgttgatattgtttttatgactatcatcgataaattagtttatgatacttttttcacatattatgttacctcgtaatatttgtaccatgattggagtgcacatttattgcaatgaattggtttcgtatgacatttgcaaaggctagcatgacaatatctcattatacgaatgtaacagatactggaagcacacagtg

SEQ ID NO: 83950 - DNA, 976 bp, Citrus clementina
  Intron number 1 from transcript clementine0.9_005241m (loc us clementine0.9_005241m.g) derived from phytozome v7.0 (c hr-ID scaffold_1; pos 1025317 to 1026292)
caagtgaaaaaaatcatctcgtctcaacttagccggtacatttaactttcatttgcgacttctttttttccttcttttccctcaatttttttttttttttgattcatgttaaattaaagttatagttttgttctcttgtaaatgatcttcagctcttttgagcatgtgggttcttattcttttggcttttggatcatcactgctgcggtttatgtgttaagctcgtgtcgttttggtttggcttggcttggcatactgggttcactaaaatttgcagcaggctctgtctttttctctgtccttttttttttgtcttttctaatttgggattatttagttttaaatttgtcttaatttcatttaagtaaaattaacgaaagctttcattgtgatcgaaaccccgaacttccggatttgtatggataatttagttccgtgtttgtgtagcttgtgttcaagataagtgattttattttaattattcgttattattattattattattattattttttcttttgcttattcggaagggaatctggctgtaagcttctgttaaaagctattacactttttttattttttttgggggggggggggggtgggtttgccgtttatgtattttagttccaactgtaggcagatctgggctctggtaatgtgggtcattttttttttttaaataaatttcgttttgttaaaagctcttgacacattaatttgttgtaattttgttttttgttgcatttattattttattacttgccttgtttatctaattaatgggtttatgggaatttgtacttggggttatatgtctttgaatagaagttgatacagattcactgtaccgggtttatctaagctggaactgatttgttttatttatttaatttgcaggacttgacggttaatgtatatttctatattctgaattgcagagttctctgttttcaagttatttgtggagtacttt

SEQ ID NO: 83951 - DNA, 887 bp, Citrus clementina
  Intron number 1 from transcript clementine0.9_019990m (loc us clementine0.9_019990m.g) derived from phytozome v7.0 (c hr-ID scaffold_53; pos 813109 to 813995 reverse strand)
tatcagttatcaagaacagagaataataacaacaggtacgcttaaagttcaacagtttcaagtttttttttctttttcattttgtaaataaaataaatgaacaattatagatttattcgctaactttatgtgtaaattgaggttgatgcttatcacgccatgttgaatttgagataaaagcatttttgggtatttgaaattgtttttgactttgcaaaagaacagtcataaacagtcccataagtgtgtttgataatttatcacgtcatgcgaattgccttacttttagttttaactttaatctgctttctttctgccttgtttgactttgattgttacttaaagtacaagctaagatttgctttaaaagattcctatgcaacttagtgaaacaaattatgtttgtttccattaacagtgattcctgggatcctctaaaaaggagctaattgggatcataattgggcagttgataatccaaaccaacagtatgtagatgaaatgaaccatcaaactgggaacgaatgacttgaaatttattgagtaaatgttagaaatcagccattttgtctttgattgtgcgccgataagggtttgatgttgtgaggtaggaccactagaagatatgaacataagatcattgaagtcagcaccaatgttataatctattatctcttcctgacatttccattatcatcttagccattccttgcaaaaatggcctcttctgtggactgctgaatataaatttcactgttatttgttgaagttggtgagatgatttctcaatgatcggattagctttgtcaaaatagtttactgaaattttattctgtatcactctaccattaggtactcatagtccgtgttttaacttttttgtgaaa

SEQ ID NO: 83952 - DNA, 1006 bp, Citrus clementina
  Intron number 4 from transcript clementine0.9_014528m (loc us clementine0.9_014503m.g) derived from phytozome v7.0 (c hr-ID scaffold_136; pos 232227 to 233232 reverse strand)
tcattcttgactccaccatcgaagataaaaaggtaatattgtcaaaacttttatattagctcttgcttttcgaagacttgttgttagagaatttttttcgttaaaaaataaaaataaaatttttggatcttacgttatgtttttggttaactctaaatccacataaaaaaaataaaaaattgaaagctgactaagacactgctacatcctatggactctctgccctgtaatgttatatcatttgagtgataagaaaattttatattcaagtagtttaggcagttttttcatctaaatataatagataatctggttgaatttgtgtataatatatggttcctttggattccattagtttctcttgctctagtatgttgttaaaggctccattttaacctgttgaaaatggtttctgtcactttagtgcttactagttcattagattcctcaagaaagataaggaataattgcgtgcttgattttgaatttttattgccagacttttcactgagggtatcacttccatgtgaattggtgtcaaattatgccagatatgacattttcttagttgtttatagcaaatattattgttataagttataaaattgcattctgaagagttgtacatggtgaaatctagctaaactgttcagcaagcctttgcttcagagtgaacacttttaattgaatcacattgaagctcattccttattgaaaagcattgtttccattttaatagcataaattaccaacttttagtcagctttcaaactgaatgatatgtttgtcatggtcttgtgtctcggaagattacttcaaacccttcttttctcttgtactgacaatgggacgcatcttttttttgtagtccttatctacagtgacagtaaccttgtaactgctaatgctatggaagcacattttcttgtttacagatacacaatcatctaactttgtttgccaaaatgcagaagattccacaaaattttgtgggaagatttgggga

SEQ ID NO: 83953 - DNA, 712 bp, Citrus clementina
  Intron number 3 from transcript clementine0.9_017924m (loc us clementine0.9_017796m.g) derived from phytozome v7.0 (c hr-ID scaffold_1; pos 1991990 to 1992701 reverse strand)
gtggtaagtaatttgtcaaagcatagaacttgattatgcatgatcaacctgaatgctggtggtgcccttgcgttttagcaaagttttgatgaggtccaaagtgatttgtcacctaatgaaatactattttagtctaatcttttttttttttaatatctcacttcaattctattgttgttatgattagaagcccattgtgaccatccttgaccagcacaatggtgatgagaaatctgaaaataaatttcaaaattaaacaaagttactctaaagaaaagagaaacctatcagagtttgttactgatggaaattgattctctttcttcataattaagaaagggatgtgagaattacccaactaaaggatgatttttgaaatgattaaattgttcttgtgttatgtttaaaaaccaaattatatttattaataataaaaataaaagtgtagagtgtccattttattggggcatataaggacttattttatacaaattttgaaaatgtgaaccttgttaaaattttactaaaattccggtgctcacaagcaatatcataatattcacgccaattggttgtaattttttgcttggttgatcgttttttaacctttattttaacgtttagcatctttatctgccaatcaatataccaaatctcatgctaatgcctagtcttatttgaattcaagggagttcatttgtaaatttctata

SEQ ID NO: 83954 - DNA, 725 bp, Citrus clementina
  Intron number 4 from transcript clementine0.9_006062m (loc us clementine0.9_006062m.g) derived from phytozome v7.0 (c hr-ID scaffold_1; pos 11618220 to 11618944)
cgtgctggggtttgtatttttgttttcttctatgcataatttttcgttttgtctgtgtaattatcccatggcgagaaagctcttcattttctggttggtgaattgagaagttacaaaatatacacctggaatgcttcggtgaatgattccattttgacttgttatggtgccagattctgagttctgttttaatgtttattcattttcatatttttggaaattgatccaaactttggttaaaacagaacagtagaaactaatgatgcttctttttatatttctccattttagtttaatttcattattattatcattagaactaaaagtgtgaatgtattgtattcatattttattagttacacaggcataagcataacccggtgtcctacctgtgagtgtcagattggatgaactagacatgttattttgttgtgcttactcagtctacttttctcattaaccatctatgtgcttaccgcttgaaattggtttgcttttcctgctacatttccttcttctgttgatagtattttagacaattttaaatgcaaaaggtgttagtttagttgattggtgcgtctttggttcgataactataaaaaatgtagtttttctaacttatgtttctgttgcttcttgctttgtgtcaattgctttgttaaaaaatatttttttgtggctattattgggagctgagttatagtctaaatgtttgactcgcagat

SEQ ID NO: 83955 - DNA, 966 bp, Citrus clementina
  Intron number 1 from transcript clementine0.9_025173m (loc us clementine0.9_025195m.g) derived from phytozome v7.0 (c hr-ID scaffold_109; pos 589166 to 590131)
aaactaaggattgctggcttattatttctggcaaggtcaaccctccatctctcttgattcatatttcatatttgttcattggtttagcaaatttctaaaatcttagaaggtgggttattcgatgaatttgtgagatatgaggggcgaagaacgcattcgatataatttaggaatctgaaagatcacttttcttttgtggccccacttaaatttcatggggatcaatgtatttatgtataacttggtcaatggaagagagtgaagtgtgatctcttcagtcctatcgtatgattacatcatatactacttgcataaagatttaatgaagagcacataatctggtttgtatgtggagtagctatgccatggcatttgataatttcaattatttatggcctcaaaagatgaggtcctaaagtgttgatgtgtaggtgttcaagaaagaaacatgagtagacttcttatgaagttttgggatactttctcattgaagaaggcaaaagtgactgtttttttttttcctgtttacagattatagactagtttgtagcactgtatttgcaaatggttttaaaatacactacaatgcaacaaatttttctttagattttcattttcttatgttttcaataataaaatacttgttctgattgtaatccaaatgagcctagtacacataatatgaagatttaggtccaaccatgaatttcagcatctaggaaaatctaatcaccctttgtttataatagtgaggtttttgaaacctaaatatgaggtaacatgggattgttccaggtgtaaacagagggtaaaaatagatgctctactgattcactgtccttatatatttgagaaagaacttgaagcaattgctccggtatgattatctttgtcatgagatgctactgattcactgccattttgctcttgtactggaaaaaaacaaatggttttacatgcaggtgt

SEQ ID NO: 83956 - DNA, 855 bp, Citrus clementina
  Intron number 1 from transcript clementine0.9_003554m (loc us clementine0.9_003554m.g) derived from phytozome v7.0 (c hr-ID scaffold_33; pos 329460 to 330314)
aactttcgcaatttcggctccgatctcacatcaaggtacgtagttttcatctatcttcatgcttgaattgaatcagttaccgaattcgattatcttaagcccgcgtttggttttgcttatttgtaattttcgcactcttgtgattgtgtttcactagctttgcgaattcgatttgatttataattccgttggtcccaattatttgaaactaaatagaagcatacaaaacagaaaggttcgcaattaggtgtatgaattcggtttttaagttaatttgtttcattaggccagcgttgaatagtacgtgtgatataatccctgtagtttgactattgttctgtttgtgcattatgggtcttaattttttggcatgcaaaaattctgtttgatgttctcggatattggtctatttggaaagaagctggaaacttgttaattttgtctctcttttttagtgtgtcaattaatcttttccaggtgtaggtaatgctaatgcactcgttatgaaaatggtgttttgtttgtctttctggtagttatgacttgattcttaaatgtgctttctttgcggttctttgaaaggtctcgtgtgacagtgttgtgactaatttttgttggttttgacccattgaatctttctgaagtataaaaatcatctgattttcttgtgtatgagtttaatgcactatctttatgttatttattgaaattgatggcctggaataagtcgtatctctacgctaatgatatggtctttttgttgtctttgtgctggttaatctcttcacattatgaacttatatgtagaattaaagttaattgttttcggtttcaattaccaacagaatagttcta

SEQ ID NO: 83957 - DNA, 671 bp, Citrus clementina
  Intron number 1 from transcript clementine0.9_032379m (loc us clementine0.9_032379m.g) derived from phytozome v7.0 (c hr-ID scaffold_27; pos 852113 to 852783)
cgcattcacgcctcctcctcttcttcttccaacaggtgatttcatttcaaataattcatatgattacgtggcatttgagttgaatttaagtttatataatggcgccgatcaactttttgtttaatggaactagaccggagaaatgtcaattttcttttgactatttatttttacttatttattatgaatgtgttattgttcttcttcttcttcttcttcttcttcttcttcttcttcttcttattattattattatagaattgaaatatcgtgtgtttttgagattaatgtaactgaaaataaaggtgttaaactgagtgcatgcagttgctggagcttgtgtttatagagtaaatggcagctaccctgcctttttcaagctacgtttaaaatgaattttgaatttttcttttcaagttgcttacaagtactactatgctctcactctgatcattattttcaggaaattgattccctgcaatctttggtggttccattctttggcttttaagaagcatgattataaaataaattatgcaggtgagttatataccaattttgcgaatttaatcttcttattcttccatgatttgtgatttttttgattttttttgggccagagaaatgggaggctagttctcgaagcatagaggataagacggactctagta

SEQ ID NO: 83958 - DNA, 425 bp, Citrus clementina
  Intron number 3 from transcript clementine0.9_023673m (loc us clementine0.9_019620m.g) derived from phytozome v7.0 (c hr-ID scaffold_29; pos 2860669 to 2861093 reverse strand)
gtcggtttagagaggttgttcaagcacctaaaagggtatgtttcatttttcatattgctcttttgaattataggttatataaaagttggttacttgtcacatgtcagcagaagcattgtaactagttcaaaatatgaatggtgatttatattcctgtgattttaatgatggtcaaatggttttattttggttttgagcttactgagctttgccgagtgttgctttatcctttctttttaggatctgaaatttcatgcttcacaccattgcatcttattagaggaagagtgttatggttttctcttgaagcagcaatcaacttactggctgcctactgtgattaatttaaataggattatttgtttgaatagtttgcttcattttgttcaggtggtacgtgatccacgtttcgagtcattgtgtgg

SEQ ID NO: 83959 - DNA, 820 bp, Citrus clementina; identical to SEQ ID NO: 80651
  Intron number 1 from transcript clementine0.9_023673m (loc us clementine0.9_019620m.g) derived from phytozome v7.0 (c hr-ID scaffold_29; pos 2861552 to 2862371 reverse strand)

SEQ ID NO: 83960 - DNA, 779 bp, Citrus clementina
  Intron number 1 from transcript clementine0.9_010297m (loc us clementine0.9_010297m.g) derived from phytozome v7.0 (c hr-ID scaffold_43; pos 1486282 to 1487060)
gcctcaaggtcttaaattcttattcgcatgttactcaattattatccattttcaatttctgggtttttttttaaaaatttttttcgatgatttgttgtgattttctttcatgggtttgttttgaacttgattttggtatctgtgtttgtttctgatctgatggatctgtttgttctgattcgatctgattcattgtttgatgttcgttgattgaagattttattttataagctgtctagatcagttggttttgttaattatgcaaatctgtgtacttagtttgaattaaagagtggtgattggtggaagaattgagtgggattttggtctcttttaagaatctaaatggagttgttatatttaataagttattttttattgttgtttaattaattgattttcattatgtaagtaattgaatttaaaatagttgattaatttcggcaaatgaattttattgcacttatttgtgcacgacaatgtgatgaataatcattcacttacctgataagcttacacttttcttctctgagtgaaaatgaaaacttaaacattttgaaagacgattcctttctcatggaagcttaataaattccatttctttttggagcctgtctctatttgtgcacgtgtaagagcggtatattgtttactagtgtattgcacaattctctattacatttattatttgtaaaaagctgtgcacttaatccacaattttatgctttttcatttgttttgatttttttgtttacatgtcttgtgcgtaggtcctgcac

SEQ ID NO: 83961 - DNA, 921 bp, Citrus clementina
  Intron number 1 from transcript clementine0.9_023689m (loc us clementine0.9_023693m.g) derived from phytozome v7.0 (c hr-ID scaffold_1; pos 11084795 to 11085715 reverse strand)
aatcttcatttaacattccaagtttaagctacaaggcaagcattctctctctctctttttgtttttttcccctctcaagtttttgcatttctctttttcgttttccaaaaaaagatacttaatttgttaaaggaacgtttttgacaatgaagaaatatgaaaaagcttgaagctttggttgtcgtttaaatgctgtggctaagcttaatttcttgtttgattgatgaatgtataaatttgaagggaaaaaaaaaataatcaaattatgggttttattttttaaaagatgggtattttggtttgaataaatgagtcacatcatgcttcaaagtttagttatttatcttacgatttatttctatttatggtaaagctgtgtcttgtatttatggtcagttttgttcctccgagctttttttaatatagaatgattaggttttctatttggttgtcttatgaattcattgtattatattgacagcatatgtatctggctgtattgtaatttttagttaatgtcctgttactttctgttcagttgttcggtgagggaaaaaaaaaaaatagtgattttaaatgaattgaagttcctgtttcttttgtgcaatacaaaatgaaaagcttgtcttgattgagctgaaagatgttaaaagaatttgctgagatgtttgttgggttcattgttacaacaaaggaaaatataaggttttgagcttttttttttttttttaattttttctgcttaattctgcctgatgtaaaatttgtgcacatagtgaaagaggagttaattcttcttaatcatcagcctcgtccactgttattgatttttgctataaaattgtttctgttgttcactaattattttcattgtttcctgttacaggcaagcaagtttgcaaccatttacggttgattgaa

SEQ ID NO: 83962 - DNA, 402 bp, Citrus clementina
  Intron number 2 from transcript clementine0.9_000810m (loc us clementine0.9_000810m.g) derived from phytozome v7.0 (c hr-ID scaffold_49; pos 566927 to 567328)
gttgcaggctaaggccctcctgaaattctactcgggtatgtgggaattgccttttaatgaggttttgtttatttgatattgaagattttgtaacttcataattactgggtgttagataagagtgttgtgttttcaggtttactgttcatccattacgtttgagttgagcagtcttatttcttctttttaataggattagttttgagtttaactttatggaagttcttttctggctttaagtactggggatatgcttttttcaaacttattttgtttattgctgtagttcttgagatcatgtattttgctgcgttgatattaccaccgtattcttcgttttagtgatttgttaacttgatgctattgcgtaatgcagaagagaagtatcctacaaaaagtgaa

SEQ ID NO: 83963 - DNA, 553 bp, Citrus clementina
  Intron number 3 from transcript clementine0.9_000810m (loc us clementine0.9_000810m.g) derived from phytozome v7.0 (c hr-ID scaffold_49; pos 567673 to 568225)
ctctcttccttctaaagcatttttccatagtaaaggtatactcaaggatcttctgcttgtttgttgctttagtagacggtatatatgtaattatacgtgtagatgttagtgcattgtattccactgggttgttgtgagtgggacactttattttattgccaagctcaatcaaggtcaaaatattatttgagagcataatggtagtgtatgtctcatggatatttggttctgttagttggagcttgatagttcctgccatgcattttttttaactggggcatggaggttttagttaccttataatgactactatatcaatggcacaattattattatgagcgcatgaatgtgtatagcaactgactgccattgtttctttttctctttcatcatcaattcagaagatagaagttatgtacatttgattagattcataactcaatattttctttagttctatgttgacttagttaatatctccagtataaattttacttatactctgttttcatgtttagattctataaattcttgtcctcctttgcaagagaac

SEQ ID NO: 83964 - DNA, 467 bp, Citrus clementina; identical to SEQ ID NO: 80841
  Intron number 1 from transcript clementine0.9_006796m (loc us clementine0.9_006796m.g) derived from phytozome v7.0 (c hr-ID scaffold_90; pos 427732 to 428198 reverse strand)

SEQ ID NO: 83965 - DNA, 454 bp, Citrus clementina
  Intron number 2 from transcript clementine0.9_023214m (loc us clementine0.9_023214m.g) derived from phytozome v7.0 (c hr-ID scaffold_20; pos 893244 to 893697 reverse strand)
gccttagtgagcacagcaacctcctatttagttaccctaaataattcccctaattttctgtttggatgccaagaaaactgacaaggaaaacatcaaaaatatagtcttggacctcaatttgtcttagctagtacatggtttctacgtccttttttgctttctttgataatagatgagttgactgacaaaaattttctttttgaatgctaggaaaatttattgattttcaataacataagaggaaatgttcagtttcaatcccaggaattttcttacctgtgagccaattaaacagtagacaattaaaaaaatataaaaaagagtctgaatatgtttttttcttaagctaaaataggatttctaatttttttcctcttttttttttatttgttttttcttaagctaaaattgggtttctaatttttttcctcttctttttgatttacttatatag

SEQ ID NO: 83966 - DNA, 490 bp, Citrus clementina
  Intron number 1 from transcript clementine0.9_014165m (loc us clementine0.9_014165m.g) derived from phytozome v7.0 (c hr-ID scaffold_27; pos 3210670 to 3211159)
cagagactggggtttcttccaggtacttcgcacactactcttcgccttaatggtcctttacctatcagtttaaatttttgggtcaatgtttctctaacacatagtatcatactatcatagccaaagtctcaaacctagtcaaatttcatgtaagagcaggggccgagctagactaaaattttggaggggccaacattttataaaagcaaatttttaagtaagaatatatttaattattgagttaagttactaagtattgaacttgcaggggccaaattataaaaactctattttaaaagataaaattataaataaacacaacatttatgtttatgtaattttcttaagagtcttacggggcattccacctcagcatgtgtgtgaacccgttaagatttataagtcaaatacaattatcgagcccttatcgatcagcttaaattttgggtcaagaaattttcctaacgttaatcaatgcagttgataaatc

SEQ ID NO: 83967 - DNA, 441 bp, Citrus clementina
  Intron number 3 from transcript clementine0.9_003074m (loc us clementine0.9_003084m.g) derived from phytozome v7.0 (c hr-ID scaffold_1; pos 6316562 to 6317002)
ttgactgggtacattctttttttcatgtggttttttattgttcatcaagtatgactaccaacaggccttagctaagttggtatttataaaatttttgtcacatacttagtttaagattgcattggagcaaatttgagttgaatcttcatccactggaattttttttaaagtaattattttgaatctattattaaaaattaactcgccctcaaacacacacctgcaagaaagaaaaggagtattagacatgaacaccagaatttttatttgttaaatacacatctaagattgaggtagagagccttctagatcttcgtatggaactagaatatggagctatcttctatcatggtatattaatacgatacaattgtctatttgaatgcataaatatctagctgcccttgcatataaggggaatgtctgtggttctgcaggtaa

SEQ ID NO: 83968 - DNA, 369 bp, Citrus clementina
  Intron number 1 from transcript clementine0.9_003923m (loc us clementine0.9_003925m.g) derived from phytozome v7.0 (c hr-ID scaffold_111; pos 252959 to 253327 reverse strand)
actattatttatttgattctcttgattcatcacaagtaagaatttcattgatttgacatatgattataaattttatgcattagtaagtggttctgctacaatcgtgaacgtgacccagatgggtaatttaaaaactgcttcatgtgaagtttcaagtctctcatgcttcttataatcgctgtcattcctttccattccttgttttagcagaagaagttgaattaaatgaatcagctgtagttttattctattgttgatttcttgggggatgtgttttgatttctgaatgtgatgtttgtcttaaattttatttttttttggattttccgtattttagttcctgctaatgggcttgctttgtttctgcag

SEQ ID NO: 83969 - DNA, 579 bp, Citrus clementina
  Intron number 1 from transcript clementine0.9_024245m (loc us clementine0.9_024239m.g) derived from phytozome v7.0 (c hr-ID scaffold_49; pos 1147975 to 1148553)
ggttcttgatatttcatcatcgaccccaactttgggtgagtctccttgctcaatttgtttctgttcttttctgggtttgttttgaaatgctcatttgttattattattattttttttttttttcattcatttgctcggtgaaaagttgtgtttgttgttaattgatagatctcttatttcaatatttgatagaaatttggcatcttgatttggtatcatgttaaagatgtcagtttttattccatgttttgtgatgatgatgatctttttttgtatttttcacgagggcatttccaattctgtcccatattttatattcttcttagaaacgttggatcatgattatgattttattgtgaaagtgattatttttatttcttttattagctgcagtgttgttttgatgcctcggattttatgatcatgggttggatcatttggatttctgataagatgatttctcagctggggttctgggaattttatgagctttcttttattccttcgaaggtagcttatattgtttgatgttggtttgttgcaggttggaattgctatcttcttttggctctttttcag

SEQ ID NO: 83970 - DNA, 572 bp, Citrus clementina
  Intron number 2 from transcript clementine0.9_001495m (loc us clementine0.9_001495m.g) derived from phytozome v7.0 (c hr-ID scaffold_53; pos 411193 to 411764 reverse strand)
aagccactgagaagtttatccaacgtcaaccaaaggtaatcattatgcatagctgttttatccccatttatatgttttgatgtctctgtatgtgaactgcatggaacaagtagttaagtcaagtttttcttagtaatgctgtaaatttggatctttaatagcaaaaggatgttttaacctggatgtttgttggtccgcaaatttcactctttatgtatgaataggaaactgagatggagttttgttcaatatgatgggttctaaaatgctgaaatagagagagctggaaactctgatcaaatttggagaccacttatgaattgatgttgtgactcttaattgtttagacctctggacgttctcatgtgtatgacttggagtgaaatgtgaagatgcattaggttgagctgaattttttatctttgattttagggaatgggcacatacagtttacctgccttgcagttcttaagctggcagcattctctgtccagtaagcttgtgctgattccccaattgtttttcctctttctgatcaattatactaggtgcttggcgaaacagctggttct

SEQ ID NO: 83971 - DNA, 724 bp, Citrus clementina; identical to SEQ ID NO: 80950
  Intron number 2 from transcript clementine0.9_034719m (loc us clementine0.9_034719m.g) derived from phytozome v7.0 (c hr-ID scaffold_98; pos 407096 to 407819 reverse strand)

SEQ ID NO: 83972 - DNA, 460 bp, Citrus clementina
  Intron number 1 from transcript clementine0.9_030847m (loc us clementine0.9_030847m.g) derived from phytozome v7.0 (c hr-ID scaffold_53; pos 1175724 to 1176183)
catcaaggtatataattgattgtcacattcggtattaatattagtctacttcatggcgtgtacaataccaaaacaatggcgtatatatatatatatatgcaaacgtttacatctgagaattttaccactaaaagaaatgttttcaaaaaaatatttcacacggcccggcaccatgtgaattttgcaggtttgagacaacatgtacatatggtaaaatcgtattgcttaagctattgtctctactttgaaattttgcgtctatagtatagtataatttaaacattttgaaaattttgtacacagtttggtgatagaattgagaataaggctcttccaaaaaattgggtttacgaaacaataactggtatttttcttactgtgcagaaattttgattaacacattagtttttttctttgctttgcagtagcaatacggaatcaaaggattcaaaatttcctg

SEQ ID NO: 83973 - DNA, 398 bp, Citrus clementina
  Intron number 2 from transcript clementine0.9_012318m (loc us clementine0.9_012318m.g) derived from phytozome v7.0 (c hr-ID scaffold_27; pos 914087 to 914484)
tgcagcacatcaaggcaattattacttctgaagaggtaattattattattgtatttttttcttttggcaaatttgggattcatcaatctttattactgcataagagtgcttcttttagtattaaataattcctcaattctttttttcaagtacaaattctaagcagatatgttttttacctttgtattgctttcagggaattctaattcataactatttttgttaacattattacttaatcaaaattattatttaatcttttctaacatgtttagtgtttgcttttaatataaagttctggtgtggaaaagaacatgcaagtgtgagcatgggccactttgggcagactgtgatgattgattttgttatataataggtgttgcttcgagatcctttgg

SEQ ID NO: 83974 - DNA, 933 bp, Citrus clementina; identical to SEQ ID NO: 80132
  Intron number 2 from transcript clementine0.9_015132m (loc us clementine0.9_014882m.g) derived from phytozome v7.0 (c hr-ID scaffold_82; pos 642974 to 643906 reverse strand)

SEQ ID NO: 83975 - DNA, 726 bp, Citrus clementina
  Intron number 1 from transcript clementine0.9_025513m (loc us clementine0.9_025513m.g) derived from phytozome v7.0 (c hr-ID scaffold_27; pos 3046487 to 3047212)
agcttagaggcaaagctattgccttgcattctcaggtatctatctctctctctttttttttttttttcactttctaatagtttttctttttttaaaatattgattatatcttcattatgcggctcttctttttctactttgtttataatttttaaattagttttatttttatttttaaaaataattgtttaggagaacaattaattagagtcatatagtatggccaatcaaatggatagatcctcttgtgagattgttgattgccggataagaatgttagaaataattattaaatcttaagcatatggattataagtgggcccgcattgtcatatggtaaaaagttaataaaaattagtaaaatttacccatccaacagtattcaggtgatatctcacagcaatatatatactgttaaatagtcaaaaaaattaacagaaattagtaaaattggaccatctaatggtgctcgaattatggaatagaggtaccagagtcacaaccgttatgagtacacaagagggctttgatcaaagttgagcttaactcatcaaagaagtcactgaaagattattattcaggaaaagcatatcctaatatgtatagattttttggtgatttcacttcacaagcagaaagcatttttctggttcgtgtaactgctaatctgttataatgttaatcttgacaggtaattactgaattctgcaaatcaataggagctga

SEQ ID NO: 83976 - DNA, 950 bp, Citrus clementina
  Intron number 1 from transcript clementine0.9_018740m (loc us clementine0.9_018740m.g) derived from phytozome v7.0 (c hr-ID scaffold_10; pos 13602 to 14551 reverse strand)
tttttcaggctattgttgcaattctcttgtttgcggtgcgtaccccttgttttttacttgatttcttttactttttacaactggttttagttttaataattgtttaaagttcgtctcttttttttcttttttctttttttcattttgcgatgtctgattggagtttttttttttttttttttttcgtgttatagcttgtgctccttttcgtaagctttgaattgtaagggaattggaacttgctagagatgctttgctttttggaacttgttaatctatgtgtgcgactgtgtagggtttgcggtggttttgcttgattgctttctgtggtttttatgtcaaattttgctaatagcttttgtcggttgaattgttgatttaacctgagaactgtgaaggaccaacttccatatattgtttctttatctcctcaaaattttaattctttttcagagaatcttctcaattgttaaacatgctcgtataaacagctttttatttggctatatgaagcctaacaaaataggtgggaacaatcatcaaaacgattggatcagggtatcagcagtattttgtcattttgataggatggaatcagctgttaatctttgtaactttggagattttatttaatgcaagaaggattttgcagggatctaatcctgataatttggatgttttcgcttatagggaaaacttggacagtttttcttttctttttttttccttttttgggcatcatagcatgctgtcagctatgtgttaactgttattcttctcttcgtatttatgctcactttttatcatctttcctctgttattgtttttgctggtattgatgtatttggagccagcaaattgttaatatcttggctagagaagatgtatgttttttgcattattgcaggaattcatgttggaatcttggttttttctataggtgacaggaa

SEQ ID NO: 83977 - DNA, 629 bp, Citrus clementina
  Intron number 1 from transcript clementine0.9_016038m (loc us clementine0.9_016038m.g) derived from phytozome v7.0 (c hr-ID scaffold_53; pos 501441 to 502069 reverse strand)
ttgataaggaggaagaatttgtcatccgttttcaggtaccgttattttgccaactttgttttcaaaatcatatttttgtataggtgtatttagaaatttgtttgtttatcaatgaacattgaattggagttaattgattagaaaatcctaaagggacatatttttcatgggaaaggagagacctttgattggatagtagaatatgtatgttgctgtctgtgtatttagagtctgttagttttgtcaatgattatagtggaatgaattagaatgaatttgattataacaggagcatttttttcattgtttgagggtatttatgtgggtgtatttgagattacgttatcttatcaatcaaaattttcattgtactcgtttattttgttgataagagagatttgatgaaggttttagactataatcattataaattctgtttgcatcaatgatttgttcagtattttccttgatggaaccaaatgacctgtcattgaagaattctatggatgatgttttgcatatttaggatggcaaggccccacgttattatgctactatggctattttgatcttttcttctttttgttacaataggagctgaaggacagaattgagcgagtcaaggagaa

SEQ ID NO: 83978 - DNA, 991 bp, Citrus clementina
  Intron number 3 from transcript clementine0.9_014300m (loc us clementine0.9_014300m.g) derived from phytozome v7.0 (c hr-ID scaffold_43; pos 1067801 to 1068791 reverse strand)
cctctaattgttctcgtacataatcgctataaaaggttagtttctctctctcttttggcttactgttatatgtgtatgtgtattattcaatttgcactccttccaattagtgccttaatttgaattgaatggacatgttgtcattcatggctgattttttttatgcacaagacgagatggtgttattcacttggctgatttcatgcgtagtggcagatttcattgtagttgcttcttagtattgctttcagtgtgctgatccatgaagtcaatttagtttgtgatctgccaataatactcctatatatttgttttctgaccactattcaaaagttctgcttagtctttttctattgaatccaggtcattgcttaatgtcagatgattttttgtgattattgaatcataagtcattctgtaaaagatggtcaagcattgtaggtctctgaagaatataatgcttcatgcttgtcctccagaaaggtccgctgctctgcattatctaagagaaggtcttgtcgaaatctctatagagtttccaacatgaaaacattgcttctggagattttgagtttgtctactactaaaatcaaattccactgaatttccaccagtctagttaatgtgatgcgttctaaaaataactgtattatgacccgttaaacgtgctgttgaatgaagtttcatgtaccttcatccctattgatcttagagctccatggaatggttattctcggttctaaaggtttatcattttactaattctatgcttatcatggcaaaaaactggaggacagaattcaaaatttttgatattctgaattgagaaaattttgctgtgaatcatggatcatacacgtaaaccattgtaatttactgattcataatctacaggttacattttaatacttgcatctcttgtatattaacaattagttgctctgctttgttataatccacatcaattcgattgtttgcaggccaaaggaaa

SEQ ID NO: 83979 - DNA, 414 bp, Citrus clementina
  Intron number 1 from transcript clementine0.9_014300m (loc us clementine0.9_014300m.g) derived from phytozome v7.0 (c hr-ID scaffold_43; pos 1069627 to 1070040 reverse strand)
aaacatatttgggcattaaaatcaaacaatcactggtcagtacttgcacaatcaactcattaacccagttttgtttcttttggctgtttttaattactgtgcatataaatctttttcaacaaaccattacttcaatacttcttcatcttcagtgatttcaattgctagtcctttcatgacattgaaaatttatcacatttaacttgaattcttcattatttaatacccatgttaaaagaaaaaggcccttttttttgctttgcagttctctcattaactttttcttttaattaattagggggtatttttgtagttggaatttttttttttgcagttctgttattcttcatttatacatttacagatatttgaattataaatttaattttgcagagtcagatacggggttgaaaa

SEQ ID NO: 83980 - DNA, 588 bp, Citrus clementina
  Intron number 2 from transcript clementine0.9_005331m (loc us clementine0.9_005323m.g) derived from phytozome v7.0 (c hr-ID scaffold_23; pos 1861416 to 1862003)
tccaaattgataagcttttgtctgagaggggtaggtgaaagacaaagcttatacttttgcctgctcttatgtttctttcatttgcagctattcataagaagatttctatttgaattgtatgatactggattttgtgtaattgtcattattgaaagtacaaggtttttctttccttctttccttcttaaaattttctattatcttgctgccgcctttcactcccaagtcacttaaggacccttaagcatcattaaagagggtagttcgtgcctattctttcattgttagcatgccagtactgatgatgtgcatacttgttgcatctatgagtactattgctttgccgctctaatacaagttgtggagatgatattcagctgaaatttaattttccaaaattttctttctggtttcttgtaattttattttcttagtttttgtttacttagcattgctgaagatatgaattaatgctttttggttaaacttttagaaagttatctagtagttattgtttttcgtaaatcattttgaccacacatgattaacaagtttagaagaacttattcagggatgttattgcaggac

SEQ ID NO: 83981 - DNA, 486 bp, Citrus clementina
  Intron number 3 from transcript clementine0.9_011091m (loc us clementine0.9_011087m.g) derived from phytozome v7.0 (c hr-ID scaffold_43; pos 1742280 to 1742765 reverse strand)
gcaaggtaactgtgctgatgtttccgaaggaaattggattatatattgcacttttgaatctttactttatccttaaaagtatctttctatgttgtatagtatggggagggaaatgtttttggttctttggatcttcgttaacttttgtagttcttctctctttctttgttaggtattttttttcgttttctatcagtttgttttattgcttagagatttcacctttatcaagttttattctagctactctgcttaacattcttactgaagtttaggtttggataaaactattatatcccgacagttatttttgtgtctcactttttgtttcctgaaagttgtagtttgattatggtgcatgtgattgatgaatcagattttagaaacaattcttgattcatacatgatggtaagaaacctatgaaaaattagtcaaaatataaaaatgtcttccattgcaggtgcaaataattcagcaaataaacc

SEQ ID NO: 83982 - DNA, 768 bp, Citrus clementina
  Intron number 2 from transcript clementine0.9_011091m (loc us clementine0.9_011087m.g) derived from phytozome v7.0 (c hr-ID scaffold_43; pos 1743113 to 1743880 reverse strand)
gagttgcatctacctcagttgcagaagtaggtaatatactggtttcttttttttttttttcccctctctctcctctttatgttattaactgtagaattagattcaatgcctggttgaaaaacgattttgttctttgttgattgctattgtgagtctgcctttttctgggcatcttcaatggagtggctgtaacttacttcttgagttctttgtgtttgtgttttatttatttattttctgcttgttgatgaatcaatttcaacctatgttatctgtattaagttgaactttagcaaaatgacctgctttttcgggttttgtgtttttatcatttgttatgatggcttgtgtctttttggtgcattttcagattgttttcaggtttatgatgctttactgtttcattttaatacttctctgaatttgtctatttgaagaagttaattgtatcgaaatggtaattgttttgttgttttcgttgttgtggtttgttttgatttgaagataaaattttcgtgtttgacaagtaatttttaatcatatcttatgaaaaaaaaaaattcacttccatttgctgtcagtgttttcgtgtttttcttattttaagcttttgtaaggatttacatctttcctattgaagtagtgtacatctatcttatcttcaatgccttacattgatcttttcatctacgcataaaaagttgctagggtttgtttggcttccaaactgtaggactttggcggcaacaaaacttaagaaattgagcg

SEQ ID NO: 83983 - DNA, 537 bp, Citrus clementina
  Intron number 2 from transcript clementine0.9_012416m (loc us clementine0.9_006644m.g) derived from phytozome v7.0 (c hr-ID scaffold_10; pos 5787941 to 5788477)
gaccaaagtgaatacgttggggtcttacactggaggtaaagcattcattgtgctcaactgtagttagaatatggtgtctgttatttccgcactcaattgtgatgtatggaaaaccatgaagtccgaatccaattaataataaaggaaaatctgagtcaaccgtatgtagtgacagcatcaatggagctggtgccagatagtttgctgcctagattgtcttataacatacctgtgtcaatatgcttgcttgacaaactgatgttagttttgaataccctttgctatttgaggatgactagctctcttttaagtagatcacaaaaaggcttagaattttgcagtcagaatttcaactgccatctgaagattcaaagtttgcatttcccttcatcatgcttcctacaactggaagatagcttatgttttaaataattttaaattcaacaatcctctgtgtgtgcatgtgtctgcctttcttcctgatttttcttttattttgcaggagatcagggttttttaaattcatattactctgac

SEQ ID NO: 83984 - DNA, 783 bp, Citrus clementina
  Intron number 1 from transcript clementine0.9_015895m (loc us clementine0.9_010844m.g) derived from phytozome v7.0 (c hr-ID scaffold_23; pos 1313342 to 1314124 reverse strand)
gaccctgaagtgtatcctcgccctactggtaatttcgtttagactctaatttatgtttctctgtttatttggtttttgattgtgttgaagttcagtaccttgattcaggagttttaaggttgtgatgagaacatggcattagcattgtttaggtttggtaatcattttattgatgacaaaaatttcatctagcatattcagtttgcttagtgatgcagtcgatcttattataatataacacagaacttgcattggatggagattaatacgttatcttgttatggatttttaaattatttgactcgcattgtaggagtgcaataacatttatggatcaaaattgtggtgattgatcatttattgtctttgtttttattaaattatataatcttgtctagataaagtattgttgttgacgattaggatgatacagagggttgcaatccaaaatagccttttgcttttctagatattagatggttgttgggaagaggatgcacactacttgttgacattgatttttggtcaactagaaagattaaataaacgggatgatgtaaaagacgaaacacagagaatttatgtggttcaggacttggcctacgtctatgggaatagagagcaactttcattattcaatgagaattacaacagtttttttttttttttcctttggctgagctatttgcctgtgtattttcttgtgtcctctatgtatcaagggcttattatttataacacaattttttggtggagcaaagtaaagtggagcagcaagtatac

SEQ ID NO: 83985 - DNA, 819 bp, Citrus clementina
  Intron number 1 from transcript clementine0.9_009952m (loc us clementine0.9_009952m.g) derived from phytozome v7.0 (c hr-ID scaffold_53; pos 385206 to 386024)
gcccttttctcaataggcgcactattagaactgaggtttgcttctttatctccagctttggctttaatcagattttaatggtcattagatttgatgtgggttcacgaattaagtgaaaacaaatgttctaagaattaataaatatgtgaaaatacatattctcgtatcaatgtcaatggtgagactcttacctcccaattaagcttcttattggtctacatgtttatcgaacataatactactactagagctaaggtttcatgtctcatgttcgatttcttctacgtgtaaacagtatttcagttattttaatattttggttgactttcgggctctcgtccgtatccacgttttactttagaggccaattgagtcttgtatttaatatttgtgttgaaactcttacctatgagttaagattttgggtctagaggtttctttagtagtcaatttgcttctttgtttctatacttggacttaggacagagccatggagttgctctaacagtcaatttgcctgttgttgctacacttttgacttgtgaagatttgcttgatagttgaggagtcttggaaggagacaacaaatcattgacctttgtgatgtatagatcctttgatcataaagatgccaagcagcttgctgaagttgattcttaatttgatataaaaggattctattgtacagatgtagcaaattgtttcatgcatttggatggataatgatcatttgttgatgtacattgtagcctcaattctgcttgtcttatactaaaaatcttgactttggtttctactttaggttgtaaaaggccggat

SEQ ID NO: 83986 - DNA, 479 bp, Citrus clementina
  Intron number 1 from transcript clementine0.9_010376m (loc us clementine0.9_010376m.g) derived from phytozome v7.0 (c hr-ID scaffold_49; pos 394966 to 395444)
ctctagctggtaccatatcagttaaggtattgtgtattcggtgcttattgttctagctgtttgacagtttgaggggtttaatggagtatgttatgtggatattgcttgaaatttgagtttttgaagtgggttcagattgatttttttttaattgagctgtcaactgtgttgacatgctctgctatgctgttgaaaaattttgattttggatacaactgtcatggaattagtgtctaatatgcaaagcataagcttaagatggagacgatgaatgtcacattagccttttgtgtatttgattttcatgcaaatgcttgagcattatgaaatgagttgctagcttgtgtgatttgaaagaaattgctttcaggatgaagcacatactgtgtgcttgcctttagtgaattcttgtgaattgaaaatcatctctccgggttgcctaatgatcttctatttgttggtgaatcagcattgttctg

SEQ ID NO: 83987 - DNA, 519 bp, Citrus clementina
  Intron number 1 from transcript clementine0.9_004631m (loc us clementine0.9_004631m.g) derived from phytozome v7.0 (c hr-ID scaffold_20; pos 2657834 to 2658352 reverse strand)
cttgttcttgtatttaatttcttttgcaagttcaggtctcttacctctctttatctgtttttgttatagacaacaagatacaacctctatatgtgtatttttatgttctcctgtttttttggtttctttttttattcttgttttattttcttctctgtttttgtcctttttcttctttatttctattctgcataattgtcaatttgattgtgacataacatgatgtttctttctttcaagtagaacattctgtaaaacttttaaatttttgtttatgggcagtgttcttttttgcaattaatgtagtatatatgagaacaggggaaggtgcacgaagctacccgttttggtattatggtttgttggtgacgtttagctcaaacttcgcctgacatccaagttcttttgcttggaaatataagatgatttataacgtagatttttttttttctttgacttttaaagtttgttggagttgttttgattttgtgtttattggttatgggcagaaagattgca

SEQ ID NO: 83988 - DNA, 379 bp, Citrus clementina
  Intron number 1 from transcript clementine0.9_010987m (loc us clementine0.9_010987m.g) derived from phytozome v7.0 (c hr-ID scaffold_5; pos 1953100 to 1953478 reverse strand)
ttgccattcaagactccaccatctaattcaagaaggtaaaacatttgtgatatcattgcattgttagaattttttttttttttcaaattgttgtttggtatttggtcgctgagtatttacaagaaaagaaactcaagtgggtcaaatagagatgaagtttgagacttttattgacaatttctttgttaatttttacattggatcttgtgagaaacttcaggaaagaaaataagataggttgcacccacctagactgtttgattttttaaattttttttccaatctttatgtcatttgattttcttggctgctaaagggacactttgtgttgatcggttttacaggaaacgtaggcttcagaaaaggagccctgtttcga

SEQ ID NO: 83989 - DNA, 533 bp, Citrus clementina
  Intron number 2 from transcript clementine0.9_011479m (loc us clementine0.9_011475m.g) derived from phytozome v7.0 (c hr-ID scaffold_10; pos 3134931 to 3135463 reverse strand)
gtgcaaacgcctacagacaaataaggatcaagctggtaaaacgctgtctctagatgaagctttgaaattttattaatagtttggtttcacgtgctttctgtgagtttctgaaaaaggacagaaggaaaaactccaatatgcctttcaaataactttttgttatccacgccacttgccctcaaaattttggttgaagagtaagaatgaatgctatcatataacctgcatcagcttccttcctcagccctcttccattatgaagaagccatatttgaaatagtgttctttttttccccccaaatgtattttctttatgtttggtgcatctcatgaatctgtgccaaagactaagacttgcaatgactacatcaatgtatctgtcaacatgataagttgtttaacacaagtgtataaagccaaacttttgtgtatgctaaactggttctttagatatacagcaaaacattttattatcttctcgtagtagtgcttatctggataaactgcttacaatgtgtgacaatttgattcag

SEQ ID NO: 83990 - DNA, 499 bp, Citrus clementina
  Intron number 1 from transcript clementine0.9_011479m (loc us clementine0.9_011475m.g) derived from phytozome v7.0 (c hr-ID scaffold_10; pos 3136049 to 3136547 reverse strand)
cactatctttgagaatctgaagctatttcgaactggtgcaattcttgtgctttttcttttttgggccatgtaggattctttgcttattcatgttcttggttcctttaatttacttggtctgtgtttgtcaaattgttatgcaattaatattgttgagtgtagtaagaccatgaaatgctcttaggtccatgatacctaatcactagactttttgaagatatcgcaccgaatgagttaatctttatttgggtttgagttactatacccaaattttgactttcaattcaggggagtgttattttctctttttaatcaaacactgagatatccctttgcattctcaaattatgtttaactagttaaaagagtaaagttttgattgataccttcattaatcaagctgattgctttccgttgagcagtgtcatctttcaattatgaattgattgaaggtttctttctcatatacaatatataattttcaggtttcacttcagaa

SEQ ID NO: 83991 - DNA, 870 bp, Citrus clementina
  Intron number 1 from transcript clementine0.9_016193m (loc us clementine0.9_016193m.g) derived from phytozome v7.0 (c hr-ID scaffold_23; pos 3334893 to 3335762 reverse strand)
gtatcccttcctgtttcttccgtgattttatcggcgtaagtactgagtagttttcttttcatttcccaaatttcaaatttgtttcatttttattttggatttattaaattaattactgatttttatttattttttcaaatattctatttagtattaaataaaacctgagaggttccgtaatcaattacagtagcacacggcactgctttgttgatccaacacttcaacttcattcccgacccctgcatgattgcttgcttcatgtgcgctagtgtgcttcctgaaatgagcaacgtcacttatgggatcaatatagtttagaaattggaactgtaatcagatgaaaagaggttagcttttttgggttttattgtgttagcagccaagtgattagatgtaattaaggtctgaaaatcataaaagcaaaactagcctgaagcatcttggagttgtatgacagacataaactgctaatgtgtcctatattactgtgcttttttctggcaacatttgctgtaatcctttttgctaggctctttgatgaccagataattacttgtataacagacgacatcatttttaccttgttaaaagatcttcaagaagttcgttccctttctcattaatatttatgtctgtgataagctttcgtaaactgacaattaaaggtcaacaagtgttcaatttccaagtacaattcatttaaattactgtctgtggagaagttttagtcatcaagatcaagaaagcatgttttccttttgattggtgccgtttacatgtttggaagtccgctattattgatttactatattccctgttctgttttgcctgacttctgttttgtgaatttttgattttgtgcaggtt

SEQ ID NO: 83992 - DNA, 683 bp, Citrus clementina
  Intron number 1 from transcript clementine0.9_013172m (loc us clementine0.9_013172m.g) derived from phytozome v7.0 (c hr-ID scaffold_29; pos 2581038 to 2581720 reverse strand)
cctccgttgtcgaaaaacagtcaaccccatcaaaggtcagatcattttgcttacaggttcttattttcttgtcattatttttttgatgattacgaaataatggctttgatggatgggaaaatctcagtatttgtttaatttacgtgggttgaatttttcaatcatatacaatgaaatgttttcttcttgttttatccagatgagcccgtttattttagcaattgaaagttgaaatgtcaaaagaagttgggcaccaactgaagtgatatgaataggttttgattcatttccatggtagtctttatgtgtttatcaatggctattattgtacgtttgtagttgctaagaacacttcaagtgcgaattggatgattaatgatatgacaaaaaaaaaattaaagggatcattaatggaaccttttttttcaatttctgtaaaagaattagatgaacttgtataaaattctatgtgatacagaactgttttattgtagctttaacttaatttctaaatacaactctttctacaataataacagcgagaatacggagtttaattagcaacttatgatttcatttgtttttcaatggatgccaagtggttgtgaatttttttagtactgtcttggttattgtgttttggctcatagtggtctcattttatttcagactggtaattggca

SEQ ID NO: 83993 - DNA, 647 bp, Citrus clementina
  Intron number 3 from transcript clementine0.9_013283m (loc us clementine0.9_009338m.g) derived from phytozome v7.0 (c hr-ID scaffold_1; pos 8880302 to 8880948)
tttgaaacttctcttttggggtatcctgttacaaggtcagttttatttaattttgactactctgccttcattttgttgtttgatgaacttaaaagtaaaatccaatctagtgctaacatgtttaggctttaagccagtgtacatctatggcacgtataataaaacatttcatcaatttaaagagcattcttgtttctttgtaggcaatgaccagttgttcgatgaaatcatggtttcactttcccattttttcaaaaaattttgaattggaaatggtgattggttgagaattgctgtatatgtagtgaaatgtgaattaggaggtgggagtctatttgcatctctttattttggttaaggttgtggcctttgcattggaagtatcaatcaccattagtaatgatttgatcagctacatgtagatagaatctagttgctattgtgagtaagtgatcgctgctttacaatatctgacaatcacatgaacatagggatgtaatttctttctttccaggaaagcccaggtggtctatcacaacctatcaaatagatagattatcaatcttttctttttcaacctgaaaaagattcatgaagaaatattttgatattaatttgcttcttatcttatcaaggtggcttctctc

SEQ ID NO: 83994 - DNA, 1020 bp, Citrus clementina
  Intron number 3 from transcript clementine0.9_019003m (loc us clementine0.9_019003m.g) derived from phytozome v7.0 (c hr-ID scaffold_23; pos 2089715 to 2090734)
tggaggcgataaagcagctgttagtaggatcgaaggtgaattatgtttgcatttagtacactgtaatggttgctctttgttcctgcttctcatgaatgaatcaagtatggagtttaggggctatgatctgttttttaattactcaaaaattaatttggagatatcactgaaagtctttttctgcgattctgttgttttgttcagttgttggatgtggtagagattatggcagagagtgctgtgagtgaataggtttctgagatactggtatgggggtttgcttgtcatctgtctctttccttcattaagcccgtttctttttagcacagtttccttcaaatagcctctcactgcagttctcctccatgcctagcgttctcctttatgcccagcgtcctagagggcacaactatctccctgataaagggctgtgagtgtgtgcgtgattgttttgttttgtttttcttttttttttaattcttttcatttttttggtgcctttcctcagattgtgttgttagttgtcttattggtatgataaagatatcaaaactatggagtaatttgacaagatacatctataacttgcagatcaatttggcttctctctctctctctttgtgtctctctctaccgcatcctttcattgatgccgtttttgatcaagatttcaatgaacattagttttctacagtttattccctaatattggtaattctcgagtgacctatggtgcatttgcttattgcccaaaagccaacactgaccataggtcccgggaaatcctagacaaagcatcaatgttttgcctatttgagccttttaagtatatgataagtttattttattcaattctatttccatatcaagtcgcgacttttaacagttgtagtagagacatagagcaaagttttcatttttgacaaagataagcttatccagcatttttctttcaatatttgattgcgcttcatttattctgtaggtgacttttcttgcacatcagaaatccaaagagct

SEQ ID NO: 83995 - DNA, 177 bp, Citrus clementina
  Intron number 1 from transcript clementine0.9_024286m (loc us clementine0.9_024286m.g) derived from phytozome v7.0 (c hr-ID scaffold_29; pos 725172 to 725348 reverse strand)
tctcgtttctctgttcgactcggttcggtgactcggtaagtccccttcagatctgttatcggtttttcgatgactacgtcgttgttttcttttccgatttttcatgtatacgatatatgcgatcgataattcttattatttgatttattaatctcttgtatatattgaagattaaag

SEQ ID NO: 83996 - DNA, 504 bp, Citrus clementina
  Intron number 1 from transcript clementine0.9_019572m (loc us clementine0.9_019572m.g) derived from phytozome v7.0 (c hr-ID scaffold_5; pos 1344737 to 1345240 reverse strand)
accgcttcctcgaagaatacaggttctcgtttgttttattcttttgttattggattccatttttcagattgttttttgatagtggggtgtctttcttttttcccttaattttttttcgtgggatttgatttgtttgaataattttacgttgttaattgaacttgatgcatttttttcttgtaagcttcatttgacattgtgaagaatagagtagccacctgagaattaacaaaataaattgtagctttagtggtagaataagtttcaatgctatgagagtctcaatggcttcatttcaactaaaatctttgctgtttcgagttccagtgatgcctaggcatttctcttgttgggatatgttgtttgggttcaattcaactttacaggaatcttgttttgtaggttaattttcttgtggaggagttgttaagatttggctagttttatgaattatttctcatgttgattgtggtgtgttttaataggaaaaagaggttggctgag

SEQ ID NO: 83997 - DNA, 920 bp, Citrus clementina
  Intron number 1 from transcript clementine0.9_008620m (loc us clementine0.9_008620m.g) derived from phytozome v7.0 (c hr-ID scaffold_33; pos 1430298 to 1431217)
tcttcgtttcgcatttccactcacctgaaaaacaagtactgaatttcactcatcattctctacttatttatttaacatcattcatagttattattgttcacgtatgaaatctgatttttttttaaaaaaaacgaatgcttagagacgaatgcatgaattttcaattttcattgttttattttttgacgcttacaaaatggtgagcctctttgtttgtttcctgatcctgccgagcagtgtcgtttttgaagcttcagtttcgtttttgtgtgttttgagacaaaatgttgagagtctctgtttgcggctgatcctgcaaaaacgctgacgtgttggtgaaaatctacattgtggttggattttgatataataatcttaagagcttttatacgtaatttgatgaatcaaatgattctgtgtttgttgctgatcctctgagtcggtgccgtgaagaagctcagttcttgtttacagttataaaaagaaatgtttattggtcgcgtcaattctctctttttttttttttttaatttataaatcttgattagagctaaacattattgcttttgtgcttaatatctagtgtgttttccatttctctattgatgcaggtacacgtgagctttgatttttctttttctttttttaatttgagtatttagatccttctggctcaaaattttcattcaagacttccgatcttgaaataaaataatatgaaataaataagacaatttctttagtcagttggctttgtactctaatctgtcaatgcaacttcttccttttttttttttttgagctttagttatatgattgagtacaatgttgaatttaaaaatgtaaggatattcgttaaatggtttgatctgatggttgttgcagttggctgctgattactttgtaaacttgaagggaaa

SEQ ID NO: 83998 - DNA, 774 bp, Citrus clementina
  Intron number 3 from transcript clementine0.9_007874m (loc us clementine0.9_005051m.g) derived from phytozome v7.0 (c hr-ID scaffold_23; pos 3620362 to 3621135)
actttagttcagcatacagctgtgagtctcatcctttgttctcttatgtatgcaagaaccttgaattattgaatgtgtggacccttctgtacatgaaagggcaaaaatgtaaatgcagaagttttaaactaaccagtatgattcttgtcatgggtagcagtagttaatactgcattgttaggatgcatggatgagctatgttaatgggagggatttgtttactagcgggaaattccatcagaagacaaattaccttccctattttgctctgtaacctaactcaagatcaccaaatcaaataagaaagatgaaagtaggtctccttgccttagacccatggaggtataaattttgcctctcaggtgaccatttgtcatgaccggggaattcgttattctaaatagcctgcaactgattcctttatctctagccaatctcttacctccaagcaggaaatccacaaaattctaatcaacattattgtataaaatttcacctctctttctgtattgctaaacaatataagaaatcaaagtctaatccatgggctctgcttcgtttatttgtgcgcattggtttcttgttgtataacactggagtaacacaagcaaactgtaaactaaaattaccttttcttgtgaatatctaactgctgatcattgatttatcacattttttgtaaaattacatgaaaagtgggggttagaaaaaaaaaatactaattttctggggttcacaggaattatacaacgaattgcaaatattggatagatt

SEQ ID NO: 83999 - DNA, 212 bp, Citrus clementina
  Intron number 1 from transcript clementine0.9_000009m (loc us clementine0.9_000009m.g) derived from phytozome v7.0 (c hr-ID scaffold_1; pos 10903265 to 10903476)
cctctcaggtatctgatctaacttggttttcttcttcaaaaagtttattttctagttaaaattgcagtggttttaaggggttttgctttggttggttggatttcttttttcaaattttttttagaggttattattattattattattattattttaaaaatttttgtgtttttgtggcagtagtcttagaaagcagcgaattttgagttgag

SEQ ID NO: 84000 - DNA, 256 bp, Citrus clementina
  Intron number 1 from transcript clementine0.9_003166m (loc us clementine0.9_001631m.g) derived from phytozome v7.0 (c hr-ID scaffold_1; pos 9654837 to 9655092)
aaaaggtgattcatttccttaattgattatttctatctttttgttttgtgtcgatgacaataatactaaataaggatacctttacacttctattcttcttagttgactctcctctttaaagttatatgtttctttataatctaatttaagtttttgactcaattaattatttgttgttctgactcaatggtaatattgtaattatttgttgacatctttaggtaggacttcctagtttggaggaattaggactctc

SEQ ID NO: 84001 - DNA, 638 bp, Citrus clementina
  Intron number 2 from transcript clementine0.9_019178m (loc us clementine0.9_019178m.g) derived from phytozome v7.0 (c hr-ID scaffold_49; pos 565105 to 565742 reverse strand)
tgaggttgcctgctgctcaatctttaaaccacaaggtttaatttgttacttcacatcactcgtttcttgtacctgtttcgatttttttttttgttggtatacgattgattatcttatgcatttagcatgctgtttcaaataatcttgcattggaacctcgaaattccgttacgaaagcaaattgtgaatttaaaatgctgaacatgtaaaatggccatctgtggtttcttgcttttcattcgtatttgtatgtgaagcattgtggaatattaagacagtgaagaactgatgattcgttaaaacatttttctggttctatattagctcccatcagctttcatagttggagaaactcagggtttctagacaccttcttatgaagacatccaattgtcatctttctttttgttgcaaagtatgcatttctttatatttgtgtcagactatttgaatccaattaattgctttgacgtacggtagtgactgattttgttctggcatgcccttagttctcttctctaccttgtggagaaattctttgtagaattagtttccctgtataatccctagctgttcactttttttttttttccttggttccaggacttcatcaaatctgcttttcaagacatagtttc

SEQ ID NO: 84002 - DNA, 1017 bp, Citrus clementina
  Intron number 2 from transcript clementine0.9_020693m (loc us clementine0.9_016617m.g) derived from phytozome v7.0 (c hr-ID scaffold_1; pos 9155875 to 9156891 reverse strand)
taatttcgctattggtttttgcttctcccatgtaagtaaaactaactgtgtatgaaattcaatatttgatttatcgtttcttttgaatataaagtaaattgtagaatcagctgaagaaatgtaaactgaaagtgcatggcttttaaattcaaagtagccagctagcttgtctactctctgtgcattaaaggttaaaattacaagatatattttctgcagattaataaatcaaatttgcagcaggttatgaaaatttttggattctgtatctttttaaaatcttaagaaaatcctaaaaaatgaaggagaactacaaaacacactctggttgtttaagattttgacggtagtaaaatgatgtgactattttcagtttttacgtggaaaagtttaaaaattaaaaaatgaagataacttctttaaattgaagtactgggaggtccactgtctccactccatcttctgtggttatcctccactttctatatttcttttccaaatttaatttagtgacacacttaatgggatcttttacaaacttttaagtagtgatgaaaacatttctctttttatatttatatagaaaaagtttatacttcaatctatatattatcctaaggttagataatattatatagttgtaatcagataatattatctaacctcatcataatattttaaaatgtacagacatcaacttttcatattgtaaattattttttgaataaaatactacgaatttatatatatattgcagcatacagagctaaaatgttcatattaaagaatttttgttaaattactttaaaaatattgaaatattatataatgcaccagtcaggaatcgaacccgggtctgtatcgtggcagagtactattctaccactagaccactggtgctgacgaaggctagcttggtcactttattgtattatctatcataagctagaacataatttggctataataattcattttccagaaaaacattttggcaaattgtgaagaagaaatcta

SEQ ID NO: 84003 - DNA, 939 bp, Citrus clementina
  Intron number 3 from transcript clementine0.9_023194m (loc us clementine0.9_023194m.g) derived from phytozome v7.0 (c hr-ID scaffold_111; pos 201663 to 202601)
gcaactcagtggacagacacctgttttctccaagggtattttatttattttatttctttttatttattattataaaaaataggattttgttaaaaagaaagtcaaagctttaggggctctggattctagatctctctttatattgtgctcaagaatgtgataagggtgtgtccaatgcaaataacctctttcttcagttggatttttttaatttgtgagattctgataagtcaggtttgctcattttctgcatactgcagttgttcattgtcttttgttttattgttttgtggatttttggagaagaaaactgaataaattagtggtttctttagtagtattattttctttatgtcaagtccactgggattgtttttggattatgttgttttttgttctccattgctgggatctctagtaatggatgtaaatatatttggaacaagtctgtttgattgattgggtttttttggtctctgttttgaatttatttgagaagagaaagcttttcggtaaatgaatattacagtgtttgtgattgtcattagttgagatgatttgatttgtatatcatcttaacgatcaacatttaagttgtttttatgctaataacttcctagtttctcatatatgatgacttgagctaactgggacaatttgcaatcctatgttttcaagcacgccaatgttgatgatgaaacccaaagtcccaaactatttcttctccctgttcttttaaaatgtccccctttaagtattgtactggggataggagttttttggtcttggattttgtgtggtagttgcgatagtatcaaccataataatttatttttgctgcatttttttgggggtcaattttgcagttacttattttttcattttttgtttttgtgattaacagccaggtacactgttcggtcttttgggatcagacgt

SEQ ID NO: 84004 - DNA, 999 bp, Citrus clementina
  Intron number 1 from transcript clementine0.9_005189m (loc us clementine0.9_005189m.g) derived from phytozome v7.0 (c hr-ID scaffold_1; pos 3199255 to 3200253)
cttttgcaggtaatttcatcaaattttatctaatatctttattttttaatttttttttggttgtgtaaagtgttcaagtttttttttttttttttttaatttatacgggtctgagactttaggcatcgtatggtgcttttgttttggctctatgcatgtatttttgcatgcttttttttgttaatgtaaaaaattcgattttgatttgataatctgtcagatcggagttgatttaggctgatatgagttttcgtggtggaatttgtcaagatcttttgtgtttcgttgaaaaattagcgattttagttcaatttttagttaattgattttaatgataggcgttgaatttttggaaattttcttttttttgtgaatatttgtttgaccaagattaatgagggctttggcttagggattattagagttgatgttcataatttcatgatgtgtttatttttatttgttttaactaatttatcaagttaagagggttagttaaagttaaattttttaatatgaagaaattaatttggaattagcttctattgcgtctttataatttgatttttttatcattttttaattttgtgaaacatatacataattaaatttcaagattttaatttctgttgctttgacactgatttaagactttattagattgtgttagtacatattgacgtaagtaatgctgaggatgtatatttcattttgcttcaatttctcttgtttacaaagttcttaacaacttaaaaatatgaataaaatgttgatttaattagtcaaatgattcttgatgctcttggatatttgataggattatttagttttttgatcacctggcttcgttgtgtgtagttgagtggatttctttctttttaagagggggaaaatttttttgcgtgtgtgtacttctaactgatctgtatatcatcttttttggttagaaatataagttctttattttgctattggatgttttaggaggagagttattcc

SEQ ID NO: 84005 - DNA, 555 bp, Citrus clementina
  Intron number 1 from transcript clementine0.9_007566m (loc us clementine0.9_007566m.g) derived from phytozome v7.0 (c hr-ID scaffold_23; pos 2737504 to 2738058 reverse strand)
ctagtaacctctctctctctctctctctctcttgttaagcctaagcttctttaaatgcatggttatatttctttttttcattcttctttcttcatttaagagagttcaaatgaaaagtttcatgttttaagcttgcatacaagtccaccgttttcaaaaactctacctttatgaagaaatattcgaatctccttaacatcttgtttgcttgctgggaaaaagtaagaacagaaaactgatgccaacgtttttatttgtttttgttatttttgtgttaaagagaaatgccaaattctttacatataaaaacaaaattttcgactgtatattgaaagctagaaacgtgaaaaatcttgtgttatgtcatatcatacagatactcatcaagtatggaatagtacatatgaattttttgaaaattttcttatttatttatttattaatttatttttctgttttgttgctcatctacatctagcagctggctggacaaatcccaaatcccaagtctttttcacagaagaagagaatattcaagcgaaggaacttgaagta

SEQ ID NO: 84006 - DNA, 787 bp, Citrus clementina; identical to SEQ ID NO: 81230
  Intron number 4 from transcript clementine0.9_021551m (loc us clementine0.9_018034m.g) derived from phytozome v7.0 (c hr-ID scaffold_136; pos 38157 to 38943)

SEQ ID NO: 84007 - DNA, 686 bp, Citrus clementina
  Intron number 1 from transcript clementine0.9_000048m (loc us clementine0.9_000048m.g) derived from phytozome v7.0 (c hr-ID scaffold_1; pos 12182367 to 12183052)
atcccagctttctgaattttgcatcttctttccaggtttctcacttttacattctgctctcccttggggtgtgattctgaattggttttgaacctctgtttgattaaacttttctttgactttgatctttttgtttataccctttgtacttttacgtagttaatggggtttcaagtgtttgactttcttttcaaagtggtgtctttttggtgtaaatcaatttttattttcatttttttatgatcctgcatcttaggtaccatacttcactaaggctgcttttggttgcttggaagtggaattggacgctttagtagttggtgtcaatggatttggaatatagttgtgattgtgtgtgtacaaagtgtccatcagcaagttcgatgggtgcaacaggctaatttatatcactgaatccaaattccatttctaaatgcaactaatcagtcttattgcaatgccttgaatttttctcgttcaagttcagctttgtttatgaactttgcttgattttgattggttgattctcagtgccatttcttgatcaagtttcaagaacttgatcctttttattttagattaaatgccatatgtttcaatgatcaaaccgaataagaacaactcgattctacggtgtaactctctacccgcagtggtgttgactgtaccatttttctccttgcagc

SEQ ID NO: 84008 - DNA, 986 bp, Citrus clementina
  Intron number 1 from transcript clementine0.9_031727m (loc us clementine0.9_031727m.g) derived from phytozome v7.0 (c hr-ID scaffold_109; pos 475327 to 476312)
cttggatcatcagaacctcgccactgctcaacaaggttagtataagcttctaaattttctttgattcttttacagaattttatgtgttttgtttataagactctatctaatcagtgacttgtctttaattcttcaaattcaaatgttgtgggaataattttcgaaccaaatttacatcttgtatttgttggttagtgttaattttgttataagatctgctctgaattatgcaagtgcatgcccgtgattatccttaattttggaccccagatgctggtttatgtaaattgagtcaagtttatgttggattaatcttgtttttccctctcccttcctggaatgagttgggttagtttatttggaatccttatgtggtgaaatatttaagatgtgggttgttgccttataaaaatcttcagttccattttagagcttttgaattttagctgaatttttggatctagtatatgccattgtcaacctttaatccctttagatcccgcaatcgaatcatttccatttcagttttggcctcttgactattatttttgtaaattatcctcctctaatgtcacaattccatttgtgcttaattaatttcttgatttccattactaatctgctttttatttttaaactctgtgatcatgaggagctttgtgctgagctttttatattattgtgattgatagttattagataaaaataataatatgtaattaaattttaaccatatactactcatgtagtagaagattataaaaagctcagcacaacttagcttagcaccagatccagttggatcaagggatacaaaattgtggttcccatgtttcacgtctttagtcataattttacaagtcgacttatttgtgcgcaagaggtggcttgttcattaccttcacgctctgtatttttcttttcgccagatttaattgggttcccatatttaacaagctagagactgtgacaatttgctgtaaagt

SEQ ID NO: 84009 - DNA, 751 bp, Citrus clementina
  Intron number 1 from transcript clementine0.9_028431m (loc us clementine0.9_028431m.g) derived from phytozome v7.0 (c hr-ID scaffold_1; pos 5661908 to 5662658 reverse strand)
aacagatcactgtcgcttctgtttccaagtttgaggttaatctccccattttaattttttaatttttttattcagtgttaaatttagtttgaagagaacgactcagcttatggggttgtagtttgaatttgagcatttttttttcctgattttttcatttgggcatttgttatttttcatctgcaaattgggttcagaggtactagcgctttgtgtgacaaatagctttcgtaaattgctccaattctgtttagcgttagggttttgtggtgttgattgggtagaatattttggaatatgatgatttcagctcatggatttgttcctctgtacatatgttgtgtacagcaaacaaaggccctaataatatgatttgtttatagcatgctatgcatcgttaatatcttcagaaagacaacaattcgttggacttggaaatttgcatgtgtatgaaaattcaatctctgagaattcactggtggcacttgttaaatcatgcttaaacccatgtcacaacccccttaaattgtgcatgcggtgatttgagatgggttattttgcgtttctttcatctgcttggttaatggtcttattttctcttaatgatttgttgagctctgctgtttgaacttcagtttgcttgtcgtgatcatttgccactgacaaggtttttaagactctatgttagattaaaaatgatgcttgtcaacgtgcaggattctccagtctttaattatatcagcagtctttc

SEQ ID NO: 84010 - DNA, 778 bp, Citrus clementina
  Intron number 1 from transcript clementine0.9_014632m (loc us clementine0.9_014632m.g) derived from phytozome v7.0 (c hr-ID scaffold_20; pos 384442 to 385219)
ttttttggtttcaatttcttctcgattaacaccaagtaagtgccttttttcaatttagatttcgttaattatgatcaagcttttcgatcattacatcaatttcattgaattgtttgtatttcagtcgttgcatgttgtgatatgatgtcagttccgatgtttcgtgaatttgggttcaatttgatgttctgtcgatcaaattctgttaggttgcctagaaaatgcgagaaagttgagactttttttgggaataaaataatttagcttgatgtgagtgtgcgactcagtctaagtggaaactaaaacagaaaggaacaatgaaaattaagatgttatgttatgtggttaggctattaactacacgatcttagcttgaattgttgtaaggtttgttgcttatgattgcatatgatttgattttgctgtttctcatttgattggaggagaatggagttgaagaattgaagaaaagttatggagtctactgtcaaaagattcggtaaaaatttacgaagggtttaatgttgcatgatatctttactgagtgctatgaagtccacttaaaatttttttgtgggttgtatgaaagctagggtatgattcatattttattttcttttatctactaggtggtttgagcttctgggttattaagagggaggttttatgaattctgattaattgttgttcctttctgtcacttttagtttctgttcagtagagtcaggttcacacgattcttgtttatgttagttctatgtctgactttgtagttagc

SEQ ID NO: 84011 - DNA, 610 bp, Citrus clementina
  Intron number 3 from transcript clementine0.9_018242m (loc us clementine0.9_018242m.g) derived from phytozome v7.0 (c hr-ID scaffold_122; pos 4277 to 4886 reverse strand)
cgccaatataactagtggctctttaacaaggctaggtaggctactgagataattaccaagtcagcacacggcaacaagtcactacccaaattccttgtgatattattatgcccttaatttttacacatgtataatgtcaaattaaaaccaatttttgactggaaaacttgacaaacttgactacaattggtacacggcaaaaaattactttctaatttctcagtaaaattaaaaaaaaatcatttttgagtatatgatcaatttaattagatctgagtcatatgctttattactacaattatttaatctaatttcttaattctttatttttttcccaaagacgattactaagatttttcttctttcatggcgcaagattagctaaattaaaaaacttggaagcgttggatttgagttctaattattatatacacggttctttagacgataatttttttaattaaacaatgtgcacaattaattttcattcaatatttaccatattattttaattaaacaatttagacgagagtgacatatctgttattgacaaaatttatgtttttttttaacaggattagcaaatttgacaaacctgcaagtgttgtat

SEQ ID NO: 84012 - DNA, 872 bp, Citrus clementina
  Intron number 2 from transcript clementine0.9_015005m (loc us clementine0.9_014913m.g) derived from phytozome v7.0 (c hr-ID scaffold_1; pos 10189700 to 10190571)
acacatactgttttttcgacatttggaaagataaggtgtgtgtgtgttgctgtggttttgttgctgtttatctaatttggactggggttgatgtgctttgagttaaaaggaaagaatagtgattcaaagtttggttcgttgttaattattgcaacgggtttatgccttttggaaaagttaaaagattttgcatggaaaatgtaggacgaaccatttttagaggattataagctgtaagatgttgaactctacatggatgccgatattagttttgtgattttggttttagatttggggttgaaatctttggtagatttctgagtattgaattgcattaagtttttgtctttttccccctctaggaaataatggatatacttttctacttcggtgaacattatgtatgtcaattatcaatttagttttcaagctgtgatgcagtctcattcctctatacttgacctacgcagctggatagcgatatatttgcataacttgcaataattaaaattgaaatatattccttgaaggtttcttcttaggatgtgtgtctaaatcctcattctgtggttgaatggtttgagtagttttgatgctattcatttcactttgttagttttcacaactcaaaaagcacagagaaaatcatctgactcataaagtttttactttgctattgaaaacaatggctttgtcataatcgaatatttctgttcatactatggcacctttaccatatttcagctgctctgtgtgtgcacacatttcgcttctcagaagactgtgttgctgacattagaatttggtgtgatataatctgattgcttatcatccttgtggtttcgtttaactcataatcaataggaatctta

SEQ ID NO: 84013 - DNA, 735 bp, Citrus clementina; identical to SEQ ID NO: 79876
  Intron number 1 from transcript clementine0.9_023735m (loc us clementine0.9_023230m.g) derived from phytozome v7.0 (c hr-ID scaffold_120; pos 192137 to 192871)

SEQ ID NO: 84014 - DNA, 675 bp, Citrus clementina
  Intron number 1 from transcript clementine0.9_026622m (loc us clementine0.9_026622m.g) derived from phytozome v7.0 (c hr-ID scaffold_53; pos 818053 to 818727 reverse strand)
tcctccctgagattcgcgatagacgcccacaaaaggtacatataattacaagttattactttcacattattttccaagcctgcaccatggagttaattagcgtgtaccaaaacaccgatttactttcactacatgtacagcgtattacaattattttagacgactttaatttgtagaaaataaatagtttgaactttgactcaaaaacttggggacaataacgaaacatcttctaggttttctcttctctacagacgttggtactttacaaaatacataccacataccatagcattaaaacgttattttatacttacggaatataatactgtctcaatctttattttggaatatgaaaataatatagtattaatatttcataagagttcaggtgctgattgacttgaatagtattgaagctggacttggaacttggaagaaccaaaacccacgttgggttcttaaatgacatagctcatgtataagtcaaaagtttgtgcgtagcttcagccttattctatggcacaataatatatgtatgtacatggtttcatgtgcattatgtttaatgtttgttgaatatatacatctcatttaacgccacaagaaaatgactcgtttctaatttattttatgacaggtttcagcttctaaggttctacaggaaacttgcaa

SEQ ID NO: 84015 - DNA, 736 bp, Citrus clementina
  Intron number 2 from transcript clementine0.9_011072m (loc us clementine0.9_011087m.g) derived from phytozome v7.0 (c hr-ID scaffold_43; pos 1743145 to 1743880 reverse strand)
gagttgcatctacctcagttgcagaagtaggtaatatactggtttcttttttttttttttcccctctctctcctctttatgttattaactgtagaattagattcaatgcctggttgaaaaacgattttgttctttgttgattgctattgtgagtctgcctttttctgggcatcttcaatggagtggctgtaacttacttcttgagttctttgtgtttgtgttttatttatttattttctgcttgttgatgaatcaatttcaacctatgttatctgtattaagttgaactttagcaaaatgacctgctttttcgggttttgtgtttttatcatttgttatgatggcttgtgtctttttggtgcattttcagattgttttcaggtttatgatgctttactgtttcattttaatacttctctgaatttgtctatttgaagaagttaattgtatcgaaatggtaattgttttgttgttttcgttgttgtggtttgttttgatttgaagataaaattttcgtgtttgacaagtaatttttaatcatatcttatgaaaaaaaaaaattcacttccatttgctgtcagtgttttcgtgtttttcttattttaagcttttgtaaggatttacatctttcctattgaagtagtgtacatctatcttatcttcaatgccttacattgatcttttcatctacgcataaaaagttgctagggtttgtttggcttccaaactgtaggac

SEQ ID NO: 84016 - DNA, 725 bp, Citrus clementina
  Intron number 1 from transcript clementine0.9_012708m (loc us clementine0.9_012684m.g) derived from phytozome v7.0 (c hr-ID scaffold_20; pos 3423199 to 3423923 reverse strand)
tttgtggtcaggtactttttatttttttatctatttatttattttttttgaaagttttccttgtggggtccttttggttttgatttattgttttgtagattatggaagaaatcgatttaatctaatttaatttttattatttttttttggtgtggttctctgctaaatttttgtatgaaattgtgtgaatgaacgaacagaactggagaagaaataaaaatttgtgttttgtgtttggtttctatttgattgaaaagtcaaggtttttaggattttgaatttggagttgtaggttctgcatacccaattgttgataatttaagtttctaggttcaattgatattgcattaggaattaatttgaccatagaaaagttgtcccccccttttttcagtttttctttttgtggctaattttaagaaagggaatgtagtattctcagttttgatgtaaatgcaataattagcatatatattgagcatgtgtatcattttggctggtggaattgattttgtgaaattcaacttgctttagactttttgaccttaaactttgttgattatgcatgattgttgttatatcatttttttcttttaacattttaatagctttattggaagttgtgcatgtgtgtgcgcgtttttggcatgagtttacatgtgtgtaatcgggtatgttatgaagtttgtgattttttgcagcaggcatctcgtgtggggctgaca

SEQ ID NO: 84017 - DNA, 813 bp, Citrus clementina
  Intron number 1 from transcript clementine0.9_004176m (loc us clementine0.9_004182m.g) derived from phytozome v7.0 (c hr-ID scaffold_29; pos 1026911 to 1027723)
aaattgcgtggccaggtttagttcttgttcttttacactttataaaatctaagggatgatctttgtttaattcctgtgggtttttttttttttcctttgttgatgctgtcatgttgctcaaatactgaaatgtcattggtgaattcatggaatggtgaacaggattactctagtatattattatatgttgtgatatctgaagaatcgcactttatgctttgtggctgagataagcaaatttttttttttagaattttgtcattagtatttaattatgagaatgcatctttaagaaatcacgtttagttcattttgtgataatatgcactgtacttccagttaatttgggagtgtttttgctgctgccaagaaagctattgagtaataaaacttcttgatggcatttggccggaaaagtaatgcattttggagaagcactccatagatgagtgctttgtaacatacacctctattgaaaatgctttatgtgaaagcaagccataaagatatgctgcttgtctcatctgtaccaggctccctaatgtttgtggattagtgaagaaaaaacatgtttaccacaagataaaatgagaggtagctgcctgatagtctaatcttttatgtttcacaactaagattgaattgttgccaggatcactcaaatgcaagtcttaaatttttatttactgatgacttttcattctgtaacctttggcatgattatttgttttggggtttgatattttttctacttctttgttgtttctttaatgttcagatagctgatcagctaaagagccgtttctcctcggg

SEQ ID NO: 84018 - DNA, 552 bp, Citrus clementina
  Intron number 1 from transcript clementine0.9_026915m (loc us clementine0.9_026915m.g) derived from phytozome v7.0 (c hr-ID scaffold_20; pos 121032 to 121583)
gactctgagtctgtaagtatccccatacgtccccgtttcattcatcaaatttatcgatgcttatttgtgcttgtttaatatctgatttggggtgaaagctagggttagggtttagggaatttagggtttttccaaaagaaacaattttttggggaaagaaatttgggatgttcgtgattgggttctgagattagcatgtttacaaaaagtttctatctttcgatcggttgcttagaaaacaggaagaagagaacaaaattgttgtgtgctgtcctctgttttttttctttctttcttttttatttgttttttcggctattatttcaaattagatattcattagaaactttgtatttggatccatgtttatctgtttataattttctttctcctaatgatccgtaagcgcacacccaaagaaccatggcatcattactgtaatccattgtacgtgttattgggggcattctacactttctttgcaaactcacttttttcgtgctaactaaccatgtgttatccatttgttagtttatctagttgaaacacaaa

SEQ ID NO: 84019 - DNA, 953 bp, Citrus clementina
  Intron number 3 from transcript clementine0.9_003907m (loc us clementine0.9_003907m.g) derived from phytozome v7.0 (c hr-ID scaffold_20; pos 2748041 to 2748993)
tgaaggtatcctactttcccttaaaacctttttcaattactgctctgtttatggctaataaacctttttcaatttctgctctgtttatggttaattaccgaagttaggagtgattgtctctaagaaaagtataagcataagtttgcagtcttagctctgttgtgggtgatgtggcgagaaagaaatcgccacatttttgtagggtaaaaagaggaaggtattaatagttaggacttaggatccctaccattactcaattttaaatgagaaaatctctttgagaagaaattgtagtaaagaaaatatcctactttttcctgataatctcacttacattacgtaagtacatgataacaatttgatctggtggtttactctctctcttttttttttttccttctttataaaactgatctggtggtttacttgaaatagaactctcaagtcaatattgtgatgagaactgactcacctttataaagatgttgtactagttgggaaaagagaaataaagagtgaaatgaaaattttctaggaagttgtttcggactagattagaatcttcttttttttaacccttaaaatttcttgtatcaataatgtcatattataaagtggaattacttccaatcctggttagtcaattggtttgacaaagaactgtacagaactttcctgatcaaagtattatcaatgtctttaatttctgaaaaatgaaacaaatgctttctgatatgcattattccatctcttttatatcttctcatcagtgatgtctgtcttgttgttcctttgacaggtaaggtactgatcacttgattttgttgaatactgttttgttatccttcaattgtttcacttttggctcgttcaatttggagaatggttctgcactacgattgcttatacttatagtatccctctacaggctggaaatattttaattgattcta

SEQ ID NO: 84020 - DNA, 898 bp, Citrus clementina
  Intron number 1 from transcript clementine0.9_022958m (loc us clementine0.9_020354m.g) derived from phytozome v7.0 (c hr-ID scaffold_90; pos 596239 to 597136)
tcgccggattgctgtcctcacgtcactggatctgggtactttcttttctctctgtcttatctttgtgagtttcttttctttctgtgcatgcattatgagatttcccttgctcttcgatatgaatgaagcccttgatatttcttataacaattttttagattttttatttaatccaagtttttttttttttaaaatacatatagatcattttggtaacatattagaaagccttgcacagttagattggcctatagctaaaacaatattgcctgcttttgtaaatacttcttgatttatttttgcaatggaaatttggatcgattcatatttttcctggatttttaacgtttgtatttaatattacgtaaatatttgaacctgaattttatagatgtaactgtaatcttgactcagagatgctgcctagcttttaataagaaatgagacttgccttcttcaccttggtgacaaattaattgaataacagttatgaaacagagccaacctatacaataaattcaaatgacataaaaagaaataaattaaatattataaaacaggattcatcttccaaatttacatatacacaatggtcttgtttctttccagtataatataatagttttgattctttgccatagattcttgtcatatattcatcacataatggccttgatctgcgttttcatgtgcatcacataatggtattatcttttctgtatgtgcgtcacctgctaccatatgatatgtgcatgtcagaatgacatcttcatatgatcttatcacttcctctcacttagaatttgtgcacttctgaagagagcttcttttttttttatttatttattttcctttgaggggtcagtcaaaatatcttatgtgaagcaggtggagagca

SEQ ID NO: 84021 - DNA, 911 bp, Citrus clementina; identical to SEQ ID NO: 81168
  Intron number 2 from transcript clementine0.9_014252m (loc us clementine0.9_010073m.g) derived from phytozome v7.0 (c hr-ID scaffold_23; pos 1568297 to 1569207 reverse strand)

SEQ ID NO: 84022 - DNA, 251 bp, Citrus clementina
  Intron number 1 from transcript clementine0.9_025125m (loc us clementine0.9_025125m.g) derived from phytozome v7.0 (c hr-ID scaffold_23; pos 3177914 to 3178164)
gagaaattgagtggaagagttgaagaaactcagaggtacgtccttttgttttttgttaattaggtttttttttttgtttatttagaaaaaaacaaatcttgtgattttgccgtgtcatcattcttatcgtgttggctttctcctcttaccggcgaatttgtcaatttagggtttttgattttgacttattcttgaaatcgcttgtgtaatccgtagggttgtcgtttatttaagatctgatcaagaattgg

SEQ ID NO: 84023 - DNA, 629 bp, Citrus clementina
  Intron number 2 from transcript clementine0.9_025542m (loc us clementine0.9_024619m.g) derived from phytozome v7.0 (c hr-ID scaffold_1; pos 10928808 to 10929436 reverse strand)
tgctggttccccattgcgcaatcctcctcagccaggtaccaagcatatttctttctgtgttgcttgtcgcattggtagccttgttttgcttggccttttgcatcccttccttttttttaagggaagggaaggtcctttgatgttaactgtaagttgatagtatgtataataccgtagatttacatgatcactagttctatccttgaggaagggaaatttccgttaaaagcaaaacatcattttttgggctagtaaactttagtaaataatctaatgcagagggtgtcaaatgttttcgtttgtttgctggtatgctaatttgcatcatctcgcagcgttatcctagctaaaaaaattgaatttatttgcatagctcttctgtgagtgcagtttaaatttgtgggtaagagtggcttttgttatgtgtgtgcatgataatcttatacactcaagtgatgtggggtttcgtattatatgggcaggattcttttgtggttttatgttattgatgtcagagcgtcaatcattattgttagaataatttccatttaccaggcttcttttaatgttgcttattattgtttctgctgaaatttgatggttctttgaattgtttactgtagccgcac

SEQ ID NO: 84024 - DNA, 328 bp, Citrus clementina
  Intron number 1 from transcript clementine0.9_019593m (loc us clementine0.9_019593m.g) derived from phytozome v7.0 (c hr-ID scaffold_27; pos 1655328 to 1655655 reverse strand)
ttgagaagcctgccttgattattctgggaaagcaggttcgttttgatcaaaattttaatcaatttgtgggttttttcttcggggatttaatattatgttgcagtgaagtgattcctgtttagttctaaagcaagttgagaaattggaaatgggtgttaaagcttctaatttcgatgaatttaatactatgtgaacataaaattttgaattttccttatgttgtctgttgcattggaagaatgtagttttgctttttctgcccttgatttcggaaatttatgcagaagattgccgtttcttatgacacagattcttgtgtaggcaattg

SEQ ID NO: 84025 - DNA, 754 bp, Citrus clementina
  Intron number 2 from transcript clementine0.9_003871m (loc us clementine0.9_003871m.g) derived from phytozome v7.0 (c hr-ID scaffold_33; pos 1946134 to 1946887 reverse strand)
agaagagagaacaggttctgggtcgaattagacaggcaagaagttttttaaaaaaaattattagtaattttaaacccggggatggccatgttgtgatatttttgcgatcagttggtttattcttcattttgtaatttggctatgaattgagcttgtttgagttgcattggtgatcttagagattttattttgttagagaatttagtgatgaactagaaaattagaagaattgattcaaggtggcaatgataattggctttcattattttagtttaagagtcgtagtgctagtcacaggcaagtatagcattcctctgggttatttaatttcaaatctagattgtcatttagcctttatgtgcagataattcattatgttttgggaactttttggccttttaggacatgatatgtagatttggggaactttttttttcccctgcttggtggcagagttctctgattcttattttgtttccatacagtgattttatgtttttatccaatagtgccagtagatggtatgtatgaggtgaaaatttagtatgtctagttgaattctttttgaatcttttttgcagatcatttcattttgatttttctgacaccatactttggcatgcgattgcaagtttctaatctattcgtcttcttactgggttagctgtattatatttcctttccttgtgctgagaatatcttattcttcatgctgtcagattgctaaagattgggtgaagcaactgactcggtt

SEQ ID NO: 84026 - DNA, 721 bp, Citrus clementina
  Intron number 1 from transcript clementine0.9_019905m (loc us clementine0.9_019899m.g) derived from phytozome v7.0 (c hr-ID scaffold_10; pos 5027207 to 5027927 reverse strand)
gtacctcaactcccccggcggccaggtcaccgcaggttctccattttgggttctttttgtcattctatcaattcgctgaattttaatttatcgatatttaagcttttatatcatgtccttaattcatttctataactcattttaggcaactatatttgtgactgaagtgctgatagttcttaattgtgtagacatcaagattacaattgctttctcccaaaaaaaaaaaaaaattttaagtgctttttttttttaacagcagcttaaggctctgtttaatatagcttttcaaatagagcttttattagtagagtttttaaagtttaaatttgagtttttgctagtagagacaaaatagcttatttaatcttcaaaagctctatagaaaaataaccaaacaatgaccaaaaaaaattgaaaagagcttatggaattaaataagtacttgtggccagcagataagccatacctaagtgtttttctgacctaaaaattgcttcttagagataagagtagtttcttaattcctaaaagtgttttgtttatgcttgttttggcaaaatgctatgactgaagaggctaaaacattttgatttgtttgaaaacatgctaatgattagacacattggaatgatatttatggctgtgagttgacttcatgattatgatgattctaatgcctgtgtttttactatgtacaggtcttgctatttacgatacg

SEQ ID NO: 84027 - DNA, 1042 bp, Citrus clementina
  Intron number 1 from transcript clementine0.9_002125m (loc us clementine0.9_000687m.g) derived from phytozome v7.0 (c hr-ID scaffold_29; pos 385526 to 386567)
cagcctcaggcgccttctccttaccccttaactcggtgagtcgactcagatttctcctctttcagtttttcagtcgtagatcttgtcgaaacgttgtgctttatggattttgttgctcgtttttccgtttaattcatctgggtattttcctgtttgttcatatgatgtattttttttcttttttaagtttttattttttttattacgtaacagggcattaggtcatgaacttatatttttgcatactgaattttttatgttttggaaaattttggaagaagtttaggttcaagaatactgaactggcaaggttccgattccttacagattgttccatgttaatattacttaacctccatctcaaactaagattgcaaacaattaattacttgataatcaaacaagggggaaaaagaaatcacggtaaagaaaaatggaagaaacctttctagccatggatggacaccaacttgtggttttattcgttcattgcctacgtggggctcagattttggtgagagtgtttgttgttgttgaaaatgaaattctcggtaaaattaaaaaaaataaaagttaaggagaaaaactataatttttgtttgcttcaatcggtaacagaagagagagaaatcaaactggactgtgtccaagcctagcttacattttcttgaaagttttgatttttcttgtcttttgtgagtttgtgcttgcagaatagtttaggattttgttgcatcatttacaattaaatcagattgtgctgtttttgtgagcttttgtttttacttaataattacctccattatttccccctgaatggtaatgactatctataatttgcatatgtgtgcacgtatattctaaatggtcggttgtattgttatattattgtggatcggattgtttagtttgagctgtttttggtaatagtgtaaagatggtacaagaatctcatatcgcttttgtttttcgcctattattactgttttagcattgagtctcgcaattgtttttgtataggttagcgaatatcattagaaag

SEQ ID NO: 84028 - DNA, 632 bp, Citrus clementina
  Intron number 3 from transcript clementine0.9_002125m (loc us clementine0.9_000687m.g) derived from phytozome v7.0 (c hr-ID scaffold_29; pos 387104 to 387735)
gctctgtcaaagcaatttgaatcctgaaaggcctggttagtaatagttaatagaatttgaggattgtgcgttaacatttaatttttggtccataaaatggatatgtttgaagtttctggtttgtcttacttttcaatctctaaacctcgtatgaaaatgagtgatgatagttatttattgttcatacttgttgccataatgatataaaacagcaattaggtatttcagataatgtttttagtaagctgtgacatttaaaatgttattctttaggcttgtaggcatttggagatgcactatattttgcatttcagtccaatttgtcttacatttgaggccttgggctttgctttgcaagcttgcatttagaaattgcaaatagggttgatcatagagatgtttgaagagaatgattgttttcatttgacgtatccatgatatcaaggttcaataattttctgattatatttgtgaattgaaataagaaatacagtttttcttagtctctttgagaactttaaggcattggatctaattcaggacctctgtgggaattactgcaccatatattttgataaggttccatgttggttccagattccggattcctcagaacattggattccagcatt

SEQ ID NO: 84029 - DNA, 762 bp, Citrus clementina
  Intron number 1 from transcript clementine0.9_007213m (loc us clementine0.9_007214m.g) derived from phytozome v7.0 (c hr-ID scaffold_53; pos 240553 to 241314 reverse strand)
gaggaggtaagagttaaataaataaagttttgatttttttttttttccaaattatggataggattggctagttttgatttgttgatggtgttggaacggtttgttttttcttagtcagggagtaggcttagcttaatgtatgtctgttttgctcttttggtgtcatgagtattaattgtttaatagtcggtggtgttttgtagtttttgctaatttttactactatttctattgtacattactcattttttatttttcattttagttgcatacaggtagcatctatttcatatttccgaagaggaatactattgttgtccaatattgttaaaatactgtataccttacttgatgttaaaatatgtctttgtattttttctaagttagttgttgattggttgttcttgcttatgctgagtgtttgtctgatttacttaacacgccgtgaattggatgaaattttgggagttttcatttctcttgttaatacttactaatgtgctcggtattagtaagcttaaaactccatatgtgctgcatttggctcttgttgaataaataatgattttttatggttttcaagcctaccaattatggtcatttcgttacataacataatgcaacagtgtgttattttatatggaaagttaaattatttctttcagtgtctcccttaagtttgattaaattgtttagatcataatcatgttcttttctattgttgcaggttgaggggcaaacagaggaagtcatttttgatca

SEQ ID NO: 84030 - DNA, 608 bp, Citrus clementina
  Intron number 1 from transcript clementine0.9_015365m (loc us clementine0.9_015365m.g) derived from phytozome v7.0 (c hr-ID scaffold_27; pos 1894888 to 1895495 reverse strand)
ggaaccagttcgcgttctcgtcaccggcgccgcaggtactgtaatctctcactccgtcgattgagatctagcgaagtcttattattattattattattattattattattattatttaaacagattactgctttgatatgtttttatgaagatctataattgtaagaaatagttatattaggtaccgtacacgatcgggaattaaaaatgttagctttaaactgatctgagtatcaatgtttgtttcttagacttgtgtgataattaccacttgaatattttggtctaatgcccgaagtttgtcacgcgatccggctaatctgttagttagatgattttgagctaatgtaacgtttattgagactaaatgattttttgttttgtcattggtgatatgtacacattttcaaaaaagaaaatttcatctgttttagatatacttggatttttaataaattttctgttcctatgtttcataccaatttgattattttaataccaaatttagctaagttattctaatacttgtgtgtttatacattgatgtattttgttatgtgctgagactgtgttttgctatgttaatggggttgcagggcaaattggat

SEQ ID NO: 84031 - DNA, 615 bp, Citrus clementina
  Intron number 4 from transcript clementine0.9_009530m (loc us clementine0.9_009530m.g) derived from phytozome v7.0 (c hr-ID scaffold_10; pos 2046956 to 2047570 reverse strand)
gcacaggccttccaactttattacatttttgtcaggtaaatagccttctttcaaagtcaagaatttaagttgttttgtactgatgaatgaaccatttcttcagttagtgacctcgcctaattaatctagccatttggctgctagatagccccgcatatatgtataccagcttttagacaggcatacatgcacattggagagatcacttgtgcataattctcttgtaaaagctaaaaaagatgaaaaaaaattttaagagttaattttgtctttgacaagatgatgatgagagccggtgggtttaacctttgcacaaattgcatgttgtcagtttgctgacagtgagactttttttgacaatgaatgaagcagcctcaagcacttagagggattcatttcttttcaattaatccagctttgctgcaggctacatgcacatttcattctcacacatgcaactgaagaaatatcaatttttttaaaacctttttcctaaagtgtttcttaatgacaattcagatttcattacctgcagttttgacactatcttaagtgttcttgctaaatttatttgcttttgatatttcaggaagcatttaccacctatcagatcat

SEQ ID NO: 84032 - DNA, 666 bp, Citrus clementina; identical to SEQ ID NO: 80642
  Intron number 3 from transcript clementine0.9_020622m (loc us clementine0.9_018933m.g) derived from phytozome v7.0 (c hr-ID scaffold_23; pos 2507054 to 2507719)

SEQ ID NO: 84033 - DNA, 894 bp, Citrus clementina
  Intron number 1 from transcript clementine0.9_021182m (loc us clementine0.9_016855m.g) derived from phytozome v7.0 (c hr-ID scaffold_67; pos 524169 to 525062 reverse strand)
ttttagaagacgagcttcagctcctctgcgaatacgtatgtttacaaaacaatacatattgcttttacttttattgagtataaagagttagggtttcgccttctcgtttttgttttttacttgtcgttatctctgaataattgaaagatttttgtatctgttgtcgatgtttacttgttaacaaaaacaattcatttattagtgatcagtgaaaaataatcatctctttttaatctgtcttgataaattgttgggcattgtaatttgtggcatgagtagaattttttgaatgcataatttgtgttcctatttatgtactctgaagtggcatgtaatatgcacattagggtcggtcccacattcggcaactgtgtaccaatatttggcatcttgatcatagtattgcttttgtttttagcatgtattttaattcttagtctggtggttttgcttttgtttcatgttctgaattcacaatgtagttgaattgggacgttattcattatggtgtagaagttgtactagtccggcatattcagctgaacaaattcttcaagctgggtggtaatagatctgttgattcattgttttggttaacagattccatatatgaatgtagatatactacaatcgttgactaaatactttggttatactattttattggatttttttttatttgttagttattctttttccttttgggaaacttttacatgcttgaattaaccatgtgttttcacgtgatgaaactgctggctttgataaaatgtatctaatttttggagaaaagatagtttatatgttttctgatttttgtttacctgatgtctcctaactagctgttgtgtacaaaaatatctcaggtgaaagaaatccttattgaagagtcca

SEQ ID NO: 84034 - DNA, 358 bp, Citrus clementina
  Intron number 1 from transcript clementine0.9_001200m (loc us clementine0.9_001200m.g) derived from phytozome v7.0 (c hr-ID scaffold_53; pos 1523842 to 1524199 reverse strand)
ccattgagcaagaggtgggtgagattggatgttgttttggttgtttttattcgctgtttgattaatcaagtgatgttatattgttctagtatgattgagcttttcagttgaagttttcttttctctctagctaggcctaggtaatgataagtaatttcagtttaatttactataatagtgagaaagtagaaccatggatattttttaacctttgagaatgaggatctgaggaaacaaattttaagcttcacttcgtccaaccttccccttctcttttcttttgaattgagcattaatctattgctattgctgtaattgttcaggtcagaatccacaagtttttggagaaaacgaaaaa

SEQ ID NO: 84035 - DNA, 372 bp, Citrus clementina
  Intron number 1 from transcript clementine0.9_018948m (loc us clementine0.9_018932m.g) derived from phytozome v7.0 (c hr-ID scaffold_1; pos 8209411 to 8209782)
cactcagcttttgttgtttcgtgtcccaagttcaggttcgttcctaagaaaattttagaaaaggaaaaaaatcattaatcgttccgaaaaacaaaaactaaaaagaaagagaaaaaaaaataaaaatcccttgattctctcaaaaccctaaaaggggaaggttatattttccaaaatcggatctttttatttcattctttcactgtacggtattaataataacccagaaaaagagaaaaaaataaaaagctttttattcatcagtgcctattagatctcttaccaaataaaagaaaaaaaaattctctaaaaatatattctttttctttcttttcagggtttcaatctgggtgaaggaggaaaaagcaaaag

SEQ ID NO: 84036 - DNA, 860 bp, Citrus clementina; identical to SEQ ID NO: 78207
  Intron number 3 from transcript clementine0.9_010492m (loc us clementine0.9_010492m.g) derived from phytozome v7.0 (c hr-ID scaffold_120; pos 334412 to 335271 reverse strand)

SEQ ID NO: 84037 - DNA, 1028 bp, Citrus clementina
  Intron number 1 from transcript clementine0.9_028710m (loc us clementine0.9_028710m.g) derived from phytozome v7.0 (c hr-ID scaffold_51; pos 467036 to 468063)
aagctcgtttttggattaaatttgccgaagacaaggttcgcatcacaacttttcttgctaacacgtttataaatttaattaatcttgtcgggtttctttatatactttaatttttcattgtatatgagaaacatgactccctaaacattaatttttatctactattaatgctcaaactaatgtcctcgcatgtgcaaaatgcattcacggccgactaagctcaatgaaccttttattttacattagagaaaattatcaaaaaaattcggttaattactttaaattttttacctttagaaatttttcttaattaatcgtggattttactgcatcaagggtaaaatattaaaatataattgttttagcgatagggggaattttgaggactttcgaaacatgaaagcaaaaatataatttactaaaacaataagaggattttttttttaaatatttttccttttatatcattaagtatttgtttgatatgacttatttattactaataagtgtttatttaatcaaaaaatctcatttcaaatttttattattgtttagttttatttttagaagaacttttggggttaaataaattcttttacctatactagtaaaaattttaatttaattttttggaaatagaagtttgaggattttttaaaaagttaaatagtttaaaatgttcatcatttattttataatattattttatttatttatttcataactttactttataaacttgtctattaaagttatttaaaaaaattaatgaaaattttcattaacaattaaattttactaacaaaaattctacttgaataagctctaaaagttataataaattagtctaaaaattagtgggtaaactcttctagatactttgacagtttgaaacgtctaggctttgaaagatactttgatgcgtgtgtacctattatctaatttctttttacctcgtttatattgttaatcatgtggtgataagaattagatataaaatcttgtggcagggagtagctgtttggaaa

SEQ ID NO: 84038 - DNA, 379 bp, Citrus clementina
  Intron number 1 from transcript clementine0.9_024608m (loc us clementine0.9_022035m.g) derived from phytozome v7.0 (c hr-ID scaffold_1; pos 6228654 to 6229032)
ctccgatattttcgcctggttcactcagtctaaaggtaaattgaaaattgtttgatttctggggctaagagaatttgtgattgaaatttgataatttggttgattagctgacttggtttttgatataaattgcaaatttgagttaaagtttcgatttttatagtttatatgactctattagaaagggatttttatttttccccccttttgtgattgttatgatgaaattaagtttttttacattggttttgagatttcacatgtttagatttcacatgtttggttgattactgttgattttctgtttatttatttatttatttattattattattattattttggtctctttttcttccttcagagactctttatattg

SEQ ID NO: 84039 - DNA, 468 bp, Citrus clementina; identical to SEQ ID NO: 83624
  Intron number 2 from transcript clementine0.9_024608m (loc us clementine0.9_022035m.g) derived from phytozome v7.0 (c hr-ID scaffold_1; pos 6229093 to 6229560)

SEQ ID NO: 84040 - DNA, 257 bp, Citrus clementina
  Intron number 1 from transcript clementine0.9_034021m (loc us clementine0.9_034021m.g) derived from phytozome v7.0 (c hr-ID scaffold_1; pos 10431611 to 10431867 reverse strand)
ctcattatcaagcttcatagtttgcttggaaacaagtaattaattaagcttcttctctttttttctctgttttttctttttaaaatttttatttgttttatttgtttaggggtgggttaattttaattattagatcttaaaaaactccttaaaaaaattttttttgggggggggggggggggagggggggttgttttgaatttgtgtagtgtgcaagtgattgttgatagctggaagattactaggaagaacagata

SEQ ID NO: 84041 - DNA, 200 bp, Citrus clementina
  Intron number 1 from transcript clementine0.9_034496m (loc us clementine0.9_034496m.g) derived from phytozome v7.0 (c hr-ID scaffold_20; pos 2548302 to 2548501)
agctgaggctgctcgtaacatcgtcggcatcatcggtaaatacttttttttttctttttttgttttgttttgttttgttttctgtttttgctttcttcgtttccaaaaacatttttgttaaatgattaattaatcaattttgttttctgcatttccaaaaacaattttgtgattgttattatccttaattggtgcaggga

SEQ ID NO: 84042 - DNA, 820 bp, Citrus clementina; identical to SEQ ID NO: 80651
  Intron number 1 from transcript clementine0.9_019632m (loc us clementine0.9_019620m.g) derived from phytozome v7.0 (c hr-ID scaffold_29; pos 2861552 to 2862371 reverse strand)

SEQ ID NO: 84043 - DNA, 450 bp, Citrus clementina
  Intron number 1 from transcript clementine0.9_000365m (loc us clementine0.9_000365m.g) derived from phytozome v7.0 (c hr-ID scaffold_10; pos 5399852 to 5400301)
ctttccacaaatccaagactcttgacaacaaatacgtaagcccatttcgttaattttcagtaattcgatcgtctcttttactcttttgttgagattaattgtagaacaagaagggctgggttgggttagggtttttgattctctgttttgtttgcatttgaagaaactgtctgttggtttacagttgagtgaattatactctagtgaaatgaattgtgtgtgtttcttcatttagttttggagaacttgagtgaaagaaaagccgtgattgaagtcaaataatgtgctattgctatgtttgagtagtaaaaaccctagaattgcaagtttatttaagtgacccaagttaggcgttagggtttttgttggttttgcaatgtgaattacttggactggagtatttggaatttgactgtgtggcttttgtttgtctgtcattgtttggtttag

SEQ ID NO: 84044 - DNA, 481 bp, Citrus clementina
  Intron number 2 from transcript clementine0.9_011628m (loc us clementine0.9_011628m.g) derived from phytozome v7.0 (c hr-ID scaffold_23; pos 399730 to 400210 reverse strand)
atcgaaaaggccttctatgtactttttttttttttttacactttcaattttctgtttttgattttatatttgtgctcatgtaactttgttcgtctatttggtttctttttttcatattaaacatagttattttgagatgaatttgggttttggtttgctaatttaaaacttttgtggtctatttgtattgtcctttaagttgttgattcataccctttgactgttaaagaaaagaaagagagaatgtggaatctttgaatgaccctttttaatccacttgctttttaatggattctgggatttcagatgcttttcttttactatggttggagtgacaaaaattacattcctctgctttcttggtttttggatatggaatttctgattttcccctccagtggagaattttgatatgataatattttaagaaccgtgtccataattgatttttggaacaattctttttcctatcttttgccag

SEQ ID NO: 84045 - DNA, 471 bp, Citrus clementina
  Intron number 1 from transcript clementine0.9_025740m (loc us clementine0.9_024235m.g) derived from phytozome v7.0 (c hr-ID scaffold_53; pos 415394 to 415864 reverse strand)
aaaaaaggagtgatccggatcagtttttgaggcaagtaagataacccatcaaggtttttggattcttttgagcgtttgttttggttttttttattggttttgaggtgagaaagttgtttggatgatataaagcgtgtcctctggatgaacgtttgatgttattattgatgattggttgattgattgctgtcacagacattttgctgctttattcgtgcaactttatttatggatttggtctggctttttgttctatttagggattattgaaaatcgaggatattgatgcgaattttgattgctagaaatcctaattgatgcctctataattatctttccttttctttcatttttttttccagtttagattttttattctttttaagatgtatccaaactctcaaagttcttcttttgcttgtttctggattttcagcctaccaaagtgagaatattgatcaatctgcaact

SEQ ID NO: 84046 - DNA, 941 bp, Citrus clementina
  Intron number 1 from transcript clementine0.9_004343m (loc us clementine0.9_004343m.g) derived from phytozome v7.0 (c hr-ID scaffold_10; pos 2221486 to 2222426)
tcctgcattcagcctctggaagaggacaggttgaggtaagggaccttctgctttctaattgttagatgcctaattggtcatttgttcacactgcagagtctttgattttttggcgagcagatacctaattagctacaagtttttccctgtttcttgtttactggaacctttttatagctaagtttgtgtgatggttatgcaatgcatcagcatttttaatgaaaaagtctgaggaatacttagacagctgggttttccgaagtaaatgttgccggtggtccttgtaagagacaattttgctcttgttttcacatttgagtaaaattctaaacgaatgctcatgtcttttggaagtatgtaagatcgaaactataacattctatttgagttgggagagattcggaattcgattcattcattctgaccaaggaattaaatgttgcaattgaagtgcatgtaactttgtgtgccacagagttagaattcactctgttgataggtgatgctatcctcatctgcctgattgaacttgctaggtcatataaatggtaagcccgaagtggtgaagctgcaaaatgtgtttttcattaatgcgtttcttggatgcactggaaaaccagtgcaatgtcccatttgttttggcttcaaaagtctccctcgaagaaagaaaattttgaccactgcatgaccaagattggaagacaaaacagatttcttaaatttggattggagaatttaagataatttttttggctgttgctttccatttagaattacaaaacctgcatatttttatgaagcctatgggagaacaagattcagtttgttttttcttgcctaccgaaacaacacgcttcattggaccaccagccacctgagaattgctacttacatttctgttcatctgttaatgcaggtagtgaagaatcttgtagaatcct

SEQ ID NO: 84047 - DNA, 675 bp, Citrus clementina
  Intron number 1 from transcript clementine0.9_013499m (loc us clementine0.9_011146m.g) derived from phytozome v7.0 (c hr-ID scaffold_33; pos 335476 to 336150)
tctcgtctcttctctttcccttggtttggaatttggtaaagcctttgatttattcatcagaatttgtaaattttgtatcattttctcatctgggtcccttttttttgtcttttgtattgttaatttagcttgatttgtgaaaatacaagtgggtttttgttttatgtggagtggatttgatttgattggattaggatacgtgtatttacagccctgatttgattttttttaaatcataattcgtggtttgaatgttatgacttttggtgtaatttgttgtactgtgattgttttaatattgattctagttttggcttctgattttgtgcttttgttgtgtttatggttctgtggtaatttgattgtcaagattttgctttcgttgatcaatttgttatatcccgttttccaattttctttttcttggcttcatttgtgaggaaatttagttcagcatgaatttggcagtgatgttatattttctgtaaaaattctgcttctattttgcctctgtattttacctgtctgtctcatccgaaatgatgatgtagcttatgttaattgctgtgcaatattgtgataaaatttattgataaaatgtcaagtgaggaaattaactctagtcctggtttcttggcagcttgtataaaagcgatacggcagaggttgaatctt

SEQ ID NO: 84048 - DNA, 782 bp, Citrus clementina
  Intron number 3 from transcript clementine0.9_013499m (loc us clementine0.9_011146m.g) derived from phytozome v7.0 (c hr-ID scaffold_33; pos 336987 to 337768)
cactaaacttcggtggtcggtatgttttgattatctgctcatctaatgctcagttttttgggaatgtgttgttttatgttaatagatatggcagtattaatagatttgttggcattttccaatctgcactctgaagtttcttttctcattggtttgattcataagaatgaagtgacctaatgccattttgattgagctgggtttgtactgatggtttgaaatttcataagcattttattatcagtaaggcctatacattttcaaatatgacaacttgattatgttctttttactggcatttaagaatattatccttttgtttgagtttcccaagttcttaataatttcttgtgacaaacttgtcaatgcatctatttagtgctttattattaatttttttcctttctcctctccatcagtattagcagaagaagcaacatcatgcacatgtaaaatccctaacattcagtaagataaaaagtaccaacagttaaatggtaatttttgtaaatttaaactatcaagtgtatctgtgcttctaattttgaagaatcaagcttaaaaatagctctcattgaatgactacccactattcacaaccgttacctatgcatttattgtggataaggatacttatccgctaaattattgttatttaatttaacaagcatgcacgtaattcgtgcttttgtgtagcttattttattgtaaaagcatctatattcaccaagtaagttgtaatggtatctctgagtgaagatgctttttaatatgcagactga

SEQ ID NO: 84049 - DNA, 856 bp, Citrus clementina
  Intron number 3 from transcript clementine0.9_007964m (loc us clementine0.9_007964m.g) derived from phytozome v7.0 (c hr-ID scaffold_20; pos 2388261 to 2389116 reverse strand)
taacatttacaagatttcaacttcgttgtctccgtgtatgtttctttttgttagaattctcagtatgccgtgtatgcttcatcgtattcttctgataattaagttggttttattcagtaaatgagaatttaattttccttcatttttctgttttggaacaattgtggtacttaacttcatactagggacatcacaacgaccaatatgttcttttttttccctgacagactctgaaatgcctttaaaattattagagtagagtttaaaatgcttttgttaagtagaagtctccacttttaaaagtacaagacaccttctagttatgtttctgcatacccaaatcttactttgtgattagcttcacccttccactttttttttctattttaggactgattttgttttcctatcaataagacttgttttttactcaacttttactgcttttgtactttatctttcttatctaactaatttctgtacttcattaaactgaagtatcttgatttcgatgtgagaatacctttaagcttcttccagaagcttaaactttttagttacttgagtgatgcgtaaccaattcttcttttgttgtatagttgtaaatgatatgagctaacttgttttcttgaacagaacagttgctcttttttttttaatttaaggaaaaaagaaaaagatgaaaacttcttacttcttcagccacatacacagttttaatttaccaatttgagttacttcttcttttgtctgctcaacaagttgtttgagtagacattgtcagtctttttatgaggtaaatttaaaatgtcaaacaacagatagcaggcccaagctagttgctggatcacctgaa

SEQ ID NO: 84050 - DNA, 919 bp, Citrus clementina
  Intron number 3 from transcript clementine0.9_002761m (loc us clementine0.9_002761m.g) derived from phytozome v7.0 (c hr-ID scaffold_1; pos 2337228 to 2338146)
tccatcttttggtagttcaacgtcatcattcggtggtgagtatgtccatgaagtatcattagtttaattattattattttttgttaagttttgtttctcctccactctttgcctgacttgttattacttttgattttaacttttgagatagatggttatgattctaggtcaataggtgtttcggggcactaaatgtgcttagtgtcctaatgttattctggcaataatgcatggcttatgaatagaatttattgccggtgtccatatgtgagaaattcagctgaggtggatgccaacttaatggcttttaagtttttgcttatgatgaccgagattcttcttctatgtatagctcacatattttctcttaggtttttgatgctcatgtatcttttattttgtttatgtccaccagataatttttttacgataagggtaattggaatgagtaatgttgttcttttttttttcttcttttctcttcccactatatataacttcatttagatgatagagaaacacagtatgtcaaccagagttaacccatttgatagatgctatgtatttgctttatcatccttctatagtatcttatttggtttatctttttttctgttttatattttattttctcttgcactggtgtgccttgatcctctctaacttaagggtcagtatgcgttgataagcccttttgatttaagtgggatttttttcccgaaagaaaaataaactaaatttgaggagtaattttcatcttttactgtatttgtgttatatcctaaaattatttaacatattttattattcttttttttttctggttccttttcatgagaactcacattaaatcttgctctctaactgtatgcatatatctccagggtcttctatctttagccagaagcctgcttttgga

SEQ ID NO: 84051 - DNA, 984 bp, Citrus clementina
  Intron number 4 from transcript clementine0.9_004247m (loc us clementine0.9_003424m.g) derived from phytozome v7.0 (c hr-ID scaffold_67; pos 1053712 to 1054695 reverse strand)
ctcttaaatcacatattttggggcttgaaagcaaggtataagtcattgtttttgattctgcagattcttatgtgttcagtagttcttaaactttgatagttcagcctttgaatgaatgaagtgggtgacatttagatacgggtccttaattgtggaaagcccactgagctcttaagatcattgatcatttaaaattttacagcccattcctcatttatcttaccataaaaccattgagcaatggctctgcttcctattttttatgctatgtgcatatttggtggaagggggtatccacactatctaatattggaatattcaaaatgttactcttggaaacagtgcagaataccataaagtgagatgtaagacaccaagtctactattcttttgggttttgcttcaagagttgacggctaagggtgacttatcacacatatatgataaatgagtgttttcaagttctggctgaaattaatttatgcttgaactttgatagggaagtctaggaaaaagttttatgctcagagaatttgaagtctttccttaaactacacacgatgactttccagaaaagaaatgagtgttgaagagaaaaaaaaattgtatttctccttttctttttccagtgttgcaaagtagatgaagcatggggtgagggcactatgtctctcttttctggttgccgcttaactttttcttatatccttctactttgacatggaaatcttgtggtcctttgaatttttaagtactagcttccattcactttcttttctattactgaatttaaaagagaaattcagaattttttcttgtgagtgaatatcatgctgttctgagcaaataagattttttaacattggattagacctgagaacactgaattttgtgaactgcctgtttgttcttgctctgtttttttaacattccctactatcagcttcctgcaattgttacagttaatttgttattgagttcagg

SEQ ID NO: 84052 - DNA, 667 bp, Citrus clementina
  Intron number 1 from transcript clementine0.9_003032m (loc us clementine0.9_003032m.g) derived from phytozome v7.0 (c hr-ID scaffold_20; pos 1878968 to 1879634)
taacaaatcctgattgagtttagtataaggttgaagtaagtttttttttttttttttaaattaaattttgtaatttcattttattttattgattatgatgcctctgttcttcaagttttcttagcagttattgtttttgtctttgtgtttgattcagctcttctattttatttttatttttatctactactctgtgtgcataattgtgtatgccatgatgaattcttaattggtgaattagaaaagaagatgggtcttaaaacttaatcctgtcgtgaattttgttcccgtaggtattttttggctgtaattatttatcctagttttatgttttattgtatgttatcggtttttgtgatttcaatttgattttgttttcttctaaatttgcttttggatcctggattttctcttttcagcattcttttgtttagcttttctttaacttatttagtgaaaagatggaagcttcatccttagatcctatgttttaactaatataaatatttggtattgttctgggaccttctcaaacttattttatacgctgtacatacattttgttaatagttttgagattcttggaagttccatttcgttgttttatctcaaatgcgtgtatttatttacagggaaagccagagtcctatttggtcgtacagacgga

SEQ ID NO: 84053 - DNA, 685 bp, Citrus clementina
  Intron number 4 from transcript clementine0.9_024383m (loc us clementine0.9_024383m.g) derived from phytozome v7.0 (c hr-ID scaffold_1; pos 10212690 to 10213374)
cacctcttctaaaggtctggatctgttctttgctcttgtcaccaacaactttgctgattcgtcttagaaactactgtgactcagtcagcgtaaagcatgaattgtcaatgaaaaaaaccagtaaagtcattaaaaataaaccgtagattaagcaaattaaaactttttgaccgttccttgtgtcagtggtttccttttttctttttcttttttcagttgaaagataacattcaataggttcttaagacgctatgatgttatgatatttatgaatctgtttggctacactttcaacttacatttgacagcgcttttggccatttattattagcttgctgccaacagcaactgtggcttaaagtcacctctataaatgtataatatcagtaagagcttgagggtctgtttggcagctgtggttctacaacttaaagttgtttgataagtacttaaatcaaagaggtttaattaaaacactcatattatctttactatttttattaaaataatatttaagaaatatacttattccctagacagtttcctctacactaataaagcttccaggccaatcatttattgacttctaagccgcaagtagtctcttgttttatctgcttgcttcgtcgtgtaaactttcgttttatgcaatcaaacaattgacttatgtttcagcccaagtcgt

SEQ ID NO: 84054 - DNA, 606 bp, Citrus clementina
  Intron number 1 from transcript clementine0.9_024392m (loc us clementine0.9_021313m.g) derived from phytozome v7.0 (c hr-ID scaffold_82; pos 279090 to 279695 reverse strand)
ataccgccggaagtatgcccctattcttcgatctccttttttctttttcttttttttttttttaatttgattgacacttcttcatttttttttccttttttgagattgttcgttgattgctttgcttaattttggtgatttgattttcgttttgaaggtttagtttttaatatgagagtcagctgtccgtctgttattacactaattaaatgcaatcagctttgaagatcttagctgtgtgaatgcgtggacataaaaatcttttctaagtcctgtgaatttaatattgtaatttaaaaagtgaacggcatttttttaacttctctctgtagataagttggaggaagaagtgttgtagatatttttgaatggcgttaaggttatgtttggtttgcaacattagctgcccagtgaaaaagtgtgcgtttagctgatgtgctttcagagttgcaaaatattcccttagtcaagttgtctacgaatgttctcggaatttatggcattaaaagaattctttatcctgctactgcttcattttagcatttcgtctgtttttgtgtgttatgtccagggcgaattccttttgcatttctggaagacattcat

SEQ ID NO: 84055 - DNA, 718 bp, Citrus clementina
  Intron number 1 from transcript clementine0.9_007011m (loc us clementine0.9_007011m.g) derived from phytozome v7.0 (c hr-ID scaffold_43; pos 904233 to 904950 reverse strand)
aatctattcagaaagttttgaatcaggtattctcctctttggaaatttaatgtttagcaacgatattggtaattatcggtttgtgtcagctattaatcaatgtgttcgagtatgtagagtttgaattaagtgctcggtcactagccgttgtatttttttaagtggatttaagttatcttagtcagaattaatcttttgttatctttgggatcaaggtgttgtgcttttaatccacgcctgctctgaagtgtactcattagctgccaagtataggttttttgggcagttggtaagtattagctgcaaagtaaaagtgcatgtttgcaaatgctttaactgctatgctatcagttacttatatacccgtaataagaatttactgtagctttggactgtaagtactatcacaatgaaggtaaaacctgcatggtaattaacagcagttgacttcagtcctggtatggggccttaagatgcaaacaatcttcagtttcttttcttttttactcttttgtggtacattggcatattattacatcatagaggacccagtaatttttgtcgattctgcaagtagtggttctcctttgatatttctttcgtgctttcattttattttcctgaccgtcactttctgtggataatgttttgcttattgttttttacaataaatcaacttgtaggtggagtattatttcagtgatttaaacttggccac

SEQ ID NO: 84056 - DNA, 855 bp, Citrus clementina
  Intron number 1 from transcript clementine0.9_000982m (loc us clementine0.9_000982m.g) derived from phytozome v7.0 (c hr-ID scaffold_38; pos 60691 to 61545)
ttcttgtcctaaattttcagtctttgaacaggtcagttttaatctctgtctttattttccttcttgaatttcattgattgacttgttgtttgtcaattggtatacacgatcattgatgtgaattggagtgaattatgatcttattattgattctctattagaattgagtttgtttaaatttcatttattgactgatcttctttactttttgtcaactcctacttgtcattttaatgaggttttgagtttgttctgaattctaatatatgctgatctcgtatgtaccatgagtgtttttttttttaaaatcattttgatctgattgttattggattaacttcttatctgttagctttgtgttcacgtaacataattaaatttatattttccaaattaaaatatggtttgcaagcttctaatttgggatgaatgggagaatcaagccagtgggatatttataggtgagaaatgggtgcatatgtttttgattccaggcctgcgctagagtttttatcgatttggaacttccatgggaaatgtgtctaggtccagttttgatatttgtttaattctttggataaagtgcttttgatgaggttttgtggctattcatcatattcgctttgttctatgtatgagtcttaatactttggccagcttccaataatgaattatatactgcagctgtcggtgttggattgacttgctgttttcctacttttctgtctgtttagctttcagttgggggggaggagatttgggtggttccttgaattgttcctggttctaactttgttctgtttgttaattatgattacagatttgatcacatcttggatatttgatattgttctg

SEQ ID NO: 84057 - DNA, 958 bp, Citrus clementina
  Intron number 2 from transcript clementine0.9_002096m (loc us clementine0.9_001962m.g) derived from phytozome v7.0 (c hr-ID scaffold_98; pos 44473 to 45430 reverse strand)
gattcagtcaagtgagatcaaggacaagaaggttagtctcagtctttttcatcatgctttcctccatcttccatttgcgtgactgcatagttctgagatcaagagatgtgctattgtctgggaattattaattttaattgttttggcttggttaaattctgctcatgcatgctcaagtaccgtaaccgcattattttaattagtctagtacttttgaactttagctgtgctgccattttttgtttttgtctttgactagtattttaactataaaattgtgtagcttagatgtgtttttggtacatcaaacttgaaacattcctcaaaactaaggaaaacatcatgtgttacttatacagttttgcctcacatgtctttgtacgacagttgatttatgcttctagggaaatagacaacaggattggtcatgaaagtagtttagtaagggaaagctattaaagatatgtcttatgattctaccacagttgttgatgacttaattttacattgttgaaatcaatatatttgctttcatgtattggtctaaggctttaataatttatcattgtgttgtgtgcaactccttgttgcatagctttatgaggttaatagttgagtgaactgggtagtttgacctgtgctttaatattatgtttctataaacaacatatacacactcgaagagtgaatggtgcatccatctacataggctttatgatgccaaggatttttagtgttttcatttttttccctatttattttgtaccttggcatgattcattttaagatcgactaaagagaataaatgtttgtgtcacatctggtatccaaggtctgctatagatttttcaatttctttaatagttgtattgatttagcatattagctattttatggagttggggtcggcagttaatctttttcttttggtatatgttgacataggtcagtgcctctt

SEQ ID NO: 84058 - DNA, 344 bp, Citrus clementina; identical to SEQ ID NO: 83849
  Intron number 2 from transcript clementine0.9_009431m (loc us clementine0.9_009431m.g) derived from phytozome v7.0 (c hr-ID scaffold_1; pos 5589505 to 5589848 reverse strand)

SEQ ID NO: 84059 - DNA, 418 bp, Citrus clementina
  Intron number 1 from transcript clementine0.9_004267m (loc us clementine0.9_004267m.g) derived from phytozome v7.0 (c hr-ID scaffold_1; pos 8422460 to 8422877)
atcttgattccggcgagcttttagcggtgaagcaggtcctgttattttttaattttgattttttttttggctattgttttttcttgtcaatgaataaagtttgatttttggatatagagtttggtttttgatgttgcttcttgtcaattctttagtgggcactctttgtgtttcttcactcttttgcgcttgggttcttattctccaagaataaagtttgatatttgggttcaagcttggtttgttgagttgcttcctgtgaattctttcgttggtgttcttaattatatggttgcaatttgtatttaaaatataagtcatgtaattttggtttattttgtactagggtttgatagagtttgtttttcgttgttctttttcaggtcttaattgcggcaaattttgcttcaaaggaaaa

SEQ ID NO: 84060 - DNA, 996 bp, Citrus clementina
  Intron number 2 from transcript clementine0.9_008974m (loc us clementine0.9_008974m.g) derived from phytozome v7.0 (c hr-ID scaffold_20; pos 2808982 to 2809977 reverse strand)
gcccgcattgagcaagggttatttacttccagaaggtatatattgccatcattaaagtcctcgaactgttgtttgaaatataaagttctgtcagatttgtgttaaggtattgcccgtatctacttcttcgtatcatacattctcctttgcagaaaggtcctccaaaattactggtgatagttggtaactttgacagtgttatttgtttgcctatgaacttggaaagcttttaataactttttcagctgcatttaatctcaaaactaatttcttttacacttgggtatccaaaattgctgtcactgttctgagcatctaacggtgggtaatagcctctaacctgtttgaagatttaagcagacttgataaagtgctcttttgacagtgttattgaaaacaaaactaaaatcaaataccaaaaactggagaatgtccgtatgtgcatgcgttgtagttttttggctaagcaggtgtcctgctgtccgtttggtcagattgtggaggaagattcagtgcatatacagccattgatattgtgtcactctgaagtgttatgggaacttaaggtgggttgtcagggactggatgtgtgtattatgaatgacattgtacttgtgaggagaaaaccttcttctgttggttcttctccgtggaagtttatttttgcactcttgtttgaatgttttctcaatgcttatcggtatcatgtcttacttttacctgtaatcttagaaatattttctggttaatttgataactctttaaaacaagcagtagcttggttggtatctacaaagggacgtgaaaatctcaggaacaagtggattaatctgtttcctcatgtgtgcatgttattctcaactgtatcaacagtactgacaatttgttcctgtgtttttagtccttttctttctcttagttatcaggattactacttactggaacttctggtattttgcagcgccagcacgccttccatcatttcacacttgtgtt

SEQ ID NO: 84061 - DNA, 664 bp, Citrus clementina; identical to SEQ ID NO: 82168
  Intron number 3 from transcript clementine0.9_024512m (loc us clementine0.9_024512m.g) derived from phytozome v7.0 (c hr-ID scaffold_33; pos 942614 to 943277 reverse strand)

SEQ ID NO: 84062 - DNA, 766 bp, Citrus clementina; identical to SEQ ID NO: 79767
  Intron number 1 from transcript clementine0.9_026208m (loc us clementine0.9_025862m.g) derived from phytozome v7.0 (c hr-ID scaffold_101; pos 422101 to 422866)

SEQ ID NO: 84063 - DNA, 631 bp, Citrus clementina
  Intron number 1 from transcript clementine0.9_024257m (loc us clementine0.9_022926m.g) derived from phytozome v7.0 (c hr-ID scaffold_53; pos 136239 to 136869)
ccagctactcggcaatagagttgagagttttgactgtaagctcactctattaatacccttttctctttgttgccattccattggtgccttttcttttctttatttttttttttttggcatctattataaactgatgaagaacttgagattgagctaaaggttcattattttgttttccatgaaatgatagtaatcaagttgagattagatatttgctgcataatttttgagttttctggttagtatatagcgtcgcataaatgatgtgattgagaataattgcattaatgaatgttgaatcgagtaatattaatgttagaattttgtacaattaatggttattgacgtacacaatgaagccctttgtatccattaattattagccacttgagaaaccattttacaggactactgaatcagtttaattataattgtaaagatatcttgagctatgaaaattgaaacgtaatgcataacctagcttaattctcttgaagaacataaataaattatattttaattcattggatttgtttaaacaatatatgtaatccaagaatcccatttagaccattgtcaagattttgataagtatgaatgctgcaatcacttcattgatttgcaggtaaaa

SEQ ID NO: 84064 - DNA, 317 bp, Citrus clementina
  Intron number 2 from transcript clementine0.9_002770m (loc us clementine0.9_002770m.g) derived from phytozome v7.0 (c hr-ID scaffold_20; pos 2067199 to 2067515)
accaagtggtttgatactaactagtaagtcttcttttttcctatttatcttcgatcattttgcatttgctcaccttggttcatgagatttttatttgtttttgagtgatgctgggaatcctaactataattctagtttttgattcccaaagacatccgttagttattaatatatatcatggagaggtgaaattataacttaatgactcatatgatgtatagctgggatcgctagcatcatcgtttattttttgtgattttgatttttaatttgtttaattgggtgtagccattatattgtgcctgaattgggaccgg

SEQ ID NO: 84065 - DNA, 890 bp, Citrus clementina
  Intron number 1 from transcript clementine0.9_019796m (loc us clementine0.9_019796m.g) derived from phytozome v7.0 (c hr-ID scaffold_63; pos 215441 to 216330)
aaggtatatacatttatattcttaattataatgaattagttatgtgcgtgagctacctagtgtggattattaattccatcatcatgcttcaatgaacatgtccatgcatgcatgattcgatatctttctttctttttctttttctggttaattgttggcttgcgagttatcctcccttcaaatgttctattttccgatcatacattcctgcaagacattaacattaaatttctagccaatatcaaacgaatgtatggcgagtatataaatggtcagtttcagaatattaatttgagacttttttttccttttccgtatagctattttaatttagcacaattgtaccacacgcatatttagagtttggagacattggttgagtataatagctagctagctagtataattctataatggatacaattttatttcaaataaatttaagagattattcgcatattaaggagaatatcaaaaattctttgcaagatgcaacctctaacatatattgatgccaaaaatgaattatcagattccactttctgaatatataattgtgatgatgaccttaatcaatcttttatctagaatcattttatccagcacttagtaaatatggatgataaagttgatggcatctcatttcgctttcatgaactaatttgtgcatgttttgctggcaccaatattaattacataacgtgtggtgtaatccatccactacattgtcccagccattaattaattctagatatattataacttaagcactaatgagctagctagcaacttgaaatattatttacatatgttaattagtctgttaatataaattaagttgattaaattaataaaatttttgtttgttaaataattgattacacaggaca

SEQ ID NO: 84066 - DNA, 567 bp, Citrus clementina; identical to SEQ ID NO: 81855
  Intron number 4 from transcript clementine0.9_021071m (loc us clementine0.9_021071m.g) derived from phytozome v7.0 (c hr-ID scaffold_1; pos 13109432 to 13109998 reverse strand)

SEQ ID NO: 84067 - DNA, 890 bp, Citrus clementina
  Intron number 1 from transcript clementine0.9_033604m (loc us clementine0.9_033604m.g) derived from phytozome v7.0 (c hr-ID scaffold_33; pos 1140198 to 1141087)
tataaggtaagctaaactctctattacactcttttaatttttacccaatttctagatttatcctctattaatacacttttgatatttggaaataacacacacacacgcatgcgggcatactctctcttgtttattttggttgaatatgtaattaatgcataattaatatacaatataaaccgtattaatcaatggtctaaaaatagtgagagaagaggtattgtgtaaaagacgagagcttttaattagcccaaccctaaataataaataagcaaggagagcaagtacataaaagatcttgctcaacaagtagctaataataatatatagctaccagaaacatgtcaagacattgatgagaaaatggaacaattagttttcccggtcgagaaattctcgatgaacaagccgctctaagtttaagttttgagggagaagattgctgtagtaaaatagagttgtgacggtggctgatggctgagacactagtgccgtcactaacctcactagtgacctaagtatcattgtcacaattgactgcagaaaaaaaaaaaaaacttaaacatactcgggggggaaaacaaaaaaggccattaggacaagtaaaaatagtatgccattctttgttatagaactggagaaataattaattaccacgatcgtcaagaatgaagaagaagatgggggcgggtgtgggcaggagtcatgttgaaggaaggcttactcacaaaccttgcaaaaagacaggcaagttgctctaagatttactcgtaatatgtgtcccgttgattattaatttgatttccactgagctttgattcttaaactaatgtaattatatttggaaaatttcaggtagactatatattaggtgtaaacccattaaaaat

SEQ ID NO: 84068 - DNA, 531 bp, Citrus clementina
  Intron number 1 from transcript clementine0.9_017895m (loc us clementine0.9_017895m.g) derived from phytozome v7.0 (c hr-ID scaffold_114; pos 254512 to 255042 reverse strand)
aatcatcttctcccccctccaaattaggtaccctttttttattttcattttcttttaattccatcaatctcactacaaaaaaaaaaattattaattttgtaagcataagttaatatctaactgctagtcaggatcctgaatatttcatgaattttttcattttattttatgattcttatagcttcaattttagcaatacagaattattgtcataagaaagcctttgactagaaattgatctcttatcatattttgaccaaacccagatacttgaaaatctgttttttgtgaggtaatattattgttattattattttgtttattctgtctgtttagatcttgaaatttttatgcaaaattctccaattttgacttcttcctcaaaaatgtgctgaatcctacgacggtggtttctttgttatcagcagcccaaaagagcttcaatttgatagtttgaattgggtcattttgcgcaattgtgtatgtggaatattaatgattgcttcaaaatggactttggattgtaggagt

SEQ ID NO: 84069 - DNA, 980 bp, Citrus clementina
  Intron number 1 from transcript clementine0.9_009529m (loc us clementine0.9_009529m.g) derived from phytozome v7.0 (c hr-ID scaffold_29; pos 1504723 to 1505702)
aaacacttcccacaaaacaggtaccttttttcttttttcttttttcttcttcctcgattttattttattttattttatttttgtttctaatcatttaatgctttgtactgttcgcttgatctgtacttgttgttatgtgttttaatattttgactgatctggatcaaacccatgtctcaaaatcgaatctttgttgttttcttatgctgcatatatttgtgttttagggttttggtgggttttatgaattagggtttgttatggtttcctttacttgtctttgtgcccttgtttctgggtatggttccttttataaggtctctttgtcttgtgttggattgatgttcgttgtgatacttcttactaattatgattgttgcttctattagtgtaacttgggatgtatagtatgactttgatttttatttatggattcagtttcgtttacttgttttatagtctttttggttaataaaacttattaaaactgtttctctttgtctacatgctgccgctgcacttaacttcttgcagtactgctattatgtctgggcaatattgtttacttttagcaacaccgggaatgcaaacttcttctgaattctgaaaaattttcaaagtgagattttcctgtacaaattttaaacttgacctcccactaatatactgtatagtcttctgttttgatatattcggcttttcttgggctgtgaaatgtctagtcttattggattagcattcttgttgttagagacattttttagtttatagtttgttttgtgatttgagttttctctgatggacttttttaatgggcctttttattttattttatttttcataagaaaccgtgaattgtattaaagatgattaacaggccgtactattaccatttaataattattgttaagtctctgtatccaaatgttttagtttgtagatctattttgcttatttgctggttttcaattgatatgtag

SEQ ID NO: 84070 - DNA, 299 bp, Citrus clementina
  Intron number 2 from transcript clementine0.9_004262m (loc us clementine0.9_004262m.g) derived from phytozome v7.0 (c hr-ID scaffold_143; pos 318403 to 318701 reverse strand)
tacttgagactgatccaacttgtcgatacatccgggtaatgttatgctcttttttatattgttaatcaatttcttctattttccctgcttgtttgctgggaaaattgggaggtgaaagaaaattagtgtgttgttatctttttttgtatgccttgttttgcttttgaggcaagagactgaagttctatgatgtgtcttttcttatgtttttctgtcaatccccatcaacaaaactgaaatataacccgatgtgggttcttacagtacaaagaagtgattggaaaaggggcttttaagac

SEQ ID NO: 84071 - DNA, 723 bp, Citrus clementina
  Intron number 1 from transcript clementine0.9_004262m (loc us clementine0.9_004262m.g) derived from phytozome v7.0 (c hr-ID scaffold_143; pos 318754 to 319476 reverse strand)
gtttaattagcagtgaagccaaaccaagcaaccaggtatgaacagaagaaaccgaattctacatattaattttatttaattactaacaattactttttaaaatttttttatcgatatatgcaatgcattatcctttgtggccatatgtatgttcttttattatttttatttgattgttatattgaattcttttagaagtaaatttaggttcagttgctgttttaatgaattgggttctttttagtttcttaattaatttgcctgtataattagttttggttttcttgggataaagtatcaacaccttctctggctctgtgctgttgttcctttggagttgctgaacttgggaattagggccttggtattatgatttggacttttcgggtgtttggatttcttttttttaaaaaaaaaataatggatttgtgtttgattggggtttattgggtgtttggatttgaatctttttttgtataatgggtttgtaatctctttctcttgaatgccttactgtctgtttttatatgatagttctcaaatgatctttcattaaaagatttttatttagtgtcctatacttaatggaaccttgaagtagcaacgatggtttcagttttaatttggtttttgaagtcttgcagtaaacaagttagatatttcaatttcgattcagatttaaaaatttggataagttgttgcagagagtggagctttgttaat

SEQ ID NO: 84072 - DNA, 290 bp, Citrus clementina
  Intron number 1 from transcript clementine0.9_009810m (loc us clementine0.9_009810m.g) derived from phytozome v7.0 (c hr-ID scaffold_23; pos 2728660 to 2728949)
gctgttcagggtaagtttctcagtatttcaattacttctttttcatttgtgattactcatttgaaatgggttttaatgttttggcctaatactagcgctatttattttggctgtgtttctgaaatggatttcattcggttttcaataagaaagaagacagctttcagttctcgcataaaaatcaaattgtcctttttaattcaatcttctatttttatatataaaaaaatattaatttctgggcaataaacgtagagacgggagtggtggaggcgcaagttgaaaaaaat

SEQ ID NO: 84073 - DNA, 970 bp, Citrus clementina
  Intron number 2 from transcript clementine0.9_009810m (loc us clementine0.9_009810m.g) derived from phytozome v7.0 (c hr-ID scaffold_23; pos 2729306 to 2730275)
tgaacttgctgctgctactgataatttcaattccggtgagttatgaacatctttgctattagcagtttcttattccaatacttgggaatttcctatttgctgttaaggacctaccgaaataccccgggccccacgcttttgcaatattgacttcttattatcttggctgcttcatgtttcaatctagtcatcagcaattgaccctgttgggaataagattcaaatagttaggactgcggttaaagcacttccgtcagtcatcagcttatgtagaaaagatttttattttgcttacaaacgaattcaactctttcgtgtgtgttttacatggcctgaactcatctagtgaacgcaagtcaattgtgcgtgctcttgacctggaccggttgcatagcaagtaggtttttatattaaatggtagaggattttcattggttaattgaccatgaagtcaaacaggcccgcttttgtcctgcaaagatttatcaatccttttatacttttaattcaacttcattttagtatttctaattgatttttctaattcatacaacttatctgcagaggggcggctaccttttcgattaaataaaatttagccgaattatttgaaacttattatctaaaagctttaacaaaacatacagtctcaatggtaaatagagcagtactgaagaaacaagttaaaaaaaaaggtaagatgggaccagcctcttgaccacccttggcataaagtctcctctaactcccagttgaaatggttgaaaatatagggcggtgttctctgttaccggtgaaatacaggggattttatcaatgtcttaatccatataattgccccatatcaagtttcttgacttattaaatcaattttactgtgcatctcacatcttcttggattaattgaaagatgtgatagttctaatcatgcatcacacttttgtagaaaacttgatcgggaaaggtggtc

SEQ ID NO: 84074 - DNA, 611 bp, Citrus clementina
  Intron number 2 from transcript clementine0.9_025320m (loc us clementine0.9_025320m.g) derived from phytozome v7.0 (c hr-ID scaffold_67; pos 90335 to 90945 reverse strand)
ggcttccaggcggttatcaattacggggcatcgtacgttttccaggttttcacagaaattattaattaaaatccttgttatctccttgcgggttcatataatgaattcaaacgagcaccaggtgtttgatagaaagcatgtttgggcaggaggagcacttgaaaagcttaagtatcatttgtgctccaacaatgtatagataaatattttcttaaaaaattgttttccagaagacgctagggatcctagctataatctcaacatttcagaggtgatagcttatctgtaatggccatgttagtcaattaataatatttataaataaattgccacgtcaattgcgactcaaatgctggaataatagttgaagtccttaaaattattgtttgtttttcttttgaagactttttagtgctcctaaaagcagtctctgtatttgttgctttaatacttgaatgataacataaaccgtaagctttttgtaattacacttcgtttcgtgtaactgctaatattggctcaagtgcagaaaaaagtattagtgttccacatttgtgaaattgttatcattttcaggtgtggagtgtgcaaccagattctccccgcattct

SEQ ID NO: 84075 - DNA, 915 bp, Citrus clementina; identical to SEQ ID NO: 83851
  Intron number 2 from transcript clementine0.9_000494m (loc us clementine0.9_000180m.g) derived from phytozome v7.0 (c hr-ID scaffold_20; pos 3939196 to 3940110 reverse strand)

SEQ ID NO: 84076 - DNA, 421 bp, Citrus clementina
  Intron number 1 from transcript clementine0.9_021158m (loc us clementine0.9_021158m.g) derived from phytozome v7.0 (c hr-ID scaffold_65; pos 649811 to 650231)
aggatcagctaaggcttgtggctgggtattattattattgttgttgctgttgttttgattattactttgtttcattttattttcaagcctagcttattttttcttttgcttgctcaattaagttttgtgtatttttatataacttactcttccttttttatgcattgactcttcattcctccaacttttagttaaatggtgttttatttcctcattctctatattgtatttaggggtgtgtgtatctaagtatatagaatgcagccctgaaattgactttatttatgtcaaaactaatttttacattaatcattaaatctggaacttagttttcttagttgttattaattcagttgcttttcaatttccatgcaaacaaatgaacaatataggtgtattccttacaagtttgagaagaacg

SEQ ID NO: 84077 - DNA, 1022 bp, Citrus clementina
  Intron number 3 from transcript clementine0.9_021158m (loc us clementine0.9_021158m.g) derived from phytozome v7.0 (c hr-ID scaffold_65; pos 650477 to 651498)
ccttggaggaagcaggagtcagaggattacttgatgtaagtctcttaatctatttagataaattatttggtgcattaatgatgattaattatgaacagtcaccaagacttccaaagtttacctaggcatacacatccactgtattgctattagaaattgtcttagaggcttttttgattctttttaggacaaactttgagatttgagtaagtatttttaaactcaaagagggatgcgtgtgattattttttaaattaaggtggtttatatatggagataacaaattgttggcttgggcccatacttggaagtcaatattaggggaagcataagagcagggcttattgttggcctaagttagggtcgggataaatttatctttcatatatgatttttaattatttttaaatagttataaacttataataagttaataatcaataaatttttataatcaataatgaatttaagaaaataattattttaaaataaaataataaataaagaaaatgaaacaaataatagtttataaatttaaatttttttacaggattctctaatttaaatacttttttaattaattaaaatttaagagaaaatttagtattacaaatttagattttttgaatcatcattgatttttgagttattaagttttatttttctattagtttttatattttaatttattatttcaatttatgaatttattttcttaaaaaaatgagagtcaggcttgttcctcatgtggagggttgggcctaagcctatgggcttattctggcctgagttttttttttccctaaacccttgtttagcatggagggttgggcctaatcctgcaaacttatagtgggccagcatgggttttctttgccagcactataaatgtatgcatttaagcaaacattgggggtcttatgactgttccctttatcaataaaatttacttaatatgtttgaatgaagcaccacttttaattttattgagcataattattatagcaaaatccattgggagt

SEQ ID NO: 84078 - DNA, 1008 bp, Citrus clementina
  Intron number 1 from transcript clementine0.9_016506m (loc us clementine0.9_016506m.g) derived from phytozome v7.0 (c hr-ID scaffold_1; pos 3582017 to 3583024 reverse strand)
ccctcgccgccttcgctgccatttgatcaatcaaggtaattttagaaactgccgcctgcgcttgcgacgaggccgtaatctgggaaacttggttgaatattaccaagtggtgtgttccatccattggccttagaaattattatataagtttgttcagtgatattggatttgttattacggatacgcttgatggatgatcatcaattcgttattaattgcagatatgcttgatggctgaatttgtccggttgaaatgttgtctgcgctattaatttactcatttgtaattttattttcaaatttatatggtcaaaataattaattttccttgaaggactcgaatatttaaattttttttttttgaaaaaataaataaatggggataggtctccgttttaatcaccacccaaattcgggatatccccaaattatccctaattaaaattttttgtttccagtttgggttcggggatcccgtccgaacctgcccattgccatccctagcaataagtgagctagtgataatcattgctctgttttggacttcagtacctttgaagagcttgctagcagcttttgtcgttgttgcttgacattatatattagggaggaaggttatgttcttttctggtatcattgctacttatagttgatttgattcttctagcttctacattaacactttgctcatgtaaaatttcaattcatgccaaatttttatcaaacagagatcttttttatgcaagggataagtaatcatttttctgttttggtaaaattatattacaaattataattaatcaaattggttgtattttgagttgttttataatttcagtttagttaggatttaatttattttcttaatttttaggattataattaaggtaaattttaagctaccttatcttcattgaaaaaaaaaaaaacccacccgaataaataatattccattttatttccctacttacagtgacaaagccttgcgcccttctcttgccaacggaa

SEQ ID NO: 84079 - DNA, 756 bp, Citrus clementina
  Intron number 1 from transcript clementine0.9_020369m (loc us clementine0.9_019496m.g) derived from phytozome v7.0 (c hr-ID scaffold_1; pos 11878569 to 11879324)
ggccagacttgctgagcaagccgagagatacgacggtagcgtttcagtttttttttttttttttttttgtgtgttcaatttgtttggtgcatggcaaattaatttgcatatgttcatagatttatggattagtagttataattactctgattatgttagtttctgtgctttaattagttgtttgattcatgcaattgatgagcttcaccaagtactgttgctgtgttggtgtcagctactcgttactttcagcgttatttgttttacgctttaagggagtttatgctgctagaagagactattttttgggcttgttcctcaatttggtcgctgatctagaagatctatgtagtgcattcaagaaatgagtataatttcattgttaatttgtgttcttttgtaaatttactgctatgaagctagtgtaaaatgatgaatgaggaagtggctggactcttagctaaggttgaacctgatcacttgcccagagtttcgtgtggaaacattgatttgttgtcttgtgtgatatttctaatatggtatatgtatatgaagtgcagtatacacaaagtaaatgttgatatgacagttccccccccccccccccccccctcccaaagtctgattaagaaacctttaaatgtagtaggttccatatttgaaagatgaaattgaactttttgttagtgggaccattttcagtattttctacttgagtttttctcatttattgttatttttttccttatattagag

SEQ ID NO: 84080 - DNA, 914 bp, Citrus clementina
  Intron number 2 from transcript clementine0.9_020155m (loc us clementine0.9_014930m.g) derived from phytozome v7.0 (c hr-ID scaffold_23; pos 3202352 to 3203265)
ccttgaagcatcctaatataataagatttaaggaagtaagttaacaagtttccttaattcccaagtgacattatcttttactgcatgctctttttgctttgtgtgtgtatatatattctcttagctccatgttcaacaacaggtattgaagggtagtgcttttgtatcctcctcaaaatagaactctttcagagaatcgcagcgtctttcctagcctttctttttttaatattagcctatctataattaggatatcattcacatgttaacttccttccttcttcaattttcaagacccttttttttgttttttgttttttgttttttctttccggttacgtactccggtattactaatttttcacttcacagttttcttccccacatatactccgctatgtattcttgattcagatatgaatatgttaattaacatataagaaaactattttatctaagcttttgactttttctatatttgctatctaatcaattaatttacattctcataaattgcttataatataaaataatcactcagagccaaatatatttgaaactctcaagtcaataattcgttatagttctattgttaagctaccacaccctaccctatatatatatatatatatatatatatgaatgaaaattcttaaagatgtggttaattactgacttgaaacaattattgtttcagttaattcgctaggtcgctgaccaagaaaacatactttaatatacatgcttgaacaatattctttcattcggttgaagttcaaatcaatttttctgctaacgaaaaccgtagcttctccttcgtgtagtaatcagtttttaaggtctatgttattaataatcaatcttgtacattatattcaggtctttttaaccccaactgaactagccatagtcat

SEQ ID NO: 84081 - DNA, 395 bp, Citrus clementina
  Intron number 1 from transcript clementine0.9_003059m (loc us clementine0.9_003059m.g) derived from phytozome v7.0 (c hr-ID scaffold_67; pos 1284972 to 1285366 reverse strand)
ggtatgttgcatttttctctctttttatcgtcgctcctattttttttcgtttgcttttattttatttttgtggaaatttgcaacattatgggacattaatgtaattgaattttttttgtttttgatttggggttaagtaatttctgtgatctcccttcttcacaatgattgatttcttgattttgtagcagcctcgattgtttgtctctataacccatataatctgttacaccttttggttaggatttgtttttccattcttatagtttgttgatttatgaactatattcatttttctctagctcgtgacaattgaattttctgtttgtggggtttgaagaaaatatttcctttctctgaattctataggctttatctgaatcaagaggagcatc

SEQ ID NO: 84082 - DNA, 607 bp, Citrus clementina
  Intron number 1 from transcript clementine0.9_008866m (loc us clementine0.9_008866m.g) derived from phytozome v7.0 (c hr-ID scaffold_1; pos 981177 to 981783)
atattgctggtgagtgcttttagattctgcgctttgataagactgcttacggatatcaacattcttttggtttcctattcagtgtgaaaagaatccctttgtgagaggagattcatacagtattatttttccatcttgttgtataaataccattccattcggcttattgattggaagaatgctctctctctctctctctctctttcccattctttggttagttgaattcaaagataataatttgtcgaaaagcatttctggggataaaaaggtgaaagataatgaaaaggagaaaatggatttgagcatattggcaatttttttataaaaaaattgagaatatattcatgtttttatgtatgtaagaaaagaagcaagaatggtataacttctctttcccttctgtttcttacgcgagaatagattcttgatatcaatggaaactagatggttgagttgagaagtgttaagaaattttcactggcatgatgtccctggcataaattccaagagtattttgttaatttactagtttttctttcagaaaattttttgcttgtttctacttgcagaagcacagcctaattcagcagttgagtctttgttc

SEQ ID NO: 84083 - DNA, 512 bp, Citrus clementina
  Intron number 3 from transcript clementine0.9_008866m (loc us clementine0.9_008866m.g) derived from phytozome v7.0 (c hr-ID scaffold_1; pos 982012 to 982523)
caggttgacggtcagtcagatatatatattttagggtatgccctctctctctctctctctctctctctctctctctcgttacttcctcaaaatgattttcttttcgctaaatgaagaagttctagtgttctacagaagttgaatttctggttcaaatggtttctatagctgaattctcatgttcatatttgtattctcaaccatagcatggaatatgaatcgtatgaagtgatcaacattattaatttgtgatcaaagcgttgtaattatagttgctaatccatgccttgggttttaacttgtttctaagcacatgttggttatacgcaaaaaaaattttgaaaatttgatttttgtcccaatcagggaaaatctgcttcaaaatcaccatcaaatttttgcatattttcatttttatcgtgttagttatgaaatttgaatatgcatgcagatttcttctctattttaattgtcgtttggatttttcagttttcaggaaattgtcccattga

SEQ ID NO: 84084 - DNA, 502 bp, Citrus clementina
  Intron number 2 from transcript clementine0.9_004232m (loc us clementine0.9_004232m.g) derived from phytozome v7.0 (c hr-ID scaffold_1; pos 8770403 to 8770904)
gaaaaggtttgtctgctttgtgcatatgtataagtagaggctactgagtgtgatttttgtgatgtctagcttgtgaagggtatgttgagagtttcactcttttgctaaatgtagaggagataatagtttgttggtggtgctgaaaagttgaaattttctaatgacatttgctgcactgttgcttactttagtccttttatccttctatggattagacagctgcaaaggatttgttggattggcatatgatttaaaatagtttagtttcttcttcgtccatcgaaatatgtattatttattgaacttttagtaattttgcttccagtggctatgctttggaattttttgatcaattgtttttcagttactttacctttggcctaccatttggttgagctgaacatctttgatgtttatgttattatgcatttccatgtattgtattgaattctcctttgctaaagtattttattgtctgtgcagctggcaagggcttggaaac

SEQ ID NO: 84085 - DNA, 345 bp, Citrus clementina
  Intron number 3 from transcript clementine0.9_024232m (loc us clementine0.9_022239m.g) derived from phytozome v7.0 (c hr-ID scaffold_98; pos 3857 to 4201)
agagtgaacagcaatcaaaactggcagcaaggaaggtgtgtcttgggctgtgaaaggcttatagattgtaattatattcatgataggagagtgggatgtaattctcttcaaaacaaaaaaactggtagtaaattaaataaaaaaatgtgtcgcatcaatgtagaataatttttaaagattttgacttttaccggtgaagagttgtttagggctttgaatggttataagctttccttcttattttctttgaattctaacctataaaattcagttgaatggatctttatcagtggaggatttcttgtataattttccttgcatgatgttgaatttgtatttttcagt

SEQ ID NO: 84086 - DNA, 901 bp, Citrus clementina
  Intron number 4 from transcript clementine0.9_021236m (loc us clementine0.9_021236m.g) derived from phytozome v7.0 (c hr-ID scaffold_23; pos 2827402 to 2828302)
ttagttcattggtgatcagctggtccttaactgaggttagtgattctcaatttgtcattttaatctgtttacccgttgatttatgtacttttccttgcgggacatttaattactagctacccactgcatgaacaccaaatctttgaaaatgttactgttcatgtaagtagggtatgtattatatgtattggttggatttagaaggaatatatttatattgatttaatgtgaagcagaaaacagagtaatttgatatcaggcagttatccttatctttagggaatctgcttcaaccattagttttggttgttatggctcttggagtctcctcagtgcaataaatttcttgacatgagatatctaaaattcttaataatttttgggaagtttgtgggtgttataaattatatagtataccatttttaattttttatatgactttctttgatatgtgaagttctctttcatcttttttatactggatttatatttcttctgtttttggagaatcgtttcttttgagaaaagcttgttatcgtgccctttgtttgttaatgaagtactttttatgctttagcaggtaggcaaaatcttatgttatgtttattcttaatttgcttgacaattgaagatgtgtgcagctcaatcaaaacaacttgtaatattgagaaccatcggtctaagcaacttagcttttttgtgaagttgtgtataaaaagtcagaactgtaatattcacgacacatgttttcattgggggattggatcctatgtttattggtatttgttgattttatgattgttcatgttggtttctgtgttaagttttatggaccagattagagtgggaactgatttttaattgcttttaatttcagattattcgctactctttctttggc

SEQ ID NO: 84087 - DNA, 895 bp, Citrus clementina
  Intron number 2 from transcript clementine0.9_003173m (loc us clementine0.9_003173m.g) derived from phytozome v7.0 (c hr-ID scaffold_27; pos 1308588 to 1309482)
tttccagaagtcgagatcatccttctgtggttgaggtataataatatgatgaaaatatccattcccatacgcttgatcaataatgctataatttgaatttgactttttctttttattttttgggttaaagtatcattgtgattttgactcctttttttttttttttgaaaagaaagtatgactttctatttaatgtttggtccttatcgattcactttttttatgactcttttggcatcacagcattgaatcctacttggctactttcacagacaaagaccctcataaaaaataacaaagagagataaggattaaactaaaactttactcatttaatgtttggtccttatcgattcactttttttatgacatatgacttctcttgagggagaaaattatggtgcaacggtggcatggtatcaccgttgcacccaaccgttggatcccactggattcattcatctaaatagatccaatggctggatgcaacggtgatactgtatcaccgttgcaccgtagccggaccctctcttgagtttgttattgttaaattatggtcctcatcggatcaaaattttagttgcagccaaaaattgagaatccggagggaccaaaagtcataagaataaacttttaagagtcgcaattaaaaagaaaaaaaaagagtaaacatattaaaataagggtaaaatatcaagttgacaaaatcatagggccaattcttaaaagagttattaacaacttaatatgtgttttttttttttgggtgttttcgctattgagtatacctaacgacacgactggtgatttcatttttctgcagaatctggctattaaattatatataatcggttcacatatacgcatatttttcaggtgataggagaaaacgata

SEQ ID NO: 84088 - DNA, 793 bp, Citrus clementina
  Intron number 1 from transcript clementine0.9_018845m (loc us clementine0.9_018845m.g) derived from phytozome v7.0 (c hr-ID scaffold_1; pos 8480295 to 8481087)
cggtcgctagcctcgccgttaagtactccgttcaggtagctgaattgttttttttgttcttttatttactttttaaaaaaattttaaggtaaattttggcgattgaaatacggtgtgaggttaataattaaaaaaaagattgaaaatttattggaaatgcgggtcgaattgtgaaatttgttggaaaattgtcttcgggcttgactgaatttctgctatggaagagttgttcgataaaatgtttcaccttttgttactgcttgtatgattgatgatgtaaatatgtttgctacaatgactgaagattataatagaatttgatgattcaattatgaagtgtgattgaaactgaaaagcaagctcaaaagaagtgctgtggaaggttgttcaggttggttcattagctatattggtttcatgagcaagtgctttcttagtaaaaggtagagtttgtcccttttcaatgtgaaaggggaaatataaatgaaaacaaaaggtagagacattcatcttttaatgatttagctatagaagctgaattcttcttttactccattacattagtgtgcaaaagttagaatattgtactgcatagaaatggtctgtgtctcgtttagattcttacagaaatttcattctgtctttctgactgcttgaattcaaactttatacaaagatatcttttgtttcattgttatagtactagtgaagtggctttttatttttttttgtgatggactcaaaagcaagggcattaacatgtcatctacattacttcttctgtctgcaggtt

SEQ ID NO: 84089 - DNA, 812 bp, Citrus clementina
  Intron number 3 from transcript clementine0.9_009437m (loc us clementine0.9_006015m.g) derived from phytozome v7.0 (c hr-ID scaffold_10; pos 445095 to 445906 reverse strand)
aagtggccgttgagtcgcactctaaggtgggaaattttttaattgactttcttattaagacttgaaaacatatttcgttgagtcacactccaggatggcaaagttttaaattcagtttcttgttaagacttaaaatcatatcttcttttgaattcattagttcatcgttcatcttaattcccggccctgaaatacattaccaagacagtcaatactttgattaaagtttccctttatcttaatctaatggatttactatgaatttaagcctatcatgctgtttgttgattgtctttcatgttgaggttgcactggaccacaggaagttcccatttctaaatgtaattttagaaactagttgaattttagtttaatttccttgtatctactagtaactgttcagcttgtatttcttgttacaagcccatgctgtaaatttgtttttcctcaaaacatccatctgatcaggtcttgcgaccataacttttccaaactatgtaatgtttctggagttaagagctatcgtgcttgtgtctcaacaaagtgacctataaactttaaacaatacggatcatgtctgttcttgaaggcttataaatttgactgctatgtccggtgttaacgttctatttattttatatctgaattgtgaatattgcatgtgttgtgggaaaatttcatttaatctttaacatcgatctttattttgctttcagtttagttcttagcatttatacaagttttgttaattgcatatgacatttgtttcttttccagcttctgaaagagtttccaagagatctgctttctct

SEQ ID NO: 84090 - DNA, 818 bp, Citrus clementina
  Intron number 1 from transcript clementine0.9_008963m (loc us clementine0.9_008963m.g) derived from phytozome v7.0 (c hr-ID scaffold_53; pos 254478 to 255295)
gttgttttgattttgagaaatcgaagctcactgaggtaaaaattaaaatctcaattcttcgtactctctcttgatccgaaatgtgatcttacctttttttaatatctgttcttttcatctctgagctctttgttgtgttaaaaacttgtgttttttagatatgaatcgaatgaattgttgttggatctgaagcaattatgtgtagatctgttatatgggtttgatccttattgtgattcgacaactggggttcagatcttattgagtttagttgattttttagttcatttttatttgagctgaatcgggttacttgctgtctaacggaacttacttggagtacagtacattgtatgaaaaatgggttcgctttttccttttttttgttggttcgaggctacttcgcagtttgaagatcaaattgagtttgttagtgtagatcttggaaaaaaaaaattgtgtataaactattctgcttgtgtagttgagctatgcatgttggacgtagtgcgtagagttgctgaaaactaaaattttccgtcgttgtggatggaaatgtatgtattttttgcctttttgattgtttgaagattctgtaatgaatgacgaatgactgacctcgtagtgatatacttattttttatacaagactagtttgcaaattgtcgattcatttattttgtttactgtttcgtatttgaaagcgggttatgtgttatgaaatgccggaaatgggtaatgttgcttgttttctcatgcatgcaagttaacttttgttctttccattttctgcaggttatattgattagtaaaggaaa

SEQ ID NO: 84091 - DNA, 775 bp, Citrus clementina
  Intron number 1 from transcript clementine0.9_009524m (loc us clementine0.9_009524m.g) derived from phytozome v7.0 (c hr-ID scaffold_49; pos 334461 to 335235 reverse strand)
agttagagaaagaggtaattaagtaatttttcttcaatttaattttttctccaccacatgattcgaatctagtgatgatcagaactgtgttgatttttaaataatgtattaaatatgtgaattccttacaggttaagattcaattatgttaaaactgatgcatattcagcataataatcaaccgaaggccacgtagagctttactgattattttctaaaaatcttgaaacacgtgtatattactaattaattttagatgcatcatttattttattgtttttgttattgctattattatttttaatcgatcaacaatctatagatctaaaaaaaaagcaggtctacagcgaaatgagttgagaaatttattaagagagagcttcataaccaaggctcatattttgatcaaatattaaggagataaaaatttcgttttcaaaatttattgtcttaatagtaattatttcactgttttattatcactttgtgcttaattctgtttgttgcgggaacaaacatattacgtaaatatttttattcaataaataataattatatctgactttgtaaaaaaatttgcataaagagatcagatcaaattaaatctaagtctaatgtaccctcgtaagtcgtatacgcgggatttaaactaacaaaccttgtcccataagattttactagttgaatcaattgtgaatgataatttttcttttgacgttatttgatatttaagattttacaatttgtagtggaataatttcttacaggtaaccga

SEQ ID NO: 84092 - DNA, 632 bp, Citrus clementina
  Intron number 3 from transcript clementine0.9_014999m (loc us clementine0.9_009205m.g) derived from phytozome v7.0 (c hr-ID scaffold_27; pos 3260128 to 3260759)
ctggtatgttgtttttttttccctcgtttttgtttaaattttgggttgtttgattgaaatgttgactggtcaattgggttgctgctggatgctcttgattgctgtagcttttcagtgcattgttgttgtttcaggtttaatggttgggcaatggctcttctgctgtactttattgtgaaaatttaggattaagtctataattggaatgcaagtactattattagatataggtagctgataataaatggggtgctcattctgatgcgagaccctcaagcatcttaatttgaaacagagagggaattatacaaatgataatgttgggctcattttatttttaatggctagacatttaggtattgtttgtatgaattgcttcattacgtgaatacattagaaaatcattgtgaatttatattttgggactttacatattttttttttaattgtttagctgtccagttaatatgagatggtttcacccagagtgtccattgattgattttttttttttaaatacatgtaattgaaaacttttatgtgtgctgtagaggcaaacgttgtggatttttttcattaattttttctttttctttttcttttctctttggcagcaaatccactcactcatc

SEQ ID NO: 84093 - DNA, 984 bp, Citrus clementina
  Intron number 1 from transcript clementine0.9_024411m (loc us clementine0.9_024411m.g) derived from phytozome v7.0 (c hr-ID scaffold_27; pos 2700504 to 2701487 reverse strand)
tcctttcgccccgggtcttcaacctattgttgcgcgtaattctcttgctctttttctcattttattttacaataattatgcttttatattttaatttattagttttcttgtgtatgcaacaatggcatggtccttagaatgtgtgcaaaacatgaatgaagaactaataattaaaaaaaaaagattttgcaatctggggattaaaattaaccttgtgttagagcattttactttgtcatattagtactttacaatttatattaatgaaacagctgttgagattaacccaagtgtttggacttgggtttggttgaaatgatgttcgtgttaggggagataagtttgtcatttatcagtttctgctaatcaaacaatgtagggaacctatagaacccaatagctgaggtattgttcacatgggtttcttgattactcaaggttgtcgattccaacaacagccccctgtttaagacccaatagggatttttggatccaaaaaaagtgggcccgtcgaatgtgcgtgtatgggtaaattagaggctaaggggttatcgtgaagctcagaatgagctctggtctacatgatggttaactggtgcagtgtaatgtaagattgatattaacacgctgagtgatgatgtgcgtttactgggtgtcttaacatttgctttcactgttctttcattgtacttttttgctgaaaatttgatttgtgtaaaagaattcttttgtatttgtcatttagaaatgggcttttgttttcatccttgggtaaaaataatttttaagaagttttcatggtgcctaccgaaaatgatatttataagataagcatgagttcatttagatctcttaataaccattcacatccattttacttgaatttatcagaccaaccgaaatatggctatctacatattttcactcataatttaatatattttttcaggtagagtgtgccccttcactggaaagaaatcaaac

SEQ ID NO: 84094 - DNA, 404 bp, Citrus clementina
  Intron number 1 from transcript clementine0.9_019183m (loc us clementine0.9_019170m.g) derived from phytozome v7.0 (c hr-ID scaffold_5; pos 1553778 to 1554181 reverse strand)
cttgctcttttacactttctaaggctttgtaagtatattctcttttttagcattttttatatattttttctattcctagagctttgattcacaatttgtgttggcgtggtgtattgtgtttgttcagaaatgaagaacgtagatcttctaaacaatgtagttctataaaaatcagctgatggaaagttaagttacttgtagatgttctaaaatgatgaaatataatttgattcttttaatatagatcaaaaatatttttttatggttttctgactcagtttcagctgtggaactaaattgatgttaattgctgttgaaatatgtcatactcgggtcttgttttctaataatatagttgttgaattctagaaattttggagctttatttgtgcggcggtcaaagt

SEQ ID NO: 84095 - DNA, 892 bp, Citrus clementina
  Intron number 1 from transcript clementine0.9_001582m (loc us clementine0.9_001582m.g) derived from phytozome v7.0 (c hr-ID scaffold_1; pos 6147475 to 6148366 reverse strand)
gcaaggtattagcttcttacgatagttttatcgcttgaattttcataattctttaatgcatgcatttgtttatttatctttcttggctctgaattgatgaaaattgctggatttttttttttttggcctctaatacattttcgagaattgctgttaattttagtcaatttttttttcttggtatatttatgggatgttggttttagggtttaattattaggaaattgttaaatgctattaggtatttatttggtagtacctctttaacatgaagagactgagagacatgcctagagacatttgaactattgtgctagagttttcaaggtgattttctgttactgttctagagttttaatctagtgctggaatttgaagttttttttatggtgacgagtgttttgttggcctctgtaaccttaactgcatttgtattagccaatacctgtcttaaattgttggattttttttggaattgttattgatcttggttaaaatgtactgttgttttactggcttgttgctttgaggtttaattattgggaattgttaaatggttgggctattctaactcaaaaatttcaagtaagatttttacataaattttgagtcatggatctaatgcaattcaatgtttggtatccaaagtcaaaagttgtatttatcgatgtcaattcatccttcatctcgaccattcaattgaattagatcaatggcttataatttgtgtcaaaattttaagttaaaatagccccacgcattgttaaatgtcatttggttttatgttcagtagtatttattcatgttccttatgctcttgacttttgatcttctgcttgtgaactgtaccctgatgataattttctatttctgtagcctgcccctacctcgt

SEQ ID NO: 84096 - DNA, 439 bp, Citrus clementina; identical to SEQ ID NO: 83846
  Intron number 1 from transcript clementine0.9_025665m (loc us clementine0.9_025688m.g) derived from phytozome v7.0 (c hr-ID scaffold_82; pos 1035846 to 1036284)

SEQ ID NO: 84097 - DNA, 743 bp, Citrus clementina
  Intron number 2 from transcript clementine0.9_026124m (loc us clementine0.9_026124m.g) derived from phytozome v7.0 (c hr-ID scaffold_20; pos 2938807 to 2939549 reverse strand)
agtcactttcaaggccattgaactggacaaagaaagttagtcctcttttttttcgcctttgcatttttgggattctattttgtctctgaatttgtgtcaaaacattttctaatttattcaatttatcattttttacattgattggattcgactgatattgggcttcatttttttttcctttcctttgccaatgtttactgctcctgacacttggtgccgcgcttctgtttattcttattgaagttggtgggagttatggaagtagttagcacagatatggttttgtaagtaggtggaattttaacaactgatgttggagcttcgtatttagtcaataaaccaaagggtctaatgaatctgatgtggtggcttagtgttgtttttacgggtcaggatttggtgctcggctgagtttgtgttgagcaccgaatcaaatgatcaggattccttcgacatgggtctcatttaggtctttaatctactctgacctttgattcagtctcagctgagcaccaaatcctgggcctgttcttcggtggttattcggggaaagagagagagtaaaagaaaaaaaaaagaacgtaggtctttaaacctctgtgtgttcttgatcttgaatagaattattatttttatagaatgaaaactttggattttgtcttatatcctattcacaattgaagtagaagtaaagaagacagatcagtaacttgcatttttttttttctggtaatttataggtg

SEQ ID NO: 84098 - DNA, 833 bp, Citrus clementina
  Intron number 1 from transcript clementine0.9_006972m (loc us clementine0.9_006972m.g) derived from phytozome v7.0 (c hr-ID scaffold_53; pos 421019 to 421851 reverse strand)
tacccttgaaggtgttgacaagtgctcctcatttggtactttcccctcctctttttcatttctaatgcaatctttatttgatggatcttgattttattttatctggcctttttttggggatggatcttgatatgattttgaaatttgagatatatgtttgttggtttggactaattgtttttgttggggcatgattagtttgattgttaattgctatactagtttggtgttaccagttttctgttatttttagatctgaatggattataattatgagtttcttctgattggtttgtttagttcaactttgaatttaagtttagtgcaatccaattaacatgggcaggaagtgatctagggcattgacttattggttgttttgtgccactttgatcataacttcacgcgggttacagcattttccaactttttacttttgaatacattgtttaggcttatggaatcgaaatatgtatattcttttttttattgctggtgctaaaatcagtagaattatggggttatggctgcatagcaaactcaaatgtaagttcttgagtcactgcttctgaatttaaaagaatagatgcaagttagattaaccatttatccctattattgtattgttgtgcaaaatatgaaatttatagttcagtgattttgtgttttctcatagcctgtacatagcatatttatatattacatagattgggatctgattttttcccttcacaattcttatagtgtactttaagtggatttatgattcttgttctctccttttcttctttgcttcagattgtttaggtaggcggttgggaccaaggcttctt

SEQ ID NO: 84099 - DNA, 856 bp, Citrus clementina
  Intron number 1 from transcript clementine0.9_028282m (loc us clementine0.9_028282m.g) derived from phytozome v7.0 (c hr-ID scaffold_89; pos 995431 to 996286)
cttctcccaggccttgtgttattaacaatgcctccatttttactttccacatattaaagtcattcttcccattaaacttttcaagatcaactttaggagctgttatacttgtatctgatcaagaaatccagctctgataccaattgtagagatttacaagctttatagaatcaacttgaacaacctctcccaagatccccagaccagaattccaagatgaaccaaagaagattcaaaagttacaatgatagaaaacaacccaatagcatattaaaccaaacagtaagcaatcaaataatctaaaagaaactcaagaacaactcaaacacagcaagttacgtggttcagtcaattcacattgacttacatccacggaggaacaaatagatcagctttattgacagaacaaagtctcttttacaatcagattttacagagcccttctcaaggaacaagaacgctcttttacacaagcactctctctctcttaaatcctctgaaatcttctcagtttgttattttcgaatcagctccagcctctgagtttataacgacccagaaacaatcccagctaggcacgtgagcagcagatgacaataacggctttaacagccttcacacgtcatttaaaatgtcacgtgcgttgctcatgattctaataaccaaaacgataaaaatctaggtcgttttgtaaggatagtcaaaaggtagcaagaaacgccgataactgtgtcgttttgctttgttgtttgcagagccaaaactccaagcttcctgtcgtttcattaacctttttgatttgtttcattttggtccaacagaatttcattgcatacgagcagtgttctcaagactt

SEQ ID NO: 84100 - DNA, 911 bp, Citrus clementina
  Intron number 2 from transcript clementine0.9_021773m (loc us clementine0.9_020406m.g) derived from phytozome v7.0 (c hr-ID scaffold_23; pos 3258710 to 3259620)
ggcgctgctcaaggtttttatttctttaaactttcgttctagttgttccttttatctcttcgagtttcttgagactgaaaactttttacattagttggtgaagttttgctgatgaatgacagcttaaagtttttattcctaatgaactgtgcaccgttaaaaaatggatagcctatccagcttagctttatggttttcctcgtgatgctgtgattgttaattattttatgttattacaagcttcattgtattgatctgcttgttgttagactctaataaggagcctgtttgccactatttttcttttacctgtatactatcttcctttgccagcaagttggattggatcttaggacacctgtgatatggcaactcacttttatttaccagagaagcttcccactgtatgttataatatttgattttaatgtgtatgagttttttaaaattatcttcccatgcgtcatgttaatgttacccaatctgttatgggactaactcatttttttggaaatgcttaaatatttttattaccccctgtatggaattatttttccaactttgtttttaatttgcatctggattattgaatgattgaacaaatctttttttagtatgtgtttttgcaatcttctgttcttttctatgggataacagttaaagcttttcatgtacatttaatttaagcttactttattcttgtttataatgcattgtttgtaattgttgaactgttttggaattccttttcaagtttatctgaaaatattttggctgttgactttcaatttgtacgtgcttaagtaacttgccagtttcctctcgaattcgtaacccatgtgttagtatttgtttcttttgtatttatcaatctgtttacacggtgttcctcctatacacagatcctgcta

SEQ ID NO: 84101 - DNA, 792 bp, Citrus clementina
  Intron number 4 from transcript clementine0.9_002965m (loc us clementine0.9_002965m.g) derived from phytozome v7.0 (c hr-ID scaffold_49; pos 884048 to 884839 reverse strand)
tggtgaagataccattattggaaatcttgatactggtgagttctagtttttgttttttggaaaaataaaataaaattatttgaccattttagtttactatataatttttttatattaatataatttatctatactacatgacagccactagatctaacatatggtataattattaaattagagttccgattttttgactctatccatgcgtggaaagaaagataattcaccataatatgactgagaaaattgaaaacgatgttttgattgttaataatttgatacagtataaacttgaaattcatatgaaccatgtttgtagacaaactctcctttttgactaatccaagttcaccaatgacaaaattatttgatttagtggtttctagatgtttaatatattcaactttagacaaccactttcggaaaaaatgatcgagctgttgcagaataaagaattcttctccttatgtaacttgaaattaaattcttactttttaggtttgcatcagagccaagaccctgtgcaaactctaatttatcaacttaagctgttgggtctaatggtttctttaatccatagtgggaacttacatgattgatttcttgttggaaaaatggtccagatacatatatgttattatgaaacactatatgatatcaggtgtgccaatttattatttctttctctttcactatcaagtttgacattctgttataggaatcacttttgcttcaatggggattattgtgttgtgttaggtgtctggcctgaatcaaaaagctttagtg

SEQ ID NO: 84102 - DNA, 900 bp, Citrus clementina
  Intron number 1 from transcript clementine0.9_024332m (loc us clementine0.9_022776m.g) derived from phytozome v7.0 (c hr-ID scaffold_82; pos 295027 to 295926 reverse strand)
ggcatttctgttgttgctggtactctttagttttattattttttattgttttgtttctcactcattttctttttaaaatttttatttcccccccccccccccatttttatttgtttcatctctctctgtctccctctctctctctctctctctctttattttttattttttaactcaaagtttgagaagcatttcttttgtcttgtttcatctgttgtagtagataaagaagaatgaagaaatcagaggaattactagcaggataaatatctatatatgtataaaaggacagtttttggtcttatttaccttttcttattctgtgctttgatcttgtcaatcacttttgtttttttggggttttttccacttttacttgaaaactatatattgacgttttaaaaaatttacctttttttaattcctaaaaatttctgtttcttgctcgttttagaaagaatgacaaattttcccttttttttgtcttcaataacatacaaagcatgcatgtgtcagcgttattgttgttcatgtatgatcatatcaaaacgtgaccaggccttcctcttgacaatctaaaaatgaaaaaaaaaaagaagaaaatatgacatgcatcatgcatgtgagtgttactttcatggcttcatatatacttgtatttgaaataaaattaatgggtattgttcgaacgagtcacaatgtaccgggcgaggtaagtaccagcgtaccattgtaacaaaacacaatctggttaactggtccttctaaaaaaaattgcaccttatgtccagttgtgttgttcgctagatcatttatgttgtttgaatatcatcattgtatcttatcttagcaaacgtgaatgtaggaattgaagctagaggattcgtttttggtccatca

SEQ ID NO: 84103 - DNA, 775 bp, Citrus clementina
  Intron number 2 from transcript clementine0.9_011033m (loc us clementine0.9_007450m.g) derived from phytozome v7.0 (c hr-ID scaffold_67; pos 198164 to 198938 reverse strand)
gggtaaattgttggacgggaatcaaattttgcaaggtttgttcatgttagcgcaaattaattttataattgaattgtagaatggtgtgtctttgaataacaaaccttttttttagatagttttcatcatgttaccttggataggcaaccgtatctaatcatacatctcaaatggttaatttttattgaactgggtgttttgcacaactcatatgccaattaattgttatattatgataaattttttgatcttcaattgacttgattgaaaagaaagtaatttgactcaattcatccaacccaaaatggagatagtcaggtttttatgaaatgtgttcattggattttacatggcacatatggaaaattttgaaactgaacaaacagctttaactacagcaaattgctctagtttgtacagtcattggatatatatatatttttttaatgtttgtgatgattatgggtatgtttggaattgaggtgtggtggtttctaatccacaaccaccatatagctgtcaagtataagtgtgtgggtgagtggtaaaacagtagctatcaagtaaaagctagtgtttactggtcgttctatcttctttggtttcaaaattaagctgaagaaaacctgtcctgaacataccatataagaatcttattggttttggactcaatgaatagggagactagaactgatttactacttatattacttcttaaattccttcttttgctggcttgtctgatgttcgagaaccatattatgcatgcagaagg

SEQ ID NO: 84104 - DNA, 999 bp, Citrus clementina
  Intron number 4 from transcript clementine0.9_016701m (loc us clementine0.9_011861m.g) derived from phytozome v7.0 (c hr-ID scaffold_90; pos 444215 to 445213 reverse strand)
gctagtaagatgcacctaaatttttatatctcactgtgctttcagttaaatttataatatattgaattttggacggttactatcatatatctaatcattattccattgcagatatatgaacgcatttcttcttatttttccatattttttttttcaaaaaaaaaaatccttgatgattaatcagtgtcatggtcaaagaattgctatctttttttcttgtgctaagtttctagactatatactttaaactaccatatcagttaaatattttcacacagtatatatatatatatatatataattgtgaattgtttgctatgctgagcttgtactggtagttttccattcacaagccaaattctgtgtttatccatgtcatatgttgacgtgttactgacaaaacatcatgtgtgagcatgcgtttttaagtctgttgggtcttcttgttactgagggatgcaggcattctttgaaagtcaacctactctgaacttcattttacatatatttagcttgttaaattatctgggcattagctatgtggtatacattctcttgatgacttaatctgagtactagacgtgtgaagtctgcattgaggatatacattgatccaaaattaattcagattgatagagattaattgtcttgtttaaatgaaatggcaatgtatggtcaatttgatggctttatgaaaagacttagttaacttgcaacttggttgaggccctcataggaccttcgggctgagctgggtcatgtgtttgtttgagttgcagtcttatttttccattcaatatggaatttccatgaagttgaatttttagttatattgctgcttgcaccctgtttggctagctacccttaatgtaatcttttcctcgccttctgccaagtgctttttggtagtgccccaaatcgagtttactttttgttcttactagaccatgttttggcaatttaaatcaattaacatatgccttgactgattgtaggttg

SEQ ID NO: 84105 - DNA, 843 bp, Citrus clementina; identical to SEQ ID NO: 83796
  Intron number 2 from transcript clementine0.9_019709m (loc us clementine0.9_019709m.g) derived from phytozome v7.0 (c hr-ID scaffold_23; pos 3209712 to 3210554)

SEQ ID NO: 84106 - DNA, 422 bp, Citrus clementina
  Intron number 3 from transcript clementine0.9_016169m (loc us clementine0.9_016162m.g) derived from phytozome v7.0 (c hr-ID scaffold_20; pos 3575548 to 3575969)
gtgaacaaattggtatggatacattagctggaattattcttgtagtttcaacttttatgattccaaaataacacgaaatctgataggtgttgattttttgcttgtttttaaaaaataaatcagaaattagcgcctttttttttttgttgagaaacagcaaaattgatttgttttaagtttttatttttcgcactatgttttcctgcttctctgtattttgttcctttcccttttacccggttaagctgcacgtcttgtttcatactttaatttttttgaggattcgtttgtttgagcttgtgtatttcccacattgtttcttgtattctttcgtttgtgactaagtcaaatggttaaattcttcttcagtacattaacttgctattgatgtttaggtggaaagaaaaggtcctcattttatt

SEQ ID NO: 84107 - DNA, 907 bp, Citrus clementina
  Intron number 2 from transcript clementine0.9_035434m (loc us clementine0.9_035434m.g) derived from phytozome v7.0 (c hr-ID scaffold_1; pos 3006500 to 3007406)
ttgatacaataaataaagctgtctgcctggtgcgcctttcttaactcgttttttcatttttgcgcctttcttaacccgttttttcatttgtactcatactctagaggacggcttaatccctctctacccggtccatcgatttgagcagagttcaaaaatcttatacctctatttttgtgttttatttatttattttttatttttattaacttgcacacattagtgaggcctgaatttagatcgcaggtcttaggatatttactccttactggtggaaatagaccttatatcttttaactcaagaaatattacttggcacttttctcttaacagaatattattctgtgcttttaaaataaattaagcttatgtatcaatattcaggatgagataacctaatgagagcaattaaaattgtaattcgtcaattgagaatatataattatattctgtttacgtccagttggttgagaggataatggtgaattaaaaagtcgatgaaatcatcttctattcattattgatttagtcatttgggacttacattttcagataagtttttggtaatatatttgtggatttggggaagtcttgagtgctccaggagctctgctccttttccattcatttcttgttacgttcatacttcaaacattcatgatactatgcataatccatggtcaagaatgaatggttaacgaccaatatttcaagaacatcaaagaccttctcgtggatttaacatgatccatcagcaagagtcaaaaggtcaaaaaaatagtctttaagttgaattcaattaagttggattgtgaatgagtgtaacatatgaaagtaatagaacaacgctttgagcactacaaattttgcagggtctcatcatagcaggattagacaccacaacagt

SEQ ID NO: 84108 - DNA, 738 bp, Citrus clementina; identical to SEQ ID NO: 80227
  Intron number 3 from transcript clementine0.9_018153m (loc us clementine0.9_016232m.g) derived from phytozome v7.0 (c hr-ID scaffold_1; pos 11976132 to 11976869)

SEQ ID NO: 84109 - DNA, 795 bp, Citrus clementina
  Intron number 2 from transcript clementine0.9_021268m (loc us clementine0.9_021268m.g) derived from phytozome v7.0 (c hr-ID scaffold_1; pos 9387938 to 9388732 reverse strand)
gggtaaataactagcagataatatatatagagagatcttttatgtagttctaaagaacaattggtgcttccgatttctgcttctgagatagcctgttgatgatgcatgaaaattcaaatggttaacgctaattttttctttcgattgtcggccaactgtcattatttgcctgcttccatctgctcaaatcagcaaagccataatttttagccagttgaagaaaatcttagtgataatgggatccgtctgcaggatgctatgctgttggcatgacctgaagtcacctaaactttgtttcttgactcatggtgatagttacttgattctgctcattatgatgatagagctcgtctgtcacctaatcgagggatatcatctgtagatttctccatcacttgatagacataaattgattttaacaatggggcttgaacctcttatgttgttgacttaagtgtttatacctgccaatgagcttcattttcgctgttgggaaggcttttcttcattaggagataggatcaacttcctgtagtccacatccataggtgaaatgggatggctaatgttcaatttgaaaactcctcaccaccaaaaaagtaataatagtaataaattttttttttaaaaaaaatcttatcaagaaaaggagaaaggctaaaaaatttgactgatggaagttttaattttttgctttggtgtttgttgttgtagattgcgttggaacttagaatcacgtattggatcttactaatgatcagggctttttgcttgcaggtttgtccagtttgtgca

SEQ ID NO: 84110 - DNA, 731 bp, Citrus clementina
  Intron number 1 from transcript clementine0.9_021268m (loc us clementine0.9_021268m.g) derived from phytozome v7.0 (c hr-ID scaffold_1; pos 9388872 to 9389602 reverse strand)
aaagagataccaatcggctctgcaatcacgatctggtaagcttattcattttttttttttttgggttacttttcctttgtgggatttttaagaaaacaatggaagatatgtgaacttgatgttgaaaactatgagagtttaatttttatttggttatttgtgaatctatttgtttacaactaatggttattatatttgattctgtgtttttggttttctgtttatttttatatcctagttgattaaagtgtggtatctgtatgtaaagattctgtttgttttctgaaaaatgaagggaaaggaaagaattcgaaaatttgagcttgacttgttactcagagtttagatgtcaaaagcttgaactcaactgaggttatagcaacaatttaaatggaaagtttagatttcaataatgaatatcgagcttgtagttcagagattagaatttcgtctattttatcatttttttcttaaaagaattttgcttgtagcttccttttgtgttgtgtgtgaaatgtccaaagttttgagttgtatgtttcttaatgttaatatttagagccttgtagaactggattaatgtacttgtaccaatggagaatgtttatataagatatttggtttcctttcctcacatcttaataattaatggtgcttaaggctctctgaagaatgaggaagctttttaaccttccttttgcttattgaaatgattttatgtgactgcagag

SEQ ID NO: 84111 - DNA, 855 bp, Citrus clementina
  Intron number 3 from transcript clementine0.9_003913m (loc us clementine0.9_000837m.g) derived from phytozome v7.0 (c hr-ID scaffold_1; pos 6124551 to 6125405 reverse strand)
gtcagctcagccggtaagctttaaaaattcatgtttcttttctttggacttctaaaataaagttatggttgttgaattacagatcatgttgtggtaaggctgtcttacctaagcgatatgtagctatgtaagtttgctgacgtcaattgctgttagtttttctgttctttaatttaaaatgagtattctgaacttctaattgatttttgaaaaaatattaagataaaatttatagtgtaagaaaattgagttagaatatttgcattatgtttggtattttttcagaattagtttgtagtctttatgcatggtcacattaaatggtgacacaagaaggcaagtgatattctttgaaagacgggaaaaaattcaatcaatgacacataaattagaagatgtcatagataattattttcttccacagaaaatagggaattttcttacaagaaatagttacagaaggaaggagagtgcttgcatctggttacaacctattgctctatatccagagatctttgtcctagtggttccctgcattaaaatttttctcattgttttactcaaacccaaacttgcttctggactctatttggattttgagaatttatgtgttatgatcagtttccctcatgatgatttgcatttatgtttgctctgtcatactagttagggttgtttacctgtttaacatatataacattttggcaaaactacatgagcatttgttgcatataactaagtacaaaatgtatgagactctgcatttgtttcttttctctttgatcaatgatctggatttagaacttttgagttgctttaggttggcccatcatcatcaattcctggttcagccca

SEQ ID NO: 84112 - DNA, 374 bp, Citrus clementina
  Intron number 1 from transcript clementine0.9_003913m (loc us clementine0.9_000837m.g) derived from phytozome v7.0 (c hr-ID scaffold_1; pos 6126409 to 6126782 reverse strand)
cgcagattagcagatccgagctcaacccatcaaaggtttttctctcttctacatctctcatctaaaagtttttattttttaattgttttgagttttagattaatgaaagcattaagaattctgttttgtgcatgtgaatttcgattaattcgagtggtatgtttatttcgctgatcggttgatttttgtttggatataaagtttgttgctttattgattattcttgggatattctgcttgtgatatatgcgtttctgtaaaattttgagaaaaaaaaattaaattgttaggtgtgattgattactgatgatggtgggtttggattctcgttgttggtaggttgataaagtggtttttattagttaaacaaggag

SEQ ID NO: 84113 - DNA, 758 bp, Citrus clementina; identical to SEQ ID NO: 82162
  Intron number 2 from transcript clementine0.9_015645m (loc us clementine0.9_015645m.g) derived from phytozome v7.0 (c hr-ID scaffold_29; pos 1994972 to 1995729)

SEQ ID NO: 84114 - DNA, 901 bp, Citrus clementina
  Intron number 1 from transcript clementine0.9_031446m (loc us clementine0.9_031446m.g) derived from phytozome v7.0 (c hr-ID scaffold_82; pos 970401 to 971301 reverse strand)
ctggaatcgtacttcatccattgtcccagaaaatagttaagtcatggctccatcaacctgatcttcttcacaactaaagattttgataagttgataacagaagctttacagaacactcccccaaagatcttggattagaatcaacaagatgccttacaaagacaactagagagctaacgaattaatgttctattaactaagaccaagattgtgtttagaaacaaacaaagaaacgaattgaatacaagaaatcacagaacacagctagcttacgtggttcagtcaatttgcattgacttacatccacgggggaacaaactcatcagctttattgaattatctcaagtcttgattacagagattaccaagcactcaataagaacaagaaaacccatggttctcaagctttctttctctcgttacaatgctctcagtctctcaacaacactctgtttttccagctgcgtatcacagcttataaaccacccaagaggcatttccagaaacacacgtgagggccatgtgcaataagggcttctttaacaaccttttgtttgcacgtgctctgcttgtgcttcattaacttcaaaacggcaagactgtatgtcgttgtaacaagcaattcatttactttattaaacacagtctttatgcgtcgttttactgaagttatcgagcatcacaaaacacaagccaacactgccgtttcatcctttttaatttgattaactgaatactcaacaacaacatcaccttacctctcaccattgatcaggtaatgtatgtgtctacacagaactgctttaatttcaactgatgttcccacaagttgtgctgattttttttttatttttctttctgtgcagaatcgggcagtagatcaggaaaagaacatctgtgc

SEQ ID NO: 84115 - DNA, 631 bp, Citrus clementina
  Intron number 2 from transcript clementine0.9_016685m (loc us clementine0.9_015402m.g) derived from phytozome v7.0 (c hr-ID scaffold_63; pos 382881 to 383511)
taatttacgtcagttctgttgaatgataacttattagaagtattagttggaaattcatttttctaattatatagtgatccactgaaaggggaatctaactttcataggtttatacattttaacttgccttctacaatctttgaatcaacttctgattggattagtttccatggcctaggcgattttctcagagttcaatgtgtatcaaactaaggatttatacgaagctagtttcttttgattgatgtttctagattccccaaaatattattttcagcttattagttccattgactcatgatctgtataatttgatgcatggtcttcctgtgtatttcacagttcccggagacgccgttcccgcttctatgataattaggtaagacatgcactactcccctgcatttgtgtagagttttgttatttgtaaaagaactcatgttaaataagcttatcaagagtcttaatgaattgttacatttgaagtaccctttcattggtttatttatgtagcttacgttttcaaatatatttttcttctagacattttttttgcttcgttttattatgttatgtaatcaatggtcctagttaattctgctggctgtggttgaatagaaagtggaagcaa

SEQ ID NO: 84116 - DNA, 771 bp, Citrus clementina
  Intron number 2 from transcript clementine0.9_010422m (loc us clementine0.9_010401m.g) derived from phytozome v7.0 (c hr-ID scaffold_10; pos 4722212 to 4722982 reverse strand)
tagattctgcacctgttgcatctcctgaccctcaggtaaatggtgcttgcaatggtttaaaatttgctattaacatgaataatgggatatctatattgttgggatagttagatatttgataatttaatggaaacagaaagctttgaccatgcacaatatttataagaagattataggccatgagcagaatttgttggaatttttacatttttacatctgccacatcttgtgctctgttttgtatctatttggaccttttagacttaaattaaccagcccttatttggttgagttagtatgctagactacacttattcaattttgatttatagggtttcaggtttagtttatagtgtatgttttctgttatcattttaactaggagttctgatgtttctttaacttactgaaattcacgggaataaacttccttcattctctcattgataagactatgtatttgactaaagtgcctatttttgtgcacctgaaagaagtcagtgctttgataaaatttggaaattttgagaagttatgcagaacaagtatgttgtttgatgacaggcatttgcatctcttcttttgatctacattgcttttattgtaagaatatctgtattctggagatgataggatgtggtcagtgtggtgcccggttgcactttagcatcttttgatttttttttttttggagtatgctcaacagtgctaattgaattcatttcatttgtcttaggtgtgggcttcgggtttctctgcagcttttctgaa

SEQ ID NO: 84117 - DNA, 805 bp, Citrus clementina
  Intron number 2 from transcript clementine0.9_008667m (loc us clementine0.9_008594m.g) derived from phytozome v7.0 (c hr-ID scaffold_27; pos 375187 to 375991 reverse strand)
cccctgtttctccatcggaaatcgacgacgtgaaggttcgtttagttcatctgacaacaaagaaccaaaacatgaaacacaaaagcaaatgactcttgataattatttgggctatggggattgattaatttaattaccgagttttaaaaaattgtgaagtgtgctgtgtgttttttatctcttttaggatacaaaagcgctgagttactcctgaatactgactcggaaacaaacatatctcaggctttctctctaaccaacgctgctttaatcaacacttacactcggcagcatttgttttgatttgctttcttcaataatacaaaagtaaaaaacaccacttttttttttctttctttaatcccaagaaatccatttttctcttcatattttcttttcaggtattaggaagtgaggttcctctatattttcctttattataattttgatgtgatattagaaaatcagttcactttgatcctttgaagctataaacaaccacgcggtgtgactctgcataattagttaaaaatgaataatataataggattaattttattataggcctggcttactttttttaattgatggatgattattattgttttaccaagtttttgtacagaaacggaaaatgcaaaattagaatttttatttgtggtgggtgcagcacaatttgcttaattttaaaaccgaaaagaaaaattggaagaaagtattaacgataacaaatttctatgtccaatcactggcgttggttctctgtgcagttctgtcgtaacaacaataacaacagcagcgctaa

SEQ ID NO: 84118 - DNA, 938 bp, Citrus clementina
  Intron number 2 from transcript clementine0.9_017596m (loc us clementine0.9_017596m.g) derived from phytozome v7.0 (c hr-ID scaffold_20; pos 4021709 to 4022646)
ttcaaccgtataactggtgtgaaggacaaggttattacttcacctgaaattcctggtgtttgtggctgacttggattttcactattatgaagaatttggatttatttgcctgtgtacaactctttatcccttctttagtattgcatctaaaatttatttgtacactaatcccttggttttgacatagtcttagcattgtggtgattattttttgagaatgagtcatccttctaaaagggttttcctttactcatggggaattaaatttttttgtgtctataatttttttttcgtctgataatttggatctttaactgatgtttgattggatctttgttttttgaggctttttctcatggcatcatgtcattgtgcttacaaaaatggttcatcggtggttcaactaaaactcttatcatttacttcttggaaaaaaaaattgaatatttctgcaataataaaacctctttttcaaattctccattaagtatgttggtgaaagtgtttgtcatgcagaccatcattagatttgttttatgctccaatatatatatgtgtatgtattcccgctttgcctttcctggttcatgttatttcagattactgggcatcatcttctgtctgaacattttttaatgtttttgaacactcatacagttgcccttaaaatactatccttagcattagagtcaacttctctgaaaaaagtgaaggatacatcatcgtcatgattttctttgctttaaatcagcattgccttctctctctctctctctctctctctctctcatatattatgtgcatcagtgaatctttattcttgttgatgctgatttctgagaggtttcttactttgttcggtaatttctgcactgtaacagattccattacggtgattcatgttgaatatgcaggtttatcctgaggggactcatcta

SEQ ID NO: 84119 - DNA, 763 bp, Citrus clementina
  Intron number 3 from transcript clementine0.9_025377m (loc us clementine0.9_025377m.g) derived from phytozome v7.0 (c hr-ID scaffold_1; pos 5179980 to 5180742 reverse strand)
atcctaatgtaagtaacaaagacatttgccaactttatcttgttctgtcatggattgaaagtatttactatgacaatttggttgttttatgctcactctttccaatgtgataacttgttttgtttctttggtatttgatgattttattacagtcatgaactctttgagatctctattcttttatccattatttattaaatcttttccgagttgcttttgatatatgtatactctttctccattaattgaagttggcttgaattcgggaagaagtattatgtatattatgatttgagatatttcagagtcaattgtttagaattatgtttatacttttggaaccataagagtttaaggatgtttaacgacgtttactcacctcttcgatgcggcctgtagggtatacgttctccactgctcaaactgctgcatgcatgcatatgcacttctttggtggactggttacatttcttttaaaattcagagcacttttaaatgacttgacagagagattatagcattgcatttagaatatcttttactgcaggtctttactttattgtcgttatatagtacttgcttgctgcagtaacagaaaaagtttcaattgttaagtttatacatggttggagtggaactttatgtttatgtttttaaaattttttaccattttaaagttgttgtttctaaacatatgtattcatgaatttcttgggtggcattattagccacttccagaaactgtagcgcttgtggaggacat

SEQ ID NO: 84120 - DNA, 658 bp, Citrus clementina
  Intron number 1 from transcript clementine0.9_025377m (loc us clementine0.9_025377m.g) derived from phytozome v7.0 (c hr-ID scaffold_1; pos 5180993 to 5181650 reverse strand)
gttaccttcaacttccaactgtaatagcatcttgggtatgtatttggtgaactgccttatgtttggtttgaatcagctttattttattttattttcagctcgtggtttgattcattaagcatgtgtgtgcataaattgtttaaagatgccgtgagaaacaattgaaaaattggcataaatcttgttttcaaaggggaagaagaataaaagagaagagattgattaggttaggagaaaataaattgaagttggcttgaattcaacttcagtattaacgaaataaaaggttaactaatcaataaaagctaggagaaaataaaagcttctaagattaacaaaataaaagagaaggttaggtttttgtttatactaggaatcgttgtgtaatgggggcgtgatagagttaggagaaaaggttaggtttttcttctttttaatttccatgttatgcttgtgctctgccatcaaaattcaatgtttcggattaaagttagggttttgagttttccgtagcattcttttttaagaaattattgctgttataaaattggcataatttagttatctgtgtagtgagttatattctatttgaatttgattgctgaatcgaagttgattttcggataggtttcaaaggaagaaacttagtacatataag

SEQ ID NO: 84121 - DNA, 655 bp, Citrus clementina
  Intron number 1 from transcript clementine0.9_030877m (loc us clementine0.9_030877m.g) derived from phytozome v7.0 (c hr-ID scaffold_65; pos 37972 to 38626 reverse strand)
ggaagaatttgaaaacgagttagtaagttttaatttttgttttctaaaaacaattttttatttacaagtggttcgttcacatggtgatggaaagtagtttatgcttagtatcttctagttttctctgttgattaaaaataaaaaattagaacttagttttatgggatttttttacgggtttgtttacaattttgtgttaggaattaatttaccttttagcttattgagtcaaaatttttcaaagcatatatgtcgactgtttgagtaatttgctactggcatttttgtatgcatgattttcttgtctttgatgtactaaatttatttttgtcatttaatttatcattcattcttattaggatgaaagattaactcataattgtgatgtttcaaatgaattagtggttttggacaatactaatacattaaagactgaaattgtatgtattaattaattcttcttttgtttctattctcatgcataatatacaatatctagttaggtaagccatattttcttttgtttacatattttttcaatttgaggatcactaattgaatggacacgagatgttggaaagagaaattgagttgttattgtgattgaaaaatctaatgtaatatcaaatggtagaaaactaaggataattttcat

SEQ ID NO: 84122 - DNA, 969 bp, Citrus clementina
  Intron number 1 from transcript clementine0.9_001645m (loc us clementine0.9_001586m.g) derived from phytozome v7.0 (c hr-ID scaffold_63; pos 502795 to 503763)
aaatcatcaatttcactcaacgctcatcacaagaggttcgtttctttctctctctattttcttagatcctgcggatttgttgattcattttctcggcagccaaactgaacatttgttaattttctcgttcgattttggttattcatggtgtttcatttttcttatctaactccaggtaatgttacgcttctatgtcatgcttctacattctacaggcgcttgaactgattttttttttttttctttgaagttgaaattgttaatctagcatgtagattttcgattcgtgatgtgaattgagagaattcagttatagcttttgataggactattagcaactatgagatcttgatgtagctaatcattgtcgtattttgtgtgtgtgtttaatatgtttttacttagcccgaattgttgaattatctttaaatttcaatgttagatctgatctggttgaggcatatgcatttaatgcctgtttaacttgtaacttatccttttaatgctgattagggctggattaagacttgtttcatttctgtttttctctagttatttgaaatcacaagggaggtggataggattttgtgtgaggtctggtctaaaaattttccttagtctccgctttctaaagcacatgcacatgcacactgagattgatatggagagcagataatagaattgttgtgttattggaaaatgaacactaggacagtttatcatatgattggaaatgtatcttgtattttggcatctgttgcactgatggttgactaatgtgatgattattgatgatgtctaattcttccataatttaattgtgttctaattttgcttagctgaattatttgatttttctagaataataacggaacacgtaacttggaaaatttgatctttttgtatcaagttattcataggattgttttttacatgaattttaaatgacagaaaagactatctgcaaaa

SEQ ID NO: 84123 - DNA, 750 bp, Citrus clementina
  Intron number 3 from transcript clementine0.9_012413m (loc us clementine0.9_012413m.g) derived from phytozome v7.0 (c hr-ID scaffold_1; pos 4472177 to 4472926 reverse strand)
gctctttatccacattctccatctgcttgcctcaagtaaatcttctaagtttattttattttttttcgtattttaaatatttataggcggtggtggttatttataggaaccgaaaattgtaagcttaagctgtattttgagttaggagagcgaaaaaagaaactggattatttggaacttttatatgatttatttatttctcttgctgaaacaatagagcttaaccaagttaggattgtgtaaaataagacaaaattatgaaaattattacatctatgacctaggctctatttgctattgaggtgctgtggaaagaaaagttgtaattgtaaaagttaatactgtgcggtaaatatgtgaaagaaaagttataactataaaatcaaagttaacggtgtgcggtaaatataactcttaaagaacaatttgacaaaaatagtgaagatattataggtttttcatcatacaagtggtggatcaaatcaacttagcttccacgttgtagtcgctagtgtttattgaatattttgtgctgtactcttaagctacagctacccaaccttagtaccaaatagggtcttatagagcactataaaatctgaattcgttccatactgcttataagcttcttgtgataacttaataatgtatactatagaggcagagtttaaatcagaccatatttattaacattataggtacttaacaaatttgctaattgtgcacattacaggtggaagaatcgttcag

SEQ ID NO: 84124 - DNA, 623 bp, Citrus clementina
  Intron number 1 from transcript clementine0.9_030036m (loc us clementine0.9_030036m.g) derived from phytozome v7.0 (c hr-ID scaffold_23; pos 2242235 to 2242857 reverse strand)
gcattcaggtaatctatttcttgaactcgatggaaatttctttgaaatgtagtatgctttttgacatttcgttagatctagggtttgtctgcgatttgcagtgtatattgctaatttatttggatttttaattttaatattgatgcattcggatccagatcttgtgtgctgatgcaagaatcttagtccattttatcaatattctcagtcacacatgatagatatctttaatctctttacttctcgcatttagtcagatctagggggctatctgcggtttacaatgtattttggaagtcgatgcggaggttaatatcttttaatctggatatctatacatttgactccagatcctatctatactttgttttttatgtgtattatttgcatttgactccagatctcagttgttttgttgttaccattgttgtgtatttgatgcgagatagtttcccatttaagaatggctcgtttttttcgttctagattacgtgaaagtgtttgcagaaaatattagatgattgttttatttttgtaaaaaattctaaataactaagatttgtttttcttctggatttctgttttatcaaatttctaagatctattgtatcatgtgcagcctg

SEQ ID NO: 84125 - DNA, 714 bp, Citrus clementina
  Intron number 1 from transcript clementine0.9_012559m (loc us clementine0.9_012559m.g) derived from phytozome v7.0 (c hr-ID scaffold_20; pos 250013 to 250726 reverse strand)
ttctaacatctgtgcttcttctcttgattcatgtgaaaattttcctctttttagtatttgtataactgtatgatggttgtttggattttttgtttttagggtttttttttttgtttttcttttatgggggttagtatctccctaagaatttacttaatgagaccatctgattaaactataccatttattttaaattcactctttattattatttctataatcaaagtgtccgtcttaaaattataaccggtggtgataggtctggtctacactaaagatattgtttaagtttttatatgactcaatacaaattagtgattgattgttaataaaatttaaaacaataaagggacaaattttaactatttatagatgataaatagtaatatacaagtatcaagagattttgagcttaaagttcaggagaagatcttaatttttttttatgttgtgagcagatttgtcctatttataaatcttctttccccactttgatccttgaagcaatgatcagttttgctttgaaaaaaaaaaaaattgtaacatgaagggaaaatcaatcatttttaaagcttttgtgataaaatggctggaatggtgactccgttgagaactgataaatagatttttcacatcgtatattgtgtacattattctcatatcttgtttattggtcattgtggcgactaccataatttatatttggatgatcag

SEQ ID NO: 84126 - DNA, 495 bp, Citrus clementina; identical to SEQ ID NO: 80703
  Intron number 2 from transcript clementine0.9_036075m (loc us clementine0.9_036075m.g) derived from phytozome v7.0 (c hr-ID scaffold_23; pos 1514573 to 1515067 reverse strand)

SEQ ID NO: 84127 - DNA, 921 bp, Citrus clementina
  Intron number 1 from transcript clementine0.9_000979m (loc us clementine0.9_000977m.g) derived from phytozome v7.0 (c hr-ID scaffold_5; pos 1258822 to 1259742 reverse strand)
acggcagcaaagagcaaaccgaggctataaaaacggtgccgtttctgtcttctgatatgagtcaccacgctcgtttaattattttatcaacgagagagtccctcgtgtcgtcatctttacttttttttttttttcaattttttcttattttaatagacatcctcggttctgattctctcagtcactcacagtctctctctctctgctctcaacctcaaaacaaaactcagatatttcattctttattacttccaaaacggcacagtttattctcttacatttctccaatttttgtagcttccattacagtttacacaggtgcatgtgatgtcttaacagtttatgttttgtcatttgtgtactttcgtctggtaatttttttgctgcattgcaataatctgttatgtcttttgctactgtgagctcaaaaaaatggacggttctgattatatcaacttttatcttctgtggatctggttttaagttgatggtgagcagtaaagaaaataatagctttgaacaaaatttttaagtaaatgagaaatcatttcgattttattttaattggattcgctagcttttttttttttttttttccttaaagctcagtttttgctgtttcagtgttagctgtttagttcaagttttattgcattaaatgggcttaatgtactttgatttcacttcttgcttgctctatttttattttttttacttttttggctcattcatttttttaaaaatatatatctcttgttttctttcttttgttttacttttaagcttgcttaggatttgtacatttattgccttttctacttattaggtgtggtgtaatgtggatcatttgatgactgcacagtgttgccttaattcgtaagcttaaaactgattttgagttttttttattttaggggtttg

SEQ ID NO: 84128 - DNA, 914 bp, Citrus clementina
  Intron number 2 from transcript clementine0.9_012025m (loc us clementine0.9_012025m.g) derived from phytozome v7.0 (c hr-ID scaffold_120; pos 180111 to 181024 reverse strand)
tttcccaggtgaatcctttgttcgataacacctatgattacaacgttgatttgtctcagaatttgcttttctctttgtctggtctcagttgcatctacttttaacttgtacaatgtagttgggttgcttttttgcaggacagttgtctttttacttaaatcatggcttggcaagattgtttgcaatactggctgtgttgttttctttacctataggttgtagaaaattagaatgttatacattgagaatgatcacagtttctagattccatgccgcctcttcgtcatttggctaagggaccaaccatcagttatagagtatctgcctcatgccctgattggtattaaggtactctagctttaagctacgactgctactatggcaaaaaaatataattatgaaataaaagttgatagcattaaggcgctgctgctgtgggaaaataattgtaattatgaaataaaaattaatagcgtgttgtaaatttgacttttaaataataattttgacaaaaatagtaaagatattataggttttttatcattttaagcgtgggacatcaacttagcttctaagccacaatagttaatgtttagtaaacactttaaaagttatagctgcccaaccttaataccaaatagggacctagttaaagacaaaagctgacctgtattattgtcatcatagatcatcagcatcatcatttctaaatattttcttttttctttctgtttttggttcattgttacaattgataagctatggaatgtctgaaagtggctaaggcagtgtttgacgatcatttttgccctcttctccatcttcttttttctatgtagtttatactttgaaagaggttctttttatcatagattttccacacatcccctttaatacagggagggctttttcct

SEQ ID NO: 84129 - DNA, 1009 bp, Citrus clementina
  Intron number 1 from transcript clementine0.9_029910m (loc us clementine0.9_029910m.g) derived from phytozome v7.0 (c hr-ID scaffold_63; pos 641047 to 642055 reverse strand)
tcgttgctgcagctgccgcaggtacccactcattattcgccatctctcgcttcttcttagttgcgatttatcttaccatatttctatttattaagcactaccaatgtccaaaaacgtgtatttactcgagttaaaattctcatagggaaagatcagcaaatttaacctcgttgtcgtaaaaaatttgtgtaaactttggacattttcatatcttttcctcttttatttctagaaattcttattgatcaatgatgatgaattttgaaatatgagaggggaaacgatattactgaactaataaggattttttattgttttcaaagtaccaatttaattaattcatagataataaataaaaataaattttatgtaaatcataaataaaaaattaattaattaatatttggtgtaataaagtctcatgaatggacaattttttctttaaatcttatcccatctaaacccatatgtaaatcaatattattagtcctgtgattttaggaataaattcaaatttagtccccttaatctagtccaattaagcttgccaaacatgagataaatatttaatctgaaaattaatccaatcctatacttaatcctatcatccaaacatggcagagttttatctgaaagttcaagttcgtagcttttaatttgtctgtacacgaggatttcttattcaagatggaggccaaattataagttttgacaaatgtggaatgtttctctttcgagcaaaagcacagagatttataatataactgaacaaaaattgtccttaatataataatgttaggtgtacagagtttgtatttcgaatgatgtagcatatggctttaacaaaaatatcaaactgtgtaaaataatgttttgtaagggagaaggaatttgaaaggaattttacatatctttctttctagatttatttttattttaattttttttgcggattgaaagtgaatcacaattttctttggtcaattcacagctctggacttgctaaaca

SEQ ID NO: 84130 - DNA, 793 bp, Citrus clementina
  Intron number 1 from transcript clementine0.9_009921m (loc us clementine0.9_009921m.g) derived from phytozome v7.0 (c hr-ID scaffold_5; pos 2424515 to 2425307)
aattcagcggttaggagtgtcttaccattttgaaagtgagattgatgaaatcttgaaagatgcacaaggcttaccgagacggtgatctttgggataatgaaaatgataagctctattatatcgctcttcagtttcgattgttcagacaaaatggctatagaatttccgctggtatgtatttttctcacctattcctcttcttaaatacctagtaaaaaccctttcatctccactcatgtccaagtcttaggagcaagagaaactcaacttgcagcttttgtacatgtgttatgtcagtttcacttgcctttcctttaatttcgttaagtaacagaagttatgtatggaaatcaattcataacgaataaaactcttggagaagtcatagaacatgcattactatatcttatagttagaaatacatccaagctatcgtctcatttgagctgccgctcggtgaagcttagtacttctgactgtcttttctacttttataatttacgtaaagagctgtctaccttcccccccaaaaaaagaaaaaactaaaaacatgtttctactacgatggatacaagcagttttgtccaaccaataaaaatcaagcatttgcttatcttgatttggacataatcagaaaccaatagagaaaaaactaaaagaaagacacggaaaagcaattcaaaaaattcttattaattgtcattgctacaaaaagaatgtttgtataaaatagtaaaaatgaaattcaaaaacagaaatcatttgatgcactaatctttcaatggggtagcag

SEQ ID NO: 84131 - DNA, 417 bp, Citrus clementina
  Intron number 1 from transcript clementine0.9_011041m (loc us clementine0.9_011041m.g) derived from phytozome v7.0 (c hr-ID scaffold_49; pos 1625028 to 1625444)
ctgtttctttggaagatagtgagatactggttcctctactgtagtcttttacgccgaatcagtatcagatgggttttaattctcattcaattgcttattcataaactgtgtccaaaatgaatatcttatttaacaaaaaaagaaaagaaaagatttttcctgttttcgacaattgccaaatgaatttgtatgcgaagaaaatttggttttggaaagagggtttatcaaattgtccgctcattgatataatcataatcatttgcaatgattagattttgtcttcagcatatcagttttgtttctcattgctgatttctagctgcaattttgagtttagatttagctggaaaacctctggccaacgatcattccgagccttaagcgatagaggcctccgttccggcatcatctgaaaaa

SEQ ID NO: 84132 - DNA, 581 bp, Citrus clementina
  Intron number 1 from transcript clementine0.9_000569m (loc us clementine0.9_000569m.g) derived from phytozome v7.0 (c hr-ID scaffold_10; pos 5731993 to 5732573)
agaaggagaagcattgaaaggtgaatgatttgatgatatttagttgcttgcattgcattgatgtgtttttgcttttgattaaaaagtaactggtttggattgtgccagtcaaattcaaatggaatatgcattatggtattgagatgttcaataaggtttctattcttatgatagttatatttttatctatgccatgttgtggaagagggactaggaggtgtaaattcaaccagcacttgttctttcagttgacacagtttcatgtgccctgtacctttgcatttatggcatgctttatggtgcatcttgcatcaacaattttatggattttttttctgtagagtcagagtaggatactggaaatgatggcatgcgtgttatgtagctgatgcaagttattttttacccgattgtttggctttgacaattttgagttggtatgaatatagaagtccttgttcagtgtaattcattgattaattctatgaatgtacaagtattcaagtgatttatttctcggaataaaattactttatgtggttgcagttcacaggaaaactcggttacaaagctttcaaggt

SEQ ID NO: 84133 - DNA, 766 bp, Citrus clementina
  Intron number 1 from transcript clementine0.9_035548m (loc us clementine0.9_035548m.g) derived from phytozome v7.0 (c hr-ID scaffold_107; pos 208869 to 209634)
ttagctgactggaatatgtttggtgctataatgaaagcttggtggaacatgttaggtgatgtgtattgttttgattatatttgttttcattcattataaatacctatgccatttgtgttgtatgcatcaagtgtcagaagaaaaaagtatacgaagcaaaacaaaatttttaagagtgatttgtgagagagtatgaattgttcttgtgatgttcttgaactttctccaataaaatttgtcttttattcttcaaattctccaacactcctgataactactatgataatgaaacaagaacaagatgctcaattaattatgcaaataacaagaaactctagttgtgtatagaacaattgtttcattactgttcattatatttttagaattttcatttcatttttcagtcgttcaattaaatgtaacagttgtaaatttcctaactgttgttaccctatcatgtaaggtacaaaatccttgtgtataatattcgcaacaattaaagacaggtcaatttgaacacaaagaatagtgtatttggtaaatcataaacgttgcataactatacaaagtaattcattcgaagcgtctagaatgcctggtaggcactaatgcaagcaatcttttaatcgtccagttgccctaacacactctatttgtggtcgcatggccttggaatatgagctgatgattgagatgttggctccaaagcctaagcataaattgtaacaaattcatgagttttatttaaattttttaagcgagctag

SEQ ID NO: 84134 - DNA, 768 bp, Citrus clementina
  Intron number 4 from transcript clementine0.9_006991m (loc us clementine0.9_003009m.g) derived from phytozome v7.0 (c hr-ID scaffold_63; pos 375824 to 376591)
tcgtacacctttggttaataacaataggaaaacaggtatttgtcaatgaccttgtactctcgtagtttctatttatccaaactcggactagtaattatagtaaagattgaacgtcatttccttatcctcatccctttagaaaaattaagaaatattcatgttagtcatggttgtgggcatcagctcttatgttttgctttattttcttttaacatcatcaactagtcagcttgcatttttttaaggttatgtcatcttttttagggtacttgttatacaattttgctttctagttggttgttcctttatatagagtagatctgtttcatgcagctggcggcatatgcaaagattctggagcatccgtaatggccaagtctctttttgcatcattgccgccacggacgccgaaaaaggctgtagtaattcaacggcagaatgatggttctttgatggaagagggcaataactgccacaagcttgggaataccaaaggaaaatttcatgaattccatgaggcttttagttcccatagccattccaaatttaatataggtctgcacatgttctaggatagggcgtagatctgtaatttattgaaatttaatgtcaattttggttttagtatcatgcttggagtagtgctacatttttgtgtttcatgtttggagaattttatttgcttcttgaaactggttgtagatttaaatatatgtattctaatttcaagctttacatatcttgatggtgcagcccctttcaagtttg

SEQ ID NO: 84135 - DNA, 441 bp, Citrus clementina; identical to SEQ ID NO: 83017
  Intron number 1 from transcript clementine0.9_009197m (loc us clementine0.9_009197m.g) derived from phytozome v7.0 (c hr-ID scaffold_40; pos 1945337 to 1945777 reverse strand)

SEQ ID NO: 84136 - DNA, 670 bp, Citrus clementina; identical to SEQ ID NO: 80439
  Intron number 1 from transcript clementine0.9_007310m (loc us clementine0.9_004985m.g) derived from phytozome v7.0 (c hr-ID scaffold_38; pos 1535653 to 1536322 reverse strand)

SEQ ID NO: 84137 - DNA, 883 bp, Citrus clementina
  Intron number 1 from transcript clementine0.9_004463m (loc us clementine0.9_004446m.g) derived from phytozome v7.0 (c hr-ID scaffold_10; pos 3744290 to 3745172)
taaaaatattggtttttgatcccatttcgttcctggtatttttctttcaatgttatttttttatctgggtatttctttttttctgttcttcgggttgtttagttggttgcttgataacgtttgtgcaagatccatcgttgttggaacagagtttctaagccttgttttgtggtcataggtttgtgtagatttgtgttttgagtttttttttttttttttcagtttctaatgtcatatataattctttatagctcgtgtgtgatcatacatgcgtcatgtggtagatcaaaagatttgtatttttgtttgcaattgtagcttcatatttgtgtgatggttgttgtatagagtcactgctggttggtatcgtttgtgatatcaatacatgtatttgcacttaatacaatgtaatgccggtaggagttgagctgcctgacttgcatcactatcatgtgaaaggtccttagttgaaattgtcggaatcctatgattttggaatgtgttactgaattacaaatatacttctgcgtgataaaagagagagatgatgtatgaatttgaactaatatttttgctagcagcttagcaaaaagcttggaattgtctcaatcataataagcttaacttaatgattgttttgttgcttgtactccctggaacatcattgaatgctcatccaatgcacacattttatggctttgcatcccaaatgtctttgatgtttaccgcactaatttgattttatttgattagtttgtttccatttagcctttacagttattacactctagttatctcaatatactgctttgttttgtactcttccaaatttaattacctcatgcattttctgtttgttttcatcagtgggagccacttttca

SEQ ID NO: 84138 - DNA, 716 bp, Citrus clementina
  Intron number 3 from transcript clementine0.9_011317m (loc us clementine0.9_011317m.g) derived from phytozome v7.0 (c hr-ID scaffold_98; pos 401706 to 402421 reverse strand)
ttggctgctagttttggatatcttcttttcaataagtatgtgatctagttccattgctgttacagcttgaatgttttgagttatatcattcctttcctttcttttgactttgaaattaaaggaacgaaaatgcatattcatactaaactctgacagaaaccttgtggtcatacaagtaatggcaactaaaattatgagcttttccattgaccatagccccatcaatagaagactgtaaattggatctccaaaccagggacacaagttaacattgcttgtaaaagccaaagaggaaaatatttataaaaaaaaaaaagaaaaataaaatgacaagatcaatgatttctagtgcgtgcacttccttcgtacctcatggaaacttccatggcctctagaatttggctttggctttgcataggcacatttcagtagtcgctgctggaaacaaattcatccattgtcttagtactgccgtatttctggtgcgagaaacaaatcaatctgttgccatggccaagtcctgttctttgatatttcattgggacaactaactgtaccactgcttggcctattttttcacaataaaaatgatgctctaggtatcaaatatttccattcttgtatctcatctttgaaaagtgcctcaaggaaataattattgtatcattcgtcttaatgcaggtataatttactgagcttagaaagtgcaagagaag

SEQ ID NO: 84139 - DNA, 676 bp, Citrus clementina
  Intron number 2 from transcript clementine0.9_000594m (loc us clementine0.9_000292m.g) derived from phytozome v7.0 (c hr-ID scaffold_33; pos 1809670 to 1810345)
aagtacttgaagaagtttagacatagaattgacaagtaagttatattcttccttttttctttgttccttaattttttttaaaaaaaaatcattgtttaatattcttatttttttctttgttcattaattaaaaaaatatggtttattaattttcataatattcgttacttattgacgtcaatttgaacccaaaaaaaaaaaaaaaaaaagagaggctgttttgtgatcaaaatagattttcatgaaagtatttttaatgcagaggaagtaacatatattatgaaaactgtgagcgagttaattgtgaaattataagtagtggtgggctagagttgttgctatctcacattttcgtcttgttttggttaactacttcttgtccctaccattttcgcattagagacaggcaaaatgttaaaatcaagagaatacttttcatatgggttattttgcttcacaatggaaagtaatcgagatttgactggagtttcattctctcccactttgtttattcaacctcaatcaaactaattacttagatattactcttatcttatttaaataaatatgttgttataactgatgaagtttttaactgtgttcagtcaactaatgacgtgataatgctgctgtaattacagggttggaattaggcttcccaaagttgaagttaggt

SEQ ID NO: 84140 - DNA, 780 bp, Citrus clementina
  Intron number 1 from transcript clementine0.9_011338m (loc us clementine0.9_005874m.g) derived from phytozome v7.0 (c hr-ID scaffold_5; pos 2449550 to 2450329 reverse strand)
cttcattgggcttctgcttctgggcatcattaaaggtaatttttttttcaattgtcaattttgttcctggtttggttctatcttgttctggtagttgacccttcttccatttttttactcaatttgcttgtagttgcttagattagcttctttatttgtttatttattttgtaatttcctgcatcaaggaaaatgatattttaagaacatgaatttgtttatatgttgattgattaattttgtaacataagcgtttttttttttaaatttttgcgtgtatatagctataatgcttttgtgagtaggtcattcctataaataaaactgatgtacacttgaggttgcccctactgtagcatgtcttttgttagactttccttagttggcatttgattgagggagcttgttaccttacataattatgtaaggtacataactcttccacaaccgtttgatgaaaatccaacggctttatcaaacggttgtggaagagttaagtaccttaactaaacccttgattgagattatacaataatttccgtgcttagcatgcaataaaatccacacattgatgatgatgttttacggtttgagttttaattggagagagtagaataatctccgagtatttagttaatatatgtctacatttggtaactgttcaagaaccatttagtataatgcattgagctgccaattaagagatgttcccttactgtggttaatgtgccaatccttaatctacaatgtattttcaggaatcattttctgccctgtgat

SEQ ID NO: 84141 - DNA, 924 bp, Citrus clementina
  Intron number 1 from transcript clementine0.9_026850m (loc us clementine0.9_026850m.g) derived from phytozome v7.0 (c hr-ID scaffold_136; pos 188824 to 189747)
agccttcgaagcaacaaccggtggccgtcgcctgaaatattaaacgtttcaaaggtgattttaagtttattttatctattaattgacattcaatattacaattttcgaaaacagtagtttaacccaaaaaaaattaatttttttgatcgtgtcttaattgatgtaatataatcatataaatcatcagttattgactaggttcttgtagaaatgcttattagctttgtctaacactaggctatgatttgtgcataatctttttcttgcctttgggcttgaaatgtctttgaaaatttgaatttaatcgatagattttccttttcacatggctttgcaacttattttgtctctcttggggaggtagagtttcattgtccatggacgggatagtttaaaaatgtttcctaacttttgtattgcttaatgatttgttcttgagagttgtaatgatgatgggcttgttatgaccataatattcagtatttaatattcagattctacttgttttccattttgcttcggtagtaatgtgagtgtgtattattttcttgaaatgaaagcttaacaaccatgttatcgccattgataaccttattgtgtgaggttttagagccctttcatattacataaaagaaagggcaagaaatttttatttacattagtggctaatcagatcatgtaaattccacatcctatgctttgcttgcttcctttctttggaatatatttgtttactttggtttcttcattgtacttttgaagaataatcggaatcagcttagcaaaatactttattttctatttaaaataaataatgatcttacttattgatgcatcaaatggcgagtttataggtagcaaccttggttgttttagtgtttgtggacaaagaattttttcttgatcagtttttgctctttgcag

SEQ ID NO: 84142 - DNA, 491 bp, Citrus clementina
  Intron number 1 from transcript clementine0.9_014630m (loc us clementine0.9_014630m.g) derived from phytozome v7.0 (c hr-ID scaffold_67; pos 720275 to 720765)
cttctagctacattcccccttttgttcctggtcaggtattcatcttttcgatcacccagtcaattcacttcagatttgattttttttggatgcccagtatagttattttggtttgatttatgcttatgaaactgtctgctagctatagtagtttagaatatcttctgccttttcagttaatttaaagatgatattacaccaacaatgccatatattgtccacagaaacttgtctaattaatttagggtgtcttgagagtccttatagatgttttctgtgaatttaaaattattgaaatcatgctaattttcgttcatcaatatgtgtctacaagtgctggctggattgttctgcatttggcccttttgctctgttgatgatttgaaaaactattatccttgtattactgtctaagatttgtggtttatgtcttctgcggtgacaatcttgatgaagcccgttgaaggatttggtgtgtcgaaagtcgtgga

SEQ ID NO: 84143 - DNA, 761 bp, Citrus clementina
  Intron number 3 from transcript clementine0.9_017798m (loc us clementine0.9_016698m.g) derived from phytozome v7.0 (c hr-ID scaffold_10; pos 283946 to 284706 reverse strand)
tctttggtatgtatgcataatgtggtttggaaccaactcttcacatgctgtacagctgggtatccatcttagctgtctttagttgtttcctgaaactttgcaatatgtttcagattcttgtgttcttttgtattctctacagtttccttcatggagttcatttacaatttttttgagcagtttattcttcttctcaaatattatgttgttttgcttggtccgcgttcaaataattggaatgttgcagacttacaggtttggataaaattggtttagtatgctagaaatttaaaattttactaggtttacaggtagacttaaaaacatgaatatttcatagttcttgtgtttctcataatatggtgccttggattccaggacttcaaatatgttagaaactaaaaaatgcttgtaggatagtagaccctttgttcttctttggacttgtgttctgagataatgatggataggtggatgcttagacacggtacgacttcctataagtttctataaagcacaatgttgctacaagcataaaatgcaataggataagaatttcacttattttccttgacatgtcgaaggttgaggtcatactttgagttgctactacacttgatttgatcttatctctgacagctttcattacaccttggaggaaattttattctgccttatttcatcagagtttgcaggagatattaacaacctcatgtttgggtttagttattagggcaagtgtaccaaagctggacctggat

SEQ ID NO: 84144 - DNA, 522 bp, Citrus clementina
  Intron number 1 from transcript clementine0.9_003898m (loc us clementine0.9_003898m.g) derived from phytozome v7.0 (c hr-ID scaffold_1; pos 11843523 to 11844044)
atacttattaatcctcacttgtgttgccacttgaggtagtgttcacttctataattgatacttctactttctcaaatgatacgttatgtttcattgttatgcttttttcagtccttaaagttgactgtgtactgatctgaaatgggtgtttatttcttatgggctaggtttagattttagtggtgggtactgatttgaagtgaatttaactgggaaaatggacttgtaacttactgaaactgattttttgtatttgactaagcttcagcactgtgtttgttttatgtgcttactcttatattttcttactgctctgatatgttaatggatctcatatcgtaaactacctactgatcttatgctgtgattaaaagttccaactattttgggattacatatattcgtttgattgaaagtgtatctgggtttagctctttcagtgtttaaagtgaagttggatcagtgatttgatttgttcacttcttataaaattaatcttctgggggtttcggattgtagaaa

SEQ ID NO: 84145 - DNA, 612 bp, Citrus clementina; identical to SEQ ID NO: 81674
  Intron number 4 from transcript clementine0.9_012929m (loc us clementine0.9_012929m.g) derived from phytozome v7.0 (c hr-ID scaffold_29; pos 944333 to 944944)

SEQ ID NO: 84146 - DNA, 990 bp, Citrus clementina
  Intron number 1 from transcript clementine0.9_010734m (loc us clementine0.9_010734m.g) derived from phytozome v7.0 (c hr-ID scaffold_1; pos 6586789 to 6587778 reverse strand)
ctctctatctctttcacgttctaagacgaaaaccggtaagcttaggctatctatcttttcatcattcctaaaacgctgtcgtttttgcttcattctcactcactcttttatctttcgaatgactcaatgatttaattaatctgaactcgatcacgcacataacacagagtttctagcgatttcgagatcgtgacgttgtcgtttttgtgttatttatttttttatttgtttgttattaaatatttctgaaagaaacgagttagaatctgcgttagtgttgagttcgtttgcttggatatttgaatagtaaaaacagaggagcttcttcttcctgagtgattgcactcgagactgcaaaattggaaacgacgtcgtttcgttttgtttgcgttttcatttttttttttgattcgactggtactctatgatccgagcggaaaagtgagtcggaattcgattttgttgactatttttcgttgctgttttgttgaacgaacgatctgagttgaggacgagttggtattaagttttattatggttggttttttttcctcattatgttgactggttccgtttcgttgactgttgtataattttttttttaatttccggttctgtgattccggcttcgtcgttgtttcgtcgatcatttttaacgtatacgaatgagtttggtgttcaccttgagttaacttgacacgttttctcaattcgttgaagcttctatgcgaattatgatcactgtttgctcgggaactcgtttttattttaatttttactatcataactgagtcaaaacgagtcaaaaatagaatcagatgtctgaattcaattttttaaaattaagtcagcataagtattgcatttttcatttctattttgcattaggcaatctgtgaattggatataattttgtggattgttggctaaagtgctaatttatttgattacgcaggggaagagatttggatctgtaattggctgtagcgg

SEQ ID NO: 84147 - DNA, 431 bp, Citrus clementina
  Intron number 4 from transcript clementine0.9_030920m (loc us clementine0.9_030920m.g) derived from phytozome v7.0 (c hr-ID scaffold_51; pos 965266 to 965696)
gcacagataaaataattctagcgaatcacaacagcgtacaaactcggtaaaaaataagacgtcagaaggaaaaaagaaattttgaagtactctgtgtgctagttgttcttgcgtgtgaaaaacagaagaagaagctgtctttttatatacatgtgagtatgtaacagtagtataaaattaaatttctgaattcaatatatgtgatttaatattgtaacagctaattgaatttaaacaattcaattcagcctattgaattcaaaaattaaattgcacaatagcccaaaaaataattgtgaagctgttataaatcttttgaattcaaaagatgtgaaaatgttaccaaaaaaaaaaaaatatttaaaagaaaataaaaaacgtgtcatgcaagcttaggtgattttgggctcatattcgtgtacgcacacgag

SEQ ID NO: 84148 - DNA, 806 bp, Citrus clementina
  Intron number 4 from transcript clementine0.9_009453m (loc us clementine0.9_009453m.g) derived from phytozome v7.0 (c hr-ID scaffold_1; pos 11417565 to 11418370 reverse strand)
tttgggttctcttttcgtaatttctttgtgtatgtctattaaacactgaagagcaaaaggaaattgcatgtgtcatgtattgaatcaattgatcacacaataataatttgctgtttctgttaatgtaatgtggtttggatatatattttaatgaaatgagttcgttatttatgtagtcccacttgtagtaattggatgcaagtactgttatgctattctctcccatgaaattcatgtcttcattgcagtaccaaatcttgtttgtttcactagcataagaaaccataatttatgttgcttgcttagaaatttaatatttatgtatttttgttgtattataacaaaaagaaagaataaacaatctacactgcttttagtctttctctttttacatatatttagccttcactcttcatctttttactgtttgattctccagtgtttttaacttatagggcttaataatttggttgtaatgcaagttccaaaactcctggctggaaattattgaaggttccttcattagtacaggctaacagctctatatttgtacaactagaaaaaatatgaaaccatataaaattatctcccggatgcaactcaatgggtcatggctacttgaatccttctaataatttttactcattgtgcctaagcaatatataaattaaaaaaaaaattcagaaagattacagaacctaaatagattgtgatcctacaacttcttcgggaatgccttgtcaaatcctcagtgtaatctgatttatctcctcaaaatccttcaggaaccccaaggccaccgtttg

SEQ ID NO: 84149 - DNA, 506 bp, Citrus clementina
  Intron number 1 from transcript clementine0.9_031343m (loc us clementine0.9_031343m.g) derived from phytozome v7.0 (c hr-ID scaffold_122; pos 445959 to 446464)
attgtttcattattgtaactatatactctcaaacttattatttcttcttagcattatcctcaaaaccaattcggaattttataagatagcctacaaaataatatttttttagttgctagggtgtttactgatgatcaggtttgtggaaagactgaagaaacctgaagtgctgccaaaactatgttttgttaagagtgaaagtgatgttattagacatgctatgtttagtactttttagattttgtttttctttcagcctgggacccattagtttagaagaatttcctattatacacataacatggaaattttgagtcagtttttatattatctgcaatgttcatgatttagcacaaacaacatctaatactaaaaatgctaaagtggttcaatgaatgttaaaaggaagaagtaagattagagttatcgcagttttgtttttgaatttacttccaagcagtacagtttgagttcaaagttgtactcttttggtacacagggttgtg

SEQ ID NO: 84150 - DNA, 961 bp, Citrus clementina
  Intron number 1 from transcript clementine0.9_012938m (loc us clementine0.9_012938m.g) derived from phytozome v7.0 (c hr-ID scaffold_10; pos 3094487 to 3095447 reverse strand)
aactggccgccagaattgagaggcttcctgttcacgtaattctcaatttttgtattatatgttaattaacgtctgtctttgacttgtttttatcgcattccgctcgttgtttggataaactttgcatttagcgctctgtttggccgctcagaaattttttgaaaatgaaaagcaaaaacggaattaattgttgtattgaatatcttgcactcttgaacttctatatatctgtaatttggagtgagttaatcacagtgatacgaagctcgtttaggcttttgattcttcctcattatcttgcaatagaaagtattaatcagttcaattgataaatgaaaaacgattggtgctatatatattcaggctggcaactttttcaagactttattattagatgataaaaattgctagcaagacctgaacttactcgcaatagctttgttccaaatatcgcttaattctagaaaagtggtttcctatcataaggttggacctatgctaaaaattgccaaataaaagttcaggaacgtaagatctccagctattaagaaaaatttactgtacttgcagtcctaccatagtgtaactacttttgtaaaaggtttattgaagaaagagattgtttctcaaccttgttatggatcttactgtgtactagatgttatagatattactagtttttgcgcaaatacttatagcctgtctaatttcaatatctctgaagtcattaagttataatttattcatccaaacattgtgtgttgaactgcactgatgtggtgaattatagtttaatgcgaagatgaagaaactctacctttcaatttcattgggttggcttataaatcttttttcattatgaccttaatatacctattttccaagaaatatgagctatgaatgtgtcctactcactcccagattgttgtcaatgcaggtcaacttctcagaaagctgtatc

SEQ ID NO: 84151 - DNA, 890 bp, Citrus clementina
  Intron number 2 from transcript clementine0.9_020348m (loc us clementine0.9_017963m.g) derived from phytozome v7.0 (c hr-ID scaffold_1; pos 11891092 to 11891981 reverse strand)
cttcgtactcgaaggtgagttttttttttttttttgggttgattctttgctgattttctgtttttgttctgtttttcctttttaaagctaggtaattgactttggggctacagttggtattattttggagggatatatatattgtgatactcaattttagtagggttttgagaattctcattggttttgaattcagttgttggattcaagtgagaattgatcccatttatgtcttttgcatgttgaggtaatttgatcatcattctttgtggtgcgtgctgagtttaatttttgggctggaggtggggttaactaggttatattgatcttatggtggttaagatttgggttatttgataagtttgatctgctttgaggtttttaactacttgtgtgctgtgttcttggagatactgaagctcggtgcacactttattgaaatttaaaatgttatctttgtcatcgtaatcatagtttagcttaaccttgttcgcaatgttaagtgaaccaacagcatactttttgctaacaagcttctctgtttggtctgaatatagtgagttaagtgaataatggatttgctctgaagtacgaagatttaaattcttctattgaccatttcttaacccgtctaccatgttctgaaatttgctagaaaaatccagtcattaagaaataaagagatgcggagttaaattcatttctttgtatgcttggggtgttatatttgatattacttttccatttgcacaatgttattgcagctgtctgatgcaggtggttaaaattgaaattactttttctcccctcttctagactatgttaaatatttttattcatatttctgccatatagcttgtgggaggacgctcgtcatctactggtaaggg

SEQ ID NO: 84152 - DNA, 943 bp, Citrus clementina; identical to SEQ ID NO: 83940
  Intron number 1 from transcript clementine0.9_018207m (loc us clementine0.9_012554m.g) derived from phytozome v7.0 (c hr-ID scaffold_29; pos 1535624 to 1536566)

SEQ ID NO: 84153 - DNA, 762 bp, Citrus clementina
  Intron number 2 from transcript clementine0.9_026840m (loc us clementine0.9_026374m.g) derived from phytozome v7.0 (c hr-ID scaffold_1; pos 12624505 to 12625266 reverse strand)
agtccctcctcaaactagcgctatcatcaccaacggtaaatcttattttgtattactttaattctattgatattcatagttatatttacttttattttgtatgtgttaataatatagagattacatgttgttaatgattcctgattcctcgtattatatttttccctttcttagggttcaaggttgtcgatttgatgttcagtagattggtttttattcaatttctgtaaagttttatacattagcgtgattttatcgatggtatgtggcccctgcaaataggaaattgatctgccggtgctagtgttttatttggcatttgtaatatgaaacaaaggctatttacggtgtgtcttctgtaatatgggggaggagcttcttttggataaaaaatctgttgcaatgatactattcttccatctgataaccctgaaaagcataagagaatataaacataatggacatttgaaaattttgatcaaggatgtctatttggttttttctggttaccctttgcgattgatgtgacctagataaacacgattgatgtcaccaagacaaacattctagttattttttatctccagtaactgaagattttcattttacaagtctaggtaatcaaactcagtaaggtaagatttgcacacctgtaattattattaaaaatggattttcaattgtttagtttgagattttcaaatgttttcactgtggttcttctaccaatctcactcaaaattcattgtctgtaatttgcag

SEQ ID NO: 84154 - DNA, 751 bp, Citrus clementina
  Intron number 1 from transcript clementine0.9_005022m (loc us clementine0.9_005026m.g) derived from phytozome v7.0 (c hr-ID scaffold_43; pos 1475599 to 1476349 reverse strand)
tctgagtttcatctgtcttcccatttctcaatctggttagctccatttctttcatgtattgctgtttctacatcttttctaatctgttttattaacttttataaaaattttgacttaatccacagctaatgattttttttttctccaattgctttgtataatcattttctgcttctgggtttgtttattcatatattgatggacatgggttttttttttcagggttgttattggttcaatgaaaatttgtagtggattttgtgaagaaaggggtttctagggtttcgtagttaatggaactttggtgggtctgagttgtttgttcattccgtgttagatttcatgggtttgcttgctttgatgttttgatgattggttagtgtcaattcagatcttttaagaagagcaaattatgatatttgttgtataaatatcttcttttttcggtttgttcttttggtaagtggaattttcggttcagtttgctttttttcctaaggatgatatccggaatagttgaatgacaaaaggaatataaggaaaacggggtattcaaagtttttggcaataggcatctgtttttgatggaatagggattttgaggaaggagtcattttgaaagtattgcctatattaggtgcttgacttttgttcttttcaatgtatcaattgttgtttgatgaggactgagtgtttatttcattaggagtttttagatcttggaggattggcagggttgtgtagaggttaa

SEQ ID NO: 84155 - DNA, 363 bp, Citrus clementina
  Intron number 2 from transcript clementine0.9_001407m (loc us clementine0.9_001407m.g) derived from phytozome v7.0 (c hr-ID scaffold_27; pos 538542 to 538904 reverse strand)
atgtaagttatctctatctatatttctttttttgccttcttggctgttagtgtgcttaaagcaaaaagaattaaattttgatctcttttcttttttgtgtatttcaaattgagtcatggcaattgggcccctaaatctgacaatgaacatggtggtgttattgtttcatcttattttctctcttacaattgcagataaaattgaataatttttatattttagaccttgtccttttcttctaatggcatttatgagatttaaatctttgcctgcaacattgttcttattgtttgcctgccttttgccaatctgtgttctgtttttgcaggttaccataactcctgaggtggcatcaaggactgt

SEQ ID NO: 84156 - DNA, 630 bp, Citrus clementina
  Intron number 1 from transcript clementine0.9_001407m (loc us clementine0.9_001407m.g) derived from phytozome v7.0 (c hr-ID scaffold_27; pos 539533 to 540162 reverse strand)
aaagtggttcttagttgcaggtatttccatttcttgggtttctctttgattatcttattgttttaataagctccttttcttcatagttaagctcattgtggggttcttaattgaagcatgtgaagaagaagattttttttttatttttgtctttgcattcatctcatgagctgagcaaattcctgtttggggtttcgtgtcttgattttcttctttgcttggtctgacattttgagcaaaatttcatggaaaaaaatcttcgtgaagaatgaaaatccctgtatgattgtatattctatttatatcatatttttcgtatgaagagttatggttgaaagaaatcgtttctcttgtttttttggcctttttttattttaaaaaaattattacgaattattatttttaaaaaaatttttgcataggaatagtaacgcttgtaatgttgcaacaaaggctggacattttacccattccgttttattgtgtgtgtgttcaactttgatgctgctttaacatcgtcattatttccacttctttacagtttctgcagctttggtaatgtgactgacatacattttcccttttttgttattaggcattttccagcagaattagtcctcgaaatctttg

SEQ ID NO: 84157 - DNA, 929 bp, Citrus clementina
  Intron number 2 from transcript clementine0.9_013765m (loc us clementine0.9_013765m.g) derived from phytozome v7.0 (c hr-ID scaffold_23; pos 2646964 to 2647892)
gttcctgggtatgtacccatgatctatctacccttcaatttttgtttcttttgcatttttttttgtttcgggtcaaacccagctacgcatgaacaggctgttgtttccgtcacggcgctccctaattattaactacggtacttgcctgtgtatgcagaaagagattaaccaaggccaaggctttgggatcttaccgttccatatttgatgtgatgaataactggaatctcctggtaaaagtgacaaacatatatatttacgggtcatcatcgtttaataagattttcttacaacaaattaaacaaaaatagagacacacaaattttaatataatataaaataaaatatattggatgaaaatatgtatttttcttatacattatcttcataactcttggtagatttatactctctatcttataaataaagggtggaaataacaattaactcaattaaagcgttgttagcatagatatcttctttttttcccaataaaattaatttatttccatttgactctgtacaatttttaaatattccagtgtagtggccagtggggtgccttggcatcattagagtgtggagatcacactaaagacttaacccatcaaaatggtacacctgtgtaattgcggaatggtcaattatgagattttacttgagggatagacgaggttgacaaataaacggagacatgacttgtaacttgaatttgcattcaaatgaagacttgtaaattttcaaatttcaaatttctttgcttgaagaattttatgattgagaaacttactgacaaaagaaaagttggtggagtggtgtagtatatacgtttccagaagctagccagttatatattgtcaaaaacagaatcaaataccttgtttccactaaagtaatttatcctaaacaatttgtatttatttgcaggc

SEQ ID NO: 84158 - DNA, 767 bp, Citrus clementina
  Intron number 1 from transcript clementine0.9_002827m (loc us clementine0.9_002827m.g) derived from phytozome v7.0 (c hr-ID scaffold_122; pos 408228 to 408994)
agactggattcagggtataatttcattattctttatgatgttattgttgcaacttgcagttaacacttgtcctctgtttgttataaaatttctttgctttttgaatgattacttgaagttgaattgtgttgaatgttcaggaaggtatttaatgtggatggtttatttgataatatgagctagcaggtgttatgttcgtgctctatcaatgcgaattagtgaataaatattagcaatttctggtagcaattggatttgctatttgttttatagtgaaatggtttatataaaattaggtgtcatataagaattttagatttttctggtatagcatgctgggttctttattgagttcttttgttgagggttggacttttgctttacagttcttaagttgatttcagttcatgggagtttaaaactggaaaggctgttcaggtcgtgaatgctgggcataatttctgaacgcagattgctgtttcatgttatttatatcactagatatccacaatctgctttgaaataattgctatttgcacgaatatttattactgaaacatcgaaataatttgtttgctaacagttcactttgttacttatgtccgtcccaggaaatgtggtgtcttaatgtgttttgcatattattgtcttgaactcaatgatttgaagattcttgtctttctgttaacaagttgtctttttttttttttcttttagccaaagtattgtcattgaaaaatcatttgttacatgtttcaggtttacga

SEQ ID NO: 84159 - DNA, 947 bp, Citrus clementina
  Intron number 1 from transcript clementine0.9_004780m (loc us clementine0.9_004741m.g) derived from phytozome v7.0 (c hr-ID scaffold_67; pos 988328 to 989274)
tccaagacccactgtgcttcttcttgatagaggaggtattttcactgttactgtctctctctctctctctcttaaaacattttctaattaatattgttttcttttctgtttctcaagtctttgaatctagaaaaaatgggttgccagagtataattcttttttgttgggttgactttaaattttttttctaagttgacttgtttgttgagagtttaattgattactcattgaattaacttttttatgtagtcatgtttattttgattcagtttcatgaacatttagttattttggtaaggaggtgtttgatggttcatgaaaaaagaattgtttaagcgattgctttcaaaagattgatcagttttagaatgggtagatgtcagtttgcttttgtttttgaataacaatgacaagttttctttaactgcaacggatctttcttatagaataaataaaaattcttggttttgtttccggatgtttttaatcacattttgaggtgggtgctctggctttcccctgtttttccactttagtttcttttaatatcctcataatcatgataaagacaacagatgggaaacaaaaattggtcagaaagcctatgctccttcactttgttgcactatttaagtgtgattttggaatgattctttcattgattaaatcagatacatattttattctttcttttgaaattcctgtatatgccgtttggggcacatagtttgaatcttcattgaaaatctcatttttcctttataatggatttgtttgattttatgaatcacgagacacataatcctggttattatttttcttccatgttctacaagtagttcaatttttgtccaatgaaagtttgcctgaatttctattttgacgattgtaaacaactgaagtaatgcaatattgcactcttagagtgctactttgccttgaaggt

SEQ ID NO: 84160 - DNA, 734 bp, Citrus clementina
  Intron number 1 from transcript clementine0.9_005059m (loc us clementine0.9_005059m.g) derived from phytozome v7.0 (c hr-ID scaffold_27; pos 867954 to 868687)
aggtaatggcaataacagtgaaggaaaaaaaagaaccccatgattcttttttagtttttgaagatttattaagttgaatttttatcatatattactgcttgtttctgccattggatatgatccaagtggtgatgctaatccttttacgctctttttggtggtgatagtattactgcttgaatcttccattggatattaagttgaattttgatcatattacttcttctatctgccaccggattcaatgctgaaaactcttggaagaaataatcttgaattttgattttatttggtttttacagtacttcatgaccttgaccaaatagattagcgcttaaaagctgattgatggtgtctttgtttcaatatggggtcctttatttatttttataaatatattttattattattattattattattattattattttacaccaatttttacttgtttgaatggaaggtagtgttcaagcttgacttttaactaaagttgtccttttgctttgttgggtcttcacattttaccgtcaaagatcttgttcaattggtaatgagtttctgttcttaagtatttgacagcttttacatagttcgcatttagatgattctgagtgatatattggctcatttgagattatgtcattttctaaagtacatacactgcctcatttgagattatgtcattttctaaagtctatttacttttcattttaatgcgttaggtgcgtgaa

SEQ ID NO: 84161 - DNA, 682 bp, Citrus clementina
  Intron number 1 from transcript clementine0.9_004731m (loc us clementine0.9_004731m.g) derived from phytozome v7.0 (c hr-ID scaffold_53; pos 996860 to 997541)
tcaataatatatcgctcggcggccgaggtggcacggtaacgtactattctcccattgtggcgttcaacaattcatcgaagctttgttttcttattgtttccttgaaacgctgtcgttttacccgagagttcttcgaaacccttattgtaggttggttagggaaatttttggttttttgacttttttatgaaggatcgaggggaagttgtgtagtgattttagatttttcttgacgttggtgatctagtgtgtcattggaaaccctaaacttttagtcataaccctaattagtccctgctgttttttttttttaaattttctcgaagaggaaaaatgagggaagaaattgaaggattatcattgtattttgttttttcagatttttttttttaaaggaaaccttaatgttatattaaagctatattcaacttcattaaagaaaggctttttctctggacaattaagttttgataatttcgtatggttctgttccaaaaggaaccctaattgcttgctttctaatgtctttctttcgtcgctttgattttggttatgaaacattgctggaaattcagtgaatatttggagattgtgtggctttttagaatattaaacatcattgttgttgccattgctgtgtaatgcagaatcctgggcagcttaaaatttactcgggaaagat

SEQ ID NO: 84162 - DNA, 490 bp, Citrus clementina
  Intron number 2 from transcript clementine0.9_004731m (loc us clementine0.9_004731m.g) derived from phytozome v7.0 (c hr-ID scaffold_53; pos 997658 to 998147)
ggttgtactacaagttcacaggatttcgtgaccaggtattttaacgttctctctctctctctattctattttgtttttttgtccgattctgaaagttggaattgaaggttttcaaagtatttgaaaaccttagtcactatatagagttattatgatgtatatttttttaaaatcctatgtagagctgttatgaatttaatgtaaatgaatgtaattaacatacctattcttatggttcctttttcattcttcttggtcacttggtcacacctagtctattttgacattgatgatcattttccagttttgttgcaaagttgctttatagtttgcattttacaaaattcatagtagttttagttttgtcttccacgtcccttgtggttgtcagtgactgttatggagagctttgatatgggtttataaaattcatagtagtttagtttcatattccatctagtctcactgttttctgtcttgtccttgtagg

SEQ ID NO: 84163 - DNA, 631 bp, Citrus clementina
  Intron number 1 from transcript clementine0.9_002955m (loc us clementine0.9_002955m.g) derived from phytozome v7.0 (c hr-ID scaffold_5; pos 88863 to 89493 reverse strand)
tcacttgattattgcatcccagcaagctttcatttgtgagtgttttcttttcttttccttttttttgaattttccaatcaaaactgtattctttttaataatttgtttagtttatgctttgtgttaaaagcagaagaaagaacgaaataaaaaatttaaaaccatatgctgtttgcttgtatgagatgatcattaaaaagttgtgctgtatgtgtgatgtacaagcgaacacttcctcatgttctccgtcttctttataattggtgcgctgatgatcttttaaatgtatctgttaaaaaaatcctgggttttctttgatttatttatttttttaaaaaaattatgggttatatatttttttgagataatctgctttaatatatgtaagttgaatgatagattttgagcggttcccttagtttccatcgctagttgattttttcttttttaattttttatcttatatagtaactggctgcttttcatagtaattgtattgattaatgttgtttaatattctttaaatcagttttataaatgtgttaaatttttagtgcaatcaatttcctgaattgtacaactaattatgtgctattgttttccttcatttcttttttttaaaatcaggtgc

SEQ ID NO: 84164 - DNA, 585 bp, Citrus clementina
  Intron number 1 from transcript clementine0.9_021674m (loc us clementine0.9_021674m.g) derived from phytozome v7.0 (c hr-ID scaffold_29; pos 1688629 to 1689213 reverse strand)
tttagctctcttccttggcttcactgggcattcaagtaagttcctcaagtcaccttttaattttcttgtagtgaagctccacaaagctagccaccattgttttttttttttcctttttttgggtttgtagacatggagatttgagatctcattttatttttatcccttgacattaaattttgagtataaaggaatgacctttttttcccctttcttcgtgcatacccatctgttgtttttttttttttaattttctgattcattttagttggtatgaaaaaatgacattttacttgcatacacggactcaaatctctcctttatatatggtgcctcactttattctcatttaaaagaaatttcttagcctgaaacttaactattttcttagttaatagaaagaaaattaaaaaagagaagattataaaatataaaaaaaaaacccaagttgcctttcagttttctgagtcaatttttaactatttttattttgcttccttcttctacaagggttaatcttttttttttgttccctcttgtttgtctgtgtgattatggtagctgcaaactggtgtgtttgcaaag

SEQ ID NO: 84165 - DNA, 867 bp, Citrus clementina
  Intron number 1 from transcript clementine0.9_025582m (loc us clementine0.9_025582m.g) derived from phytozome v7.0 (c hr-ID scaffold_29; pos 1440338 to 1441204 reverse strand)
agcagcacacagcactcacgcagggcaagaatcgggtgagtgagcgagcgagcaagcgagctaattcttttcttttaattttttgttatattttcccgtcctttctcggctaccaaacagaattttaggttttcagatttgtttattttacattttttttccaagtttatctgatttgatctgttctctggctgttttaaaaccacatttcatcattaggcatacttctgtgaggataaaaaccttagatgtccatatcaaaaaatagcatgcttaatttaatgttttgatgttgattttaaggcttggttttgcttagattatctgataatgacatttattattattattattattattattattattattattattattattattattattattatttgctataattttatgttgattttaggtttacgttgctctttaaggcttagattacttctgttttcttaaataaaaattcattaaattaatgcctcatgtagatttttatttgatactttggttgtttgtggggaaaccttacaaattcttatttgatctggctcttttgtatcttccgatgcggcaggaaaattttggatgtcatttgcttttcataattttgttgtttttcttgatcttttttggatctagtttttgtaaaattttacatcagggctaatgattagaggaactatcttaagtttgagccaggctgggttagtctttgaagacttgtttatgccctaatttcatgttacatcaactctggaatgttggttgaaatttgtagtggctaacacttgcgttgcatttacttctgttgcaaaattagtgcaggatctaggatttgttagataaaagttcaag

SEQ ID NO: 84166 - DNA, 529 bp, Citrus clementina
  Intron number 1 from transcript clementine0.9_004836m (loc us clementine0.9_004836m.g) derived from phytozome v7.0 (c hr-ID scaffold_5; pos 6140423 to 6140951)
caaaatctggctggagagaggtcagtttttttttaaaataatttttggctgttaaaatcgttcttgttaattgtttggaatcagttttattgatgtttgttaaagattctggataaaaaaaggatttattaagctacggcctacgggttgtttttgttttattaataaatttggatctgtgtatgttgtcttatcgtaacatctatctgggtcattaatccaatttgtacctgatagatatatgtgaagtattgaaaagtgaacataaagctaaggaaacgatagatacttttggaatttagctattacaatttcatgaatatgtatgtttcttttagagaaacacaatagcaaaatggaaaagctaagcctgttaataatgctcatttgttttgagcaaaatattatgagattattgtgtttctttgtatagttatgcttttaaatgtccagtatacttttgttgatgatcaatggattaaaagggttgtcttcttttctcattttgacaggctaaactctcttgttc

SEQ ID NO: 84167 - DNA, 577 bp, Citrus clementina
  Intron number 2 from transcript clementine0.9_013274m (loc us clementine0.9_011809m.g) derived from phytozome v7.0 (c hr-ID scaffold_67; pos 1084754 to 1085330 reverse strand)
gagaagaaggtgaggtgctttgcaaatgcgtcacttatccacctaatttatggattgtttttgcaccagtttgtttgttgtaattagttttgattgaattagaagctaaagagcaaccaataaatagattagttacgaacagttggctgctggatttctctatggtgtttggtttttcttgtgaacaattggcttatgctttgctggagtttttttgctctcctgctcacatgtacacaagacagcttatttttcagtagttgaacttctttttgtatagtttgcttcaatctccctggtcttactattcatattcaaactttttttcaagctagaaactgaacaaactaagttagggagtacttgttatgtttatatcttaattgttgattcaatgctcgtgaaagtgatagataagtactttctaatgttctaagtgtcttggtggtttttggactcggtactaattctgtcttaagaaaatttgaagattttgcacatctgcagctattgagcaaatagagcttcactcttaacaaatgttaatattattgcagaagaagaagttccatctaaa

SEQ ID NO: 84168 - DNA, 267 bp, Citrus clementina
  Intron number 1 from transcript clementine0.9_020308m (loc us clementine0.9_018119m.g) derived from phytozome v7.0 (c hr-ID scaffold_1; pos 12794662 to 12794928)
aatcgccttgtttgataaacgactgccctcccgatgtgtgtatttgtggtttcgtaatgcactttatttttgtgttaattttcaaacattaaaaaaagaaaggaacgattttttcttcatttttaattataattattctatgttatattggtacaattagatcaaaatttgatttttactttttggtttctcttaattctgtaatcattttgtttcaatataaaacgcggttaaataagcttgaatctattttgtaattgtagctgc

SEQ ID NO: 84169 - DNA, 429 bp, Citrus clementina; identical to SEQ ID NO: 79252
  Intron number 1 from transcript clementine0.9_008833m (loc us clementine0.9_008870m.g) derived from phytozome v7.0 (c hr-ID scaffold_23; pos 3357655 to 3358083)

SEQ ID NO: 84170 - DNA, 1018 bp, Citrus clementina
  Intron number 3 from transcript clementine0.9_008833m (loc us clementine0.9_008870m.g) derived from phytozome v7.0 (c hr-ID scaffold_23; pos 3358427 to 3359444)
gttacaagcctcctaagcgaccgctgacaaagaaggtttgtgctgcagttttattatcaactctatatttcatttgttcaattcctgtaaaaatgaagcatttgggtttcttctttcagttaagaatattactaatggtaagggtgataggcacttctgttatgatagcaagcttaatatttattaggtggattcttattctacaagtttgttaaaagaagcaataatagtaacaagttactggcaaatctgtcttgtattcatttttaagtatatcctttatattggatttatcaagaagggaggttggtgactgtagtcaatttataattttttccatgggcttttctgcaagtgtggtctttggataatgttcttgacgttgtatggttacacacatcaccatctctagctgccaagaccaggtctgttttgctgttttatatggagaatgctgagtattttgacctaggcctgcttaagttgatttcatttctctctgctgctgaatgaaacatataccaatgcaattgcaactctgtctgatttgaaattctaaaagatttagtcagaatttcctgaaaatgttgcgaaaaactgaaaatatgtgatttttgataaatttcttgctaggatataaattaaattcaaacttttctgaaagtataaaatctttgtcctgtgttgttatctgttaagcatcatgacattatcaagaatttctccatctaacgtatgtgattaaatgtatttcttcctttatgaggttcatctgtttatgcatgtatattcaatttgccattatatttattatctctcatttgagctatatttatcaaggctaagttatggacatagtgttgtatggtgtatttttagattttaatttgtactaaatcttttgatttaatatcctataaaaaaaaagtcttttggtaataccacctattttggtgttggttatcttgcatcttacgaacattgcttaaatattttgcatgatgaccgtaggaaatag

SEQ ID NO: 84171 - DNA, 958 bp, Citrus clementina
  Intron number 1 from transcript clementine0.9_020447m (loc us clementine0.9_015466m.g) derived from phytozome v7.0 (c hr-ID scaffold_1; pos 4992360 to 4993317 reverse strand)
ggagttgaattgggtgtccctccgttttcaggttcatttccttttcattctgaattgtgatgtacatatattggatgtgctagggttcttgctttgcttgtatgcagatcaggttcacatgtgcattgacatcttatatgcatcgacatcttatatgcattgacatcttataccgatacatgagtaatttgatcaaatgttcttgttataatgtagttagttccaactgcaaaattaagttttttttttctttttaaactcttgtctatgtatcaacaagttgttggtggaacctaacaagaagttaatgctacgagaaagtgccaatttttattttttttcaatattgcttacttttgcgcaccttgtttatgagctccttgatatcattcaagatttttgtttagcaaacatcaactatagacctcttgaatacgggatgctatggaataatgcatcatttggttaggatctacttttggtgataaatttgatagttgccctttttataatgggtgtagatgttttccctttcctatttcagaaaagccctgctaaaaagtgggttctatcttctatgtttgcttgtaaggttcctggggatgtacgagagatcttggatcaagttaaactcccgttagggttgttgggtagggatgggtagtataaatgctaaaagtttgattcgagggacaataactattcagtatttgacacaagtgagaacactcttgagcttttggtgatggtagtggagtagatttccttgttaaggttgtaggagttgcatcagtttttgtattccacgttttcttatgtaattcctagaagcatgactatcaccaaatccttgatcctgcgctaaagcgtaatttattttcatcaatcacttagaactgttcttaagttgatataattgatatgcaaattgtcaattcgacagaatttcctcagctaa

SEQ ID NO: 84172 - DNA, 952 bp, Citrus clementina
  Intron number 1 from transcript clementine0.9_014800m (loc us clementine0.9_014800m.g) derived from phytozome v7.0 (c hr-ID scaffold_23; pos 1661592 to 1662543 reverse strand)
aatttttgtttttggcctggtaatataatctctttatttgtttctatttttcactttgtttgttgcttattcttttagcattgcctttgtttttttcgtgctatatttgtccccgttccctttttttttttttcgtttcaaaagaaatattgatttctattctcctagaagctcaagccactcttttgaggctttaatcgtgtatggtgttgcatatttcgtccaaatccatttttcaaagcttaggatacaatttcaagttgttggataaaattttgggtccaatcttatagaaaatggcttgccgttttcaggacatcccgtaggattctcatcgaatagagaattgcttttacaagttcctaactgggttcgctacataaacagttcctgtatccttaattttctgaaaatgaagaattgtttttagatattttggattccaacatgtgagatgtttgtatctaattttcctctgctttagattcaagtcttactatttccctacacagcttggaagactttgccgctgcttagctccaagattactggaagaacgtggttggtggatgttgtaggcattttagttatgcaatagtattgtaggaagatggatccccttatcactttgtatgcgcacatcaatacttgatattgatgtgccccagtagtgggaactgaatgtaatttggtatatctggtgcagtgataggaagcaaattactaagtaaactattcatatttggtttttttttactgctcaccacattcttctcaaatatttcaattcgcttacagcaataaactcctccaaatttgagtagaaacccctgatatattttatatatttcttgccattgttcatgcaagttcttcttgtttgctccactaacatttttttttcccttttttcttctgatcttgtcaatgcttaaagataaggatctaaatt

SEQ ID NO: 84173 - DNA, 563 bp, Citrus clementina; identical to SEQ ID NO: 77979
  Intron number 2 from transcript clementine0.9_008718m (loc us clementine0.9_008718m.g) derived from phytozome v7.0 (c hr-ID scaffold_38; pos 421725 to 422287)

SEQ ID NO: 84174 - DNA, 487 bp, Citrus clementina
  Intron number 1 from transcript clementine0.9_028450m (loc us clementine0.9_028450m.g) derived from phytozome v7.0 (c hr-ID scaffold_1; pos 3451583 to 3452069 reverse strand)
gaatcaggagcatttgaagctggaggctacaagtggtgcgtgcgtgcgtgtgcatatatatctatatatatatagttcctttattgcagtaaattaaataacttatgccaccaccttttcttttgttattatcgttattattattattattattattattattattattccatcttgatattaataatcaaacgacacctcaacctacgggctgagtgttatttagttaaattggtaaaatcttttgtggtgaaacatcagatcccgggttcaaaatcacttttcaaagatgacaagaaaattgggctgccgttagactataatgattaaaaaaaaaaaaaacaacaactccccaaccctaatgtgatcacgatttgaacctaacttttgaatgatagtctttgcttggtagtatcatttattagtgtatttatgttgattaattaattattgcaggaaacttgttatataccccaagagagcaaga

SEQ ID NO: 84175 - DNA, 762 bp, Citrus clementina; identical to SEQ ID NO: 83579
  Intron number 3 from transcript clementine0.9_017408m (loc us clementine0.9_017408m.g) derived from phytozome v7.0 (c hr-ID scaffold_23; pos 510546 to 511307 reverse strand)

SEQ ID NO: 84176 - DNA, 912 bp, Citrus clementina
  Intron number 2 from transcript clementine0.9_001013m (loc us clementine0.9_000929m.g) derived from phytozome v7.0 (c hr-ID scaffold_29; pos 2621181 to 2622092)
tctggtgaaagctgtcagagaagctgtgtgttttatttttcttttaactccatgtgccagtatctttggatagtggtttatttgtgtgtcgaaaatcatcttttgtttactttggggaatcgaaaatcatctttcccttttatgtgaacgaaaatgatgcgtgcttgcaactgtctataaactggaagctttgcgagctggattaagtggtcctggtgttgatgaatggcagaaagttgaataaataatatcgcaatgttttttgtttttgtatattgagatggattgatcgtcgcaaattgtagacaaattagtagtcttaaattatttagcgcgaaggtgacattatctatgcgtattatatgctacataataagtgatctgtaattttcacatagtgaaatttgaaaaatacattggttattgtagctatctaaatcagtgacagttcttatggaagtcttaaagcacttgcaatagtcatagaacctttcttggacatcttgtgtggttatccgcctgattgatttatgagttttgcttccattttgggttaagagtttgtttcctagtacggatacaaagtttgtgaatgctaatgcatgtaattgccaggcaacaggagtttggctaggtgcaagcagtattttatatgccttgatattgtgacatcaattgctcttttacctaatagaagataatgaaaacttaaggttaattaacatattagtttttccattgttgctctatgtaaggaagaaacatcatcttatctgttttcttaagtttattgtcgtcttgataagttgtactcttcttttgggttgctgagaggatgtccattatgtaaattatcatgcaattaaaaagcagccaccatgcttattatttctctggcttttgtagtactac

SEQ ID NO: 84177 - DNA, 482 bp, Citrus clementina
  Intron number 6 from transcript clementine0.9_001013m (loc us clementine0.9_000929m.g) derived from phytozome v7.0 (c hr-ID scaffold_29; pos 2622840 to 2623321)
gcaagagtggttcagctgtgggacgacaatacaaggtattgcatgcatttgcttaaaattctgtttggatcatatgaagaaaaagatgtactaccacggaattttctgtgtatcgctctttctcttttacatttctattggccagacttgtttcttcatttatcttcttgttcattccagtcatgaagtctcattctggtgctggttattgattagctgcaactttagaatgccaattggcatgtcacagaacattactatgcacatgagatctgtatgtattgcacatttttctctgtggtaatcatgtgattgtgagatctgaccctacatattttaattgtgttaaataatttgattgtatgtgacactgttggtagttatgtgttgggcaatttctcagtatatttcatagctggaaactccttaaattcttatgtaactgcatctttcttgcaggtttacattgagccaattactgg

SEQ ID NO: 84178 - DNA, 157 bp, Citrus clementina; identical to SEQ ID NO: 83744
  Intron number 3 from transcript clementine0.9_023294m (loc us clementine0.9_023294m.g) derived from phytozome v7.0 (c hr-ID scaffold_23; pos 1288843 to 1288999 reverse strand)

SEQ ID NO: 84179 - DNA, 641 bp, Citrus clementina
  Intron number 3 from transcript clementine0.9_022978m (loc us clementine0.9_022978m.g) derived from phytozome v7.0 (c hr-ID scaffold_1; pos 6111645 to 6112285)
cggaagttacagctattagagaggttagattaaaaaatttgtttcttctttatgttcttgttcttcttgaggagctgtctttgtgcaattgtgctcatgcacttgtgagtgtcctgtttcctgaactacatggctaggcataagttattttttgttttgactatttaactcttagtagctctttccttctgtttgttaggtaagttggtttctgaagccttcaacttagttacgacatttcaagtcttatctgatatagccttgtgaaagtaattgtttaaaagttgagtttatggacaacttctacgagttcgtcttgtaatcccttttactacatgtattgtttacttatcttttgttcaacttcaacatcaagcatatacagtgtgtccataattgcattggtggaattctcaaatgaggtgtgagttttttattgtgtaaatctggttgtaagcacagttccttcatctctgaattgatcccgtgattcaagctgttcctgtgaagacacatctctaatgctagagtatacagcttgttttctacctttttttattttagagtcagcatcgcaaaacgaatattcttcaaagggcatgcgtgtggttctaatggttgaaatgatctgtgtctcaggc

SEQ ID NO: 84180 - DNA, 511 bp, Citrus clementina
  Intron number 2 from transcript clementine0.9_016043m (loc us clementine0.9_015036m.g) derived from phytozome v7.0 (c hr-ID scaffold_49; pos 1190830 to 1191340 reverse strand)
aagtgcttgtctctctctggtacatcatgggtttgtggcctttagtgtatagcatgttactgcttccaaccggtagaaggtcccttccagttcttcatctttgttcttcatattattgtgtgaactctgtaacttgtttgtgtgaaatcctcagttcagttgacagtgtaagtgtcggtgtctttttgcctcattgttccataaggaaaatgctgagtcttcagcgagaatctgttgaatttacttatgcttgttcgttatgcttttattttgtgtgaatgcgaaatagaccagcggaatcatgagaaataatatattgatactgttgaacttcgttgaatggcttgaggattagcctctgttccttgcatgcaagcagcaattaaaatgtaggggattgactggtatatgtgtcaacagcttgaaacacagactgaattcagttagtttgacttattcattcttgtgccttgcagctcaaaatccagtattcctgtctggccatttcttg

SEQ ID NO: 84181 - DNA, 586 bp, Citrus clementina
  Intron number 2 from transcript clementine0.9_004020m (loc us clementine0.9_004020m.g) derived from phytozome v7.0 (c hr-ID scaffold_1; pos 9244688 to 9245273 reverse strand)
tggcttactcatctggttggttttcttcatcattgttactctctctatcaacatcgcatcttttggaattctctttgtctattccattttgattttatgtttgttcttttgtgatgtctaaattctgtttcttttcatgagtttctctttcaattctctataacctcagtgtgttttatcctttcaaatacttgtgtttgtaagttgtgtgtgataaagactcatatttttttgtctcattttcattcttttggtttttataacttcagaaaaataatcatgttcaatgactatgaacatttgttaggattaggagaagtttgaggttaatatttattttatttaacaataagaaattaaaaatgagaatggaccccagacttcttgtaccactcgaagagattttgctaattgaaccaacttgcacacaagtagtttctaaaatttgcttatattgtgtgtgtttgaattgtgataatgatggtgattaatgactctgatttaaattgctttgttatgttttgtgaacgtgatccattaaataactttagtttttaatgaatcatccagagctaccccacggtgt

SEQ ID NO: 84182 - DNA, 380 bp, Citrus clementina
  Intron number 1 from transcript clementine0.9_000911m (loc us clementine0.9_000911m.g) derived from phytozome v7.0 (c hr-ID scaffold_114; pos 24097 to 24476)
atcggcaacagagccagtttctgtgtgaagaacccgtaagttaattctctttagatttagccatttagtttctgtttggttgctgagagagcagggaaaagaaagacaataattggatgtttcattctttctgctcttgtttctgggtatgaaaacgtctaacacatttttgttaaattagttgcatttagcttggttgtcatcaggcaaatgaatttgactcagctgcgtggtgtccatttagcccttttttttaaaaaaaaaaaaattattagtaatgtaaattcgagtgtgtaacgttttggcctttctcgagctttggttatgcagattgtcatttgaatttgcattgatttcaagcttatttcattgtttcaggg

SEQ ID NO: 84183 - DNA, 876 bp, Citrus clementina
  Intron number 2 from transcript clementine0.9_007116m (loc us clementine0.9_006552m.g) derived from phytozome v7.0 (c hr-ID scaffold_20; pos 356085 to 356960)
tttgtcattgcaggtctgtcgtggtgtgcatgtgttattttagcatttttttcatttctaattttcctgttttatttattccttttctataaaactttgcttgtatttgcgtgattttgtcatttcttttaaagcatcatcactataagacctgcattggtgaattgagtttcatatgtctaattgtataactaatagtcacgaagctgcctgattcttacttgtcctagaataggcaccaaatattatgattttctgttattttccttttgctgtctactagcttctctttgggcctctatctctagagcttttctggatacttcatttttctccatccattttactggtagaggatcttggattgaatttttagtttcttgatatttttggtaagtcaagaggacttggtttttatagatttcagtaagagatatattgtcggcaaatgtaaagatctcttccgttctcctcatagtttttcttaatcttaatctcaaaaaattaaaaaaaaatgttcttgagcttttcctgatagctcgttcttcttcttgaatctcattttacccgtataggttttcctttgttttttttttttttaaagcttttgaataattgtcactcatatttttacaatccatgaaaaatgggtggttaatttacttcttttgaatattgtaccgcacaaagtacaaaattataatggtcaatgttatgctaaatttcttgaaatataaaggtactgggattttgttataattgaataaatgtagtcaaatagaatatataattagtaagctttcaaaattcttttcttaaaaacttcactgattcacagttattctccttgaaaataggtattgaacttggtagttg

SEQ ID NO: 84184 - DNA, 481 bp, Citrus clementina
  Intron number 1 from transcript clementine0.9_020757m (loc us clementine0.9_020757m.g) derived from phytozome v7.0 (c hr-ID scaffold_10; pos 2572459 to 2572939)
atctcctcgtttttcttgataagaaggtattatttgtttgtttttttgttttattctccccagatcaattattttttttaattttctttctttattttcatcattctaagatttagaataattttttcaaaatagttcctgtgaggtttgggttcttctgaacgttggtggagagaatatcggatttttcttagctttgggattctggaatttgttgatttgggatcttttaggcatgatcttataaataagatttgattttgtgtgattatgaatttataatctaatatatgaagtgaagaactcctgttgtggttcctaaaatatccaatttttatttaattttattctttgggttctgatgtattcattacagagctgtctctgtgactatgaattccctgattatttgatttctgcaatgaactttggcaaatgacctagatgacaggagtaattaacttaataatactgcaggtgg

SEQ ID NO: 84185 - DNA, 706 bp, Citrus clementina
  Intron number 1 from transcript clementine0.9_023175m (loc us clementine0.9_019962m.g) derived from phytozome v7.0 (c hr-ID scaffold_63; pos 943209 to 943914 reverse strand)
acttcaccgtcaaggtaatttattttgctccttgtggacttaaaaattttaatcctttgattgctattatttgcttcttcgcttaatagtatgtagtcgtgatgaccataagtgtttggtctaatagtttaagcttggagttaagggcctaaataattttatttaaccttctttaacattcactttgtgtgaattcaattgtatatggaggattcgaacacaagacctttaggtcaaatttgctgtgataccgtgttcgagaagttgcttgacttgacccaaaagcgtaagcttgaaggatccagacaatagtatttaagcttgtctaattctaaattatcatagcaactcaatctgctgtatgctctatgtgtttggctgattgcgtgctggcattacttaggcttcaacttagttgctaccgtggaggaaaaaagaaagaaagatatcggagcttggggctgaattgctcaagctaaagtttttctctgttttgcttaacttttttttttttttttttattgtattgaagtatgtattagtttatgaatattgaatactggtgtggatttgtgaaataaatcaaccggattgtgtcatacgctacttgagtgaaaataatttctgcttgttattatattgctcaaattggtaagaaatatttgtgttgagcatggttttatttctcttctgatgcaggatattg

SEQ ID NO: 84186 - DNA, 674 bp, Citrus clementina
  Intron number 1 from transcript clementine0.9_004173m (loc us clementine0.9_004173m.g) derived from phytozome v7.0 (c hr-ID scaffold_63; pos 369557 to 370230)
tttgcgtgccgtttcgcaagtacacgcctgaaacagtacgattagatttagtgtcctgtaattatttttatttatttatcttgtattcttgatattcgatgttcgccttctgtaaacttggctgttagtttcgttacgagttatgaaaattttggcttacgtagtcaagttttctgttgacaactgggcttcatatcaagagcttctcataaagcacttcattcaagtgctttcttcaccacataagctttttgtggtttgtactgtaattgcatattttttgacctgtgctgacatattctttgtcgaggattaaagtgtcgggatacagatatatgatattctgcgtgtgttggggagtgctttctgtaaaaagaattgcttcatagttaaccactttctgaaaaagcagatatctatagcttcttcaacagcacttgactgacttcaccatatctttctggaaaatcaacggcaaaatgtttcactctatacatgtcattataaacactttccttcaaactgtactccacagcataaaaagaacattttactatttaaaagtgctttcagcacaatcttgtatcttggcttttctttttttggcttgaatttgattgtgttgttgttgataattaggtgaggaacaaggtattggaatccagaggggctgt

SEQ ID NO: 84187 - DNA, 587 bp, Citrus clementina
  Intron number 1 from transcript clementine0.9_005030m (loc us clementine0.9_004094m.g) derived from phytozome v7.0 (c hr-ID scaffold_1; pos 11903032 to 11903618 reverse strand)
tggtgctactcagctcttcttcaaccatttatgtcggctttccttcctttgactttcttttgatcattttaatttattcctttgcagtcagataatggatcatgtgggttgacttttgtgttgttaattttcctttctcattttttttttccgggcttcttttgggttcatttgttttgtagtttgttttctttttggatggcatgattatgttttacttgaatatttgtgtgagcggtatcttcttatagattggataagtctttcctgttcctttatcaattgccggggaattgttctgttattgcttactaatagagatcatttgtttttggtaatggcgcttatataattttggaatttattcccttccaattgttatagtcacacctcaattgttctgatcgaacttttattgatctggtcttattattcagttcatttgagtatgttttatttgattaggtattgaattttaggaaatatgtcccatatgaaatgttggactccttgtaaacaatgaaaacaattttgcattcaactgtttttcagaccccctgtcgctggttcgagatcaccgagctaag

SEQ ID NO: 84188 - DNA, 517 bp, Citrus clementina
  Intron number 1 from transcript clementine0.9_000151m (loc us clementine0.9_000151m.g) derived from phytozome v7.0 (c hr-ID scaffold_33; pos 2416325 to 2416841 reverse strand)
aacaggttggatttttgtctgctcttaattgctttgtagagcattataaatgtgcacagccttgagatgaacttttatttaccaaaacattagttatattttggcacaatataaataacacttttacaatgtttacgttacgtgtttgtagaatgatagcttcaagtatatggttaattgtgcattttgggattgaaagttgacgctctttgtgctagtttctgggagtgctctgtgaatcttcagatatctcaaaatatgtaggaggaaaacttttgataatttggtttacgttacaacctgtgactgtaagtaactaacatcaggacctttactgtgagtttagttgatagatcctgcagaagaaggtggttccttattatctgcatatggccattttttcctaggtgctcattttgtatgggcttttagtttaatgtttctattcagcggccattgttgttggcaagattttaattacttctttctttttgccttcatttttgtatcaggagcg

SEQ ID NO: 84189 - DNA, 786 bp, Citrus clementina
  Intron number 1 from transcript clementine0.9_019719m (loc us clementine0.9_018022m.g) derived from phytozome v7.0 (c hr-ID scaffold_20; pos 1599323 to 1600108 reverse strand)
tcttgaaatccgaccacaacggctgctctgctgaggtaatacagtaattttgttgtttgtttatttgtttgttgtaaacggtgatcagaccagacatggtccaggtgtctacccaattcttgtaataatggtagggacctttacatgtctgggaaattaaagaaacaaagtgtccatcgtttcttggtaatcatcatttcaatgattacaaaagctacatctggactctacatctaatatttttattgggaatcttgtagaatcatcttgaaaggtggtaattttatattattattttgaggatttagtgtttaggctcataatttgattgattgaaaacaaaaaaccctgtgttccacccattttttttaaaattaattccctacgaatggaataatgtgctttaatttatgaaagtgtcacgcatttgtaacattgtctgctaccagagaagttgtgaaatgaagtgagtctcatgatattatgaagaaaggaattttatgggtatcggtgaattagatgttgtaattctctttatactacttgtttgttgggtgcaactgaactatgaaattggcttttgaatgaaactgactgtagaatatgcatgttaaaggcctttttatcagcttgagatgcctttcaaggctttcacattattttcttccattatacatgtaccatgatttgttttgttagatgagacttgatttggcaagtgagatgactttgattgtcctcaatctatcaggtgtttgatactcctcacttgccagtactagttgg

SEQ ID NO: 84190 - DNA, 537 bp, Citrus clementina
  Intron number 1 from transcript clementine0.9_006693m (loc us clementine0.9_006693m.g) derived from phytozome v7.0 (c hr-ID scaffold_20; pos 2946090 to 2946626 reverse strand)
gacggtataactaaaacctctctaaaaccctaagtaattttaactttttaaaatattttaattagttggtgtgctacttcgttcattagattttttttttaaatgcttgcagttcatacagtctagttcattagataatttcttttttagatgcctgcagttcatacagtgctgtttgcttaattagaaaatggatgaaaatgagagcaaattcgatttcttagaattcttattgcaaaattattgaatattttgagagtccatttcttgaggtgaatgataggatgataagttcccttgctgctaagttcgatggatgagaaaaatgcggaaattgaaaagcaagttgtactcggtgtttttttgaattcataagttattttgtgactttatgaatgatttttttttttgtgttaattgatatttttatgtcccatttttaggccaatttttaggttaaatggaggaacagctgtttcattatgttttagaagattaattttaatcctagttttatcttacttttgcaatcaggcg

SEQ ID NO: 84191 - DNA, 469 bp, Citrus clementina; identical to SEQ ID NO: 83576
  Intron number 1 from transcript clementine0.9_021434m (loc us clementine0.9_021452m.g) derived from phytozome v7.0 (c hr-ID scaffold_23; pos 2835362 to 2835830 reverse strand)

SEQ ID NO: 84192 - DNA, 615 bp, Citrus clementina
  Intron number 1 from transcript clementine0.9_015609m (loc us clementine0.9_015609m.g) derived from phytozome v7.0 (c hr-ID scaffold_1; pos 13099432 to 13100046 reverse strand)
aagaagaagaaaattaaagactctcttctttaaggtttcctttaattatttcttgtcgttttaactcattttgataatcaaaacgacatgaagtttcaatacatttctgctatgatcttgattttgatttttatttttcctgtttgttgaagagtatgtcgtttgatgaactttgatggctaaaacgacaacgtattttagtattcatgtgcttgctctgttcgatgaggattgagcttcttgaagtgatagtgtttgtctaatgtcttataatttcagttatatttctcatgatttggatctcggtaaattttttctaatcagctagattaatttattatcaagtgactgtcattgcttcagagatttttgtctctgattctgattcaattttctactattattgttgtcgtttgatgaagtactatctattaaacgacaagaagtttcaagtttcttcatatcttatctcatttctgaaaattccagtgttatttggagtaacattattgattttaatctatctttcttgttttaactaatttcattattagtaactgttccattgctttagatctgattttttttctttttttcacctgttcatgttcgaag

SEQ ID NO: 84193 - DNA, 956 bp, Citrus clementina
  Intron number 3 from transcript clementine0.9_034974m (loc us clementine0.9_034974m.g) derived from phytozome v7.0 (c hr-ID scaffold_1; pos 10838380 to 10839335)
tgtaagccatcctctcactttggttcttatcagtgataaccacagttgaacacgcttatcttttctcgttttaatcatattagaacactaaatattaacaaaagaaaattaattccgtagatcttttctcatgcccacaggtaaaaactgtcccataacaagattacttgatagatacaagtggttggacttaataaattttgtacttgaaatctcaccaaaaacaaaggaatctatgaagcatatatcacatgagcagcttgcttgatcttgcattttaatttcttggatgttgggagctgctgttgaataatcttataccatcaatatgttctcttctttataagtttcacttatcatctcaagtctcaacttatggtatgtttgggatttcttgcttttacttatagcccgtttgggcccagctactaaggtgtttgataacacttgtagctgggctttggcagtttagcaaattttttttcccaatttctactccacagctgtagcttttactccacaacaactgcagcttaaaagctacagcaccacactcccaaacacacccttaactttgaaagcacagcagccaagtgccataaacactaacatttaattggattttaatcttactcctcactcccctacctgtatttgacaattagtgattccatgtcatagcaactgtgacttcaaagccaccaaaacacttcaatcccaaacgtacactgagtctaaagacaatggctttggacacttggttctgttttatggttacttactggtttattatcaaagcttcaaaattgttaaccaaaaattcatatttatctgattaatcttatttttcgtttttgtgactagactgatatattattatacttgtttcactgattgatgcaagaactgcttctcctgcaggataagtggaacaagttttagggttgtagtggaaa

SEQ ID NO: 84194 - DNA, 913 bp, Citrus clementina
  Intron number 1 from transcript clementine0.9_010346m (loc us clementine0.9_010346m.g) derived from phytozome v7.0 (c hr-ID scaffold_143; pos 26231 to 27143 reverse strand)
ggacagtggtgggtgccagggaagctttttcaagtgtaagttccttgttatgtatggttactcacatatgaagttatagtgtactatatatatttgaagagtacgataatatgatttggtggatatggtaatgctgttctttggatattgcatgcaatgatcttccatggttacaatacagcatcgattagatttgccagcctaggctttgtattttggttggtgctttggtcatcttttctgaattgacatatttagaatcaatgttacacttctaagttattgaaaagcattcacatggttaaagaacttgtagagtagatggatcttcgacttaatttttttatgtttagagcgcctcgaatcttcttttggcatattttttgaggatttttctttttattgtataatttaacaagttacagctgttctctctttcttcctttctctattggtacgatctatgctaatgatggcctctttccttgcttgatttgtgagttcctgctagaagaaaagacatctttctaaactattgtagaataattttgttgaagtagttttagtgattagtttctcgtttgacctctagagagaaactagttattatccactgacctctgagcaagagaataagttgaacagtttgcttatgaaatgtaagtgcaacatctggaaacaattgtgtcctttgaaggatatacacctttaatgaatttcttttaggcaatgactgtataattcctttgcatgagcatcataatattatttgatctattgtgcactctgcattcaagcagacctactcctccctattgttgcttgattcaacatttctattaattcaagtatgaaatgatctcaaatgttttggacaggggttgctatttccaggttggaaattcactgaagc

SEQ ID NO: 84195 - DNA, 598 bp, Citrus clementina
  Intron number 1 from transcript clementine0.9_007582m (loc us clementine0.9_007582m.g) derived from phytozome v7.0 (c hr-ID scaffold_20; pos 3164834 to 3165431)
caacagcgaaaaagttcacctgtaagtactcatttgaattcatcaaattcttcgtttgtaatcaattcttagattcaaattattttacagtttgtaattcatgctttttgcttttggttttgtttggttttgcttccttgatctgcatctgggttttggttccccctagtttatcatttctgtaatgaatattattcaaattagatttagattgatcgtaccttacaatcaaaattttcttgaggaaatcaaagatggtttgttgaagattagagattttcttgatttaaatccttataaaaacttactattcaaattcatagacagtaataatagtaagaataatcatagatgcagcttaatattgttcagcataggttcattttgcaacatttgttatgcaaatggttaccagtaaccatttaatctcgtaggatgtaaaagataatactagtgaaagcagtaaaatggaaatttggatctctttgtttgtgaaagcactattttgttctcaaattctaagggatattgaattttttccggtgaattcagagagagagatcaataatagttataattcatattgtagtaaattatc

SEQ ID NO: 84196 - DNA, 437 bp, Citrus clementina; identical to SEQ ID NO: 81969
  Intron number 4 from transcript clementine0.9_016598m (loc us clementine0.9_012758m.g) derived from phytozome v7.0 (c hr-ID scaffold_67; pos 40603 to 41039)

SEQ ID NO: 84197 - DNA, 773 bp, Citrus clementina
  Intron number 1 from transcript clementine0.9_014707m (loc us clementine0.9_010099m.g) derived from phytozome v7.0 (c hr-ID scaffold_38; pos 505463 to 506235 reverse strand)
agaagctaccactatttctttgtgtcttcatacatgtaagctactttattttatttcatgtttctgttgtattgttgatggttttgatctgggaatttgttggttcttttacactggagattgtttgctcttctctcagcactcttgagctgtgttacttctgtgtgtgtgtgtgtgtttatgtttgttcacagtttagaaattttaataatatgtgtcgatgtttgctgaatctgttgtccttttaaactttggttttcttcgaattcaatttcgggttgttctttttttcgaaattttgtgaactgggttctattaacattgtatgttagtttcagaatttctaggtggtctagttcatagtttcaatctttttgttgttgagtcatgtttgaaggttgcaatttggatggatattggtgagattatatgtatttgtactcatcgaccctgtagaatcatgatggcttgtgcttccagcatgtgttattgaagaaagaccaaatgtgggtgttcttttaggcttgatatggtagaacgagtgcaatattttcgcaaatatagaaatacgttattgattattctctgaaagctattttttaaaattattttataaggattgaccttctagaaccatatgttgttatattatagaaaatagatagcacaccttgtaggttttcatctcccctctgaatgaattgtttctcatgcactaaattttggaattgaaaccagtctgcaggaagtgcatttacgagaagctttcggat

SEQ ID NO: 84198 - DNA, 611 bp, Citrus clementina
  Intron number 1 from transcript clementine0.9_000065m (loc us clementine0.9_000065m.g) derived from phytozome v7.0 (c hr-ID scaffold_10; pos 1059552 to 1060162)
aacttgttagctctgggtatgatgttctaattttggtcaattttaacctttggatttcatattaaattgtttagttgtaattttgaatttctttggcttccttttcgcgcgtttgtttttttattttatttccatttaatatgagaaaatttaggactatttggtaatccagctcggctagttcttgttagttataacgtgaactcaaaattttgattagttttgatagcaagtaaagctgtgatatgttcaaggagtaatttagtagctgatttcgataattacattgcttaaaaaggccaactttcccgtagagcaggctagttgctaaatttttaccttaaaacatatcaaaagaaagcaatgctatactagttcaacttacatgctgccattataagatagctagtgttgggtagtggattctttgtttcattattcttgattctcttggattgaacataaatcaaatgcaagttttgtttttcttcaaagtttttattgtttattttgatggcatttgctttaattatactgcttgtaacaatgtgaatttgttgacacttgatgcttatatggcttgtttttaaattttgtagagtgcattctcc

SEQ ID NO: 84199 - DNA, 744 bp, Citrus clementina
  Intron number 1 from transcript clementine0.9_015986m (loc us clementine0.9_015986m.g) derived from phytozome v7.0 (c hr-ID scaffold_1; pos 11871119 to 11871862)
actttcaggatatcgtcggtgttatcgaggtacgtatccaagcttctgtattcatgtcaattgaattttgagaactggaattttttattcatttttttctttttagctgtttgtgggacagaatctgttgttcgaatttggctgtttgaaatttaaaaattggaagtctgatttttgtttctaattatataaaaaaattggagttaaatttagaggattccgtattcaaaatttagcaataaacttcgattaatgatcattttggaaaaagaaattaaaggatttttgggcaaaagaaaaggattgatattctagtgtttgtattttagctgctttgtcgctttagagttctgtaaaggtacaagccttttggaagtagttttgaagcttctcatggtaaattttccttcctagcaaaaccaaccaactttgactaaacatgcagggaagaaaaagttcttagataatgattttttgcctggattcttaaaatgtcactgaatattgatattcccaagttccagtgggacattgctaatcagatacatgggaaaagttgttggtagagttaattttggttttggaaaaacttactatcgtggttaataatgagaaaaggacgatatacttgggtgacatagatgttgatcagttttataattttataagatttatttgctttattaatttaagtctgttagtatatttgatgggaagtgtgcaatttggtttttgtgaaggggg

SEQ ID NO: 84200 - DNA, 700 bp, Citrus clementina
  Intron number 2 from transcript clementine0.9_018308m (loc us clementine0.9_018320m.g) derived from phytozome v7.0 (c hr-ID scaffold_5; pos 626778 to 627477 reverse strand)
ctggcggaatctcctgcgattattcttgccttgaagtgaggtttttttttcttgcttctttaatattgttcaaaatatattgttgttagtttaaatttttgtcaagctgcgtacatatacttcttagctgattgctttctacgaaataacgagcgaggcactcgatttttttttttttttttttttgtattgaacgtaatgagcttgatattttgggagtacttggctgttaagtaaaaagtataatttatcagattgagacctcccaaaagtgtaattcttttgaaatagttattataataatttggtgatgataatatgtgaaatcttatttttatttgcttgtaatagttttgatttgtgacgtaattgtgaataattattatttatttgtttccccctgcatgtagccagcgttgctaattggcttttgtttctagcattttagtgataggataatttttaaacagggaacatatctttacaaccattcatgataatggcatgtgaattctacaaaatggaaatttttggatttcagtgttgccgagagtatatagcagtagttaattgttaggaatttgctcgctttttatgcttcatgtattagtattaacagcttctttgctataattgaatataaagttgatggttctggaagttactaagaaaatataaaatgttacttttaaggttaggg

SEQ ID NO: 84201 - DNA, 457 bp, Citrus clementina
  Intron number 5 from transcript clementine0.9_017384m (loc us clementine0.9_016661m.g) derived from phytozome v7.0 (c hr-ID scaffold_23; pos 3277500 to 3277956)
ctgtgctttcattcacagaaagctatatttaccaggtaacacaacctgctcaaaagtatgaactatgataatcttttcaataatatgaaaaacatttcaaagtatttttttgaatttttgtcgagatggtgctgagactgttgaattattattgctgcaaaactgatgttaggaccttgtagaagtgtataaatttcattcatctatcaggcattggcatgtttctctagaaggcatatgagcctcgcctgatctttgtgtgctctttttcctgctatattcttgcctagaataattttttttttttaataataaactaaaaggaatttgcacaagttagcatgagtttgccgtgtaacttcttcgctgatgcctattttatattgagctgctaagtcctttctgttttatcatctctcaacagttgtggttttcttagtgcagctggatagtctga

SEQ ID NO: 84202 - DNA, 756 bp, Citrus clementina
  Intron number 1 from transcript clementine0.9_019775m (loc us clementine0.9_019775m.g) derived from phytozome v7.0 (c hr-ID scaffold_67; pos 1321510 to 1322265)
ggaaaactgaccgaattctgcagtgaatcaaccaggtcctgccaagattatcattacatatcccttttcttaattattaatttccctataatgcatttctttgtttattttctttttatattataatattacttttggatgtatttgagttttttttttctctcattcatggcttctttctggcggctagaacgctgatcagtatttaaattgttatatatttctgcttaaatgagttaaattgacgttctaatttctgttttttttttcactacgtaaaaacttgtttttcttttgaagaaatcataaaaaattcaaagaaattaagaccaacttgggttatttcttattctacttcctcctttgttttgtttcttttttctctttgacatcctcctacccaattagggtttccgtatattaatccttgcgtatttctttgttgatccgctaaaggtctccagactccggcttcctatgattatatatatatatttttgttgacttaatgacatgaaggtcaggccttcgtcaatgtgattttctacgaaaagttgttttaatcaattatcacagaagtactaggaaatatcaaataaaaaaaatgaccaagttgctatctccttttttaccctcttcaatcaataccagtaataaattcttgcagagttttctttcagtttgtatagattttcttcaatttaaattatagatcttgcagcattgaagaaatcataagaaggtaccaggctgcta

SEQ ID NO: 84203 - DNA, 536 bp, Citrus clementina
  Intron number 1 from transcript clementine0.9_000280m (loc us clementine0.9_000281m.g) derived from phytozome v7.0 (c hr-ID scaffold_101; pos 628845 to 629380 reverse strand)
tctcgaaggccgataaactcaacagcaacaactaggtacattaagaaaagcttcctaatatttcaatgtgatcgtcggttctcgcgattaatttatttgatttttaaatttttttttttggcttggattatcgtttgcttcactttagttttttagttacaaaattcactgtcgtttatttggagagtgattgtgttgtgtttgtttcttgattaaatgatattaagtgttttctttttcaattaatctgtttgtttatgcttttttttttttctccttcctttgttgttctcgtaaaaaggacccgaacttgcaacagatgtaaagtatttaaaaaatatttatatagaaaaactttaaggtctttggttttgatgattatgtaggttttggtgttttgagtaactgagttactctgtttttaccgtattatgttgtttgtgaactaagtgctagtggttcttgttggcttgagtctataaattcctgaaaatggctgctcttttacatggaagatgttgactttacaggggtga

SEQ ID NO: 84204 - DNA, 1001 bp, Citrus clementina
  Intron number 1 from transcript clementine0.9_032443m (loc us clementine0.9_032443m.g) derived from phytozome v7.0 (c hr-ID scaffold_20; pos 2073116 to 2074116)
gctcgctttcctccacttcacttctcctcctccaagtgagcttcattactgctttttaacaaaagcacttcgtgtggaaacagtactggaccctgagtttattatatattttactgaaaaattgttgtactatatgtgatgcactatttgatcagggccttcaacaaaagatgagccgcttgctgatcaaggattggaaatggatgaaaagcctcaactggttgatatcaatcatcccgatatttcaggtaccatagatggcaaagcatttcaagaatcaatgatattagtatattgtaattctatactctatatatatatatatttttttttttttttttctcagtgaaacatgctcttactgtgtgaaagtttgtaatttttgtcttgtcagtgggagcaaatgatttagtccctcaagtagacagttacatttgttgtcactgttccagattctttgatatcaattgctgaaccaagtgctggagaagtaaagattgctgaaacatgtcaaggtcttgagattcactcggaagctttgggagtcaaaaatggtgatgaatatgagatcttcttttgccatctttatatcctatactaattttcttaatgctttagaattcttttagttaacatgagaatgtagtagtaaaattctctgcttttattatgctccgcggaattatcaccagaatgtgcttgtggaaagcatgatgcaattatcatgtttatagcagaaaagaatttattctgctatacgacacatctaagtgtgttctatttttatttccctgtgatcttttcaacttatttcattttacatactcttatggtagcttattcaacacgactttttgcataacctgagaacttagaattttgcgagtgtgatatttgggattgaaatattttgtcgcagcacttcttggataattgatatgattgcttcatgcttccttggatgagatataacaagaaaaaataacagaaaaatagcacat

SEQ ID NO: 84205 - DNA, 488 bp, Citrus clementina
  Intron number 1 from transcript clementine0.9_011841m (loc us clementine0.9_011841m.g) derived from phytozome v7.0 (c hr-ID scaffold_10; pos 3101650 to 3102137)
cttcttgcctgaattagtagtttgttttacagcgggttcgtacttttgactgtccggtgatatttctttctttccgcctctcattttgttcattttgtttggtggtgcaccggaaagtaataatatcacttatgttgtcgctttcatttgccgcatcatgtttacatgtgttatcagcacttgcaatttttatttttttttaaattttcccctgatttatgggaacatggtgggtagtttaatgggttcacttcctgaaatgatatcttctctgggtttgctttgatttttatactgttttaagtgcttccgagatgcactgatttatacttttgatgcatccaatttaaaggcaaaagaaacactgtttctagtgaaagtttgtacttgactagatagttatggaaggctaagatggaaatcgattgactcaaatttgcaacttgattgtaggatttcggggaaatcccttgcttgactactctgca

SEQ ID NO: 84206 - DNA, 962 bp, Citrus clementina
  Intron number 2 from transcript clementine0.9_011841m (loc us clementine0.9_011841m.g) derived from phytozome v7.0 (c hr-ID scaffold_10; pos 3102371 to 3103332)
ggccaaattttgtatatcaacttactgaactaaaggtgagtttcttttgtatttgatagtgttatgctatattatcaaattttgctttttcataggcagttaattagattaagggagatcaaacagttatgttattgttagtagaaatctcttgcagcagaagtaatgacctatagtttggacttttggaactgagcagattgagaattgcctaaggatgttgtatctaattagaaaaaaaggtaaagaactttgctggtctgtggaagttgattgcagcaaattaattattggaatctgtcttccaaattgtagaaatttaaagcagatttggtatcttggttatgaacaaagatgactgattttgacaagctgtcaaaacataaatgaacaatcaaaatctggaaggctattgtcagcccatatgaatctatgatggattttgtaagcaaggttgcaagaagaatcagtatatttactatgagaaagatgtttacaataggaaaataacagccagtgtgctgctaaaccccatatcacagacggccttctccaattgaatgagaaaggaccagattaacatattgatatctgtagctcttcatgtaatgtctagaggctctgaacttcttgaaaggtgccaatttagtgtctttgtccactagttggtgcttatgtcttattttaattatttaatttaatttgtagtttcagtggccctagcaatgttttgagatattaagtgtctcaatttgatcaaggtttaatggcatttatattcacatatgcattgttgtcgtgtactcattgcaatttattttgatcatttaaggtgattgtctgaatgatggagcgtacttggccaagcatcttgtttgctatgctatatcattgcttataatgggtttctgaatattctagggtaattgatgcaggataattggccatctgttttgtttgca

SEQ ID NO: 84207 - DNA, 729 bp, Citrus clementina
  Intron number 2 from transcript clementine0.9_016968m (loc us clementine0.9_016968m.g) derived from phytozome v7.0 (c hr-ID scaffold_49; pos 286980 to 287708 reverse strand)
tcagtggcggggttagaggcaaaaaagggtggctggtatgctgcgtcccttctgcttaactatatattgccccatatagttcctctctgatatgcatttgttgcaattgtgtttcttttttagatgtttaatgttttgaaatccattgttagttaggtcttgttaatgacatattttacccaagttgaagttctgttgttgcttgccataacatttcatattcctagagaagtctatgctgcagattttgttacttcagaacccctgattatgtcttacttcatctcatgggtgcaatcaagagttgactaggaataggtcttaactcttaagccaattaagtaagcctttggacagagcatttgcacagcagccatatcaaattggtgtacttgtcagtaattaaatgtctaagctttacctattaaatgactgtatattaatagaaatgtgagcaataatagctttgatgcatctctgctatagcgtgctgctgacttttgtctcgtaaacaatgtgactttattgtaaatcttggaagagatgatttactgttagtctgtagaaactttcaagttttaattcaagatttgcttaagccaccatcattgccgttttctttttttttttcagggttttccactcttgacatttggttcactggataattaggttttgttttgctgttttgcaggcaatacaggagacccttttgccgcctgctgtgca

SEQ ID NO: 84208 - DNA, 330 bp, Citrus clementina
  Intron number 1 from transcript clementine0.9_022400m (loc us clementine0.9_019199m.g) derived from phytozome v7.0 (c hr-ID scaffold_49; pos 284363 to 284692 reverse strand)
gaggcttcttctattaaagcttggtttctttttaggtattgactgtctacgttatcaatattttgtctcgcttatgctcattaatttgaattatgtgtcctgggttttattctgtttttggatcaatactgcgcggttcgattgtgataatctgataatcattattaagctagatcttcttgcaggaattttagttgttttcacaatttctggttatggggtcactgataattgaaacaaaatatgaaatttcaggaaattagtgaaatttacataatcatgttttgttattatattcttatttcaactactgcagtctgcagtgcaatc

SEQ ID NO: 84209 - DNA, 418 bp, Citrus clementina; identical to SEQ ID NO: 83555
  Intron number 2 from transcript clementine0.9_009472m (loc us clementine0.9_009472m.g) derived from phytozome v7.0 (c hr-ID scaffold_90; pos 729894 to 730311 reverse strand)

SEQ ID NO: 84210 - DNA, 579 bp, Citrus clementina
  Intron number 1 from transcript clementine0.9_027263m (loc us clementine0.9_026915m.g) derived from phytozome v7.0 (c hr-ID scaffold_20; pos 121032 to 121610)
gactctgagtctgtaagtatccccatacgtccccgtttcattcatcaaatttatcgatgcttatttgtgcttgtttaatatctgatttggggtgaaagctagggttagggtttagggaatttagggtttttccaaaagaaacaattttttggggaaagaaatttgggatgttcgtgattgggttctgagattagcatgtttacaaaaagtttctatctttcgatcggttgcttagaaaacaggaagaagagaacaaaattgttgtgtgctgtcctctgttttttttctttctttcttttttatttgttttttcggctattatttcaaattagatattcattagaaactttgtatttggatccatgtttatctgtttataattttctttctcctaatgatccgtaagcgcacacccaaagaaccatggcatcattactgtaatccattgtacgtgttattgggggcattctacactttctttgcaaactcacttttttcgtgctaactaaccatgtgttatccatttgttagtttatctagttgaaacacaaaatgtcaaaatcttgcaagggccttgct

SEQ ID NO: 84211 - DNA, 1011 bp, Citrus clementina
  Intron number 3 from transcript clementine0.9_027263m (loc us clementine0.9_026915m.g) derived from phytozome v7.0 (c hr-ID scaffold_20; pos 121850 to 122860)
taagggaaacttatttcaattgcaagagaggccaggcttgttctcttttctcttcttttcatatatgttttctttttcttttgacttcctctgaaaacttgtaaggctacaagctctgatttaattggaacgagataatcagtgatagctggtgaagttaaattcttctacattatattgtagaaatggaatgatacgtcctgtagagacaccataaactgtagaagtacatgtgcatttatggtatttttcatatatatggtttctggttctatgtataagcttgactacataaatagcatgaaatgggtctttgcattcatttaagtctacctaaggaacttgcctgttagtatcaaattttaaagaaacctggtggagctggaggatagagaagataatttgtattttgtgacatgaagccaaactcatcttttttcaccttgatagtgtgatgaaactcaatagataatccatatctgtgtgagcacacatgactgattaaggaatagaattatgaaaatctaaactcctttttgttataagttaactaacgcaaggaactcaatacagaaaattgtaatctgtatgagtacgattgattataggacagaattatgaaaatttgaactttttttcttgatctaagttaactgaggctttgttacttcagtttatgtcacttggtttatctagaagcctataaccctacagggcagcttgagcactttaaactaggcatatctcatgtattggaaaaacttaaatttatgcctatatatgaggagggatattatgattttacacttacactttatatgcaatttgtaaatttattcttgaagacttctcaaatgttgaagttttagctatgttgaacaatgaatactggttatcatatggtcaattctgtaacataacaattagactttctataatatttgagtcaacaagatcccttcttttaatgtgtcattccttttcttcccctttttggttggtcaggttgac

SEQ ID NO: 84212 - DNA, 707 bp, Citrus clementina
  Intron number 1 from transcript clementine0.9_004450m (loc us clementine0.9_004450m.g) derived from phytozome v7.0 (c hr-ID scaffold_23; pos 3787108 to 3787814)
agtttatcaaggtttgatttctttaaatattgatttcttaaacattcttttaatttggtttacatattgtttgtttgaatgaaggcattaattttaactatgatatgttctgcctttgtgatttaatataagctgcttgattaatatttatgtttgcttgcactaacttatttgcagtgttattgaatattatacttcagttacttttctgtgaactcaacttgttgcttcttttggtcagcaagtatttgtatgtgctactgtatatatgtgggtgggaaggccccaagggtttggccgagtggttttcaagaagctttatttatcttgccacggggttggaatcttagcagagataaagggtaaaatattgaatttgtgctttgcacacacctttaccttttagaagtataaatatgtgggtgggaagaatattctgtcctctaaaaacttcttttacttctgtttctttgtcattttccgtttttgatcacatagatggtaccatgtcaattatttgaattgatggtcttctttatatttttccttgtgtcattgaataatgattcaatttttagttctgtggctactctccttgaccaatttcaattggtgggaattttcaagtttttctcgagttgagttgttgatttagaactatcttcttctcaggtggcagcacctccagtgactttggggagggctgc

SEQ ID NO: 84213 - DNA, 1007 bp, Citrus clementina
  Intron number 1 from transcript clementine0.9_017946m (loc us clementine0.9_017946m.g) derived from phytozome v7.0 (c hr-ID scaffold_5; pos 2432554 to 2433560 reverse strand)
ctaataggtatttaatggccgcttgaatttctttttttatgtttttatttgcttccaagtttttgtggatattattgggtttgaaagttattcgttgattgatacatgggatgctctaatttcctattattctagctacatatggaaaggtgattagtttttggaatatgcaaagatatagaatcttgataactatgaaatctaattgttttggaacatttactaatgctctgtttgcgaaaagctttaaatactggattttgacgtcattttttccaaagtaattagggacttactttcctaataggaacctctgattctagctattgaacagaggtagcatgttttgattagtgcttgtggcttcagtacctaggatggtcaatatagtttttcaattaggtctcctatgtcctttaactttaagtttaagctacttttcgtgtagattattatgtttactttcaagtttctacttgaattctcagtatcggactgtcgaacttgctttaactagcttggatgccagacaatggggaagaatatgctgctaaaatgaatcttgtttgtagaatcttctcagctgtggtaaaggtgttaaaaaatttcatggattttgaaattcttgttcaaacttcatgaatatatctctctacatatatgattgttcttttgggtggactaagatttgtacatataagagcgcatggtttctttcatcattgatgtgtgccatggccttctgatgattctctgccacaactacgtaagttgaggaagtaattaacctgtacttatacatcactaacgtcacactgagccagggtgctgttccattttcccttttctgtttggaaaatttgctggggcctatttttcttgtatgcgaggagcatttttttttcattctatgaagaaaactcttatgtgctgtggctatcttttacctgtatttagagacctttgtaactatgttggttcatgcaggtggataagtgatagccgtg

SEQ ID NO: 84214 - DNA, 661 bp, Citrus clementina
  Intron number 3 from transcript clementine0.9_022963m (loc us clementine0.9_019767m.g) derived from phytozome v7.0 (c hr-ID scaffold_1; pos 10633911 to 10634571 reverse strand)
caggtatttcgccttctctgtctacatccttctttggagagacacttcttaagtgggaatggttaatattctaaacatcaattttgccatttgctagttggaattcatcttttaacacaatgtgtttagagttattgaagcttgaaatattgtagattttctatgtcgtattaatgaatcttacataggttttatgcttataagttgattttaagtatgtctgagtaacggccatgaaaataatttagttttcttcattagcttgatgaataaatttgttgatgtcaagtgcaaggtctataatatgtttagttggtttaagattctcttgcttcattttgtgattgtctctgtttcttattatgcgggggtgtgtgtaaggatcaactttcaactactgtattaaaataaatttgttaccaaatgggaatgtaacaaaattatagcatggaagataataataatataaaagaaaaatgggaatcaaaatacggaaagcgtgtatgcagcttatttgcatctgtaaataaattttacaaattatggatttgttcctatttttagtaaattatgcaactgtaacgctgagttatattcttataaaaaataatgaaattatgcaactctaatgcttattttggaaaattttagtttcgctggc

SEQ ID NO: 84215 - DNA, 330 bp, Citrus clementina
  Intron number 2 from transcript clementine0.9_022208m (loc us clementine0.9_022208m.g) derived from phytozome v7.0 (c hr-ID scaffold_27; pos 2110142 to 2110471)
cttggaagtttgcaaactgattttgcctgttttgggtaaataattcaaaaataatcaatcttgatttactttttatttttcgtctttttgcaatttcttagaatttgataaaatgttatttggatgatatgattatgtaccagcttattactcatttaaaaatgtacttgaggaagaaataaatatattttagattattgtttaattaggaaaatttttattgattttctgtttctcatttcctgtgtataaagagtgactgaagttttgaggtaagggaaagaattgaagttttctgttttgtctatgtcagataagtttggagcggct

SEQ ID NO: 84216 - DNA, 637 bp, Citrus clementina
  Intron number 2 from transcript clementine0.9_020176m (loc us clementine0.9_020176m.g) derived from phytozome v7.0 (c hr-ID scaffold_109; pos 509945 to 510581)
ggaagactaagagggagttactgctacagaaaagggtacttatcagttctgtgtctctctgcacacacactaattaaggcatgcctgcttagacagtaatttgcttttatctactgcctttatactttgtaaacatgaattttcaatcaaatatgggactttataaagcctttacacacgcatgcatattgatacatgaagggattgcggttcaaagcttacaattttgagaacgtcaattttgggaatatctcaaatgtcaagtagtgacataggaattctatagtttgatttgcaaaatataatgcagcattctgtaccatttattatctttcaaaagaagttcagggttcaatatagactgaattaccgtctcaatgcatttttgttctggtccattgatctcgaatagacaatcgctgacaagtaataacggaaaaaataagaatgagataaagagaacaacctatatttttcaggaaaggaaggaaacggattattcacgagccaggttggatgaaccttgacaatcaggatatgttttggtgatgattaaattgagtctttggataaaatctgttgaagtgttttatcttctgcaggtaaggagtgtggaagcgaaggaagctcttcgtct

SEQ ID NO: 84217 - DNA, 941 bp, Citrus clementina
  Intron number 1 from transcript clementine0.9_005123m (loc us clementine0.9_005123m.g) derived from phytozome v7.0 (c hr-ID scaffold_1; pos 5351157 to 5352097)
tgcgtcgtttctttgtttttttcttttttcatcaggtacattaattattaatttgcattctctctctcttttttatttttaataaaattttaagttccgaatcttaacattttacttatgattaactttccgaagctgcatttgttgatttattttttattttttggttctcggtatatttttaattttatttcataatgtagtatttatttatgctgcatttttttattttttatttaggtgtttgattttgaagctcaataatttgtgacctgaagctgctttttaagttagatattttctcctctctttttgttagtatttgtttgctttttttttttttttccttgatttccattaattagaaagttttaattaacttgaatgcaggcttaatgctttagttgatcagatgaaatgtaagaggtagaatgacaagttccacagtatcgtcgaatgcagtttaaaaaaagtaataataataataataataaaagatttgcagagactataagtttcttaaatactgtaaagttatttttgttttctttctattttttgcaatcagagaatgatatgtgaattgaattcaaagatcacatacattattttgttttagctgttttttccgtggcttttaaggctctttttagtattttttttttctcatttgagaagtgatatttgatatagttactttctttgtttgtgaagaggattttgtttgcttataaaggatatgcacttcttgagtgactttacagatagtgtaacttaccttccttttgttgtttacttcttgaaattttatttgcttctgcatttatggtgtacaatttgggaaatgtagaggatttctttttgcatttttgtgatatctcatggcactgaaactctcttgcatatgcggtttggtaaaggttttggaacggacctcacac

SEQ ID NO: 84218 - DNA, 696 bp, Citrus clementina
  Intron number 2 from transcript clementine0.9_024734m (loc us clementine0.9_024734m.g) derived from phytozome v7.0 (c hr-ID scaffold_98; pos 469005 to 469700 reverse strand)
atctaaagttgagaagactagtttcagagattcaggtacttgctgctttttgctttaacttttatcacaaaacctactatctttgtgtatgattacatggatcttgaaattcttgctgttatgtcataatgttaatgcatattttgtcttcacgcatttcttactgaacttgtgtcttgagctgtaattgtaatttccaatttttactattagatgggtattttattggagatttctttacttaaaaaaaaaaaatgtttgacagagaatattttaacgatgagattgcaatattgtaatagataatcttcaggaactctttttaccttttagtagttatgcagttgctcctctgtgttagtttatttattctatcatatgtaacgaatgactttttaccaaatttgatttcaaagctgagcttccagcttatgacttatatttgtgtcttgcacttttgttttacaatcaccattagatggaagagtgcttagagttagttaattgattcaatcccaggattagtcttttgaaacataaaatttatcggctaagctatataaatctgtttcatgtttcttatcgcacactatttcgtatggctttgtctccatgctcatacaaaattagtgttgtattagatgtcttctgtctttcattcacatgtacttattactttttctttcaatcgtcagg

SEQ ID NO: 84219 - DNA, 946 bp, Citrus clementina
  Intron number 1 from transcript clementine0.9_007234m (loc us clementine0.9_006050m.g) derived from phytozome v7.0 (c hr-ID scaffold_29; pos 2819857 to 2820802)
gtgccactgaatcggtcgcggtgcaaaagctagaggtatattaaaaaaaaaaactgtaatttttagctaaatttcagaatttttattcgctttttatgtattttgattgcaattgtggagttaattgattttcagttgattgatgatgtaatctacgcgaaactagggttaatgtttgtatttcgtgtatttttggactttaatttgcttaactttcgttgatgtatgatgaccaatgctttaattttagggttttcactttatatattgataaaagtcgtaatatttaaacctttgtaggagaattattttaggttctctgaaattggtgaattttgtttttggttcttgagtttaagtttattagaaatgaaattaacgtggaatttgttactctgattggtacttcttttatgtttgtttacatatatcattggctgtacttgttcttgtgccatttttgaatgaacattagtgttttttgtgttgatcagagtactcttcgttcatttaatacccgcatggaaccatgtgagttaaataaaatctaagaaacaaaattcattgtttataactaggcttggtgaagaatttaaatagatttttttttaataaattaaagtgcaaatgtggaagaattgtgttgagctgacgtatgccaaatttggttatatttggacggcatatttgtcagatggatgaatcctagtccaatacgagtaatgccaagattacagcaagaaaatttcctgcacattgtaaattctctggagtagctaagtgcttggtattatgctgcccattggggttagcttttgaggatggatacttgtacggctgtgtgcctgatagtaatcttgtagaattgtttgctgaaatttagttttctttactgctgatttatctgttattcttccttgaaatcaggagcacagtggtgatctga

SEQ ID NO: 84220 - DNA, 724 bp, Citrus clementina
  Intron number 1 from transcript clementine0.9_011328m (loc us clementine0.9_010508m.g) derived from phytozome v7.0 (c hr-ID scaffold_45; pos 20894 to 21617)
ctccggcttcgtttgttgtcgtcagcccgcacagggtaaggttatttgtaattcaatcttcttttgggcatgggtaagagcgtcacaggcactgatactgttcaatcttcttttgtataatggccatttgtaattgttgctgattcggtttcttaacattgtaatttttgttgtcttgagtattgatggtgatgggttattaatgtattatatatgtttgtcatttggtatcattattgcatcattgagccgggctggtattttattttggaattttaggtggctgcctggcagggatttgattcattttgaaattttgagtctctggaaatttatgctttttagtgtttccctttcaatattccttcgttaagctttaattttctctttgtatcccaatatatattcaaagtttacttccttagctgcttctgtttggttgaaaaaaaagctataaattattattattattattattattttcttgacctaatttgaatttcttatttgctattttcgttgattttggtattcctgtattgagaaataattcggtagtggctttgctactgttctctctgtttcttaaattgtataactcacaagtttcatattgcttataggaataagattgcgttgatactaaatacattatatacttaatttggtgacccatgacggaaattcagacttgcggtaaaccaattgattctttgttggagaa

SEQ ID NO: 84221 - DNA, 476 bp, Citrus clementina
  Intron number 1 from transcript clementine0.9_017898m (loc us clementine0.9_017898m.g) derived from phytozome v7.0 (c hr-ID scaffold_67; pos 658084 to 658559 reverse strand)
ccggcggtgttgactgtcaatctcgaccaccagaggtaactcattttctgttctttctatattctttcattgcttttgattgtttattgtaaagtgaagtttgtttagtttacttaaagcttttactgtcaattcattcttctttgaaattagttcattaatcaatcatctgtcaagtgagagctcggctatgctctacagtaatttgttgaatttggaaacaatcgatttcaagttgtatttaaacttctttcagccgtaattgaaacttctacattggaaagcgcaactctttctttctttgttcttcttggtctctgtttaaagatctcccccttttttaatttaaaaattattttccacttctcattagttattatgtcgcatatagcacgaggctgtgcggttaccgaggaatcatggcccgagtccctaattgttatcatttgtggcttcttgttaggaaaattgtctga

SEQ ID NO: 84222 - DNA, 942 bp, Citrus clementina
  Intron number 1 from transcript clementine0.9_025303m (loc us clementine0.9_025303m.g) derived from phytozome v7.0 (c hr-ID scaffold_33; pos 1969056 to 1969997 reverse strand)
gcagcgtttgggcccagagctccaatttccctcaggttataccaaatctctcttgtttatctcttcgattttatttaccgatctgctgttaatttattgttacgttccattttctaattgcacggatctgattgttccaatttttttttttggcttaattgataattattagcattcagattagtttgttgccatgatttgaatcaaaagtaaaaatgaaatgttagatttacgtttttagattgtaaaaattaagaattttactgaaaaccagaataaattatgaaactgtaagtataaaaatcaaaacttgtatatgatgatataggttgtatttgcttgtggctttacaatgaccatttcgtaattcactattaatcttgagaaaattatagaattttcaaataaaaaatagataaaaaaaaatgtgttgctaatgttaagactgtcaagggcatgtttgttaatgttgagtttctgattaattttgcaaacacaacagctaaagtgtttatgagcactcagtctctaatgattccaattccaccacagctgtggcttaaaagccatatctcctcaattccaaagataaaataaatgattttggagattttttatttttgtgttttctatatgcaattttattgtttttgttctcagaaaatttttgttggaaaaatgctatccagggaactttctcaaatcatcaaaatacaaatttttaatttcttatttgcatttacgcaatggatgtttaaaacagttttgaaaaatgatactgaatggaccctaattttctttgctggacttcacctttggtttaagatataatttttcattcctttctgttgctgtagattaggtggtgagattttgtgtttatttttaaatgtttgttatttgcttttactgcagttcaagcctgaagagattgctgcaatc

SEQ ID NO: 84223 - DNA, 507 bp, Citrus clementina
  Intron number 1 from transcript clementine0.9_005395m (loc us clementine0.9_002162m.g) derived from phytozome v7.0 (c hr-ID scaffold_23; pos 2478148 to 2478654 reverse strand)
tacgaaggccctacccttcaaagggcaatttataggtaaccacttagcattccaatcactctgtccactttcttctaggtctaaactttccagcttgtgtttttttttttttttttttggtatatatttatttgctggccttctttatattgagcacaggcagcttagggtccctttttctttttctaatggtttttgtttttttgggtttcctttgttagatgataagactgccgcaaccatgaattcattttgtgttatggtatcctttatttcttttgataccaattaactcacttttggttttggatttaactctccatgtcaactccgggagttcatactctttaaattatttggttcgttatcagatgtatttttctggtgaaggttataacaactggggttagaatatatggatattttcttcttaagtatccatttatacacagctttagggtctttacttttcattttattgatatactgatgttaatttcaggtata

SEQ ID NO: 84224 - DNA, 735 bp, Citrus clementina
  Intron number 3 from transcript clementine0.9_006643m (loc us clementine0.9_006643m.g) derived from phytozome v7.0 (c hr-ID scaffold_10; pos 5119792 to 5120526 reverse strand)
cccagagagagtccaaaagagatcttactcaagtggtctgtgcatttaattttcatactttataatcatgtcggtcattttgtttgtgttacattcttttttccagtagagattgcacacggcttattcttttcttgtgaagtcatttgtattctgacttaattattaaggtaggaatacgatggatcaaaatcaaagtattaacatcattttctcttcttatcaatcgaaactgtccctactgaattatatttctgacccttccctttatgagagctttaaagtaggcatacaacattcgttatgtcctatgagttaaagaaatagtaaatcagcaactaattctttagctcttattagtgaatgatatattaattataaccatctgattttgacactaatgtagaagtaaatggttcttagtgttcttaataagtttgagtaataataataattgttttatttttttaatagaaaatatcagcaatattttacagtcaggtgctttcagctgctgaacttgtacaatttcttagagcctgtcatcgttcacaatatttgatgtttatagagttatgattcaataatttctttttcttctcactcttcttctacccaaacaagaagctgacatctttcacgatatttgatgttttatggagttgtgattttcattatttctttttctgcttactcttcttcttccaaacaggaagctcgtctaccattacaaat

SEQ ID NO: 84225 - DNA, 342 bp, Citrus clementina
  Intron number 1 from transcript clementine0.9_024507m (loc us clementine0.9_024384m.g) derived from phytozome v7.0 (c hr-ID scaffold_10; pos 2378043 to 2378384 reverse strand)
ccgaaggtttgctcatctttcgcctgtctttgtattttcttttatattgccatgtgtggaagcctttgaattcttggcaatggtttgtttgcatttattttttttttcaaagatacaaaaccggaacatgagtgttggaaaattatagttttgaaattgcgttaacatcgttggagaaaatattaatccattgataaattttttatgagtacgtagttaaaatatatatgtgcatgtctatatggttgggtggatgtatatgttgaatagctaaaagcttaattgtcgtcttgatcgcttaatgaatggatttttgttagcttgattcaggcatagctggtg

SEQ ID NO: 84226 - DNA, 986 bp, Citrus clementina
  Intron number 1 from transcript clementine0.9_007248m (loc us clementine0.9_007101m.g) derived from phytozome v7.0 (c hr-ID scaffold_33; pos 2389876 to 2390861)
ctcctgctatcacggtcgattcccttaaccccaaggtatcaactttcgatcatctgccgtttatttgagctgtttctgcatctgggtttctttcttttttaagtccattcaattaatttttcgttaatttggggtgtttctgcatctgggtttattttcttttttgcatttttttgttctgtttgatttaacttacagcaactgttttggttcactgttttattactttatgtttttattttcatatcttattcattttttatgtgtttataattttgggtatgtatgtctcatgtctctcgagagtttactgttcgaataggcgatctgctgttttaccatcaaaaattactttttcgatgtgaattttttgtttaattaccttttaccttctcaggttttataccttctgctttctgatgcatctttttattttattttagattcccttttatagctttagtttaaaccgtaatacatgtttgtaaattgtagggtatttttctttgtttgtttattctttgttaacctgagctcaatgctttaattctactgcttgtatgctgtgtatatgtgcttgattctgtttatctctattgtcatgcgactttaaatggaccctatttgatatgtcttcagctatcagtttaaccattttgttgcaggatgcataaacctggtagttcttctgacttcatttgtctgtggaattagactgctgagttactttaagagattttttgaacttaacgataaactaagttttgactgaaattgtaggatagttgttttaagttattttatcgtaagttctactgaattttgtttagtgagtcattgtgattatagagtactaatgaaagacagtgcgtctcccttttgttctgattctcattgttaagttttcttgattgtgtggttcttgtaagttttttctgttcctgttttgatccctcacgaagtttctctttcctgcaggttctaaa

SEQ ID NO: 84227 - DNA, 409 bp, Citrus clementina
  Intron number 1 from transcript clementine0.9_014457m (loc us clementine0.9_014457m.g) derived from phytozome v7.0 (c hr-ID scaffold_131; pos 171468 to 171876)
cgaattgtacaaatttgatccttgggagttaccaggtacctcagattttaatcgtgcaatgtttgtatttgtctaatttccatgaaaaacatgaattagctttagtaatcaaagacagttcaaagttaatgtgaacaaggaattgtttttagctttgtaaagcacttttttgtttgttttatttatttgattcctgttagaatctttcttcacatggggccttaactttttgtattaaagccaattttacgggatttaagttttcatgtacaataatgagaaaaaaagcagtgagtagctgttttctatttggtcattctgtttaccttaatcttattgatttgagaattcaacaaaatgaatttccaactgtaaatttgcagagaaatcattccttccaaaacgagat

SEQ ID NO: 84228 - DNA, 903 bp, Citrus clementina
  Intron number 3 from transcript clementine0.9_012852m (loc us clementine0.9_012852m.g) derived from phytozome v7.0 (c hr-ID scaffold_10; pos 1454961 to 1455863)
aggtaattagtgcgtcagagttttttctttgaaaaataaataaataaataaatttgtactgtaatatcattttcttcccccaggagccttgcctccatattcaaataaacaaacaactctaaagaaagtggtcaaagaaaatggcacatcaggcttgttgttgttgattgcctactgctttaggtctctttttgaataggaccattatgttaatttttaaatccccaaaagaattaacaaaagagttttcttttttctttttttaactttttacaggtttaacaaaaatacgtatttgctacgttttttatgtttttgttattttctaatcttttttcctaacgagtttaaggtgaaatttcatcaaaatggactagagattgctgttccagtgaataataaatgctgcaatgtctagttttcatcaataatgagttcctgagatgaaaagaaaaagaattaataaattttatgtgttgctgatactttcctactgagcaaaataagtaattctagcagcttgatcctcttttatttcaatcattaaacacaagcagcttcttggttttagtaattacagtaattcacttatttcagtgcaaaagaattttttcattaatgagtcccctgcagttctgtataatgactgtttgccatctttctcttctttcttagaaactttcttgttacaatgtgaaattgggggattcagtgctaagttaattttgcactgaacactaaatcaatagtcatgatttattttttatatctttcatttcccttggctaacaaccattccttcactgttcaacaagaaatcacattgatattaaaaatttgtctgttaatttaatgttcatcttggacacaattttaaattttgaaatttggttaatttacagc

SEQ ID NO: 84229 - DNA, 671 bp, Citrus clementina
  Intron number 1 from transcript clementine0.9_012071m (loc us clementine0.9_012071m.g) derived from phytozome v7.0 (c hr-ID scaffold_53; pos 99918 to 100588 reverse strand)
catcaaattgtctcctttcttgtaagttctcatggtttgaattctttcttcgaaaagcataacctacagatactagaactttaacctttaccactatatatacgcgcgcgcgtgtgtgttgtgtatccatatctattctgctatatatagaagcatgtattgcagctgtataatagagctgcctcaataatcacaacagctgtgatgtaggttttctgaccagcatcatataaattaacaattgagagtagttgatcgatcgatgcaacatcaaattagttctcttgattactctccccaccccaccttctctctctccatatatatgtatgtatgtatgtatgtatgtatgcgtgtctgtgtttttttttttttttttaaattaatcgttcatactcctaatgtatctgacactaattgacactactcttttattttatgtgaattttctaattattacttttcagttgtgtaagttactagctctttaatttaattaggtatgcgtgggtgtgtgtagggatctaataattttttttttcctttgttctcttgtgttttcatagatcaatgggaagaacaaaattgttaggaagtacttgcagaaactcggagagttaatttcctagaatttaaggaatattaatttaatagtttacatatctagctgc

SEQ ID NO: 84230 - DNA, 390 bp, Citrus clementina
  Intron number 2 from transcript clementine0.9_014391m (loc us clementine0.9_014391m.g) derived from phytozome v7.0 (c hr-ID scaffold_139; pos 363860 to 364249 reverse strand)
caatcaaggtcaaaagggtatgtttgtttttggctggcatactgttgatttgcaattgtgtgtgagttggattcatgatccatgagatgggttttaggttcaatgattcatgagatgggttttgggatttttaattatgttctgttttgttttttatttctgtattgcagggattcttctctttcacagtgccttgaggattgcttaagattacattgtacccttttgactttggatttaaagggttttgggttttgaatttttcttgatactcaagtttgtttaaaattgttgaaaattttcaattttttttttttggcattagtttttgctttttggtgttcaaagggttctctttttggagtctataaactttagtttccctacaaa

SEQ ID NO: 84231 - DNA, 663 bp, Citrus clementina
  Intron number 1 from transcript clementine0.9_009917m (loc us clementine0.9_007815m.g) derived from phytozome v7.0 (c hr-ID scaffold_23; pos 1450005 to 1450667)
ctttggtctggtgttgttattactgctctcgattggtaagtcttttgttttgttttgttttgttttaaactttttaaagcttggtttttaacattttagtttgaaagataaacccaccccacaaaaaaaaagcaaaaaaaaaaaaggactggctctcttgaggctgtcgatatgttagtttcaataatttatgtgcatgttagttcagttgattagaatttattttacatatgctcattgtactaaggattaaagtcactatctctgtatgatggactttaattaaatacagcaaggctgattgctcggttccctgaaatggcgtaagctcagtattctataataaaaatataaaatgtattatgaatttgtttgttagcctttgtactggcggaaaagaacgaactttggcgttaacttaattttttggtattcaaaatatcaatcatttttctttttctttctttctcttttttaaaaagaggattcaaaatgttaaattcagttttccatgattcttttttattttttcagtgactgagcagagcatgtttcctttttttttgtttcaacaagattttcgttcatttttttactagtattgacttgattctctctttcattgttctttatacagttttatctttctatttcttgagaact

SEQ ID NO: 84232 - DNA, 716 bp, Citrus clementina
  Intron number 1 from transcript clementine0.9_029173m (loc us clementine0.9_029173m.g) derived from phytozome v7.0 (c hr-ID scaffold_29; pos 859300 to 860015 reverse strand)
ggcaagagattaggagttgtttggctgacgcaaacgtctgcagaaatcttggtaacaaagacttaaaggattggtctctagtacaggtactttcattcatttattttattttattgccttatatcgaacgattagttttatatggccacaatttgacctggatatgtatttcggaagagccaaatttatggcctatgcttttatttcgaaatgcttttggttttttttttttctcaaaagtgcttttaaagtgattaaagcattcctatagtgtttggattacaacacgtaaaatattttttcaataaatattaatgtaggaacatgtgttaaagggagaatgacactcggtattaaacccccacattaaacattaatagaaaatatattttttgaataattttgcgattgtatttttgttgtcagtttattcttgatgtgtttgtgaaaagagaggaaaatttttgaatactgaagattacatttatcttccaacagtaaaatttgcatacatgtaggactctatgggtaaatttgaaaaaaaaaaggtgataataatgagaaatattgagaaccaacgtgtcattctcactcatacatacatacatacatagagatgtgtgagtgtgtgtgtgatgcgtaatcgctttgggctaacaatggagttgtttcaatattcagtcaggctgttgcaagccaccggtgtactgcggatt

SEQ ID NO: 84233 - DNA, 731 bp, Citrus clementina
  Intron number 1 from transcript clementine0.9_017884m (loc us clementine0.9_017884m.g) derived from phytozome v7.0 (c hr-ID scaffold_120; pos 156259 to 156989)
acccccaaagacacccttgacctacgcgataaactgtgagtattttattttatttttaaaaaattttatttttcaattgtgattcttatttcggaaattttgtttcctggggtttttcactttagtgcttgtacattatgctgtaactgattgtactctccgttgccgctagtgtaatgttgatgacaaaattaacaaacaaataacacttcttaattaaccattggttgattaatgtgattaaaaatatgtgcttttcaattttcatcactgttgatgctgttctggattttttttaaaaataaatttatattttttttcttcttttgcggatgaagtttggtgtagtagaaattgcaaattgtcaatttaccggaggattatagtaacttgtgataaatttttttccatccttttcttcctaatcttaaatttaactggtcaactttttagcctgacttttctctttgtctgaaatttatgaagaaactagagcgaaaatctgtgatttgttttcatctaccgttattttttcttaattctcaagtccttttcatggattacaaaaacaacgggcatatgccttttgaccttgtatattttagattcctttgatatcttgaggtactgtagaaagtaaaatttgaatcgtttgtttgtgtttttaactttttattgctttgaattggctggcagacacaaaacaaggctacatattgggcaattggtga

SEQ ID NO: 84234 - DNA, 632 bp, Citrus clementina
  Intron number 2 from transcript clementine0.9_017884m (loc us clementine0.9_017884m.g) derived from phytozome v7.0 (c hr-ID scaffold_120; pos 157014 to 157645)
aagctagtgaagctgatcaccacacagaagtcagcgtaagtaaatatgaaatgttctatttatataaacaaatgcctggttttctagtaatgattattgaatttgcatttgttattcatgttttcattgtgcgtggttagtttaagtattgctcttcttgcttttggaaatattttccccccaatattcatgtttagattttattcttaagtggtattttcattcagtcatcttaagcaaccttaacctgccactggtcttttctaccttattacaacatctctgagtctctggcttctgcaccactccttctgtggagccttcttcttcatctttcaatcaaaatagccaatgccccctcttttaagttagcccttggaagttcctttagatttttctcagttagcatttaatcatcatcagccagtcctttttttttccccccttttctttcaatattctttttctcgacaattctattcaaactcacccatttctttgaaaaattggtaggatagggttcggttccacattcatttatctactcattatgatgtgtgaaggatttgatttatgtcttaagcactgaattttttttttcattaaattgcagcccattaggaagattgctg

SEQ ID NO: 84235 - DNA, 995 bp, Citrus clementina
  Intron number 1 from transcript clementine0.9_013440m (loc us clementine0.9_013440m.g) derived from phytozome v7.0 (c hr-ID scaffold_1; pos 2133183 to 2134177 reverse strand)
tgctgcttcgggcctcaagatttgctacattatctgtaagtgattgtttccttttttatgagaagtttaagcaactgatttggatttgtaaatttttgaaataatggttctagatgagtaggccattaagaacttatatgtttttgggtatatataatctgagaggctcttacggtcgggctttagcaattatgagcaccattcaagttttaactgataagatattctagatttgcaatttgcagttgattaaaatatgatttcttttcccagtgcgttcttcagagaagttgaataaatttagttgatttaaacttcagacacacttaggactttgatggcaagttgaacgagccctatgatttgaaattataaatgagagattgaaatacaaagatcaactaggattagtttcatagtcccctgagttatgaatctcatcctagctgctgacctagtttgtggatcacttgcaacttgcatgttgttgtcatatggggcatctattttggacttgtaaatatggaactaccggggatcacatgcttcctgcattatgttttctccatccctgttaattttactttggagtttatgcatattgtatgttcaattttattcctattttgcacttgtactgagatgtttgagatttcccgttcttgtaaatgctagaagaatgttaaatctgctaatgataaattttcaatttatatatatgaagctacagagcaattcaaagaagcactgtttaaccaatgttctctctcagattttgattatgaaatgatcatatacctgacagtaacacgtttgtttatgttcagggaatgattattgagatataaattcttgctaagcctcatggtccatatgcatggttgcttgtgaacccttttcatttttatcttatcttttgggggcttgatggagcactaaatgtttattcattctctgcagttgggggctggtttgcttcactttgtgttgcaggt

SEQ ID NO: 84236 - DNA, 904 bp, Citrus clementina
  Intron number 2 from transcript clementine0.9_018333m (loc us clementine0.9_018333m.g) derived from phytozome v7.0 (c hr-ID scaffold_27; pos 1560214 to 1561117)
ccaccaaatcctgaagagctgcctgctgtttgtaggtatgtaatacatacgccttcatttatggtcagtttggtattcatgtccggtagttgtgcggcttgtgccgcctaattaaggtcaaagttgctatagtgtttgacaaatatttaattacaactacgatttaaaagttaaggtatctaacttttaattaacagtagctatagttttgaagtcgcaacattataatattaaagagcaggtgcggctcaattaattttggggttttaggcgaattgttttaattaggtcttttaaaaaatttgaggtcaaatatatgtattagttttactaaaaagttatttatttaaaatcaatttttctagttttgttaggtgcaaaattattgatcaaatttttacattctaatttcactaatatatttttctcaatatagttaaatcatttaacttttcttgtgactcagttgatcttaaataagtttttgtcaattttaattttgaaaaacttcgtcaattactaatttttcactccaattcatattttttttactacttataacaaatttaataattataatgttggagagaaatttgggaccttcatatatggtggggctctagacaactgtctaagttgcgtagaggaagagccgctctgttaaaaagagtcttaatcaagatgaatgttcatatatttattttcaatcctacccattttgtttttttaacactataacaataattttgcaacttttattagatcacgccaattatatactcgtaaagtttccttacagagggaaaacttttgtcccatatggttcatataatttattcacaaggtaatcaaaattttatcctcaggaaaagaaaactaacatcatttcaattacagaagtgta

SEQ ID NO: 84237 - DNA, 440 bp, Citrus clementina
  Intron number 1 from transcript clementine0.9_027449m (loc us clementine0.9_027449m.g) derived from phytozome v7.0 (c hr-ID scaffold_29; pos 1585318 to 1585757)
ggtgatcaagtggtcggattttagtttttgcataggtgagactagcctaacattctttcttcacaatatatatatatatatatacacacacatttgaatttaatctagtgagtactattgtacatattatggtgcgtgactgcgcgcgtgacgagtttttattgaaaaactacagctctattgtaaagctcgtaacctctgagtagtcgctagatacatgataacatgcgcaattgcacctactggatcatatttctaaaataaataatgaaacacaagttgtaacaatacagccctattaagcaccacctaatgacatacccagcttattttttatgaacaatttttttatgataatttgctgtaagcaaattaaaaaaactatagcaaaactcaaattgttgttatacataattgtttttccctcaaattttgtagcc

SEQ ID NO: 84238 - DNA, 889 bp, Citrus clementina; identical to SEQ ID NO: 78840
  Intron number 3 from transcript clementine0.9_024144m (loc us clementine0.9_022932m.g) derived from phytozome v7.0 (c hr-ID scaffold_27; pos 448846 to 449734)

SEQ ID NO: 84239 - DNA, 678 bp, Citrus clementina
  Intron number 3 from transcript clementine0.9_007709m (loc us clementine0.9_007692m.g) derived from phytozome v7.0 (c hr-ID scaffold_33; pos 1596118 to 1596795)
aaggtctttggttttattctttcttttttcgtctttatcaacatgacctatgatactgtttgctatcacagatggatcatttgttggattcttttgtttgctaatccttgtctaatggtcatagaaatgctacacggtgcagatgcaaacaaactagcttgattgtggaccttaaatgataaaatacctataagctggtgacacatttcttgattcttaaactggaaacggtttctttttcctctcatatttcattcttcctttgcttgtcagtcttttttttctcctcgctttttgtccggaaaaacagttttcagattttcagatatgacctaagttcaaagcattgactcttaactcataatcgataattgctataaataccctgtcattttaatagtttctgattatcactatacaatatttatctcctttggcaacattggatggtgttctgctgattgtggattggccttttatattaatgtacactggtcacattgtagatatcatattttatttctaacagttgattttttgttttaattttttgtagagattgaaactgaattttgtatttcactctcaaacagaaataatgcgatttttgttggtttagtaacatttgatgttgctgatgggacctttgatgtcaatttttagaaagcttggtaaagg

SEQ ID NO: 84240 - DNA, 718 bp, Citrus clementina
  Intron number 2 from transcript clementine0.9_013016m (loc us clementine0.9_013016m.g) derived from phytozome v7.0 (c hr-ID scaffold_67; pos 113737 to 114454 reverse strand)
tggccttcccgaaggcactcactctggacgcagaggtacagttgatcctataaaactttgagcagtttctgctaattgtacctgttttttgttttacttacttttaaaagggtgacagctaaaatacttgataaacacccactcttactttagatagcttaatgattaccaattatccatccacttatactactatagtgattctattcaacaacagctgtgatttaaagacacaaccaccttaatttcaaacaaacacacccttgtagggcgtaaactttgaaaaatagaaatggagggttggtgtaacttaatttacattttacagttagtttgtatgggatgttgtattttcatataagtgatttgatttgtttctcgtatcgaactatgtgaaaaatggcactccaaacgtcagtagcatgtgaactatgaactgggcaggacacactattggcataaaatcctagttatcattataaacttttatcctgataaatataccaatatatggttcctttattttctgaagaagaaatatgttttgcaagctcagagcttgtgacaacagtttgatgctactctgaataaatactcttatgcttaagtttgatggatactttttgtttctatgcctgttgattgtgataattgtttacgcttctctttttgacttcactcaggtagtatcattataataagtttacagaacatattg

SEQ ID NO: 84241 - DNA, 593 bp, Citrus clementina
  Intron number 3 from transcript clementine0.9_023330m (loc us clementine0.9_021131m.g) derived from phytozome v7.0 (c hr-ID scaffold_20; pos 1498989 to 1499581)
gttggcaactgctaaggagaaggaacttgcaaactgtgaggctaactgcagtcttagtcgtttactatttgtttcttttgacttatactgttaaatttacatagtactttcttctttctctttaacaaacttgacttttgggggactctataacaacttatatggaacatttaaagagtttctggagtgtctgatgattagtggtatcaaggggaagattttcttttatgggtggcaagcctatcaagataagctattgtctcttatttgaatgtgccacacctaacaatttcattctgtaatgatggtctcctgactaccagcattgtcaagacttcaaatctttgtcttcctaaagttactgtaccaaaaaccaagaaccttttagagtatgaattatctgttactagaggtgtatgctaattaatagagaacataaggaatcttggtcaacgactttagttgttatgctgttgctttttgtttgttgcttttattttccattgttataactgtgtttccttactctgatgaaagcttctaactgttatatttgtcatgcagatcaagaatcacagagcaaggagatacat

SEQ ID NO: 84242 - DNA, 875 bp, Citrus clementina
  Intron number 3 from transcript clementine0.9_025997m (loc us clementine0.9_025997m.g) derived from phytozome v7.0 (c hr-ID scaffold_65; pos 1314996 to 1315870 reverse strand)
tacattccagattggcaaaggctctgttataaaaggtaactctatggtttttcttttcggctactttttgaagtccatgattttacattgtttttgttctgttaacaacgagaggaatgaacacatttaagtttttagataagttatcattttatcagagtttgaatgttacgcttggaactcaagtttgtttctttatatttttgtagcaaaggcattttgaatatggcaaattaaatgtactatatcaaagaagtgactggtggtagtgcttgtttttgttgcgtccttgactggcgcttttgcttacaagttgctctgtgaccatttttgagatgtgtttataacccttttagttgtttgtttaagcaagaaactaatgtcttattttaaatttttaacctgagagttttatcttcctgtgtgtcaattatgcattttgttgctactgaagattgtgtttgttgtgcattgaagatgttttatgtaactcctctcctaatgcctatatttctttggtcatgtttgcaactctgtagtgctgttttaaaatcatctccaaacagcctcttaatatctgaattgataatttctagtgtcctagctaatttactggttattatttatgtatcataaattatattgaacacataatcattataatcataatttttttttgtcagaaagcatttcctttttaactctatgtcaagttaaggacatttcagctctgagatgaccacgatttttatattatctttgttcttttccttctcattttgatactttgggcatgatattgaatactaagaagataaactttaaatttataatgtataatgtgtataatcctatatgtttgatttatatgtagg

SEQ ID NO: 84243 - DNA, 540 bp, Citrus clementina
  Intron number 1 from transcript clementine0.9_025997m (loc us clementine0.9_025997m.g) derived from phytozome v7.0 (c hr-ID scaffold_65; pos 1316048 to 1316587 reverse strand)
tggtcagaaggttaccgtccactgcactggctacggttagtttttttttttttttttggttgtcaacttaatgcattttttgtaaatacatcgaaagtttggtaatgggtatttgctaatattagtgataatcatattatttttttttttttgtgaatttttcaatggagaggacattatgtctgatctttatattttgagtgtgtgtgcatatgtataaaccgaaacctcttatgattctgtgagtttaggcacaagtaagggatgataatcgctgacttttctaagtgtgtcacacatatttaacttatagctttcagtttgtagagttgttatccgttatttccgtatataggtctcggtgaatcaatgttctgtgttaattacatatactggcatacagtttaaccttgcagggtcgtgctggaaaaatttgagtgtgtcaaagtaagctaattgtgaaatgagtggaagctttgttcatatatagttttcttctcttttcacacctttaaatatttctttttaatgcagggaaaa

SEQ ID NO: 84244 - DNA, 942 bp, Citrus clementina
  Intron number 1 from transcript clementine0.9_032578m (loc us clementine0.9_032578m.g) derived from phytozome v7.0 (c hr-ID scaffold_33; pos 1953246 to 1954187)
tcttcaggggctttttggtaagtaggtttttgttttttattcatttaattgccattttctagtagttggttttctagtcaaagtagttggttttgccatgtgggtaatttgagatctccaatgctgcagtttatttaggaatgttgcattttcatctttttttttccccttataggtatgtttgtggtgcactttcaaatattttggttttttattcgtgttattgaagcactttgcttacatcttacttttgtgtctgcccttaaaagctggaagctagatttcaaatggtaatgaaattgtacatagttttctttggagtcaatgaaaggtggatatgttttcttaacattctctgtaacttagaaatctaatagtgcttgatttttgttgcggaagtgcttttcttaacttttactacattctcttttacttggaaatgtaatagtgctttatatatgttgtggtagtgcttttcttagttttcacttttgtgtctgccaccagaagctggaaatgtatacaataaactgctgcttatcagcatttacactttgggctcaatgtaatgggttgttttcaactttcttttttgacacagcaaattttcttcttcttgttctgttttgctttttggtcacccatactgcggtacataattttagtttttgaaacttgaagatttgtttttactgaattggagtatgattgctgtctctgttgcctgtaggtgaatcaatttggttatgattgccattgcttttgcttgctctaatgctatatttctgagtacatttttttttttttactttagtgatgttgcctatgaatctgctaaatcccttgatctggtagaaaatagttctaccgtcctatttattgaatctcaatgtaattaaattttcaggcccggaaagcccttcgagctttgaagggattggt

SEQ ID NO: 84245 - DNA, 492 bp, Citrus clementina
  Intron number 1 from transcript clementine0.9_025629m (loc us clementine0.9_025629m.g) derived from phytozome v7.0 (c hr-ID scaffold_90; pos 568022 to 568513)
cgtcgaacgtttctgcttccaaaaacaatcagaaggtaaaatcaaagtcgtcggatgttcagattcgcaatttataatatattgcatatagaatacaatcgtggttcattagattctctgttgtcttgttaattcttagatctgtttatctaggggttgtttagtcaatttgataaaggtaattaaggcattgatttcttgtatgatctttgaattctaatatgaagattgtttatgttagggtttcagcgagattttagaccttgttttgacttttacttcataaaagtgtttgtttttttaagtgaatcgatgaaaatgttgttgttttatggaggaataatcaaagtcatcttgatttgttgcaaggactacttatttttgggcgaaaatattattcagtcgatagatgaaaatttttagttagaagtttttttaattaaaaaaattgggtttattgtttttgtggctttagggtaagtttgggagttg

SEQ ID NO: 84246 - DNA, 877 bp, Citrus clementina
  Intron number 1 from transcript clementine0.9_020310m (loc us clementine0.9_020354m.g) derived from phytozome v7.0 (c hr-ID scaffold_90; pos 596239 to 597115)
tcgccggattgctgtcctcacgtcactggatctgggtactttcttttctctctgtcttatctttgtgagtttcttttctttctgtgcatgcattatgagatttcccttgctcttcgatatgaatgaagcccttgatatttcttataacaattttttagattttttatttaatccaagtttttttttttttaaaatacatatagatcattttggtaacatattagaaagccttgcacagttagattggcctatagctaaaacaatattgcctgcttttgtaaatacttcttgatttatttttgcaatggaaatttggatcgattcatatttttcctggatttttaacgtttgtatttaatattacgtaaatatttgaacctgaattttatagatgtaactgtaatcttgactcagagatgctgcctagcttttaataagaaatgagacttgccttcttcaccttggtgacaaattaattgaataacagttatgaaacagagccaacctatacaataaattcaaatgacataaaaagaaataaattaaatattataaaacaggattcatcttccaaatttacatatacacaatggtcttgtttctttccagtataatataatagttttgattctttgccatagattcttgtcatatattcatcacataatggccttgatctgcgttttcatgtgcatcacataatggtattatcttttctgtatgtgcgtcacctgctaccatatgatatgtgcatgtcagaatgacatcttcatatgatcttatcacttcctctcacttagaatttgtgcacttctgaagagagcttcttttttttttatttatttattttcctttgaggggtcagtcaaaatatctt

SEQ ID NO: 84247 - DNA, 757 bp, Citrus clementina
  Intron number 1 from transcript clementine0.9_015786m (loc us clementine0.9_015786m.g) derived from phytozome v7.0 (c hr-ID scaffold_20; pos 2475406 to 2476162 reverse strand)
gtggagactgagtaattcgtcgatcactttgtctggtactctatctcaagctctattaaaattcaatttctgattattattagtcgtatttttctttttgaactagtcatttgaaatgctttatttttggcggagaaattacgatctgcgacgcagttttgaggcgagatcttgttttaattttgtgttgtgtttgtatttcggtgttatgagatctctatttgcgtctttttttgcgcttactcggcaatgttcattgaaacgaattgttttttagctaggttttgatgctcttatttagggctagattgacactcttttgtgattacagctcatgtcttgtgaaaataatttttgaatggaatgaattgtcattgttttgatctatgaatttagtgattgaatttgtgagattcagttcaaattgattattgactaagttgttaaaagcattggtgtcacttgtgtcttataaatgaagcacattgtgattactatatatgataatcttgtcaaatgcttcatggctttaggtactatcagtactggataaatttgattgtgtattgttgctgttttcaaaatttctctgagtagttattctgcttcacctttttacttggtaaactgaagttagatattctcgttaatttagtttgatatgttacggtctttctttctgcctatgcgctagttattttgttgagaagacagtttttgatgtggctttctttctgtttagactgtaaacgtagta

SEQ ID NO: 84248 - DNA, 669 bp, Citrus clementina
  Intron number 2 from transcript clementine0.9_031206m (loc us clementine0.9_031206m.g) derived from phytozome v7.0 (c hr-ID scaffold_1; pos 2345149 to 2345817 reverse strand)
ggaagctgtgcaccttctgtatctgctgctgaactgtaagcccgcatcattttgttctcccattattatcattattatgggtgttagtaaattgaatcacacgcagttaccgttttagccactcatctgtttttgtattgactacaggtttgctcttcttttgttttagtctagttagcttcaatattttgttagattatcttgtacatagttcaaacatgtttttcatagcattatcagaaagttttgtcaacctaagcggccaaatcaaagtaagggcaagaagaagaactagatgtccaaacctcgtatcagattaaccactctaagtttctgtccatacatgatgcaatatagaaccagttccaacccttttaagtggtagttttcagacaagaactctaattagtgctctctaatactttgagctgttgtttttttttttttattttactttttaatttcaagctgactagcagagcactttgagtgatcttaaaacttactgctactctcatctcctctctgataaccccattcattcgtatgtttgagatttaaagttggcatgtatagatttgctcatagttgcaacactttcctaacaattttttatttcttgattggataaaaggtccgaaaatatttcgtagattctgctctggttat

SEQ ID NO: 84249 - DNA, 728 bp, Citrus clementina
  Intron number 1 from transcript clementine0.9_019256m (loc us clementine0.9_019256m.g) derived from phytozome v7.0 (c hr-ID scaffold_23; pos 3809579 to 3810306)
actggtaatgctacttccagtgttcaattttaaaattttatttagaatattcaatattgaatctatacgcatatggttacgtctaataaggcacttttgaatttcttttttttttttccttttaatgcaactcaattgcgtgatgcctcaatttattcctaatcaaagttctcttcttgagttaattttcgggcattccagctctagttcgaatgtatttatttattttaaaacatattgattaccctgagcacttttagtgatgaaactttgatgcttatagcgataattaattagaagtatcagcaagatttaatttttatgattaattttataattcggttctcttaaagctttcatcagcttgttttagttttttctttttctttttcctgctcgagtctattattgttagcgctaatggtgctttggtgctagcatgtagagactaataattgattattcacatttgtgtgtatgagagtgtagaaagatctttctttggaaaaaatgaaagaagttaattttcatgtaaaacagtttggagttgtactcaatgttgcaagatattgtctgtaagtggttcaaagtaagaccattatcaattagaagttgatggcatagtcgtattatatgtttagacattgaacatttttgtaagatttcttatctttgtttatatgttctttctgttagtttcctttgtcttaaactatgttttacagacc

SEQ ID NO: 84250 - DNA, 449 bp, Citrus clementina
  Intron number 3 from transcript clementine0.9_019256m (loc us clementine0.9_019256m.g) derived from phytozome v7.0 (c hr-ID scaffold_23; pos 3810496 to 3810944)
tttccaagtaacgttatctccacaggtatgtgataagtaggaaattagaggttttttttttttaaaatgtgagccttctaatgtctaaacttatgaagctgggttgaagcttcttcctgtgatcagatattaagcagaggtttattgagccgaaagcaatctatcacccaaatacaattttaaatttgggggctgaaagaaatttttggaagttgctgtgttttctgtgtaaatggatgactatgtttgattcttatcagtaactctactaggttcttcatacttatggttatataaggagccattattattttggtcaacgtgttagtgatctaaatttgccatgatatggcaaatttagaaagacaagaatagggatcttttgactatgtttgtgctttggaaagtccattttcttaatgtaattaccttgttttctgttcaacagg

SEQ ID NO: 84251 - DNA, 640 bp, Citrus clementina
  Intron number 1 from transcript clementine0.9_030842m (loc us clementine0.9_030842m.g) derived from phytozome v7.0 (c hr-ID scaffold_40; pos 164357 to 164996)
ctggctccattcattatcctagaagcactcctgaggtattgccattattgccattgtcaccgtgcctcctcattctgtccatttaatttctttgtttgagtttgggaaaatcacagcacgtagttgggtggaattgtcacgtaaattttttcgacaatctttagagtccgcaagataatttctaaacacaaaagaagatttgtactttgtttatcacaggcaaaaaaaaaaaacagtggtgcactaaggaccactcggtccaaaattcccagaagacattttctttttaatttgttacattacaaatttacctccactggactaattaaaaacgttaaatttaacttcaaaatgtattaaaaaattcaagttcaaagtttattttaaaaatcacaaatacatatataatcgtaaaattttgaatttatatgttttcttcattttatgtcggtcataaactttgctccccttagtttgattttttagctaccccattgcaagaaaaagtctagtaactatttctgaaaacaagagatatccgcgacctccatttcgtgaccattgcgtcaaactagaatgttgatgtcttttttctttttgattttttttttcatttgctgtggtacattttttgttgcag

SEQ ID NO: 84252 - DNA, 450 bp, Citrus clementina
  Intron number 1 from transcript clementine0.9_020676m (loc us clementine0.9_020676m.g) derived from phytozome v7.0 (c hr-ID scaffold_65; pos 507122 to 507571)
tgctacaaaataaagctcaacgtacacaaacccaggtgcaaaatttcttcttttcatatatacaagttatttagaatctaagttgaattgatttatctttaatgaattgatttatctttaaagctttgagatggtaagtgagtgcctcgcttttgttttatttatttatttattttttaatttttatatgctttacttttaagttcgtctgtcaattttgctgttttctttatatgtctttgtgagttcttttgcttaccacattttagatgtattttgctcgaaaaataaatataaaaagtattccaactttagggatcattcaacacattcaaccactgacgttattattttgtgttgcttttgctcttaactttcctcatttttctgtttttatgtgttgttccgtgattaggtatttttgctcgtcctggttgattgctttctagt

SEQ ID NO: 84253 - DNA, 633 bp, Citrus clementina
  Intron number 2 from transcript clementine0.9_020676m (loc us clementine0.9_020676m.g) derived from phytozome v7.0 (c hr-ID scaffold_65; pos 507736 to 508368)
gggtatgcttttagtttttcaggcactggaacccttggccagttttttatctttattatccatgtggaaattttttcattggtttgatctccttacattttgtattgatgctgatgactatcatcacttgatgaatgggttaaaaactcagggctcatatgatatgagtgacagttaggcaccagagtcttcattgctgatgtttggcctagcgaatattataccattgatcagtttgaaactttatcaaaatttgcaaattttttctttgtcagctatgcaatagaatcgacatatgttctgttctgattgtagtgtcctttgatacctttgaattttaaaatcaatttctgggttaaaggaaaaccctgaaggagaatttaattatgacaagaaaagctccttagatgtcctgttacctgtagaaaggaatgttgctttgttttacttgtaatgccatagattaaactcagccttttagcttgtgttgtatttgtacttctgcattgtgatcaagacaggatgtatgggagattagtgtaaattattagatttttcattgattgtgaccgccgtactatctgatacaatgttatccattctttgtttgctgtctccctatgcttgtgcagt

SEQ ID NO: 84254 - DNA, 574 bp, Citrus clementina
  Intron number 2 from transcript clementine0.9_014349m (loc us clementine0.9_014349m.g) derived from phytozome v7.0 (c hr-ID scaffold_20; pos 1155706 to 1156279)
gcaataagtaagtgtttctctctctctctgtctttttgtgtttgtgtttgtagtttttttttttttttaaaggaagtactgattaaatctttgtagtataagaagtatattacctttattttagaacttgctgcttttatgtaatgccaccattatctgctagataaattctctgtctatcctataggccggcaattgtgtgaatttgattttgaatgtcatgtttcatgtcatcttcgaatttaggtccatagattattgaaaatttagtaggccatttttctctcgtcatgatcattgtctgatgaatctatagcttcaacaatattaacagggagttacaaaattcagccctgtgttcagttgctcattggatcatttctctttcattgaaaagttagcatctgcagatcttcatgtttttgttctattacattttttattacttactagagtatgctaattttgatttactatgtgcatttggtctatcactgatctttggcagaatcattcttgttgtatgatttttgatatagtgattgttggagaggtggcaaattttgtggcatat

SEQ ID NO: 84255 - DNA, 727 bp, Citrus clementina
  Intron number 2 from transcript clementine0.9_024859m (loc us clementine0.9_024859m.g) derived from phytozome v7.0 (c hr-ID scaffold_27; pos 1871784 to 1872510 reverse strand)
aattgtcagaaaagcaagatctttttcattgcgtaatttgttcatttcaacttatctaactcattaaatttgctttgtgtttgcttgatgatttcaggtgtgtgtacttctattaatcatgtttctaaaagctatacgatttttattattttttgaaacgaaagcccagtaatttgagcttctttccacgtgaataccttatgttccttttttgtcaaattcttgtgctaatggtttttctgcattagctctaatcacaattctgtttccattgttagtgagttctgtaggggattaaattggttgaagcgtacctcctaatgagaaatactgcttgttgcagatgttgacgatatatgtgttgtatttacctacaattcatttttttctttttagtggaatttataactagtcttcggtgggacaaggaattaaagaagggaactggaggagtttgaattttgtagtccatgctgagctcaatttctttttaacatagattagatatggagcaaggccaggactaggaagaaaaggaatcgcttcttttttgtttcgtttgatctcaagtgttaatgaatttttccgaacttagttgctatggacagttggactaaaatatttgttattctacttataagattttctataatctttacttggaatcaagaatcattgtttgacatttcctctcaggtctcctgacgtgtcccgaatccgagctaag

SEQ ID NO: 84256 - DNA, 915 bp, Citrus clementina; identical to SEQ ID NO: 83851
  Intron number 2 from transcript clementine0.9_000182m (loc us clementine0.9_000180m.g) derived from phytozome v7.0 (c hr-ID scaffold_20; pos 3939196 to 3940110 reverse strand)

SEQ ID NO: 84257 - DNA, 650 bp, Citrus clementina
  Intron number 5 from transcript clementine0.9_015124m (loc us clementine0.9_006772m.g) derived from phytozome v7.0 (c hr-ID scaffold_29; pos 2017296 to 2017945 reverse strand)
agttaaaccaattatttaatagaacggggtaagttgtatgacatttttgtctaatcattaaataccaaattttcttgtcgattattaaatctctgatgttaatgtaccaaggtgttttacatggtcaagtaatctcaatggagtcaaatatatctagtttgttctaacataacacgtgaaagagaactcctactaacttacagtgtagtttattttcttaatctaaaatcgcaaccgatctaataaattccttcaatttcttatattttgacagttttctccctcaagtgttttgacttcattgaagctaacttctcatctcttcttattcaagcacttctttcaagtgatctagtggtgctgggttggagtttgaatgcccgctgttgtccgaatttcttattatatgggacatatgattttgtttcaaatctttcctaaaactattttgattttgtttcaaatctttcctaaaactattatcatgtcgattgtatttttcttctctttttcttttccccccaaacattttatcctaattttgtttctgagtgttatttttcaattttgtacctatggtacatttgtcatgatgtcagcttaatcttacatttgcagggctatagtaagttttggcttgaacgcactcc

SEQ ID NO: 84258 - DNA, 817 bp, Citrus clementina
  Intron number 2 from transcript clementine0.9_021506m (loc us clementine0.9_021493m.g) derived from phytozome v7.0 (c hr-ID scaffold_10; pos 1284133 to 1284949 reverse strand)
aacaagtcatctgggttagctttgttctgcaacttcatttagttttaaaaattgctaatattttggaatttatatgtaatataggagaggaaattctcacacttttttttcttttgaatggttaattagtttactaagagcagccatgtttaggcctgtgaattgggacaccaactctacaacacggctgttgaagcctaattcaaaaggaaataagaatccatgagacttctcaggatgcctcactatcgctcagttttgaggctgaccagaaaatttcgtgcaaattgaacatagaaaagcccggcgaacttttaaaaattatattagtagatgctttgtgcatagtctaaatataagggtagtcgtatctcttaaatttctagttgtttttagtcaatcattgcttcacttcttttttttaccccctccttctttgcatttgctttgttattactgcttgctccttttcattctctatttttcactatagtcgaccttcaactgttgctgttgtctgtctactttatgtttttggtatattggctgcttgtatcctctgggacttggctttaaagcatttcactcttattgggaggcgctgggccccacaggctagctccccaatgtgaggtgcgcaacaacgtgctctagatcaattgcattgaattcatatatgtaataaaattgccgatcacaaaaatgtcagtccacgaattcaccttttcagttttggattaaatagtgtgtctaagaagacttaaattttgttgctttttcagattcatttgggggtaaatagtgggtcatcaaagtt

SEQ ID NO: 84259 - DNA, 973 bp, Citrus clementina
  Intron number 2 from transcript clementine0.9_006626m (loc us clementine0.9_005785m.g) derived from phytozome v7.0 (c hr-ID scaffold_49; pos 295143 to 296115 reverse strand)
acttatttgctgaatttgagcttgctaaattactggtgagtttttgtgattgtgatagtctgattgatgattggttgaattgttgagctgatttcttttaatataattatactgattgtatgtagttcttaaataaatggattgcttgtggagttcaaaacatgtttgtgcttttcaggttgtcatttttcctctagttaggatattttgatttgcgttgaacataatgtggacattagggttttacttgttgttgtcttcctagtgagttctggtataacttgttgatgctttcattcaattgagttactggggatgctctggagtggttggaaagtagttatcttcttcaatattccagtgatgatgtgtcattttctatcttgacagggaacttctatttgtgcttagccagttagcctggtacagattaatttggcctagatcattgcttacagtacttctgtgttgttcttgtaaggttatctaataagtttaaaatgggttttgttcttgatgttcatatgacaaactggggattttatgaccagagagcctacattttcaaatctcttgactactgttttacgctgttgttgttttagcactttggaacttcaggaaataaagcttgctgcatccgggtattccacctttttttttgggtttcttatagcattttattgtcatagctgtagatatttattaggatgaattttcttttatgttgttgttaaggttgtcttgcttttataaatttgatctttttggcaacaatataaatacatggcggatgctaaaaagtttttgcattgtaactttttttttttcatttttttaaatacatatgatggttaaaaatcttttcatgtttttttctgtttatgcctttttttgctgggtaggctggtttttctttatcttgtttccttttaattattctacatgctgtttcccttccagcatttctgct

SEQ ID NO: 84260 - DNA, 1026 bp, Citrus clementina
  Intron number 2 from transcript clementine0.9_027969m (loc us clementine0.9_027969m.g) derived from phytozome v7.0 (c hr-ID scaffold_127; pos 126858 to 127883 reverse strand)
aagtataaccctgatttaacaaaggctttcttccggttcatgatgcagcattatatggtcataaagatacttttcactatctactagaggtgactcatggtgtagacatctacagcggcaaagatggtgcgaatgtgctttcatttctcatcgcagctaatttatatggtcagtattattaacctaaaagtttcaagctaacacgtatgcgattgcagataaaccaattctcaagttatatcgtccatgtatagcttgttttaaccaaaattttcttttaaaaacctcaaggctagcaagctctaaaccataattcataaacatatgtttttgacaactctgatacggaagctactttggtgcgaatgtttgaaacaaaattctgtgtggccacagagtttacaacattacaaaagttgttcacgaaaattataaaatttgacattccgcacctgagttttcgctgtgatacgtatttttgaaattccttgacatgaacattaatcaaataaattccttctttttttgtacccattctttaataaaaaaatttattactttaatacccattaataaaataaaaattttagataaaataatataattaattcttttgtttaaaaaaaaatgtttacacataacgcaaccaacttactgaaaccccaatagaaatatattagaagggcaaaatacttcgaagatgaacccattatcatgcaatagtttggaactcttgaccatatcgaaacgaacaacctgttcttcttgactatccaccgcattaatttaattgattacctcgattgtgttagtaattttatcgaatgcatatttaattgtttaaatatatacatttaatttttttttggctgctttcatataatgtgatccgctaaaccaaattcctgtttctactgttgattgcttggttatactttcgtcatgttatcttcgtttatatatgtatatatatgatgctcgaattatatagagatcaagtacatcgccaccactctgactttgttc

SEQ ID NO: 84261 - DNA, 937 bp, Citrus clementina
  Intron number 1 from transcript clementine0.9_018336m (loc us clementine0.9_018340m.g) derived from phytozome v7.0 (c hr-ID scaffold_43; pos 893820 to 894756 reverse strand)
catatcgaatcttctggtaaaagttaaaatacccactttcattttcccataacgtttcaaaatttagtccttttttttatggggttatgaatttggtatcagaagatggattgctatgtgggtatgagtggttttttttttttttttaataaatggaatctgttggatatttgactgagcaatagctgactacgtgtaaaaagaatgagtacatgtttgtcattgttgggcattatgcttaattttgtaacctggatagcttaaagtgtttggtaaatacccttatttcaacttttacagctaatatttatgaactatctgcctacttatacttgatacttagtgatttaattttagagtagtcgtggattaaaaatttctttcccttgatcccaaatggttcgattaacgcactaagcaggaattttctgagatattagttgaaaatgaatatgagccactggcatataaacctgatgcttctgagttccagtgccaatctaaggaatatgtgtatctattttggtgtgacaatttatttcatgcagtcctagtgtatctggaaaaatacctgggattgataatttgacattttagtggaaggccattaaagccaatttcattttcatcgaactttgtttagcattttaagttaaacttgacgagttgggttctttgtggtttcattggctaatccctgattgaaattgagctttatacaagtagtcaatagacttgcatatgcatttagtgggaattctcacatttgttgtgtgtttaattaggagtgtggtgaaacatctgttttgttgtgtatgaaatccataaagtcctattgatggaatagttctccaacttgtgttggggtttagggcttctccacatgtgttttttgttatagaatgttgaaccatcatgtcattaatctttcaggagg

SEQ ID NO: 84262 - DNA, 298 bp, Citrus clementina
  Intron number 1 from transcript clementine0.9_020932m (loc us clementine0.9_020932m.g) derived from phytozome v7.0 (c hr-ID scaffold_5; pos 1199749 to 1200046)
gacatcgtatgctgccttaactttacgctgtaagaattaatcgccattatgacgtaataatttggttagcttattgtatttttagttttatttacgccctgtttggcaaatcctttttatatataaattcaaattccagattgatgacagatacgagtaatgaaacgaacaacaacaagatcattatttttatttttctttatctaatgtactgtttgacttgcgttgactgcatcatacattgctattgtgaaatgttcttctaattaacgtgtttttcttattgtttgtgtgcagg

SEQ ID NO: 84263 - DNA, 964 bp, Citrus clementina
  Intron number 3 from transcript clementine0.9_006843m (loc us clementine0.9_006843m.g) derived from phytozome v7.0 (c hr-ID scaffold_1; pos 5331036 to 5331999 reverse strand)
aaagtttctctaatacggtaagcaccatctttcttgctcgttcgtgtcttgtcatgtctgcttctttactactccatggaaggataagcttatccacaacttcttcattgtcatttcccacgaagtccatgtcttggtctcgtatatttttgtgcataaacaacatttgttgatttttgtttctttgatgaagctaagaaaacttgagcctgtctatccttggaacagaaatataatacaaaatttatcccccttctggcattattgcttttgaaatgagttgaatacttaatatcattgacttgtaagtcatagcatccgatgctgaaaaattagtaatgcatggcattacagttgcaactaataaaattatgaggtgtaaatctaatttgtttttatgatttaacatttatgctgcatttgatgtagatacaaccctaatgaatctatagggccatctatgataattgtagatttgctaaaggcttcatttattgggtttattgttgaggactatttagtttatcaacccttttcttccacttcatttgaaatgtgatgccctaaaatgttttcagttcaataataatagcaagtgctaaaaatgtagtttgatccttgtcattgcaagcatgcatgaaaaatgtccacaggtagtgggaatggactcttgaagatttattgttcttttgcttgtgatcttccactaatgcatctttaactgccatttaacaatcatgtttataaaatgttagagggattttttttttttccctggggagagaagactcttttatgtaaatttctgacaatgggactttggtcaagcatttttttttggtcatggtataggaaaccagagtagcattattttattgcctttgcataactgaagaatgtgtagtagtgtgttgtctctagtctggatgaaataatcacttcctgatcttacttaggtgctttc

SEQ ID NO: 84264 - DNA, 777 bp, Citrus clementina; identical to SEQ ID NO: 83496
  Intron number 1 from transcript clementine0.9_030018m (loc us clementine0.9_030018m.g) derived from phytozome v7.0 (c hr-ID scaffold_5; pos 2907345 to 2908121)

SEQ ID NO: 84265 - DNA, 723 bp, Citrus clementina
  Intron number 1 from transcript clementine0.9_036070m (loc us clementine0.9_036070m.g) derived from phytozome v7.0 (c hr-ID scaffold_1; pos 2574205 to 2574927)
gggagaaaagggcgtccaaggtaactgtgcctatatatagtgagcacggaaagtacttggacagttgagtacattaatcataaatcaagtattacttctagtggagttgatttggtgaccatatcgctattgtaaggtttctacaattaaacctcttcttcaagcatctctgcttggtttttatttttttttttcaactactgaagaattatcactctgaagtccatttatacgtatgtttgtatgcactggatttagttcatttttacatactgggactggaaatcaagtaacgctgagctaattaattaacttaagtacaagtaatgtaaatggaattaagtcagactcgaggtatttttattttcacatgatggcctgaactatgaaatcaaatgcataaattgtttgttaataagtatttgcaagatgaagttcaatacgtatatattcagttcatgtaacgagaatagacatgtatatatatatatatttgcagttcaggtgaaatggctaaaagggatttcagttcgaacccttgttcggaagtgggaggttcgttttcaatacaagtgtcagaatttgttgagagcgagaaaagttcattaactcgagtacttaagcagccttctcttcacttgctttctggtaagaatgagataacctttaatttttttttttaatttaggttacataaaattcaacttttataagttcaaaatt

SEQ ID NO: 84266 - DNA, 458 bp, Citrus clementina
  Intron number 1 from transcript clementine0.9_015950m (loc us clementine0.9_015969m.g) derived from phytozome v7.0 (c hr-ID scaffold_63; pos 593786 to 594243 reverse strand)
cagaaatatcaccgtttttggggttgctttctgttaactttgaatttttatcactttttttttttagtagtatcagattttgtaataatttgtatactaaaatagtataatttttttagccttcttttttttctttttgccttcaaatgcagtaaagtgtgctcccaaaatacctttgtgtatttgaaattttcggaacccgtcagttctgtacattgttaaaatctgaattttgatttgtttgctttcaattttcgaaataaaaactacatgggtacagaacagatttcttcaactgtagggtaaaattagtacctcatttcgaattattagtttgttttggcttgattttgcatccattctgttgcccaagtttttcaccagttaaatattaagtatatttgtactgattaagtagcttgttgtaccaaaatgcagtttgtttgctgccttatcat

SEQ ID NO: 84267 - DNA, 672 bp, Citrus clementina
  Intron number 4 from transcript clementine0.9_005560m (loc us clementine0.9_005560m.g) derived from phytozome v7.0 (c hr-ID scaffold_23; pos 1913227 to 1913898 reverse strand)
ctgaaggtttggaaattttttttattttttattttttggccttataaacttatagttcattgtacagtttatattctttagttaaaatctttaagcataatttgtgaatgctacgtgattacatgtggatccaagaaattaatttgatgaagttgagtttgagttccactcaagtatgttgatgcgtagctcttaattgtgacatgtattggctttcttcaggaagatacttaccttagtagatagtttgtgctactagtagcttgaatagtatttcctaatctgacagtagttatcttttgtgtattacataggctatttgcttgtgctaacctatgagttatgacattagtgttttttaattttttggaactgttcattttagttaagctttcttatgagcttacattttcatctgaatttggcttaaaaaaaagcataatttttttattattattttttctaaattaatgctttcacaaactgttctttagatgtgcactggcttttgagtcacggatttgaaggtgattgttgaccgacaactcatttgagggactagagcatactgttatgtaattatgtttagctttggagctaggtaatctattggtgaagattttccctttctctgcaggagagtatcattgccctgtgctaaataaagttttt

SEQ ID NO: 84268 - DNA, 700 bp, Citrus clementina
  Intron number 1 from transcript clementine0.9_015492m (loc us clementine0.9_015401m.g) derived from phytozome v7.0 (c hr-ID scaffold_120; pos 171672 to 172371 reverse strand)
aggctacaccgtccacgctgccctccacaaccacggtattaatttattacttcatttctttcttcctctctctttcttttttttcttcattattttcatttcttcaattcaatttttgattttttttttttggtaattatagcaatacattttcccaaaaaaaatataaacaacaaaaaatgtttttagagctgtttcattttgttggtgcacgcacgtgtccagctaattcattcaattctgccagctaactcaaaagtaattaaacaaaaaaggtcatttttctggaataaaaattcttattgagttagacaaaataaataagaaaataaaaaattttaaaataaaactcaactagcttaaaataatccttatcatctattattttgactaatacttcttgggaatggaatccaaaacgatatcgccttctacttttatgatgtgtctgtctgtgcatcacgcattgcatcatcacaagtccacaactttgcaaaggttaactgaacgtggttttgaggttgacgccacgcacgtacattgccttggttttcttttcattattttaattcttttaagtaattcaatttccaatcattaactaatattttattttttatcttatcttgttttgatatttttcaaccaaaaaaaaaaaaaagcaggaaaattgcagtgtatcgaaggagagttaattaat

SEQ ID NO: 84269 - DNA, 761 bp, Citrus clementina; identical to SEQ ID NO: 78148
  Intron number 2 from transcript clementine0.9_013528m (loc us clementine0.9_013528m.g) derived from phytozome v7.0 (c hr-ID scaffold_5; pos 3558516 to 3559276)

SEQ ID NO: 84270 - DNA, 997 bp, Citrus clementina; identical to SEQ ID NO: 80605
  Intron number 3 from transcript clementine0.9_002446m (loc us clementine0.9_002444m.g) derived from phytozome v7.0 (c hr-ID scaffold_23; pos 1472561 to 1473557)

SEQ ID NO: 84271 - DNA, 831 bp, Citrus clementina
  Intron number 2 from transcript clementine0.9_022800m (loc us clementine0.9_022800m.g) derived from phytozome v7.0 (c hr-ID scaffold_10; pos 196214 to 197044)
agcacatcatttgtactggcaatctctctatcaaagtaaatctctctcttgtcttttgggtttagttatggtatgtgatataattgattggggttgttctcttggtagtgtttatcagaatgttgaaattgcttttgacatgcattcttaatttctcttgaaaattttgaagaaaaaaaagattatttttattagaatttgaatcctgagactattatttgttcttgttatgagtagcattgagaaatcttagattggaaacatttgaataactaataatttgctgatattgtaccactttctttaacatttactatgatgttgttgccgcctgctggttgatagataattgtaaccgtataatacatactgcataatggcttcttacttagactggatgatccagatgttacctgttgatctggatggcctactggtggaccaaaaaaatggataactaaagtcatggttcataacttacagcagcccccctggaattcaaaagaaagcattaaaacaaatttggttattcttattgttttactttggcattgacttgtaccttattctgatattgatgagccagattatcattatcttcattacttttttggttgtgataaactgatattcacaccctgaagagaacttctcttgagctgttaattccctgctctagatttatatattatgattgatactttgataaatgtgttgtagaaacagttgaagttccttggcttcattgctttactcaccctcctacacatttgcttccagaatatcttgttaaatttacccttatgaatgctatcaatgggcaggaagtcc

SEQ ID NO: 84272 - DNA, 251 bp, Citrus clementina
  Intron number 1 from transcript clementine0.9_020468m (loc us clementine0.9_020468m.g) derived from phytozome v7.0 (c hr-ID scaffold_63; pos 177122 to 177372)
cgttgtcctcggcgccgattctcgtactagcaccggtatttgtcttcgattcaatttcattatttgagtttctcgattcagtaacttgctgatcgttttctttttcattttttttattttaataggttattgtttttatttaaaaataatagtaaataaataaagagcagagatttcgtgttaatttcttgattaaaaaaaaaaaaaactgacaaattttggtcgctgttgtgatgtgatggtaggggtgt

SEQ ID NO: 84273 - DNA, 693 bp, Citrus clementina
  Intron number 1 from transcript clementine0.9_013885m (loc us clementine0.9_013885m.g) derived from phytozome v7.0 (c hr-ID scaffold_122; pos 469227 to 469919)
ttgggcctaatactggtgtccctcttcattacaaggtgagttgtttatgtgaatgtgtctgtttctgttttaaaagttgaccttttcattatttgttgtgggacaaaggttggttctttgttataatcttatgattttggcacgcattttgaagggtgtttgtgtttttgaagttgtgttggttatgtaaatgatgggttccagttgttgatgataaagtgacgctaatgatcttgaattttgatgaaggggacaaattgtgggatattagtgtactttagaagtatgggaggagataatattagaagggcattgctggttgttgaatgtctcgtgtatgtagtttgatggttggttgacctttttgattgtgagttgttttccaaatttttaggcaatatgtggattactgactttgtttgaagcatgtttgatctcttcatcgaagatttatcatctattcgagagtgcaaagactccctaagcggtgataaattttgatataagattgtttcaagtatcaatttgatagaatatgctgccggctagttgtttgcactgtaggtttaccatttactttggtgtggggggccgtgattacccggcatcttttatctaatgctgcttttttagtctaattaggtttatgttgtttcagggagttcgctttcatcgtgtcatcaaagggtttat

SEQ ID NO: 84274 - DNA, 632 bp, Citrus clementina
  Intron number 4 from transcript clementine0.9_000648m (loc us clementine0.9_000207m.g) derived from phytozome v7.0 (c hr-ID scaffold_20; pos 2360831 to 2361462 reverse strand)
ttggtacgtggttagtttaatctagctatgactgttggcatttatgtggatacttcttttataattgttttatgggaccttgttgttggaaatgtagattgagtgaactgactattaagttcattggatcattcacctctgaagaattagggtcaattttgccctcatggaatgacaatctttaaaatacccccaaactattgtaaacctcaaattaccctccatttttgttaagaagacaaaaaaaattttcatcaatgtgcccccatttttgtttaaaagaatttttcttttatcttttaaacaaaaatgggtgtaagttgaggttaacaataatttgggagtattttgaagattgtcatttcacgaggggtaaccagatatttaccttttgaattatgtagatgctttatttatccatttctttattctaattacaccttaaagatgaagtgcgaattagtctaaaatatttcagattggcttactccagtatcttatttaagaataaagattctttccatgtgccttgtggtgttattaggcttatctgtaaatcagcacttgtttaggattttctagacttgtgggtatgtgtttcatgaccactgtatcttggtttgcagccaaca

SEQ ID NO: 84275 - DNA, 664 bp, Citrus clementina; identical to SEQ ID NO: 81792
  Intron number 1 from transcript clementine0.9_021785m (loc us clementine0.9_021785m.g) derived from phytozome v7.0 (c hr-ID scaffold_1; pos 6298092 to 6298755 reverse strand)

SEQ ID NO: 84276 - DNA, 901 bp, Citrus clementina
  Intron number 1 from transcript clementine0.9_006656m (loc us clementine0.9_006586m.g) derived from phytozome v7.0 (c hr-ID scaffold_109; pos 635257 to 636157 reverse strand)
gccttgttggccgctgttttctacaccaacgctaggtaaatttgtttccgtgaaaccctagtccagtagtagtagcaagaagtagaagatagataaatagttaagaaggaaaaaaaaagggaaaaaaaaaggtttagtagatgaaagctttaaaaagaagtcacacttcgtcgtcgtcttcaaataataacaactcgtcatcgtcgtcatcaccgtcgtcgtcgtcttcatcttcgtgggttcacttgcgttcggttctattcgttgttacctcttcctcaccagcttcttgttcttcctctgatcggtgagtcccccacaaatcactctctttgttttttttttctttttaacattaattttttgtttaatcactcattgtcttgtcctccatcgtttcttgtgagtttatgtttaaaatttttttctcattattagttattcttagtgcttatcgagtttgatccagatcttgatctcgggcttatattcccttccctttctcttttgggatcggcgtgttcgtgtttctggatctgttttaatcgcgtggtagtgatgatttcactgatctcactatgatagagatcgtgtcaataactcgtttgtagttgttctcatttttaatgtattcaaagccattaaccagattactctagtattgttggccaaggaatagtgcttaatcttagacattgactcagtctggtggtcttttcagctattgtggttttcttatattgaagctttaaatctagaatccttgaggattagtgttgagtgagacttagttgagctccattttatctattgcagaaggctctgaatcatgagtggtttcttactctaggactctaactttgtcttcctgtcatttcaggactggtcgactgaagtcacc

SEQ ID NO: 84277 - DNA, 556 bp, Citrus clementina; identical to SEQ ID NO: 78483
  Intron number 1 from transcript clementine0.9_013812m (loc us clementine0.9_013812m.g) derived from phytozome v7.0 (c hr-ID scaffold_82; pos 89710 to 90265)

SEQ ID NO: 84278 - DNA, 437 bp, Citrus clementina
  Intron number 2 from transcript clementine0.9_003520m (loc us clementine0.9_003520m.g) derived from phytozome v7.0 (c hr-ID scaffold_10; pos 3935555 to 3935991 reverse strand)
actcaaaactgctctgaagaaaaagcgtggcaaaggtgcttcttcccaggactccaaggaagacgagtccatttcatgcaccatctcatgtggtatataatctcttacaatgcaatcaaaattttgaaacaagctctgttttcaactgtgaatagtcgtatgcaatataaggaaattttacatcatttgtttttagtcaattaatcaagacacataaagcatatataaggtaccgcattttctcaatttcgcataaatcaggatatgcatcacttctacgatcttcggttcagtgtgatttaaaattgcaggtagccaaaatgttcaatttaggacaaatcaaagactcaaattaaattatctgttacatttgtgtctcatttttcttttctttggctacagaggagtccattgaggacagaacagaacaggagcaa

SEQ ID NO: 84279 - DNA, 655 bp, Citrus clementina
  Intron number 1 from transcript clementine0.9_016059m (loc us clementine0.9_014687m.g) derived from phytozome v7.0 (c hr-ID scaffold_10; pos 1027585 to 1028239 reverse strand)
tggcccggtttgtttttcttttctttttctctttataggctgtatgttcatgcttttttatctgattaaaatcattggtatgtttaatatcatacggtcaggggcgaaagctgacaattttggtcacagggccggagtgaataatgtatatatagtttagagatattttttttaatttctattataatttaggagatatcatgtatattttaaaaaaatttgaatttttttttgcctgcttcttttcatttgggaattttatctgttgattcttacaagaattttaagctgcttggtagagctgaataccttaaagtatatagaagactttgttgtcctttgatgcacttgttgttaaacttgctaaacctttggatgtttagtgagaacagggtgccgaatccatctgtatggtgttctctttagtcttttatgtcagcatggctttaaatattggagtctagtttgttataatatctacaggaaaacagaagtattgcaattgtttttgtctctttaattcttgtgtgtaggtttgccattgccagattcttttttcattcttattatcatattaattctcagaaaatcttatatgcgaggtattttttattatgcaggtgaggcacattcattgaaggttgagaaaatcttg

SEQ ID NO: 84280 - DNA, 822 bp, Citrus clementina; identical to SEQ ID NO: 80579
  Intron number 1 from transcript clementine0.9_029580m (loc us clementine0.9_029580m.g) derived from phytozome v7.0 (c hr-ID scaffold_5; pos 2969308 to 2970129)

SEQ ID NO: 84281 - DNA, 987 bp, Citrus clementina
  Intron number 1 from transcript clementine0.9_010208m (loc us clementine0.9_010208m.g) derived from phytozome v7.0 (c hr-ID scaffold_122; pos 564647 to 565633 reverse strand)
cttttcttcataattgtttctcacatactggtcaggtcagatttataggttttttttttattataaaaaattatgttttagaagattacagaggttgaatctaggtggatcttttgctaaaattacaagtttcaatgctagttgattaatgtagtgggatcttgtttctcaatgttatgctcactgatgtttttgtgatagttgtcgttgttaaattgctggataaaatgaaatgcatgctagcttgagctaggtcaacaattgtatttaacaggtgaaatagtgtgttattacgggtatgtgggttggatagttaattgacagctgattgttgtaatctcaattatcaacaaaataggttgatgattataatgcagtccatttatggaatgcaaactccttctggggtcaaggaagtctttttttttttttttggttttcttatgaggtgatcttgaaatggaaatgtattgttaatgtctgctctctttgttgataaatttcattcgtcattcaagtcatgcaacttaggttgggtaaggtttgttcatccctttatgggtgggaggggtgatctcccatttcctactttagtctgaatggaaaatggatcactgatctaccttaacatgatgataccatttctggtaaatatggggaaaacaatggttagagtaaacttgacaattgaatcatttaaaagttgtttatttgatttgggctcccacagatcaatgcaatcttaaattataaggttaatgtagagacctcagtcctaatgtatgctgtgaacactgttctttcctgtgtaatctatcataaattgtgtacttatcaaaaatcagcttttgacaggtatttagtttcatgcatcagttagtctaacatcaatcatgttgctagctttgatgaatttgatgcttgctgccctgtcttgttcagatagatgaacgattgacccttgtgtttaatcattgcaggttgtaa

SEQ ID NO: 84282 - DNA, 551 bp, Citrus clementina
  Intron number 1 from transcript clementine0.9_016861m (loc us clementine0.9_016861m.g) derived from phytozome v7.0 (c hr-ID scaffold_10; pos 345020 to 345570)
gttctggttatccaaatctcctacttcgcttcagggtaattccctgcttttcttcttcctctgtctgcactctccttattatttttggtagatttgccattgttcatgttaatgcatgcaaaatttccgtttggcgggtttgtgattcttttatgatcttgcttatattctcttccgaatgaatgaacaaaatgtttttggaggagataatcaattagtcatttggttcactagaaaaacaaatgaaaaaaaaaaaaagttgttagcttttgattgattcgatgttttgagaacagagtacctctgtttttattgtcttcattaaacggaaaaaagggttgaaacatttatgcataaaaattcttacttttaaagtgtgcttgctccttgcatatgatattcttctgctttcattttgtttttggaagaaagcttgagttagcatatttatttggtcagtcatgtcaaattagaacaagaagaaaatgataatataatgttttatgtgtctttctttcatttaggtccacaatctaaggctaattttgaga

SEQ ID NO: 84283 - DNA, 922 bp, Citrus clementina
  Intron number 1 from transcript clementine0.9_009790m (loc us clementine0.9_009790m.g) derived from phytozome v7.0 (c hr-ID scaffold_29; pos 2954701 to 2955622)
tgtcggattcggccaaggacacgaacgactcagctgtaagttctttttttttttttgtttccgcattcattataagccctaagctatttattattccgttttgcgtatttattgaaattatgaggtttgacagcaataatttccactcaattaagctttactggagtaggtttattgattttttttaattttaaattgaaaacattgcttaaattgcctagcttattcattatgatcaatgtatatagctggttggtttttagtttattaaattcaaaacaatgtaaactcagaaatattgaaaatttcaaattattttggcattgtcagcttaatttatctggaaagttgttgagtaacatggtgaatcgagttatttgagtactagttatgaaaatctataatcatgtgaacttacatggtgcttcttctttttttctttttttttttaatgaatttaggttatggaaaatcttggtttgaggattttggaatttagcttatgttggaattggctatctttgttagaattcagagaaccttgcatagttgcatttatggggttttctttttatcttctttactgcaaatgaggagatctaagaatctagttatttgttatttggtggcttaatgcaagtggaagctgaaataattaggatcaagacttagttgtgcatgaactctgttctattggttgttacaacattcaaatgcttcttacaatatccacaatgccctttgaactgtcgcacaatggagctttggcttccagagaactattcaagttctggtaaatgatatttgaattctctcatgttagtcttgggtgcatattttgcatgtttttgatatgtatactatcatgtgaagacttattgtaaacttttcaatgttgatgcagtttggaaataaaagaata

SEQ ID NO: 84284 - DNA, 271 bp, Citrus clementina
  Intron number 3 from transcript clementine0.9_031772m (loc us clementine0.9_031772m.g) derived from phytozome v7.0 (c hr-ID scaffold_53; pos 695759 to 696029 reverse strand)
gaaacattacggacctgggactgtcaagagctaccgtaagtttctcaagtctcaaataaccgttttccattaattattcacttccaaaaaacaaaagcacaatgaccgatgtatgtgggtagagcagagagtccaagtgtggtcaaaactcttcgaaagttacaaaagataatgatggttttattttttttgactatttgttttatttttttttatttataataaagaatactactactttctcaaatcacatgtgtctggaatgaccaga

SEQ ID NO: 84285 - DNA, 780 bp, Citrus clementina
  Intron number 2 from transcript clementine0.9_001779m (loc us clementine0.9_001779m.g) derived from phytozome v7.0 (c hr-ID scaffold_1; pos 10455541 to 10456320 reverse strand)
acaattctgcagcactggtatgtttattttgtttgggttattaggttcatttgttgattctcatttggctttcctttttcttgcttgttttcttatggctggatggggtgtttcgtgtcttcaaatattcctgcacacttgttcaacttacaacgttgagggaaatcaccattgttttattttcgctaatttatggcactaccaagtttaatttagtacttggggattttagtgggctggcattttatgatttgatttttagcgttgtaacttgtaaatcaatgtcttacttagtaatgaactgaaaattgcatcaaaggaagccgaatacagaatttaatttgaattatggtgagacaatgtcagtattaaattttggtaatgcagctttggtctgattaccacaattaaatatgaggttgtgggaagctattgaagattgcattgattaataaccgacggtatttgacatcaaatgcccgagccatatgaagcaattcatctgatttcgcgatttcttcttcattcctcatatttgatggcaaatgatatgtcgagcttggccactcaatttctgtgtgcctgctgtatcagttactacaaaagcttttcactttctaattgaagctctcattatattgcacattttctcagtatattttgtgatacctgggtattctgagcttgtgcattaaggaagttcattgtgctgcttaagtttcatgacttctacttttgctgacagattgcagaacataacaagatcaatttaagcactag

SEQ ID NO: 84286 - DNA, 901 bp, Citrus clementina
  Intron number 1 from transcript clementine0.9_021679m (loc us clementine0.9_021679m.g) derived from phytozome v7.0 (c hr-ID scaffold_1; pos 11035301 to 11036201)
acgctcaagccgcgctggatcgcttggtttcgtagcccaaacacctccggttattagataagctaccagctaactgaaatgaggcaagttctgaaaatcaattacctgtcccttttttttatttttatttttaataaaaattgatttgatgggggacttatatctttcgataatatatatatatatatatatatatatcttttttcatttttaattgtattataatctgcatcagggtttgagtttataaggagtctgaattaatatcgttaaagcatatctctagcgtccgcagagacgcagagtatagctcgagaatttacaattaagggctctgctcggaaatctatgtaacagtgagatcattcgactcttacatgcatataaaagagaggagatgagttcccatagactctgctcttgtgttaactactgtgtctaaaatgtgctcgtggaatatgaaattgactggaaattaaggctagttagtcaagaagaagaaaagtttgttccaagtctgatgccgtctcgtttggttcttaacttacggtcaattgaaaaccattgacgcatgacttagcagattcacttggtttactgtataaaggctctattggtcttagcagccccttgcaaaagcagaagctgaaaccagactctttaaactatagcattgtatcatgaggggaaattgttagtgcttctgtgctagcttgtagatatcaaacaaaccacgaacatagctgtaattcacatcatgtcccattgggcttgttcgtaactttcattgttagctcctgttatgatggtcatttcatagataacttgggtgagtaattagtgtcgttttttttttcaattgatttgctgaatcattttactaactttatttttccttagt

SEQ ID NO: 84287 - DNA, 569 bp, Citrus clementina
  Intron number 2 from transcript clementine0.9_033160m (loc us clementine0.9_033160m.g) derived from phytozome v7.0 (c hr-ID scaffold_1; pos 11224363 to 11224931 reverse strand)
atatcgtttattctaaagatttaaaacgacaagacgtaattctaaatgaatcatttgactttgtcttcacatttaacttccatgcagcctcgtagctcatcgaccagacgcttaaattaggcggcattattgctgttcaaacgtgtgacgccgtccttctttggcattaatcaataaaccatcaaattaccaaacaatgtatttcaaacgattcaataattcaaacgtcataacagccattgaaaaaaaaaaaaaaacaatgctggtcatgaaacaaaattctaatcaaacaccaaggtcctgtttgggattgaagtgttgtagcttatagttgttgtggaaaaaaaactgtaattatgaaacaaaaattaataatatgtagtaaatataaattttaaataataattttgacaaaattattaaagatattaataaattttttattatgcaggtaaaaaattacatcaacataactttcaaactacagtaactagggtttaccaaatactttagtactgtaacttttaactatagttgtccaacctcaattccaaacacacccaaagtcc

SEQ ID NO: 84288 - DNA, 725 bp, Citrus clementina
  Intron number 2 from transcript clementine0.9_021517m (loc us clementine0.9_021517m.g) derived from phytozome v7.0 (c hr-ID scaffold_27; pos 393526 to 394250 reverse strand)
aaatctcaagtttctcccttgcattgcccccgactgtgagctcattctctatattcaactttgagctggtcctatattttcagttaacatttttcctttaggcattttgtatcttgtgtgtatcctattagtttttatcatatttttggtgacgattatgacttatgagttataagggtgaagtttagttcaatttggtttgggattgttgtgggattccaattatatgcaatgaaatcatgaattaactggctatagagtatatagtatttgattgatttggacaagcttattgctaaaataaggatagaagatatggcagtattttggattcagttgtataatggagtccaattgtattcctagaatatggtgttcacatcaaaagagaaattatatgtaggactgttgttttcattttctaattcaagtcgccagtacatgataatcacagcttaatttactgatgattcgtgtatggtgagattcaatctaatttctctaatgagatttattaaaacttataaagatgtgatgcttgtatcgtatccaaattaaaaattgagacttttagttttctaatgctgcgtgcttggccttaaggtatgatttgtttcaatttgtattttgtgtttaatggagaaacaattccacagtttttttattttgatgatcgatttgcctttttaggtacactcaatcaggattgcgcgccatcaccctcc

SEQ ID NO: 84289 - DNA, 584 bp, Citrus clementina; identical to SEQ ID NO: 78869
  Intron number 1 from transcript clementine0.9_002858m (loc us clementine0.9_002678m.g) derived from phytozome v7.0 (c hr-ID scaffold_23; pos 3391475 to 3392058 reverse strand)

SEQ ID NO: 84290 - DNA, 631 bp, Citrus clementina
  Intron number 1 from transcript clementine0.9_020911m (loc us clementine0.9_013324m.g) derived from phytozome v7.0 (c hr-ID scaffold_27; pos 1573861 to 1574491)
gccgaaagtttgcaggtatatacataatcgatccctgtctctgtatatatattgctggttaattaagagccctttttaattaatgttcagtatattgtaaccagccatcatgagttgtgatatcatattcttctgtacaatcgttcatccgaatttgcagagataccataatggagtacataaaggaagtctcaaaattgggtgagactctgtttgaaatactatcaatggctctaggactgaagcctgaatatttgaaagatatgggatgcttcaatttatacagcgttatctgccactactatccgcactgcccacagccagagctgactttgggagctagaacgcattctgatccttcattccttacaattctgttgcaagaccaaatcggtggccttcaagtctttaatgaaaatcagtggattgatgttaaccctatgtcaggaggcttggtggtaaatataggggactttctccaggtttgtttttgaaaataacggagacaattaatcttcccatcatctgcttatttttcgtgttttaatagtaactatatatgctaatttaaagttttcaataattaatcaattcaggttgtatcaaacgataaactcaagagtgttgacca

SEQ ID NO: 84291 - DNA, 1008 bp, Citrus clementina; identical to SEQ ID NO: 78451
  Intron number 2 from transcript clementine0.9_003076m (loc us clementine0.9_003076m.g) derived from phytozome v7.0 (c hr-ID scaffold_23; pos 3805170 to 3806177 reverse strand)

SEQ ID NO: 84292 - DNA, 586 bp, Citrus clementina
  Intron number 3 from transcript clementine0.9_021203m (loc us clementine0.9_016243m.g) derived from phytozome v7.0 (c hr-ID scaffold_5; pos 4899515 to 4900100 reverse strand)
gataaggtactttttcttagtttcttaagtctataatgcaagcttgcttgtagctttatgctgttttttacttataaatttgttatacatcttgttttccttacatgaagatcgatcaattaaagaacttattggagtgattatagcatctgtggattggttagaataatctgaaatccttttcatgataagcatctagtaaagatagaatggatcttttgacttttgggcatgaaactataaacttctttttttctttctagtttttttgtagtttgcgttgtcgatttgttaatattctctcatttctggactcactagtttgcttaaaattattcagattcatcttgtcctttcttaagtttatgatttttttattaagcatctgttcttgcctttgatctgacaatatctattatcttttactgtgctttgaggaagaatattaagacagaatttgtaattgaccattatactctatattctttgtgccccttttcactatgaaagatgctgattccatagatactttattggttctttactttcagattacaggattggctcgaagatatcccgggttgat

SEQ ID NO: 84293 - DNA, 748 bp, Citrus clementina
  Intron number 2 from transcript clementine0.9_015206m (loc us clementine0.9_015206m.g) derived from phytozome v7.0 (c hr-ID scaffold_82; pos 388159 to 388906)
cacgaatttgtgcaagacctgggcgcaaaagctgagtaagttgattttttctttttttctttttttccaaaagctgtaattgtctgattttggatgcaactttcattttgttcatttaagattgtaattaaatcatctaattggatataattgaatagcatacgtctctccaatattgtcatgtttcatacatgagctttgttttcatatacgatattgccatgcttcaaaagttggcgcacaacttttttctttttcctcacctaatgtcgcgtatgacatgacattgttagttgttacaatttgcttggtcttatgtgatcattttatcttaccatctcaccgatacatggtgaattgtttgattttgatggccatatgtatgtgaaatcatttgagatactatatttgtatgccaactttgtaagtgtagcattactcacatacaagccttcaatagtgcccgtgtcctaaagcttggataaaaggtttaatccacatattttgctaaacagaattactagttaacaaatataatacagagagtgtgggttgctaaacattatcttccaagtaaaagtttagtggcttttggaggccagtagttacaaacatatccccatttgagttctgaggtaactggccaagtgttaatagtttctctgtgttgattgactagatcctgcaaattttttttccgtttttctgattatttttcaatttcctttactgacaccacaggtcaggt

SEQ ID NO: 84294 - DNA, 962 bp, Citrus clementina
  Intron number 2 from transcript clementine0.9_033167m (loc us clementine0.9_033167m.g) derived from phytozome v7.0 (c hr-ID scaffold_53; pos 952963 to 953924 reverse strand)
gaacttgggtaacattaggggtgggcaaaaaaaccgtagtcttaaaaaaaccgaaccgaaccgacggttttttcttattcggtacggttttttttttaaaaaaaaaccgaacggtacaatttataaaaaaaccgaaatgtcggttcggtattcggttcatttaactgaaccgaaaaaccgaaccgaaaaaccgaattatttttaaattttattaaattaaatatgtgttaatttttaactgattgtgtaagatagctaacataaacttgcatacacacaatcagagtgtatatatatgttagtgttacaatttcgtaaatttttatttcccaaaataaaccctaaaatcaaatataaaaaaatttcgtaaatttcgtaaatttcaatttcttgaagaattttttaggctaatgcaatctcaagaacaacagcaaatagctgaggagtaaatgatagttgattgatgttgcttaccagtaagttttctttattttttttttaaactagcatcttattatatagattgtttatttaattatttattaatagttagtaagatattattgataaaatgtgttttgaatactttgtatttattgttaatatttgtaatgaaattaggatgaacttgttgaaaaaaaatattacatttttgaagctcaatgggctaaaaatttgaaaattcaaaataggtccagaaccgaaaaaaccgaaccgaaccaaaccgaaccgaaaagaaccgtttgagttcggttcttttttagttcggttcttattcggttctttttataaaataaccgatttaaatcggttctacttaatttcgaaccgaaccgaaccgaaccgaaccgtgcccacccctaggtaacatttttttttttttaaatttggtttctttattatataatatttatttacaaaatgttgattggtttgaatatttttaatttgtagaatccaat

SEQ ID NO: 84295 - DNA, 869 bp, Citrus clementina
  Intron number 1 from transcript clementine0.9_008865m (loc us clementine0.9_008865m.g) derived from phytozome v7.0 (c hr-ID scaffold_98; pos 364880 to 365748 reverse strand)
cactggcagtctttcttcaggtcccctactactaggtcagcttccttgactctctttctttgttttacttgtttaacaacaatttgtttgatgcaatttggagtccttaatgggttaatgtgttcttggcttgagtatctgcagaagtgatttatttatctatttattcactgaaattaattgttaactttctttctagtagcaataggataggataagcaattgggtacttttctttttttttttggctgaaattcttggtcacccgtagtttgaaattgagtgtttcctgctgaattcactctatggctcctttatagaaaatgtgttaggcctaagagggcactaattagcaaattactaattatatgttttttaaatggcagcagagtaatgcttctgtcactcaaaagtgttgagactagaagttgatttggaatttgagccattggttgttgttgtattttcttcactacatgattcagatatatgtacaattcgtgcaatttatttgtatttaattattactttgatttgaagattatttaatgatttggtaccaagagctatatatgagaatgtctgacttaaaatttctccatacatttacatacatacatagagccatcaatttattcataagcattcgcgttcagtaatttacaaataatttggagcaattggatttatataataggaaaggatgatgctatagaatgctttaaagatcacttcttttgtcttatatgctgcttcaagttgaagaagcacatatgcattattaaaaaggttgacaaataaataaactcactgacatatttcaatgataatcagcttgcaataagaagaactctgacactgaactatta

SEQ ID NO: 84296 - DNA, 567 bp, Citrus clementina
  Intron number 2 from transcript clementine0.9_033859m (loc us clementine0.9_033859m.g) derived from phytozome v7.0 (c hr-ID scaffold_23; pos 2198212 to 2198778)
atctgtctttccaccgttccgtcacctcacagagagtagacagtgaaataactcaccccccattctcctgtcattcaattacccaactccatctgtactcttttatatttatattcacacacatcaaactcagtattattacttattttactctttcagtgggccaccagtagctgcactgagctcattaatatttgctctgtcttctccccacctcctcagtcctcacgcctcacaaacgtattttgctttcaagttttcggcttttctgctttggctcaactcttctcttcaaaaaaatgggatattgttgcaattacataattcgccgcaggctttgctcattttcaagttttgccttcgttgttttgattctcagctcaatccagatgagattcatggctgaaggtaagtgggtagttgttaaaacttcaaacgataaaacaagtccaaaaaagttttgttgattgctgcatttggtggtgaaatgaaagtcttaactgcttcttttcttttctcttcttgtgtgcagctggtagaacaaatctcaaaacttctgatttctca

SEQ ID NO: 84297 - DNA, 391 bp, Citrus clementina
  Intron number 7 from transcript clementine0.9_015421m (loc us clementine0.9_015421m.g) derived from phytozome v7.0 (c hr-ID scaffold_43; pos 1493151 to 1493541)
tatctagtccacagctatccactgtaagacttccctttttacttctaaatatgtttgcttttcatacaatttgcatacggctgtttattttctttctgtttctactttaaaatgtctagtaatttatttcttgtgttactttgactttagctcctgttagacaaatatgaagaagtgaaaaattatttacagtaagatggctgtttatcattaagaactggcgaggcactattaaaggttaggagaaaattattcagctaggaatggattatgactgttttaatattaattaaagtttttagtgagttttttttttaatatttggtaattatatcagctctatctgctcgttgcagtgtgcaagtgaatcaattacaaaatccagaaactg

SEQ ID NO: 84298 - DNA, 705 bp, Citrus clementina
  Intron number 2 from transcript clementine0.9_001323m (loc us clementine0.9_001282m.g) derived from phytozome v7.0 (c hr-ID scaffold_29; pos 2088527 to 2089231 reverse strand)
cttaagcaggaagctattttcagggatcaggtattgttctggttcagccttgagtttttagttgttttgttgattacatctcatttttttaagcctatttttattttcaatagaaataaaaccaattctattatgcgtatcatattcaagcatgcactaatcaacatgtctcggggaaaatttgaatatataggtcttgaagtggtgttatttattgatatccttaaaggtaaacaaatatttttgatgctttaatgcttgcgaatgtattttattaatggtcctttggcacgttaaagaactgtgacttctggttgtctttagggcatcaagtgcatttatttatttttaaaatccttttagtcaagagatcctgaggacttgtaactctacttcttcagatgatggaagtttggaagggaaaatgggggacttgttaattggctataggaatctgaatcattgtggtgaaccataatgtgactattcatatatccctttctttttgtgtttgtgtgtgtgtgtgtgcatgcatgctcatgtgcatgtgttggtattacaaacagcgtctcatatattcatcaattctgatgcaatacttgttactaatgaatacctatcagttgatcttagacgctcaaatgggttttaaatgtttttgactatccagatccgcgaacttcatcgcatttattggagacagag

SEQ ID NO: 84299 - DNA, 901 bp, Citrus clementina
  Intron number 1 from transcript clementine0.9_006077m (loc us clementine0.9_006077m.g) derived from phytozome v7.0 (c hr-ID scaffold_29; pos 40177 to 41077)
tctcactgtcgtcgtcgtctttgagttcagtatcggtaactctcctggttttttgcttcatttttagaactcattttttttatttttctatctttatcaaattttagttttttttttcttttgtgggtccagaaactgtcttattatttatttgagtaaataatttaagtttttcttatgacttatgatacggctcttttcatagtcttttttctctcttaagtcctaacctttcttagtgaaattaaaccgccaagattgaatttttaaattttgatatttacaatcaagtcagttggtttattttatttctaattaaacaaacttttttcactatattttgaattaactagatttagaagattaagagagactactgggtgagaaaaacactagaagagaatcctaattcatgatttataatacctcaattatagggttttgtttagtgaatctggccaagtcgtggtgccgtgcagtcaagttattagggattgtactgcatcacttggctgaagtggcagaatagttcgcatatcacaaggattgattgaaatgatatgactgaacagatttatgctgaaacatttttagcgattagtactttgtccatgcagctttctaatgagttctcatcggctcttagttatcaggaaagaagttactaaataactggatgtttttatatttgtgattgctaggctggctagttcaagtggtaaaatctgtttatgtttactcattgatgtttattgctcttgactgacataatgtttattattcggctacctgatgcaaaaacggtaaaaaaaggggaaaaaaaagctttcattttcttgatgctcggctacttcatttttgtgcaggagcaacccttagcaaaggatttaaccggggattg

SEQ ID NO: 84300 - DNA, 318 bp, Citrus clementina
  Intron number 2 from transcript clementine0.9_009160m (loc us clementine0.9_009160m.g) derived from phytozome v7.0 (c hr-ID scaffold_40; pos 114848 to 115165 reverse strand)
cttcacgcctttcacattggctggccttgtttaaggtcctttctttgcatccttcattcattattatttgctctgttctgttctgtttgttagaatgttctgttgtgtaactgaaggtattgaaagttttgattctctaatttagttaaatggatcaaaaaattgaattggggttgtcattttttctgctaaaaaactagaaaagtttatttccttgtgagaacaattagagagaatggtaacttcatttaattttctgttggaatttcattcttttttacagctttgatatcttgcgtgatacgttgggtttagtgc

SEQ ID NO: 84301 - DNA, 616 bp, Citrus clementina
  Intron number 1 from transcript clementine0.9_002164m (loc us clementine0.9_002163m.g) derived from phytozome v7.0 (c hr-ID scaffold_1; pos 3698442 to 3699057 reverse strand)
aatctttcatctctggcttgtgttcagccttcaaagtaagttcttgtccttctttattcttcttcttattcactgctaatactatgatattttaccttctgttttctttttcgtttttgtcccgtttaaatgctgcatgctgcttttgttcttgcgtgctcagctgatttgctgactgtaaatcattttcttgctatagattctactttttttattactaaatttgatttgctttgcttcgctatagcatgctttgtaattccagcctatcttaactagttgcagttttggattttatttaatcaggttttgcttctgggtacttccaaataatctgctaaagtctgcatcactcgcagttttctagtgactccattctgggttatggagaggaggtcataaggagtgagctattcttatacttttttgtttactggggaacagctgatttttgtgaggatttttcttttactaacttggacttccaaaatcatgtactgcaagtagaatcttttaggcttggcttagtacacatagttttctgttggttatatgatatacttaacagttgggattcagttctaattgtgttttatcatggggcattttgtagatt

SEQ ID NO: 84302 - DNA, 714 bp, Citrus clementina
  Intron number 1 from transcript clementine0.9_007235m (loc us clementine0.9_005978m.g) derived from phytozome v7.0 (c hr-ID scaffold_29; pos 1431563 to 1432276)
ctgccaaactaaccaagttcacgtttttgatactggtaccttctttttattttcccagattcttgttcttcccccccccccccccccttcttttaatatttataataagtgcctgttcttaaagtttgcattttggtttatattttgtttagtgcagttgcaaaaattgcatttttttttctaaatgggtgtagtgtttgattgattcttgttttaaaaaagttggtaattttagggtttatgctgggtttattttgatggatagttataagtttttgttgttgggagttaatgttgtgattgcttcttggtttgcagagattattggcattagtgcttttgtgggtctgatatagaaatgattttttaggttttctttttaactatgtatgtagggttttctattgtagcatgaatactgttcttttttgttatgtcttttaattcttgtggcttgtgagtttagcgtcagtgccacatttggaatccatttccatttgggttgttgcaaatttttgagtcgtgccaacatatgaatgttagtgcatagcattttctgctattctcttgctgggacttcatcttatttttcctttctaaagctgcacttcttgtatttgacagcttttttgttgttgcatgttcttacattctaaatagctgctttgcagttaatcagacgtggagccagccggtgataaagggcagcccgcc

SEQ ID NO: 84303 - DNA, 765 bp, Citrus clementina
  Intron number 1 from transcript clementine0.9_031329m (loc us clementine0.9_031329m.g) derived from phytozome v7.0 (c hr-ID scaffold_29; pos 1048871 to 1049635)
gagacaaaacctcccttaacttccgaacattttcagtcagttctctctctctctttccttttctttttaatatttgtttattcgctttttaacattttcagtcagttcagttctaattctttctatttaaattttatataaattctcatggtactatgtgctggctgttactgttacttgacttgctaagtgtgcacatttatgatgattaagtccacttaagtatttctgggtagtgggttccataaagtcggggccttttaattagaaagattttggtcaactcttttggatgaggttttgatatctaagccattgtcacatatggaacctcacactactcttgactgtagatgagtaatttccctgttcaatgataaatcctgaccactagagttcaaaggtgaagttgcatccaatgcaatctaaaggaagaaagagctgcttggatttttaatctgaattaaattaagataatgcataaatttgatcgaatcaatgattaatctgaatttctagtaatgatgagttattccctagcttttatgcaccgatatattgtatttcatgactatctacattccaaatctttcaagttaaagctaatcactttttgaggttgtcgaacatgtaccttgtttttctcgttaagcttttgattgactatatgacatcttgatactcccaagacataaccatatattaactgtccaatgctgttgaatattgatatgatatatcctactttgatcaggattcttaaaa

SEQ ID NO: 84304 - DNA, 910 bp, Citrus clementina
  Intron number 1 from transcript clementine0.9_016322m (loc us clementine0.9_015963m.g) derived from phytozome v7.0 (c hr-ID scaffold_53; pos 621980 to 622889)
tcttgatatcttcgagatttaccgacggttttgcggtaaattacaaaatttcacctactttttatttttgaattgggattttacagattatcttattcttgtttcttgattcgaatcacgcttctaattttttacttggaaaattttgattatttgatgtaaagttttcatttttatgcatttttgatgtgggtgtctgtgtctgggagtttgatgggtgaaggatttgatcttgtgttttctttagataactttaggggttttatctattgggttgctcagtggctgtgcaaatttagttttgatgagctgttgaggaacttgagctttttattccaatcccgcttgtagtttttttttttctctttggggggggggggggggggcattgaggtatatggaggactagggttttgggtttgaaattattgctgatttattttggttttgtagggaaatgtatgagggatagtgggttgttgtgtatagtttcctaaatcccgtgcttttgattgtttatgactttttctgaaaagaaataaatagaatttgagatggtttatttaatgtagagattttagaaattatgatgtggtattatgtgttacattttgtagcagttgtcaatcgttgatttaaattagttttgtattggaatgtacgagggagtggatggttatgtatctttgcaaaagcccgcgcttttgattgtcaaagacttttttggaaaaagagaatagaaggcacttttttatatgctgttaaattaaagattgttgaattaattgttactgtgtgttaaactgtttagcagctgccattcattgttttgtacttgttgatgagaaagaagttgtcatttagctgattctttgaacttatattgcagaaattaaatctcaaaatgcag

SEQ ID NO: 84305 - DNA, 817 bp, Citrus clementina
  Intron number 2 from transcript clementine0.9_023698m (loc us clementine0.9_016718m.g) derived from phytozome v7.0 (c hr-ID scaffold_20; pos 3384410 to 3385226)
ttattttgactgagccaactgggtcatctgctgaggtctgtttcaccattataattatttattcattttttttaaatattattatggatttgttcttatttgttttgtagttgattttatgatttggattcgaggggttatatgaattttatgattggaagtatttagttgtctttgatttggtttttacttgtagatggtgctgtttgaattttgagaagaaagaaaaaagagaaagggtttgtgattggattgttgaaatggttttaatggattctggtacatccagcataaaaaaagattaaagaggtgtttaaactaaaaggatgtgtggtagttggtgaagagaagcccctttaatttataagaaaataaagtcatcttgttatgattaaatttgagaatttgaagacgactaatgctcaaagcctcagatgcttagataaaagaacaggggtgtcgaagataataaaataagcttttttaaaagtaactttttgtgtccctattttggcttgatactgattattgattttgagctgtaagtcttgccgtctgatcttcctaatacaaaatccatggaatattaaaggttaagttgaatccaatttctgcgttattgagttgttaatacgatagtaaattgactgaagattcagtggtttattaattagggtttgacataagtgtttcaattttcaacatgatacgttgtccccttgtggtttaagtggctttatgcatcgaaatgatgaaagcagaaaccttgcctgtttaccaaccaactacatgacctaaaattgtcaggtgcttctct

SEQ ID NO: 84306 - DNA, 933 bp, Citrus clementina
  Intron number 1 from transcript clementine0.9_011567m (loc us clementine0.9_008722m.g) derived from phytozome v7.0 (c hr-ID scaffold_1; pos 7432135 to 7433067)
gctgcaccgtgagtagcattccactgtcctcgtatatgttcttgtttcttgaccctaatctggcttttaagtgtttttttttaagtttttttattctgtggagaaattaataattctaatgaaatttgagtcttcaaattgatttccaattttctattctatctcaatcgtgtggctggtattaattaagtaagcgtacatggctggcaactctgacgatcttatgtttattatatttatatttttgttaattaaataggttagtgggtgactttagagatgatcattggtcaaaactttcaacatcacatggttgaagcaagtgggttatttttatcctaagcagaaaagtaatctattataatatatactaatatcccgaataggcgtaaagatttcttcggcggttgtcattccatttttttttttttttttcaaatttcatagtagttgtcaaagactttttttttttattttttttcatttgcctatcgcgctttcattcaagaaaaataatcatggggacatcagaaagcttgaacgaaggacttccttttattgtgcgaaggcctgtgattactaataatgaagttagtaatgttagtggcctgcaagaaagtgattcttcggctacaccagctgttattttcagtaccttggtggccgtgtgcggttcatttgcttatggctgtgctgtaagtttgatcgttgtttgctgccatcagagcaaatcaatatatttaacttggaagactaatctctatatgcttgaagataatagacgttcaggaagcagttttgattgaaatcactctcatcataggccactagtcaaacaaatagcttttcattggctgcagtaatggctggttgattgatcgatcgattgattattgttttcagattggatattcatcacctgctgagtctgga

SEQ ID NO: 84307 - DNA, 658 bp, Citrus clementina
  Intron number 1 from transcript clementine0.9_003605m (loc us clementine0.9_003605m.g) derived from phytozome v7.0 (c hr-ID scaffold_49; pos 1184388 to 1185045)
caagctttggcttcggttcaaaaggaaaattcgaggtttttttttttcttttggttaaagtttatatattttaattaattcttttcttagaatgatagtgttcttgtaatcacttaatactactgatatataaattatatatatataaaagggtgttgtttgagagaattgttcgttgtagaggccaattttttgtagattgttgataatattttctgggtgctggtttctagttgcatcatgggcttatggccatttgatcatcttggaattatgaaaaatactgatttttttgttcgatgtttgagggtgaaaatctgattatgttgtgtacgccaatcaagttattttttgtgaattttattgaaggatggtctttgatcatacaaaattttgatttttcttctattttttgaaaaatatgtgtaagcgaaggtacatataagcaagttaaagtccaaatttgcctggtattttgtttatgaagctgtgaaactttttgtttcttctttgtatgactcttaaagttggtctgtatgtctctcatttggtcttctttgagctatataatcatgttttcaccaatccaaaatggaattatgtcgctgatttgatttcttcagttttaggtcattatttggtttcttctgaagagaga

SEQ ID NO: 84308 - DNA, 449 bp, Citrus clementina
  Intron number 1 from transcript clementine0.9_012204m (loc us clementine0.9_012204m.g) derived from phytozome v7.0 (c hr-ID scaffold_10; pos 1717035 to 1717483 reverse strand)
ttactgcgacggccgcctcattgttgatttcataggtatacataaatattcttgtttaatttgatgggattttaaggaaaaaaaaaaggattaatagttaatgttacacaaaaatttcttaacaaggtagtgaggtgtccgatgagtagaagaaacaatgtgttgtctttttcacgtggaatgtttgataatatccaccgacgctatcaaaatcaaaatcaaaagcttcatccacttttagatttggtcccacgctgtaacttctaatgtagagcacgcatgcagcttgtcccttttttttttcttttacttttatcttcaattatttcaagcgtgacaaagatatttttaatcatgtaacattttattatttatttatttacttatttattgtgaaaaaataaaaaatttcagctgaggcctttgggttaccgtacgtgagtgcatat

SEQ ID NO: 84309 - DNA, 724 bp, Citrus clementina
  Intron number 1 from transcript clementine0.9_023017m (loc us clementine0.9_019198m.g) derived from phytozome v7.0 (c hr-ID scaffold_53; pos 480653 to 481376 reverse strand)
aggtttctaattttggttttgtgtttgatttcactgtttacggttctggaattttagaccagttttgtttacaattatgtgcctacaatgagttttgtagcattattccaagctaatattttggaattgttggtaattgatatgattatctgggcttaattatgagacttgatctccttgttttcttgtcatttggatggaatttagtaatgattctcttctaagaatgggagtccatctgactaaaagaatcgcttgctttagaatttgtcaataaacgatatagtagtactggcaatggtggttgtgaatcgtcatgattgaaagatcgcataatcatacctaaccatgtagttctagtcgaaagagagtgagattgattcttctagctttatctgttgagaatatattaatgccaagttaagctatcagaggatctcttcatggtgtatgatacctagatatacttgcttgattttaaggcctttacatagatccgtcgcatagcctgaacaaaaatttgccaaaagatcttctttgcatttagacctgtgtagtcttttcaaaaacagaagttgtatatcacccccaaatgatcgttggtagaagtcagaatatagccatcagcttaaatgctttttaagcctacgcattctttttatatgtaagagaaggttccctaaatctgagatatgtaatttggatatataatatattttgcagg

SEQ ID NO: 84310 - DNA, 825 bp, Citrus clementina
  Intron number 1 from transcript clementine0.9_012812m (loc us clementine0.9_010508m.g) derived from phytozome v7.0 (c hr-ID scaffold_45; pos 20894 to 21718)
ctccggcttcgtttgttgtcgtcagcccgcacagggtaaggttatttgtaattcaatcttcttttgggcatgggtaagagcgtcacaggcactgatactgttcaatcttcttttgtataatggccatttgtaattgttgctgattcggtttcttaacattgtaatttttgttgtcttgagtattgatggtgatgggttattaatgtattatatatgtttgtcatttggtatcattattgcatcattgagccgggctggtattttattttggaattttaggtggctgcctggcagggatttgattcattttgaaattttgagtctctggaaatttatgctttttagtgtttccctttcaatattccttcgttaagctttaattttctctttgtatcccaatatatattcaaagtttacttccttagctgcttctgtttggttgaaaaaaaagctataaattattattattattattattattttcttgacctaatttgaatttcttatttgctattttcgttgattttggtattcctgtattgagaaataattcggtagtggctttgctactgttctctctgtttcttaaattgtataactcacaagtttcatattgcttataggaataagattgcgttgatactaaatacattatatacttaatttggtgacccatgacggaaattcagacttgcggtaaaccaattgattctttgttggagaaggtcctttgtatgaacatactatcgtctgattacttcaaagaactttaccgcttaaagacctaccatgaggtgatagatgaaatttacaatcaggtggatc

SEQ ID NO: 84311 - DNA, 511 bp, Citrus clementina
  Intron number 2 from transcript clementine0.9_004579m (loc us clementine0.9_003946m.g) derived from phytozome v7.0 (c hr-ID scaffold_29; pos 2139408 to 2139918)
cattgtctgatataatacacaaaatctgttgtgaggtaatttttgattacttgcttcttttgaatggatataccactgttattaaacctttttaaagatgcatttgggattaaggttagacagctgttaacttttataataataaatgtttggtaaacactagttattgtaacttagaagatatattgacatgattttttatttgtatagaaaatttattatatgtttaataattttgttaaagttattatttaaaatttatatttattacgtattattaacttttgtttcatagttataatttttttttttcataacaactttatcttaaaagctaaatacctagatccaaacaggacccaagtgttctactactttgtaacttaagcaagaagagcaaaagatgtctacgagtctaatattaattctgcttttaattatgtacgtttaccttgaaatgtgttgaaaaatgccctgactttaattttgtatacatatacctgcagatatc

SEQ ID NO: 84312 - DNA, 571 bp, Citrus clementina
  Intron number 1 from transcript clementine0.9_019242m (loc us clementine0.9_019242m.g) derived from phytozome v7.0 (c hr-ID scaffold_63; pos 1035768 to 1036338 reverse strand)
gattctcacaactctcctaaagaaaaggtcagcgggttttggttttctctctttattattatttatttttttttcttgcttcatttttacgtatgttaaggtacccactacccaaaatgatcacgtctcctcaattcttgctttcaaggtggatctagaggctttcaaaaaagaaaaaaagtgaaaaatgagtttcttgtgtctctttttgatcatgtaaaataaataaatcatggatgttcacgactctactaaagaaagggttttccttttcttcaattaatttttacatttttgcatgtgttgaagtacccaaaaagatcatgagttgtatgaaagagatatctcaggagtggggctctactttgtgcctcacgctatctggggtttttatgaaatgatttcctcgtatgatctcatgatgatcatttgatgctcaaatatagtgatagtttgaagctttgatcatagctgagaacaaattatgtgtgtgtgagtgtgtggatgtgatttgatggtataataatactattttacgggataaattgttgtataaatgatgattcttcag

SEQ ID NO: 84313 - DNA, 896 bp, Citrus clementina
  Intron number 1 from transcript clementine0.9_006074m (loc us clementine0.9_006074m.g) derived from phytozome v7.0 (c hr-ID scaffold_20; pos 3086145 to 3087040)
agaataaaccaaactcttctttgcctccggtgagagtgagtatttcgcactctcttttatttgtttgtaatccagatgggttttgattattgtcgggtgtttttgtctctgtgtgagatattttatggattaaatttattgtttcattggtgatgaattgctattcattaggtgaacgcaatgcgattagtgaaagatttgttttgtgctttgtttaactgttaacacttgggattaattttgggtccactttcgccaaatctagtgcgttgtctttatcttttgaaacaacggttatatatattaggagtcagcagcatagctcaaaatacactcagaatctgccaatggaatctagtgaggagcattatgcagaaatgtgtgtgcatttttcccccctgtttgagtatagtcttggatttagtcacgcttggagctgagtcttttggtctcactattgttgtttactcaggttttaaacactgttactaaagtggcagccctgctgcggctttgtgctcatacattttagattctttatgtttccttggttaagctatctctcttctcttggtgtctgtgtgcaaacaagttggtgtttggacattggaagatctatcttttttcagttcctttatttgtcttcttgattggtgctttctctatgcatttagttcaatcattcttttttgattatttctttaaaaaataatattgtattggatttctgtttctttgcttgggttatggacagttttgtgtaaattttgctactgtgttgctaggaggtcaatgatgatagcatttgtattcaacttgttttgtttactctaaatttatatgtttccttgttgtgtacagaattttggttctctggacaattttgactgcccaaa

SEQ ID NO: 84314 - DNA, 876 bp, Citrus clementina
  Intron number 1 from transcript clementine0.9_026373m (loc us clementine0.9_025582m.g) derived from phytozome v7.0 (c hr-ID scaffold_29; pos 1440329 to 1441204 reverse strand)
agcagcacacagcactcacgcagggcaagaatcgggtgagtgagcgagcgagcaagcgagctaattcttttcttttaattttttgttatattttcccgtcctttctcggctaccaaacagaattttaggttttcagatttgtttattttacattttttttccaagtttatctgatttgatctgttctctggctgttttaaaaccacatttcatcattaggcatacttctgtgaggataaaaaccttagatgtccatatcaaaaaatagcatgcttaatttaatgttttgatgttgattttaaggcttggttttgcttagattatctgataatgacatttattattattattattattattattattattattattattattattattattattattatttgctataattttatgttgattttaggtttacgttgctctttaaggcttagattacttctgttttcttaaataaaaattcattaaattaatgcctcatgtagatttttatttgatactttggttgtttgtggggaaaccttacaaattcttatttgatctggctcttttgtatcttccgatgcggcaggaaaattttggatgtcatttgcttttcataattttgttgtttttcttgatcttttttggatctagtttttgtaaaattttacatcagggctaatgattagaggaactatcttaagtttgagccaggctgggttagtctttgaagacttgtttatgccctaatttcatgttacatcaactctggaatgttggttgaaatttgtagtggctaacacttgcgttgcatttacttctgttgcaaaattagtgcaggatctaggatttgttagataaaagttcaagagagagatt

SEQ ID NO: 84315 - DNA, 501 bp, Citrus clementina
  Intron number 4 from transcript clementine0.9_018717m (loc us clementine0.9_018717m.g) derived from phytozome v7.0 (c hr-ID scaffold_111; pos 513202 to 513702 reverse strand)
gagcagaagaggtaagtgcttaattctcacacccttttgctctgaattttttgctacatcagttgggttttagtcgtcagtgttaatattggtccatatgctatttgtcttttcacatgatgtacatgctacaaaattttgctttatttagttcatgactttggtgttttaacttgattggtctgtgttgttggactttttatacttttatagttgagtttttcataataattttagtggatagtgaagccatattttctctttactgcagtagaatgttccaaaaaacatgtgtatttagtagcttatggcagaaacatacttggtttccatttaatttcaattgaagctgactgagatacacttatattagagatcactcccttaaagactcttccattgcttttgctggaaagctaggcatttctttccctttgctttttctctttaatcaaatttgttgaacatttacatacaggcaggagttatttctgctggata

SEQ ID NO: 84316 - DNA, 721 bp, Citrus clementina
  Intron number 1 from transcript clementine0.9_022012m (loc us clementine0.9_022012m.g) derived from phytozome v7.0 (c hr-ID scaffold_133; pos 454342 to 455062 reverse strand)
gctcctgctaagatcctttggcgtaccatccgtgggtatgttatgtttttgtttctgggttcttttattttttgatgtttgattctattttagtgtaaaaattggattttctgatttagtatgcaaatgcgtttgtgggtgtgttgaaattagtttagattaagcaaatttatctatttttcttttcattgatcttaaaaaaatattaattttcatatttgaatgttatctttttgtctatctattgaaaatgtgtagatctctatctgattgttttatgcatgttggattataaaatttgattgagcttatcattagaaataatgtgaactttttcatgtggctactgagagtgtatgagtacattgttttgtagctggactgtcattgtcagtgtatgataagattctttgctgctaaggttgaagccatattttttgttccagccttttaaattgggattgtgtttggctcctacaatcttcttggtacattgtatccgaaagaatgagaaaaacctgattttgtgactagttttagatgcaatacaaatataagcttaatgaggtaacctgcttttaaggtatttatttgctaattactggagtgcaaactttgtgtgcgttcctttattttagcttttagttttttttcccataaaagttggttatttgttttatgtatatgtggtaatgaaagctgttcggttcttccatgtagg

SEQ ID NO: 84317 - DNA, 343 bp, Citrus clementina
  Intron number 3 from transcript clementine0.9_009750m (loc us clementine0.9_009750m.g) derived from phytozome v7.0 (c hr-ID scaffold_38; pos 487085 to 487427)
aaggtttgttcttaatgttcttgctgtgcattcttagatttgttgttttaatctttgtgcatgaattggtgattgcactagaaatcatactcgtgtggtttctcctacgtggttcccttttgtttttgatagttgtttcgagacctatgttgttttttgaatgttatcatgggctaatacactcacaattgcagcagatacatttttatctagttttagttttgcgtccccttataagtatgaaaacttagacatggtggttgtagtgttacaactatgactatgaagttatttcgtctgatcttctagaatttcaaatatgcaggtgaaactcctcttcttc

SEQ ID NO: 84318 - DNA, 597 bp, Citrus clementina
  Intron number 2 from transcript clementine0.9_001975m (loc us clementine0.9_001975m.g) derived from phytozome v7.0 (c hr-ID scaffold_1; pos 11942223 to 11942819)
gcggtaatatgaatgcctccgtatctgtttatctttatgtacgaaaatccatgtctattaggatatagaaggaaatgtgtaattgtgtcagctaataaaggcatctaatttgttcttgtttgagtgaagtttgtgtatttacttgatttttatgcttattaggatacagaaggaaatgtgtaattttgtcagctaataaaggcatctaagttgttcttgcttgagtgaagtttgtgtatttacatgatctttacgcttttttcttttctaatgtacttacaagagtattaggatttgttatttacttggatgattattggaacaaaattgcatcaattctttaaggcatttacacagttacgtgttttagaaggtttgttacatgattattaggtttgatttccacatttcaatgagatttttgctatgccaacatgagattgtgtgtgtaacatgaaagttattggatcaatgaataaaggcaataatttcattatttaaggtaaaatgttggtacttccaaaattactgtttgattgaatggccaacttgatagacacaatttaacaaatgtagaattctaagctcaagaaatca

SEQ ID NO: 84319 - DNA, 770 bp, Citrus clementina
  Intron number 1 from transcript clementine0.9_021532m (loc us clementine0.9_021532m.g) derived from phytozome v7.0 (c hr-ID scaffold_27; pos 491680 to 492449)
tctggagcactgatcaccccggcattgatttcactgtatgtatggagattcgcgccattttatagtttcactgcatcgacttgttttattaatgcatgctgttttggttcgattagggttaaataagtagagtttgacgaaattatgaacttcttttgcttctacattggatttcgatggtgaagtttgcttccttttagggttttgaatttaacttaaaacttgcatgtttggcttaaaattcatcaatatttagtccataaacttcaattttgattcgataattttattttgcatagttttggatattgatttgtaggtttagaggctgaggctttgtactgattatgcaaaattacaaacttgagatggaatagtcattgatactttgattttgaacaatggtggaatgagcaatatgtgcataagaacttggaaattaagaaatcattagtgtggttgtttcttgaaattaagggtttacaaagtccttctagctatctgtttaggttgactgtacggattatgagctgttctgctttgggaaccttggttttcttcttgtggtcatggagtctctatacatatatgacaattgccaatattgtggtttatgagctgcatttgtcttatgtattattttgacacattgatcaatttaccagatagtgacactatatgttggagtggatattagattgatttatcatatgttagtcgagcatttttatcatcttgggttttcatgcaggtgacatctcctgctggaa

SEQ ID NO: 84320 - DNA, 590 bp, Citrus clementina
  Intron number 4 from transcript clementine0.9_020694m (loc us clementine0.9_020694m.g) derived from phytozome v7.0 (c hr-ID scaffold_23; pos 2359159 to 2359748)
agcaagtgtaagtacacctctgctttaaataaacattttgatttttttttttggttcaggtatttagaaagagtggaaaactaaatgactgtgttccatgctggtttgcaaaattgttatgaggagaatgaattgggaaattgaattttcaaatatgagtgagttaaggtaggattattatcccaaaatatattcaagaacaaaaaaaaaatgaaattgtgtttgctaatggtattttggaactgtggaagaaaaaccagttttttgttgtcttcacatctcgttctgttggaatcatcgccttaaaaaaggtacccaatgacacctgacttttccaataactctgctatatgttggaagtttcttaggagaaatcttctgtaaagtaataccacattcaccagcatgtggtcttaaatgttttattgtcccatgcttgctgtatttttataccattagatgccagctctttctctcttggatgaaccttcttttttcagagttttactttttaatttattttaaaccttttactttaaaatgtacatacagaagtgcatacaagcctactcggacttactgaccattta

SEQ ID NO: 84321 - DNA, 1029 bp, Citrus clementina
  Intron number 1 from transcript clementine0.9_026959m (loc us clementine0.9_026959m.g) derived from phytozome v7.0 (c hr-ID scaffold_1; pos 8475199 to 8476227 reverse strand)
aagaaacagaagggattgcgtaaaccatcattaaggtaagggtattttttaaaaaaatccatgatttgtgacgcgaatcatctgtagctgacaatatagttggtgcgaaattagatttcatgtggagaatgtgaagatatcaacaatatagggtgtaaatttgtaagtaaaatatctaggaattttatgaacaacgtagtaatataaatgagtttttgactattgtttgtaagtaagcaacacatgtattgaaattgtaagagagaatgatttaggcaatattaattcagggcagtgagagctgcacctgagacaattgagttgaatgctgctgagaataaatgaggtcggaagttagatttcccactgggtgagaggtagaaaatcgcggagtagcagggaaaaaatattgaaaacaatttggggattatatagcaggaggtgaatatggcccatttaaagttgtatgattgataagaaacaatctaggttttgctctttgtgtttgccatatttcccttttctttatcttcaggttgacaatggcttcggctgcaacgctatagaagcatctgcgaagtgacaaattagatgcgaatccgactgaattttggaaaatgatatcagaatttttgtgcttgtataataacaatgggattaattagtttaaatgttttcattgttttaaagtaaatgtaatggaaattgaatgtatgtatgacaatttaacagacagggggatgttagtaagttgtacgatgaacaagtttggaaagtacgaacaagaaaagggaaattgcagcaagtaataaaattaagtgaagcgtgagcatttagatgaggggtaatggtacatgtttatgggtcgttgtacatatgtttggttaattttttggaaatggttttagtttcttttgctgatggtaacattcagcacatgtttgttttatgtgtccatgatatgtatttatatggtgctgtacaatatagtttgatggtaataaataaatgtaccattgaatttcagaa

SEQ ID NO: 84322 - DNA, 582 bp, Citrus clementina; identical to SEQ ID NO: 79913
  Intron number 1 from transcript clementine0.9_025457m (loc us clementine0.9_025457m.g) derived from phytozome v7.0 (c hr-ID scaffold_1; pos 11172102 to 11172683 reverse strand)

SEQ ID NO: 84323 - DNA, 936 bp, Citrus clementina
  Intron number 2 from transcript clementine0.9_011951m (loc us clementine0.9_011956m.g) derived from phytozome v7.0 (c hr-ID scaffold_53; pos 125644 to 126579)
tggcatttcagaacttgatagtataacacctcaaggtatgcattatcctcttttctttttcttttttcctttcttcaatttttattttataattttgaagtttgatattgattgcagtgtttgctggtctgatgttcttatgattgtagttgttggatcttgaaaacattggctgatttaatatgtctctctctctctctctctttttatctttcgtagttcttaactatactcttgatcttgtggggttatttagtttcttgttctttatttgtttaattaagtcagttttcttgtttagctcaacccgtgggtctatttagatctccaagtctcttaccgtttgaagtcagttgtattactgcatgaatcaacacgtatctagttcatttgctttcttaaagctattctttttctctgttttaatttttcaaatttagcatttatgttcacatttcctctattcctttgtaatacttttgaaaattctgtctttttgtttgaggaaccaactcctgaggcatctggtgctcttgcctaattgattaaattgttgatgactagaggagtttagtttcccaaaaagtgtccacctttgtatgataacctcatgttgtgatgtacatctttagattatggtacatggacaagcatcttggcatgttataagctctaagagtaatgatatttagcctgagccaaaacagaggcaagcgagaaatgactgtgttgcatgctgtaacacatgggttttaaatcattttttcttagtcttaaaaacccaaaccataaacgacagtaaaacactgtcctttctagcttgcttatgttttggcgcagaataaatattattgctcgctctaatagcctaaatatggctctaaactcgagtcaacggcaggcactacctcattggcgaccagtctgctgcttgga

SEQ ID NO: 84324 - DNA, 771 bp, Citrus clementina
  Intron number 1 from transcript clementine0.9_023653m (loc us clementine0.9_023653m.g) derived from phytozome v7.0 (c hr-ID scaffold_43; pos 1802349 to 1803119 reverse strand)
accgcactgcccgccattctcgcatcagaaagaaggtgctgctgctcccactttctttcatttttaatctctcttccccattatcccactactcatttatattcttagttctatctatcccatttttggtttcttgtattaatttatcaaaatcgaataatgcacttttcttgggggtcatttatgtagaaatcttatttttttgtactttgatagattggtaccagattgattttgacattatcctagttcacgttgtaagggcagagatattcaattatttattgcatattttgggtctagaaacttagtgagtgaagttttttcaaagtcattctaagtttggcatgaaatgtcatcggctatgcttggaatgatttgtgtttatgattgtaagtgataaaaaggacatgggacaattataaaccgttatccctttgaagattagagaggaaactgctaatttcccaaaataggtcggctcctgcctgaaccccaccacaggcttatgattagaaattaagttaaagaccttcataacaaagccagctgccccttctcttatataagcatcaagtcttctgtggtgcttgtccagtacgggtgaatgattggagatgcataagcatttggccatttattgagtcctaggactgtgatatgtagctgtgagcttttattgattctatgttgacgatgatgttttattctccttgatacagttatatgtttcctttaaaatgaatgaatctctcttattttctcagattg

SEQ ID NO: 84325 - DNA, 253 bp, Citrus clementina
  Intron number 1 from transcript clementine0.9_010481m (loc us clementine0.9_010481m.g) derived from phytozome v7.0 (c hr-ID scaffold_5; pos 3304514 to 3304766)
gctgtcggagacagtgagttgagacttgttttttatttttcattaatttttggcctgaattaaattattcaaattaattaagttgtgattaatactttagttatttaatttaataaattttatagcacatgttttaatttttttcttctattcaatgttcatagtatttatttgatttgatttctgtcatggtgatggtgtattggtattgttgcgatgttgctaatgaaattttgtttgttagtttaaaagg

SEQ ID NO: 84326 - DNA, 801 bp, Citrus clementina
  Intron number 1 from transcript clementine0.9_006836m (loc us clementine0.9_006836m.g) derived from phytozome v7.0 (c hr-ID scaffold_122; pos 283427 to 284227)
cttgttgatattcgcggtctgctatttcttatcgcgtacgataacaatcaaattctcgggtttttttttaaattttcttttttttttgctttattcagttaatttgtgttaattttatttatagtttaagttaagctagggtgtcgttttagaattttgaattgtcgttgcattgttgaacttttttacatcatttaattctgtgtgctttttagctggtatttatggtgtcttattattggtgtttaagctgtgtttggtaatttgaaattggaaattagtgttaatgatagggccagtcttcatttatataccttttttatgaaaggataactttgaatttggtggcgccgaactaagggtatgttttttgttgagatgttgtggcttttagtccacggctgctgtagaatgaaatcactagcagtggatagtaagtagacattagctgtcaagtagaaaacacttcaggggccgtaaaatggaaaacctcagtgaactcagcaaaatgtttatgacgctggtttaagttcttcttttagctttttcattgcttaagttaatgatgccaagttggattccagattttattaaagtgttttttgaatctctgagagcaaccaaatcatggagaatcttggtctaactctttgatgctggtactgattgtttttcttacggtatcagtttttgggagattgatatgctatcttttcaaatatgtttctgtataatgtactgcttatctgtttactatatttattttctttttaattattcaatgcagatacaagcacatca

SEQ ID NO: 84327 - DNA, 390 bp, Citrus clementina
  Intron number 4 from transcript clementine0.9_011937m (loc us clementine0.9_006643m.g) derived from phytozome v7.0 (c hr-ID scaffold_10; pos 5119373 to 5119762 reverse strand)
ggttacttacagaagaaaatcaaagtgagcttacattgaagatttcttacactgaaatgtagacagcaaagtattgatctttcggcctaacgtttaattcttgaacaaattataatcattatattattttatcacgtaactactatatctaggtttaactgacagccaaaaataaagtgtggtgacctatatagttgttgcgatggtgagggttttttaaagatagattagttttaattatagtttatctatcgagggtcatacctttgttttttcattgtcaaacgtgaccttcaaaatgtaatcataaaggaaccatgctatacagatattatagaatgacctaacggtaaattttcttttcaatgtttgagtgatagaacacttatt

SEQ ID NO: 84328 - DNA, 938 bp, Citrus clementina
  Intron number 1 from transcript clementine0.9_001269m (loc us clementine0.9_001269m.g) derived from phytozome v7.0 (c hr-ID scaffold_49; pos 555336 to 556273)
ggttttggtcgcagtaggtctcctagtagtaacaggtatgttcttttatctgcattttgatttaatcttttaatttgatgtgaaatatgacattttgatgtgtttgcaaatatagctctatccaccctagaaatatgagcagtactattggagtgtaattggtggcaatgtttgaaaatctaagtctggaatgtggtgttacgaaacaaaaaccatgtcattatatattgtaagtaaaatgttgctagtctgcaatatatttacataaaggtggcatttgcaattttttcgtagtgttttactcttggaatgtgcttgctgcgacaagattagtgttattttgttcaatgtagtaaaatgtgtcccagcaagtcgtaaaagtccctgcagacctaggaagccatattgaagccaaattatgttgttttctgtaagacattgcagaggcattctatctttgggcagtgagccagcaactttgttttgtagaagaattgagtgtttttagggctaagttgtcacatcaatttgttttttctacagcaaaattcagtaattggaatgatatgagatttatgtaaatcctgattggaaatctaacagaggatgttctaattgaagaaaataagatttcagctggacaagagacagaaattcagctgagggttttgacaagtcagtgtcgtagtttcactttcatgtatagatgtgggaaatgcaattaacataaaaatgtgacagaatttgtttttggttttttcccgcttttctttgtcatattcaactttataccacccttataatagaaagtatatgtgattcagtatgacatgatgccctttgtgttatagtttctgcctacgaattaatatatgcagctcctatctattttcccttgcacaggtcaacatcagagtccagtcagtctcaaaaaccac

SEQ ID NO: 84329 - DNA, 375 bp, Citrus clementina
  Intron number 1 from transcript clementine0.9_018658m (loc us clementine0.9_014157m.g) derived from phytozome v7.0 (c hr-ID scaffold_120; pos 23690 to 24064)
gctggtatatatagttacttcttttctttacaaattttgataaattggggaaatgatcaaaaccttctagctgtatatatcaatgaaataatcatttgcatctcatgttttaaacccatcaaaatccgtcagctgctaaaaagagagttaacttcaattattttacttttaatgtggtaaaagatacaaaaaaatgaaaatctacgtgttattgaaatacgaaagtagaaaagattgatttcaaccaacaattctttgtcttggttaattatgcggtctagttttacaaactaagcttctaaaattgttactaattgtgtttggattttggaaaattcaggtttggattgaaaaagcaaattcttgaaggaggaa

SEQ ID NO: 84330 - DNA, 803 bp, Citrus clementina
  Intron number 3 from transcript clementine0.9_001503m (loc us clementine0.9_001503m.g) derived from phytozome v7.0 (c hr-ID scaffold_10; pos 2751724 to 2752526 reverse strand)
ggagggctgttggggaggcacacgaacgccttaaggtttgtgaaaaaaatatctacacaattacctgcaaattttttctttcaaggttttattttattgttctccaagaaaactcaaaaaccaaaagatgaaaaaagccctatgtgctgcttctatgacaagtaatcagggattgcattgccttggtaggtgccgagaattaactgttgcatgagaaacatttctcttaatttccatatttatgtttacttttgtttcatggaggaaaaaggaaaaaaaaggttattcgaatggtagtaatcttttagaaggggaactttgacttgctgtctgcactagaaggtcatatgataaatcttctctgacacctttaaattatctgtttgtccgttttggagatctgtttttccaaaaatgtaagtggattttatttgcctgatatctaaattccatgttaaaatttcatgctgctgctgcttctcctttaataatttaaattacaaaatttcctttctcctccccgtatgaaaaagaggccgtaatggaacgtcttattgcttatgtctggatgaagtacacaaaaaagggaatgggtcatgttgctgtgattagcatgctagaatgcacttaacactgacattatgaaatgaaattactctataaatcaagtttagctgcttaaataaaaagggacttatgtaatgtgcacaaagcttctttttgaagtaattatccgtcttatggcacatcagtttgttctgagaactatggtgtactgtgtattatttgtggttaggttggaa

SEQ ID NO: 84331 - DNA, 932 bp, Citrus clementina
  Intron number 1 from transcript clementine0.9_015838m (loc us clementine0.9_015838m.g) derived from phytozome v7.0 (c hr-ID scaffold_10; pos 2239455 to 2240386 reverse strand)
gaacagctccttcgcttcttctggtaccgtttcttcttgttcacgttttcaattcattgttttgttgtgttatttggagcaaaatttgcattcgttttaggcatatatgcggtgatatctttgagatttttggatgttattgacaccgaaaatattaaagcccgtttcttaaaagcacctaccaagtacttttctggaaggcattgggagtaatttcatggtcagaggttttctctatatgaccttctttcaagtgctccttcaagaagaattccaatttttttgtttcattcttttcttttattacccagacaatatgaaataaaagccaagcaaacttgtctatttgaaagtgcatttgacagtgacatgcaactaacctacagtatctaactgctttgaatccatttcatcttgttgaagagtaaaattatacattgtacggaatggggccggtaattgatcaagttctatcatcccgtccttttgccctcagtcggatttcccttaacttaaagggagcagtctggaaaacagaaaaattggattggctacttagccactatagttgcaaaaagtttcatctgatcgacctgctgtttgcaagttcactacttctgccgctatatgagatggggggaaaaaaagttagttagttgacttcattcttaaagaaaatgggtttactgatttgacccgtctaacacttcagcaaatatttagggaaattaatccagagcatgctattgcttctatatctgtttgcaatataggctttctgtacagatacacatcacatcatgtcccaaatccttccacttttggcaattttgtttggtatagataaaatcaattatctttaaatctagatctcattgattgtaatggttcacgcaggaatcagagctcaggttgccaccatagaacaagca

SEQ ID NO: 84332 - DNA, 906 bp, Citrus clementina
  Intron number 1 from transcript clementine0.9_027102m (loc us clementine0.9_027102m.g) derived from phytozome v7.0 (c hr-ID scaffold_10; pos 5599976 to 5600881 reverse strand)
atcagagttgttcaagggtaccttaatcaataacaagctcagttgagtgatacctttccccagtgcagagtagacggcagtaaaacatcttaaaccttcttgaaattgaaattcgtatttacagggatgttcaacaactatctagctccttgatgatatcctctagaacataaatctccaaaacttcggccggtaaaacaaaacttggcaagatttctctcatgaaagaactagatctcatattaaacgcaactctatcatcaccacaaagttgatgcagtctcagacgatgaagttcaattactaaaccagtattgctgaagctctattggatttccaaaacaaagacttacaatgaatgttttatgcttcaaatactgcagtggcataccacttttaatgttctatagcaacatacaaaagcacccttgcacaagcagggatgaaaagttttccgggtatggtctactttgccatccacgtaaagcaacccaatgcaagtagaaggaccagatgttatgactagaaaagtgcctaattgcggcaaaacatcattatataaactaaagagtagttatgctatggaaacatagtaacagtctgctccatcctattttgcagagtatcgctactactactacaagcgatcctcaaatcattgattagtgactcttggatctggattccagatgctttcattagatacaaaaatttagtggcctcaacataaagcccattacgtatataacccataagcatggcattccaagacgctatgtttttcttatcaactatcaattcaaacaccctcttggcatctctgagcaacctacattttccatacatgtcaaccaacccacactgcacgtattcatctgattccagcccaatcttgacaatgttggc

SEQ ID NO: 84333 - DNA, 971 bp, Citrus clementina
  Intron number 1 from transcript clementine0.9_006624m (loc us clementine0.9_006617m.g) derived from phytozome v7.0 (c hr-ID scaffold_27; pos 2002266 to 2003236)
cgctcattgaggattttaattttggttattttttggtaattttttgttgtgttgtagtgtgcgtttttttttttagttaacagaagattttgttttcgtctttggttttgagttttgagaagtcactgtctgtctgtttggctggtgagaaagtgtgggggaatgattctgagaaaattgaaattcaagtgaatttttcgtttgagaatttagaattgagcatgttagttattgaggtgctgtggtttgtttatgtatatcgaatttgatttgttgattgactgttaattttcgaattttgtaattttttcaaaagtaaaagttgaagctttgtctttgtagctaggttctgactctctgattgcttgaggagggagtgggtgtgggaaatagctaagagaattgaatgctggttttggagagtctttagctcaaagttttggccttagcagagtagcgctttagatcagtctttgcatattgaattgctttcgggtagcaaattagttgaattcagggtttgctgggttttgactcattgcttggttggtgatagaacgtaggagaagctatattaccaatcagttggtggttttgaatcatgaaagtgtccttatcagctgggtttttttttttcctgttgtgatgatgaatgttttgactgcttaagtttttatgttggtctggaaatgtaaaaataataaggaatggaagtttcgaaaaatggagacaatgctaagtttatttttaactaagaaaagaaaaaaaggtggtcattgctgtttactgattctcagctgccgaatgtcgctcagcagtcgactaattttgcacattacaattttcttcttagagttggctagacaaatatcaataagtaggcattttgaatcattttaagctaattggatttatttctcttatttctcaatacaggatagcagatctttgatactctgggaatccttgat

SEQ ID NO: 84334 - DNA, 420 bp, Citrus clementina
  Intron number 1 from transcript clementine0.9_022386m (loc us clementine0.9_022386m.g) derived from phytozome v7.0 (c hr-ID scaffold_63; pos 85900 to 86319 reverse strand)
cattcatatttggtgtaattgctgaaaataagaaggtactcgctattttctttttcttttcttcgttagtgaaatattaataactgtttttgattaagcaaacatggtgaaatagtctgattatactttgttagaaactgagacatgaacgtttatatagtgggtcagtttctcactttgcatgtgtatgtttgttgagattgtttagtttcaattgttatatcaaggtctgtaaaatttaaagtttagagactaacaggtcagtttagtttatttctatcatcctcgtggaacaaacaactgcgagtgtttgtgtatattattatatactttatatgattgttctctaactttattgatttgatttattgtctggtgattttagcctgcatcgggaactccgatacctttgaaaggtgg

SEQ ID NO: 84335 - DNA, 801 bp, Citrus clementina
  Intron number 3 from transcript clementine0.9_035511m (loc us clementine0.9_035511m.g) derived from phytozome v7.0 (c hr-ID scaffold_29; pos 398699 to 399499)
agtgataggcggtattttcttctaactatctttttcaaggcaaaataagagtatctaaattttgattcatgtatcatgttaaattttcaactgcatgctgttgaattgttgtgcttttatatcttgccttttagtgttttgttggaatggaggaggactaggaaatatgtttgtagttatttttcaaagaagcacttgatgggtttttctagagaacttaaaagcactagacatatgcttttcttataaattaaaaattaaaaagaagaagaagaattcttaatcaatgcatttcaaagcagatttgcttgccagacacaaggactgtctttagctacatgttgattgtgatttgcagttccttttatctttttttttttttttttcattgggttcaatttttggtgcctcttaagtgaaatgaatagctggaggaatgggtaagttatcatttgattacgtatatgaaactccaatatagagtaataacaggttcagtcaatacataaattaattgttgagcaagcgagaaacatatgttttgtatgttaagattaatcaatgctggtcattagacgatttcataccatgtaacttcaagcattaagcatgcacagtctcgtgcagagaatttatcttgaaaagacaatatttggaagtttgttgatgatattcttattcttctaacacagtatttcacaagtagggttgcatatgaactaaggttggtttatataacatctaaattagacactgttgactaaatgtggcattcctttacagggaacagtttaccacact

SEQ ID NO: 84336 - DNA, 539 bp, Citrus clementina
  Intron number 1 from transcript clementine0.9_013049m (loc us clementine0.9_013049m.g) derived from phytozome v7.0 (c hr-ID scaffold_10; pos 2175129 to 2175667 reverse strand)
tatcatcggttttagcaactcaaggtctctttcaggtattttatcaaacacctcgcattagtgtactcagcttctttctcatttagttgtttttcaactgaattgagttatgggtatgcttatttgagcttttagagtcgtgagttctctcatttattgtttatttggagggaaattggattcattttagttactgacttggactacaacttgcggtgggtaaaatatttttgcttttgctgtgtttttgggataagaaacttagattaaactgtctaactttctgcatgggaatctttttttattttcatttgacatgataaagatatttcttgtatgatgctatatatcagtattggggaaaatttgaattctcttcgtagtcagaaggatccagtgcgcatgcttgattgtataatacgacttttctaacgaatggttgtaatggaatttttcttttcatcatgaatttgatcttgaattatctactaaccattccagcagtctgcagcttttgtaggatccttcaaccaaataaa

SEQ ID NO: 84337 - DNA, 367 bp, Citrus clementina
  Intron number 1 from transcript clementine0.9_015532m (loc us clementine0.9_015532m.g) derived from phytozome v7.0 (c hr-ID scaffold_136; pos 405908 to 406274 reverse strand)
tggagaaagcaagtgaggagtccttccttggtcaggcaagtttaagttgaactttcgtattttaatattaaaaactgtacttttgtctcgcttggatatgctaacctttgttttccgtcatttctgtcactggctttttatgtttttgatcttaagttatcatactttatttaacataggtttttattctgttaattatcttctatgtgtagtctaatttagtcgcttttctgctggatgtgaactttcttctcacatgtatttgtcttccactgctgatacattagtttcttgcactggtttgaactgttctttcttctcaactattgcagcgtttgaaggttattgataattctgtggagaatct

SEQ ID NO: 84338 - DNA, 567 bp, Citrus clementina
  Intron number 1 from transcript clementine0.9_022452m (loc us clementine0.9_022452m.g) derived from phytozome v7.0 (c hr-ID scaffold_27; pos 3049711 to 3050277 reverse strand)
gtctacaccttcgacactgtcgaagaattttggtggtacgctactaacacacataccctcgatatggctctgttatatgttattttcaactgggtttgtttctttctgctttaatatcttttttctgatcaatatttgtaaatgtttggattttcttttctttgtgttgttaggtttattgatctaattaatgagatgggtttgcattgaattaactgagctttatgattgattcttctcgcttggttgataagaaatttaaagcaaagtaatgtgaacttttgaatcctggagaatcttgtgtctggagatctagtgaaattttattaacatctttataatagttattattgtgctcttcatgaatttgtttgatccagctttagacacacatttgttttagttttttttttttttgttttaacccaaatcaattggttttgatattagttagatcatatacgttttccaaaaaagaaataggtagttgagtttgattcattttaatgtttaatctggttatatgttcttgatcatttggttgatttttttcccttttcagtttgt

SEQ ID NO: 84339 - DNA, 1015 bp, Citrus clementina; identical to SEQ ID NO: 78475
  Intron number 1 from transcript clementine0.9_010403m (loc us clementine0.9_010403m.g) derived from phytozome v7.0 (c hr-ID scaffold_109; pos 275608 to 276622)

SEQ ID NO: 84340 - DNA, 964 bp, Citrus clementina
  Intron number 1 from transcript clementine0.9_016770m (loc us clementine0.9_016770m.g) derived from phytozome v7.0 (c hr-ID scaffold_29; pos 2000376 to 2001339)
gcgctcttgcaagattttctgcaacattttctcaggttaaagatactcttctaaaatctttgccgattaatttagttacttatttttcttgattctgcgttctgggttttgcttgattttagattctgctatgtgggtttgtttcaaaatcttgtcttgtcttgtgttgtttgtttgtttgtttcttccttgttatcatcgtacggtcggtttctttgagatcaacttgctttctcgttaatcaaacaaaatccttttttttttttcttgaaattagagaatttgaaatctttaggtacagctattcagtatctctgtggtttttttttttttttcaattcatttttaaggcttatggttgttctccctttggatcttctgtttggttctgagaaaaattggaggaaaaagtttcctgttttattttttctgttgaacggtcgctcaagtgacatattagtctaacggtcatattatgttcattcctgtagatgtgttgcatatttatgaataatttttttaatcttttttcttcaaaaaaaaaaaagcctatatcggtatgattattttccatagccttttttttttggtcaacctaaatctttaattagatttgtaaccttactgtcttcctctcatttctttttatcaaattttctctaatggaaacatcttcttctggtttattttctcgctgatcttgtttttcttatttgaattttgggtcgctggtttttttttttttttttgggaactagttctgattatttgttcctgaatcacgcctactagtctgtattatggaactcaaatgttatgcaaccttattcagctaaacttgttgattattgtaattatttgaataacctcatcacaatctcacagaaatgctttttttttttgttttttttccctttttttattttcaggaacattgattgatagatcgatttctcttcagttt

SEQ ID NO: 84341 - DNA, 738 bp, Citrus clementina
  Intron number 3 from transcript clementine0.9_013073m (loc us clementine0.9_013073m.g) derived from phytozome v7.0 (c hr-ID scaffold_122; pos 417755 to 418492)
gtcaaagcacatttggcctctcggtgcagaaggtactttctttgaacttgacttgacatttgtggttaatgttacatatggagtgtagagggaataattggaaagaaatggataccaatgttcttttcataataaattcatttgtattttttaatttttctttttttaatttggcgtaacagattaaagatttgttcatataaaacatcttttagcaagaataaaaatatcgcgtaataaagattaaatatgatttagccttgccaaaagatagaactttgtttagttaaacatttttattttacaaaatgaaatgcaattggtgttgagattctgttggcaactatttgcacttggcagaagaaaagtggttgcatgtcagtgactagactacactattgcttttctcaagtaatcaaagaattagtttgttattatttagcatgtggttcttagtatgattttccttgttgggttgtttctcaaatttttagagatgcagtataatactcatttttggtatgatcttatcaaattttccagtattttgattaccgtagcatgtttagatttttctgcaatcacggctacttcgacttcctcaaaacaaactggatcacgttgtactttggctttatttcattagcggtatttacctttagagtatcatcgtaaatttgtatggttcagttatttggttgaaataatagtgccgacttatggatgaaaaatcagaaa

SEQ ID NO: 84342 - DNA, 974 bp, Citrus clementina
  Intron number 1 from transcript clementine0.9_016471m (loc us clementine0.9_015402m.g) derived from phytozome v7.0 (c hr-ID scaffold_63; pos 380829 to 381802)
ggtttcctgagtcactccgatttttcttctgtacagtaagtcaatttcgattacgtgcttctcttcttttttttttcattttatcccaaaagactccaagaaatccttccttttggggttattcttcattttcagttgatgcccacgaatcacgattgctgatttgagaatcatatgttcaatttttaatttgtgtgtgcttagcttgtgaactcggataatttggggttgctcaattttgttgattatgcttttggtcaatatctatggttagtaattttgttatcgtcatactcaatatcgatttaaaatgtttatttattttttaaaatattagtgatatttgattgattaattaatttcttggtcactgtggaatttattgcttgtgtttatacgtggtagatgttatctcaagcttagacttttattttttatgatgatagctgttgaatttcaaatctaaaatcgttagattaatatgggcttaagttgcttttttttttttattaatttgcagtacttttttttggggtaaaaaaaaaaagagagagagagagagagagagaagtttctcagctttttgttaaatgttgtttggttttcctgaaaatgaagcccttcttactcagtcaatgcatttttaccggggttagattggcaaacttttatttctttgatttgggctttggaaattaattaaaggttccaaattttaatttgtttttacaaactaccaagtgttcttccaatttaccgggcaactaaatggattagcatgctacactgcacccaagtatatattgaactcattggaagtttcttgagtatttgaatgtttcttcgtggaagcgttgatgtggaaatgaatagttttaatcttttgcttttttcccaagcacattattattgttttcttcaggcttaactcatgatcactgttatcttctaccatgtgcagtcatctttcgagc

SEQ ID NO: 84343 - DNA, 373 bp, Citrus clementina
  Intron number 1 from transcript clementine0.9_010646m (loc us clementine0.9_010660m.g) derived from phytozome v7.0 (c hr-ID scaffold_38; pos 1798436 to 1798808 reverse strand)
ctctctcactcctctcccagcgctctctctctttggtaggatcaatctcccactctgatttttgtgtattttttgttattctgattagggttttgtggtttttgattgtgtggattagggttttcaatctagggttctttttagcgattttgttgtttttctttgacctatctgatgaaagcaatcaaatttatctgttacttatctcgttttcatctgggtttgctttatttttgatgtttgttccagttccgattcgtatttgtttggcaccgtattgttcttcttttttttttttcttaagggtttcctgtgttaatattcgtattttgaacctaataatgtttaaagcaggatcagcattgcacaccaa

SEQ ID NO: 84344 - DNA, 862 bp, Citrus clementina
  Intron number 3 from transcript clementine0.9_025179m (loc us clementine0.9_025179m.g) derived from phytozome v7.0 (c hr-ID scaffold_1; pos 6106796 to 6107657)
ctaagaagtttgagcccaagtacaggcttatcagggtaagttttaagtgctcatcgttcttatgggactgcagattgtcactatgtttatatgttcttgcattgttttattattcaattttggttattctgtgaaaatccattagataacttgtgagtttaattataagccaattattctttttttttataagaattattgaccaattattcctcaaaaggggaaaaaaggaacataacagaagctaattattcatatattataataggtgcagttgatttatacatgcttccgttgggtagatattaaaaacttaactacagatatcactcttgatagtttattatttttgttctcatgatttggttttctaattatagtctttctgacaacttgatagtggagtggaacacgttgctaaaatcttctttctttgtttcattttgacgacatgtctcttatttaactaattgagactcctgtatgtggccgtcgtatagcatacattctctgcttgagctatttatacacttcccttctgttgtaaagttgtctgattacccaatagaaatctcatatgatcaatctttgagtggttagggcctggtaggttgccattctgtttgtgccatcggacccatttaagaaactgctgtacttgattgatctaagcaactgatttggtttaaaagtcttctgttttatcttttgaatgatggggagactgttgtggatatctcttctgttctatttgcatgtccacaagttacttgttcctgtggtggttttacttgaattgagttttgtgcattgatgtttctttaactagttcttatgattatatgttgtcttgccatgcaga

SEQ ID NO: 84345 - DNA, 911 bp, Citrus clementina
  Intron number 2 from transcript clementine0.9_001264m (loc us clementine0.9_001264m.g) derived from phytozome v7.0 (c hr-ID scaffold_1; pos 10140344 to 10141254 reverse strand)
gatttgaagcggaagccatccgtcgttctaatcaggtctcatttctctgaatttgacattttagtattactattattattatttttttcaaaaaaagtcagaacaaaaatccgacatccaacctaattaattttactgttttgatagcctttagctttgtaagtttcagacaacagttactaatcgatatacagatccaatcggtagttttatttccgctacctggaacttggtcgtgttgatttacacacgtcttccgtttgctcgattgtttgtgcttcaaaaccccctgaggatacagttttgctttcacttaaatcatgcaaaccttatgctgtcaatttattctttcagcttgaaaggctaaatgaacctgaacattttcaattattagcacactgaaggatcgactgaagtaaatttttaataaccggacgccctactagcaggctcactgctactagcttgtgaattagaagatagtttttttggggggggggggggggggggaactattggtcctattcttctcaagttaattatattatttttggaggcagctagtttctgttgactgtttcaaagtgatgctttggtactgtgtcctggtgatgctcattaatgcttcctatgaatatattttccatttttctagttcacttattcaaacttttgagtgcatatatttaaccaaaatttctcctattaacaaatcttctccgaacatataatcaattggttacatggaatttattaattggaaaagcaacatccatcattccatatcatatatgatagcagcttttgttggacagctagaattttcattttattattctgctttttgatgtcctttcccaacttttgacattttaggagaagtttagagtagcagttttggtttcgcaagc

SEQ ID NO: 84346 - DNA, 1061 bp, Citrus clementina
  Intron number 1 from transcript clementine0.9_021252m (loc us clementine0.9_019957m.g) derived from phytozome v7.0 (c hr-ID scaffold_1; pos 4902709 to 4903769 reverse strand)
actggggctacagacctttcaaagcctccggccaagtaagttatttttctattttgatatatcatttttttttcattttttctttttaaattatcgttacttggaatgcaaatttgtctttttaattaacgctaacaaattatctaaatactgttatatatctttttctaatatcaagatgaaatatcgttattactagctagagtagatgttatatagtattggttaaataaaatgttaaatttaatttattaattatttcaagtgaaagagaaaagtgtgagattagtttttctttttttctttttttaacgttcataatgaaaataaggacttaattttcttcatgtgaagataacaaaatactaacatttttttttcaaaaaacttactagctagtgtgtaaattcaatgaaattgatttttgacatttttaattaatttcctgtaagaaatactattgatggggaacctgaaaaaaataatcgtaaaagagtttgatgagggtacgttatgttgttgtcacataagcaaacaattctgactaaagggagatttcaaggatttggttttttgtcgggaggaaagaggaaaattacaaaacattaggaatctttacttttctcacccaccaaacaatatttcgattttcaaattaaaattttaaaaaaaaggccacagctaatgattcttatctcatttttttgtacaccgggaaaaaaagaaatctcagttgtacggtcagacaaataagtttttcaaaaaataacatgcctctaatcacaaaatttgataaatattttatatcctaatttcggaatcagaattttggttcaacggaagccataaagaagaaataacaaattcgaaaaggttgaaacgtaatataaacaaaaccactgaattttagtgaaaacccaaatttttttaggcctcaatatagtaagttattattattattattattttttggggggtcaattaatagttaatgacatgaaaatgatctgatttttttttttgcagggcacaagttgtgggttggccacccgttagatcat

SEQ ID NO: 84347 - DNA, 697 bp, Citrus clementina
  Intron number 1 from transcript clementine0.9_015401m (loc us clementine0.9_015401m.g) derived from phytozome v7.0 (c hr-ID scaffold_120; pos 171675 to 172371 reverse strand)
aggctacaccgtccacgctgccctccacaaccacggtattaatttattacttcatttctttcttcctctctctttcttttttttcttcattattttcatttcttcaattcaatttttgattttttttttttggtaattatagcaatacattttcccaaaaaaaatataaacaacaaaaaatgtttttagagctgtttcattttgttggtgcacgcacgtgtccagctaattcattcaattctgccagctaactcaaaagtaattaaacaaaaaaggtcatttttctggaataaaaattcttattgagttagacaaaataaataagaaaataaaaaattttaaaataaaactcaactagcttaaaataatccttatcatctattattttgactaatacttcttgggaatggaatccaaaacgatatcgccttctacttttatgatgtgtctgtctgtgcatcacgcattgcatcatcacaagtccacaactttgcaaaggttaactgaacgtggttttgaggttgacgccacgcacgtacattgccttggttttcttttcattattttaattcttttaagtaattcaatttccaatcattaactaatattttattttttatcttatcttgttttgatatttttcaaccaaaaaaaaaaaaaagcaggaaaattgcagtgtatcgaaggagagttaatt

SEQ ID NO: 84348 - DNA, 637 bp, Citrus clementina
  Intron number 2 from transcript clementine0.9_001369m (loc us clementine0.9_001369m.g) derived from phytozome v7.0 (c hr-ID scaffold_1; pos 9611175 to 9611811 reverse strand)
agaagttgcttgcagagatcttccccaaatccattgtgagtgttcgctgtttatcttctgaatcactctcttgtttatcagtctgtgtgtagtatttgggcctttggccttgctttttcaaatgctttcttttcctataatagttagtaatttctgctaattgtagcgaagctggcaaattttatattcagttttagtgaacatagtgagaaacaaaacaatacgagccttggaatacaatgtggcaaattgcggcattatatatgttcttattgtggtaattcattatattgctaatgcattctcattctagtagaatcagttccatttgtttgactatacatgttcctggaatgccctactgaaaaaaaaaaaaaaattgcaggatgattaaggatagtggtaaatttgaagggtgtatttttcttttcctcaatgttcttggagatcaaaaagagcctgaatcacaagtatagacggatatttgtataattagaccaacaagttgcgttaaaattgtcggttttgtgtcttttaacatgtttccttagtattctatgagattgtagctaaaattcaaatactattttaaaagtatagagaaagctgaagtttgaagctccaaacttaatgcagg

SEQ ID NO: 84349 - DNA, 695 bp, Citrus clementina
  Intron number 1 from transcript clementine0.9_001369m (loc us clementine0.9_001369m.g) derived from phytozome v7.0 (c hr-ID scaffold_1; pos 9611912 to 9612606 reverse strand)
actgcaagccaactgcaagccatcagcaactcaaggtatgttccattcttattctctttttatgctttgtaaagaattgcttttctcttgggttttaatattttgtctctacactttgttttggcttctgggtgtctgagtttttggtaaaaaaacattcccttttctgcaactgttgctctaacgcttgtgtttcttgctgtgttaccgcagcctcaaaatctttacgtttcctttttcttttacctctgttgcttgtagctggtgtttccctcgctatgtgctccttttgacctctcttatttttttgtgtaatttctgtgcttgtgtaatacttgcatgtttctgcaaagcttgcggggaaatgcattttatcgaagttttctttcttctttgttactgtttgttgtgctattttctttgtaagaaactttctagattaagggtttttattcttattttatacgacggtttgatccccgttctcagtcaaagctgtcttttttctccctagattcttcttttttttttctgttctatggtttttattttgttttctgggaaacagtcatgtgcattttgctggtctcaactcttaaagaatcatgctttattaagacttctattttttttttatccctttaaaaactaatttctatagctctttctaaccgtattttgaaaatgtgcagtaa

SEQ ID NO: 84350 - DNA, 719 bp, Citrus clementina
  Intron number 1 from transcript clementine0.9_032087m (loc us clementine0.9_032087m.g) derived from phytozome v7.0 (c hr-ID scaffold_63; pos 1174653 to 1175371)
cggtctgtttcttgattctttttgtctttgaaatcctcttataagtattttttttttcctcgtccgttatattaagtttttcttgcatctcctgatgctgagcttttgaacacaaagagtaaaaacttgtatgtctaactgattaattaagtattttcagtttttttgtgtaaattacttgcctttctcaaaactaaggcattcttttaagtcttgggttggcaactatattggttactgcatttggattgttttagatgatggtccgcatgaaatcaaacatttacacggcagttatttaggatttgattttatctgaaatgcatgcttttcaccattgcttaaagcttagggaactagattttagtgatgaagtacaggcacagtttgcatgtagatgaatgtcttagtttcaagcatttctcatgtctcggtttttgcatgttgttgaagtataattgatagggttatatctcatagttctggcttttcatcacaggcctttcacactatttgttttcactttatcattaaagtttgtaatggtaggaaggtctttgacagacaaaactaaaacttgggtggttggtcatgcactcatgcttcttgtattgatattgttctgaaatttttattgtgcacttatttccatgtttaaagcgtggctagatggtttttcttcaattttaagatgtttctgattgtaaattaacagaaag

SEQ ID NO: 84351 - DNA, 696 bp, Citrus clementina
  Intron number 1 from transcript clementine0.9_023024m (loc us clementine0.9_023024m.g) derived from phytozome v7.0 (c hr-ID scaffold_90; pos 910477 to 911172 reverse strand)
cgtagcttgggacaggaatcgtttcacttgctgtaagttaatatctctaaatatgtacttgaatcatctcttttctgaaattaaaattaattacgtaaacctgttgcgtacaatcatctctatcaaattgtacgatcatttcacgttcttcgaaattccgcttcttaaattcaattctcgtttggctactgaggaaatgcaggaaaatttaatataattaggaatctggatctgagattacaaatttcttttgcaggaagaaaagtaatattagaatttgattaggagtaatttatttctgtttacttcattttctcagcaatcaaacacattgatggtggaattgtttctaattacagttgtttgcgaagtgccttctaggtgtatgaagaaaagattagctacataaattagatataattttaagtttttcattaaaatccgtatattgtaaaataagattacataaaaaaaatctgaaaaatctggagctatttagttgtgactggaaataaaattgggtatcaaattcacaagtttattactgtttgttgtactagattcactcaattttatgtataaaattactctttaactaattgtttgccgaaatgtcttgttaataggaggtttaatttgctttattaaattgttggtgcagtctaagaaaaggggtctttcattggaagaaaagcg

SEQ ID NO: 84352 - DNA, 681 bp, Citrus clementina
  Intron number 2 from transcript clementine0.9_026810m (loc us clementine0.9_026810m.g) derived from phytozome v7.0 (c hr-ID scaffold_10; pos 4421867 to 4422547 reverse strand)
tccaaactgaacggtgagatttcagtatagggctttctgctttcttatcttatctcgtcaagttgtttcacaattgctttgggctgtttctctgaacacttagctagaggaatcttcgaaccagtgttgccacatgcagttcttttaccagctaaaaagtaggtctccattttccacacagtgtattcggaggtggtccagggtttgtacctcatatgggcatcactaaactttgtatagcttgctctttctagagtagaatcttttatgacaaaatttaaaaagaaaactgtctttactcaatatttatgcaaatgatccgaattcagagttcagacagacatgtgacaaaatagagccacagaatttaaagcaaacaaaagactgtgcaacaagccagttatcttgctattttctttgcaagctgtaattataatgttaagttgctaatggtgtttacttgttcagtggcactgcatgtctccaatggataagctggactgctgtagttcttcagctacagcaacatctttgaaaattggaactttcttttagattttcttcggctaggatcagattaatgtttcatttgaattatgaatccaatgttttgtaatccattggattagcatggattctaaaaatttgcatattgggcagagacagagtctgtgttggtca

SEQ ID NO: 84353 - DNA, 710 bp, Citrus clementina; identical to SEQ ID NO: 80254
  Intron number 1 from transcript clementine0.9_011639m (loc us clementine0.9_011639m.g) derived from phytozome v7.0 (c hr-ID scaffold_65; pos 327327 to 328036)

SEQ ID NO: 84354 - DNA, 627 bp, Citrus clementina
  Intron number 2 from transcript clementine0.9_005047m (loc us clementine0.9_005047m.g) derived from phytozome v7.0 (c hr-ID scaffold_10; pos 2163428 to 2164054)
ctcagaagtttacttttgattttaattacttaaaggtttttaatgttgtcattttttccttttgcttcctatttatgtgcctaaattacatttgtgtgccattatggataaaagaaagttggttagtttcgaagaagtttgtttaacttcatatctgcataagcttcttagctgccatgatacaaccaattacctttgaacttgtcagtccgggactttaggtgaagcaatgtgagcatacatggatgcaggttttgctaaacaaattacaattcataggatattgcgtttacaactgttactttaacttactgccttgctggttgtatctgttcttagataaaattaaacagatttgataatatttacattaagttgtagtataggtcttctctcttagtgtgatttcattatggcaatctgaaaacatgtgagataatgcatccaatgctaatttgcattctgtggctgctagatttgcttgatttaggattatagtggtgcaatcaaagtgtatctttagatgcattgaatgcactaaatttttatcaacttccagtattgattttgattttcctttggctatttttaaataggcatactgcctatacaggcaaaacaggttag

SEQ ID NO: 84355 - DNA, 745 bp, Citrus clementina
  Intron number 1 from transcript clementine0.9_011071m (loc us clementine0.9_011090m.g) derived from phytozome v7.0 (c hr-ID scaffold_67; pos 1078121 to 1078865 reverse strand)
ccggaaagtcttccatcattaactacgtttgtctactgatttttttattttttatttttcatttgggattgtaggtttaagaatgtttgattttttgtgttggtttttgaatgatggattgttgggaatttttcaaatctccattattggttgagctccatatctagaagttctctaacttgtagaagaagatttgtatcttgtggttatggatgggttaattttatttgatttttagtttggagttagtatagaagtgttcaattggttgattcatgaaatatatgagattttggaacggattgctggagattatatttttacttgcatgttagtacgaatgatgtgaactggattatattttcactaagttttcatgaataactgatgatggcaagagggagaatgttgtgacagtaaaggattctgttttgtatttttatattatcccggtatagaggttttttatttctttacaaagttcaaactctgtcatgtctagtctgacaagttttatttgaaaacggttcaagaaaacagatccaaagttatgatgtttctatgttgggtaagagatacttctagtttaagcattcataatcatgttttataagaactagttattataatgtttttggggcctttcatgactaacaattcagttgatgactatgtgctgatacgttatatggctatttcatttgttataggttgggacaaaggttgctgctgtttctcggaagac

SEQ ID NO: 84356 - DNA, 980 bp, Citrus clementina
  Intron number 1 from transcript clementine0.9_035838m (loc us clementine0.9_035838m.g) derived from phytozome v7.0 (c hr-ID scaffold_63; pos 333168 to 334147)
taccttttgagaacctgtgggaaaagttctttcatgtaagtgctcagtttcttttttattgttttcttttcatatctttcttttgcattccttatatatttatatgaacttatgatttttgatggtggcttcttattccagctagacatgtctttgagtctacatctagtttgtgcagggatatctagattattagaaaatatttgatcttattttcctcgagttcaaatttctatgttcagctcctgctatattgatgtgtggggtagtaacatttttcttgacgtcagcaagtccagatctgtaatgctgattgttattactttttgatgcctctagaatgtgcctccgtgctattggtttgattttgaagatagataaatagtttactttaggtcttcatttttatcaaaatttctcatcaaagtcatggaggcgtgtaaaggttttggatatcagatgagttcgtgatggttattagcttcttatgtctttcgtgataagcttaggagtctctattggatgttggaaagagtttgatgaattggatggacttacaagaatgtgaagctacagaagttgagttaaaacatttaggaatagatataggattatatttctattactttagaagtcactttcttcatgatacagaccctccgctcttgtgctcctttttcttttttcgacaatacaaacaatgtacactgcctagtctgttataataaaatgttgtcaaattttgtgccttaagtgggactgatttgtatattgctagtgcatgtggaaactgattaaatcatggatatttttgcaaaaggtttagttatagtttagatctcttgtcagtacttctaactttttactcacaggatataatgtcaatttcctttccttccaaatttagataaacgcactgttatttagcattgtttatcttgtacacgaaatgatatggcttacactcttcatacagggcc

SEQ ID NO: 84357 - DNA, 253 bp, Citrus clementina
  Intron number 2 from transcript clementine0.9_000694m (loc us clementine0.9_000557m.g) derived from phytozome v7.0 (c hr-ID scaffold_1; pos 3808776 to 3809028 reverse strand)
gggtgagaaacagagtgaatttgctgaaatattatgtgagtatgatgttactgtgatggattatccgcggcagtatgagggttgccctctccttccattgtctttgattcaacattttcttcgagtttgtgagcattggcttttgcttgggaatcatcagaatgttattcttctacattgcgagagaggaggttggccactattggcgtttcttttagctagtttattaattttcagaaagctgcatagtgga

SEQ ID NO: 84358 - DNA, 453 bp, Citrus clementina
  Intron number 1 from transcript clementine0.9_000498m (loc us clementine0.9_000498m.g) derived from phytozome v7.0 (c hr-ID scaffold_38; pos 590738 to 591190)
tcgctttaagagtgtcaagctcagttgtggcgaaggcaagtttagttttctttattgggttcatagattttctctatctattcattgtaactctgtaataaaacattgtttcttttatattacccactttaggagttgtattctaacactttacaagctatgtgcttgatgatgtgagtttaattctttttcactgtgttggtctgtttaattttttcctatacggtgtatttgctttcttcaaaaataggcttttgactcttttgagtttttatagtataaatttaaattttcaagtattagaattttcatcttgaatttcgtcaaccaaactgaggattcaggtgctatttgctaatcataatcctatgcttttatatgtgaaatattgactattatttaagtaattcttttccatgttctgctttttgaaattgcaggtggttgcggtgc

SEQ ID NO: 84359 - DNA, 992 bp, Citrus clementina
  Intron number 1 from transcript clementine0.9_000018m (loc us clementine0.9_000018m.g) derived from phytozome v7.0 (c hr-ID scaffold_1; pos 11011209 to 11012200 reverse strand)
ctttaggtacttgcatctggttaagaatattctgtattcttcttttgtttgtgctccattattttcattaggtgagcgggagttgatgaagtagaattagtaaagcacttttaaagtatttatcacttgcactattttgatgggcataaagaaatcgtcttggttaactaccaccaaatttatagacagggttagctcttgcagctggtccacagcaggtattaggtccattacagccatacaggtagtacatcgctatctgatcggatatctgtcgtttatgaaagtactttgaatgtgtgctagatgcagtctagtttgttgccaaaaacaaagagaaagataacttagtgaaatggccttttttttttactaaaacaaaaaagaaaagaaaagaaaaatacaatggctagagcggaaggtattaaaaaagtgacttgtagactgcttagtgtgtagaaggacaataatgttttggtttgaatttgataatgtggtcagtgatttgaaaaggtgtctcacattatattatgggaagaagaccaacattgactatattttagtataggaaagtgaattgaaggggcattctttcttgtgcaatgattaatgagtttttctttgtttcttacctaaaagaaaagtttaattgcacagaaaattttttgactgaaacttctcctttattttattttcttgttctattgccatgttaaagaacttcttagtgccggttgtgtttaattgttttgcttgcaaacaaatgacattgtcatttgttatcattatagatatagggtcgttaatgattgatttttgagaaccttgctgatcttcttttgctaataagacataagttctggtacaccaggattgggtgctgagggaccaagtaattttagttaggttttgttcagaaacccctttcttcctgacagcacattatacaatcttttgtacttttgttcctttactttgcagtggagaaggtg

SEQ ID NO: 84360 - DNA, 550 bp, Citrus clementina
  Intron number 1 from transcript clementine0.9_010296m (loc us clementine0.9_009889m.g) derived from phytozome v7.0 (c hr-ID scaffold_63; pos 275293 to 275842)
attggaccaactcaagtctaagatccgttctcttggtttgcattttttctttttcttttatctttacttctatttgactccaaatcatgcgtgaaaaggaagaaatacaaatatcgaaaacttttttaggtttaagtcagattttgggagtatcgacgcttgactttctacttcggtctcagtctcagatagcgtaactacgaatttcattgaaatgcaaattgagcattatgtagcaccaattagtctgactgatttcatcattcatttgttggctattatacgtttgcttaaaattacattactatctaaatctaaaaattagagctgaatgtttgtgctgtttctattcgagtccatagttatatcagtgtttcgtgggaggaaaactaactgggaaaattagtataattgagcattgtttggttgttttgagtttatttcaaacccttcgtatctcttttcaataggaatcttcaaagttctgctgttgtatgtgagcatttgttttgatgttgtttacttttttgttctaaagaatcccatattg

SEQ ID NO: 84361 - DNA, 711 bp, Citrus clementina
  Intron number 1 from transcript clementine0.9_010299m (loc us clementine0.9_010299m.g) derived from phytozome v7.0 (c hr-ID scaffold_23; pos 3327686 to 3328396 reverse strand)
cgacggagaagataagattaaacgacaacagtcaggttcgttttgcaacatggcttctctttagctgccctaatttcgtcacccaaaaaaaagttattttttttttagtttacgtactacctaacggcatttctggactgtatattcgtatttccataaatttgtgtctgtagttattgaaaaaattactgtgtgaatttatgtttatatttaatgctgtttttttgcttattgtcattcatgtttctattattttcttacttatttaggtctcttttgccattttattcccgtgcaattgcctattaagttttcttgttgtggggtattaattattaaaaccctaatattttgggaaaatgtgctttgctgcatgtgagtgagttgtggaaaataataattaaatataattttctgagctaataagcaatatgattactagtatagctaccattttaattggcattgcttttgataaagtctgtggatgtcaattgatatctttttgttttctggcgaacaaattatttgtcttagtcaatatccagatgctgcaaataattttgttccagattctaaaggattttgttttatcattttgatttttaaacttctactatgtttgtattcttctttttggcttgctcttttctgaaaaatgttcttctgtttgcaggaaactcagattaggccagttgatcagcccctttt

SEQ ID NO: 84362 - DNA, 413 bp, Citrus clementina
  Intron number 2 from transcript clementine0.9_003418m (loc us clementine0.9_003418m.g) derived from phytozome v7.0 (c hr-ID scaffold_33; pos 455674 to 456086 reverse strand)
gattggtgagtgtcattaggtaataattcattgatttccttaatttcattttaatataattacaatagtcgagaagatgctgaagttctttatgaaattgcacaattcaattgccattagcatctctagaatattatttgtctctcagcaaggcaacacttgaaattattttcttataactaaaagtccgttcttgtgtttgttttcttgaaaacattgaatatcattctatgcgttgccttgctatcgctttttatcatttaacttcaatttttaaattgctacgtggttgagtgaagtatggtcttggatttgtttgaggcttcacactttcatctgtcatatgttattaactttgaatcatattcttgttttcagatcaatatataactcgttttcctgctggtggaagt

SEQ ID NO: 84363 - DNA, 780 bp, Citrus clementina
  Intron number 1 from transcript clementine0.9_003418m (loc us clementine0.9_003418m.g) derived from phytozome v7.0 (c hr-ID scaffold_33; pos 457178 to 457957 reverse strand)
ctgagagctgagagctgaagagatcagtcgcgcaggtgagattagtaaattttatttttactctcttaagcttttaaaaataactttagttttgattgcaactgtcgtttcgttctcttgattgagttgccgcgacaaaaatgggagcgagctacgcttgtttgcttttcttttctttttttaaatatttgtacttttgttttatattttatagctctgatatacttattttgtttggttactgagaaaatgtaagtgattaaactggatttgtatatttccggctttgtttgatgatcgtgatttgacttagtatttgtgtttatttattgtttagttagtgatcggttactatgagtaactgtttggttgataagaaagtgaaggaaaaatgaaagaaacaaagcattctgcttaagtgagcttgtatgttgggtatgtgtttgagatttgtagatgtgatggctaggagacatttttgggtggattttaatctttgtttggttattgagaaacggcaggaagattagtaaatggataattgttggatagttttttgtgaatattatgaaattctcttatggttgctgagaaaatatagcgaattaacagtaacttgtttttggttattacatatgcttttaccttatttaggctctaaaccataagaaactgagtatacatattttttatttaaaaaatataaagaaattattattgatatttaaatttctgttttcttgattcatgtagcattgaagcctgaagagctgtagaaga

SEQ ID NO: 84364 - DNA, 930 bp, Citrus clementina
  Intron number 1 from transcript clementine0.9_025330m (loc us clementine0.9_025353m.g) derived from phytozome v7.0 (c hr-ID scaffold_1; pos 4980473 to 4981402 reverse strand)
cctccggcgtcgttcgccgtcgtcagccacacaaggtaaggtatatttatgcgattccagatggtgaatgaatggctgtttgtaattcaatcttcttttgggcttgggtaagtagcgtgacgggcactgaaactgttcaatcttcttttatataatggctgttattgttgctgatttggtttcttaacattgtaattgttgttgtcttgagtgttgatggtgatggatttttacatctattatatttgtttgtcatttagagatgggtttatggagatgggttgttaatcatgtttgtcatttggagatgtaacttcagtagcttggtgccttggtagttgactgcactttatttatttatttatattcttttgttctttgttaccttatgtcgtttaaaaagactttttgaggatgcttgatagtttgtattcatttttgcatcattcagctgggctggtatttgagatttttggaattgtaggtggctgcctggctgggatttgattcattttgaaatagaattgaattttgggataggttgtaacctgaattgcaaccaaaatcgaaatttagacccgaattttcaatctaaactgatccaaaactcgaacctaaactgaaccaaaatgaacagatcagggattatccggatatccccgatccaaccccaattaccacaatttgggtggtagggatgggttcaaggattactaaaaacttaggatcgagtctagggatcgtgatccctggcccaatgccatctctaatttgtttgtgtaaatctctagctattttttttttttaattatttgagagtgaggtggggattggaatattttgatcatattggttttcagctactcataagattgtatgtttgttcctgattttgctttttctttggcagttcaatcaatttaaatttaa

SEQ ID NO: 84365 - DNA, 495 bp, Citrus clementina
  Intron number 3 from transcript clementine0.9_023585m (loc us clementine0.9_023585m.g) derived from phytozome v7.0 (c hr-ID scaffold_20; pos 1710944 to 1711438 reverse strand)
cgggtgatcgggtcatcttctctgttctgtccaaggtgtgtgtgtcttcatgtttctgtctaatttgttttttcgctttatgatttttttttttgggtgacagtaaaataagagaaattaaattgaagaagaatatgaaaccaaattgcttttctgctaaaaccatcgtatcagctctgtcgcatttaattatcttgcataaaatttctctacacttgaatatatataattaataaaaaattaattggttttcaattcctttgctgaagaatgaatagggagcataataatttaaaacttcgctttgaatcttaattatgttatcctatgaggatgttagcatctttttaatgcactgaaagactaaaaaaaaacaagaaaaataaagactttaatatatatattttttaatcttttagctcacattggagtttttgttttttttgtaaatttattttaggtccatttccgtccaacccaagccgaggtcagtac

SEQ ID NO: 84366 - DNA, 350 bp, Citrus clementina
  Intron number 1 from transcript clementine0.9_025487m (loc us clementine0.9_023800m.g) derived from phytozome v7.0 (c hr-ID scaffold_1; pos 12513661 to 12514010)
cttccctgtctttccctgtttccaagcagcctcaggtgatttccttacagttcatattatttaaactttctatttttaatatatattttcttatttcctaattatttattcattcattgtacggtttgtttgggtcacttatttgttcctacttacaatcccttcgtcttcattttggtttcgattttttttttctctctctgatttaatttaatgaaatatggatatttaagcaaccgcttctttccatctcatgtataattaaatgaaaaaaactgattctttttgtttatttcttggttaattttgattaaatggtgttgtgagcagtatcccggtctgagcattca

SEQ ID NO: 84367 - DNA, 496 bp, Citrus clementina
  Intron number 1 from transcript clementine0.9_026773m (loc us clementine0.9_026773m.g) derived from phytozome v7.0 (c hr-ID scaffold_136; pos 228980 to 229475 reverse strand)
ataaagaactggtaaattttcacaactttaatatgttaactcttgctttccaaattataagttgtttttgacagcctttttcttttaaaacaaaaaatataaagaataaaaattatgggtcttatgttttatttttggttgttaactatattttagcaagcaaacctgtcatattgattttggcacctgaggaaacaaacaactgatgttccatttttttttttaattgcgcgcttaattttgaattttaagttgctagacgtttcatgattaccaacttcatctcagctttcactctgaatgataagtttgtgatggtcttgcgcatgagaagcttatttcaaattcttcttctttgttgtgttcacaatgggataaatcttcttgtttttgtaacctttatctagtgattgtaaccttatgatagctagctatggaagcactttttcttgtttcctaatacatagataatctaactttgtttacctcaatgcag

SEQ ID NO: 84368 - DNA, 615 bp, Citrus clementina
  Intron number 1 from transcript clementine0.9_026729m (loc us clementine0.9_026736m.g) derived from phytozome v7.0 (c hr-ID scaffold_27; pos 2015683 to 2016297)
cctccggcttcgttcgccgtcgtcagccgcacagggtaaggttagacatgcgattccaaatggtgcatgaatggctgtttgtaattcaatcttcttttgtgctcgggtgagaggcgttacaggcactgaaactgaccaatcttcttttgtacaatggctgtttgtaattgttgccgatttgttttcttaacatagtaattgttgttttcttgagtgctcatggatggtcatgggttattaatctgttatatatgtttgtcatttggtattcatttttgtttttcattttttgcatcattgagctgggctggtgtttgagatttttggaattttaggtggctgcccggctgggatttgattcattttgaaattgaattgaattttggaataggttctaacccggattgcaacccaaaccgaaatttagaccctaattttatttcggtttggtttgggtttgcgtttcaaacccgattgagttgactgttcaatctgaatgggttctaacccaaaccaaagccccatttgggcgcccctagtactactcattactcactagtatttctttttcgctcttcagcttcaaaaccctgccatcgcattcgctcttgctgc

SEQ ID NO: 84369 - DNA, 915 bp, Citrus clementina
  Intron number 1 from transcript clementine0.9_021662m (loc us clementine0.9_021679m.g) derived from phytozome v7.0 (c hr-ID scaffold_1; pos 11035301 to 11036215)
acgctcaagccgcgctggatcgcttggtttcgtagcccaaacacctccggttattagataagctaccagctaactgaaatgaggcaagttctgaaaatcaattacctgtcccttttttttatttttatttttaataaaaattgatttgatgggggacttatatctttcgataatatatatatatatatatatatatatcttttttcatttttaattgtattataatctgcatcagggtttgagtttataaggagtctgaattaatatcgttaaagcatatctctagcgtccgcagagacgcagagtatagctcgagaatttacaattaagggctctgctcggaaatctatgtaacagtgagatcattcgactcttacatgcatataaaagagaggagatgagttcccatagactctgctcttgtgttaactactgtgtctaaaatgtgctcgtggaatatgaaattgactggaaattaaggctagttagtcaagaagaagaaaagtttgttccaagtctgatgccgtctcgtttggttcttaacttacggtcaattgaaaaccattgacgcatgacttagcagattcacttggtttactgtataaaggctctattggtcttagcagccccttgcaaaagcagaagctgaaaccagactctttaaactatagcattgtatcatgaggggaaattgttagtgcttctgtgctagcttgtagatatcaaacaaaccacgaacatagctgtaattcacatcatgtcccattgggcttgttcgtaactttcattgttagctcctgttatgatggtcatttcatagataacttgggtgagtaattagtgtcgttttttttttcaattgatttgctgaatcattttactaactttatttttccttagtatgcagtgaacttc

SEQ ID NO: 84370 - DNA, 547 bp, Citrus clementina
  Intron number 1 from transcript clementine0.9_024964m (loc us clementine0.9_024964m.g) derived from phytozome v7.0 (c hr-ID scaffold_27; pos 3169277 to 3169823 reverse strand)
tcgaagcgaggtcagttcttctctcttctcacttgaaactgttgttacatttgttttcattatcatttactattcgcatcatcaacttatgaattccgttttttctcattttctgtttgcttccccgataaaaaataaaaattgaacaaattcacacgcttagatctcttgctgttttaagaactgtcttaactgtttgttatataacatcgataataagatttgatttttttgtttgtttcagaataaaataatgaaatattttattttattttcggaatttgttgtgtctatagtgaaaaaaaatgagtaggtgtttattttagatcctgtaaaaaaagcactaaaataatataaattaaatcagaatcgatacttttcttgttggttttacgaggaagtctttttttgggatggaaaaagaaattcgttgtctttgatatgggtttgatggtccagttattttttgtaagattttttttaatatatgaaaatttgtgtccttttgtttgtaggacgtggaggatcagcaggtaacaagttcagg

SEQ ID NO: 84371 - DNA, 412 bp, Citrus clementina
  Intron number 1 from transcript clementine0.9_008058m (loc us clementine0.9_007682m.g) derived from phytozome v7.0 (c hr-ID scaffold_89; pos 657049 to 657460 reverse strand)
aacaggtgcgcacctcagtttttaaatttaaatttttttctttcttttttaagtttaattgaatacagcaagattaatgttagactccattagctagatagttcactaaaattttcgcaaattattattttttttaatatgaaattatttcttacttcttcatgtttcagcatgttaatggatactgataatagatttagaatcagttgcttgtctcacttaagtcatcgccttttctttcttttttttttcctggaactatttttatttatattaaatttgtgaaattatattaattctatgtttaaatcattcattattcgtgtatttgaagttttgatgctaataaattgcccgtttaaaaaattaaaaaaaaattgaaacaggatcattgtgggaagactctctgtaa

SEQ ID NO: 84372 - DNA, 560 bp, Citrus clementina
  Intron number 3 from transcript clementine0.9_023201m (loc us clementine0.9_023201m.g) derived from phytozome v7.0 (c hr-ID scaffold_63; pos 724934 to 725493)
gtacaacaacatcaagttccaagtttgggatttaggtaagtcaattattttctttcataaccttttactacaattcattggttaaactgatcgatagcaaccatgcgagaagaccctttgattatgctactgagtagttgagtgaatcttatttattttatgtttgtaactgttgcgcttctacttaccttttgaatatgtactaactatccacacacttgttcttgacaatcagcaatttcattccacagcgactttggattaataatcaaaacctctcaatacccttagtccatatcttagttaaacccattgggattttgctttaatagcataagtaaggtcaatttgagttaactgagctgtcaataagtttccatagtggtttacactctcaactgttctcgtgttgggtttaggttcttgaagaggttcagttgttacatttaagtcattacgtttttatgcagctgaagtgttcatgtttgtttcatagttgaattgactagtggtttattgcaacaggtgggcaaacaagcataaggtaatccatttgtact

SEQ ID NO: 84373 - DNA, 467 bp, Citrus clementina
  Intron number 1 from transcript clementine0.9_009341m (loc us clementine0.9_009341m.g) derived from phytozome v7.0 (c hr-ID scaffold_1; pos 9942018 to 9942484)
ctttgcctcatcttagcatcaaagacactccaattgttagtatagtacctacctactttctttctttattcaatataatcttttatttttttatttaatgttaaaatgatgtcacttattaatattactagaaatccaaagctccaaagtatttttgttcttatgcatgtcgggttttctagttttaaaattcaaataagctctttgtttctgccctttttgatgatctaattaataaagatgataagaaaattttattgtatccggtttcatttcacggctctttagttttcttacatttaggtgctttgtatttgatagtatctatgttctgccaatgctgaaattggaagctctgcgcgataatttgagcagtgtgttgattgctttgctaaatgtggtttttttttatttaaataattttgtttgcaggaaagctcatctgcccaatatatattgcagcagta

SEQ ID NO: 84374 - DNA, 707 bp, Citrus clementina
  Intron number 3 from transcript clementine0.9_019628m (loc us clementine0.9_018738m.g) derived from phytozome v7.0 (c hr-ID scaffold_65; pos 389749 to 390455)
actacatagaaacggaatctggtcttcagtataaggtcaaccattagaaactacatcttaaaacctccttgcatatttatagcattagcactcagggtttagttagttggtttaatttcgaaattcaagagtgcaggacttgcgacaaggaagtggtcctaaaccaaagatgggagagacagttgtggtaaggagatgatctgtctgtaaaaatgctttgcaagttgttgaaaatatattataaacagcccaatgttgtttgttgaagaaggtacagagttgacataaggataattttggagaaaaaaatttctttctttatttttatggatgggttcctgtattcttcccaattcaagtgaaactttggtaattaaatattttcacttaattagattctcagaagaaataaccagaaagagtctggtgcattgaacaagctaaatcagatttttggatagccaacctgcctctttgtgcactttatagaatagtagagagagagaattattataaaacaaactaaagtttgctctatggatttgttagtttgaacaagttcaggtttcaaaataactgaatgatgaaaactttaaagtccagttctttttggataatcatgaccgcttcaatctgcaattatcttatcctaagttggtgttatgcaagcgatttatgaactgcggacgcattttaggttgactggg

SEQ ID NO: 84375 - DNA, 855 bp, Citrus clementina
  Intron number 3 from transcript clementine0.9_000702m (loc us clementine0.9_000702m.g) derived from phytozome v7.0 (c hr-ID scaffold_1; pos 3676261 to 3677115 reverse strand)
ctctctctgagaaggtaaataattgaaaaaaataaattaattttttttcgtttgttgttgtttttagcaaattatttttttccctctctttgaagttgccattttgagctatttcccttgagggcagcattcaaattttctatttcaatcccttattattcattaaatacatataggtgtcacggttatatgggtctataaaaatttgagtaatgatacagctataaaattcttgtataaatttattttgtacaaactgacatggcatgataagattggttgaatgaaaatataaattaataaaaacaaatcatgtgggccaagtgatatttaattcaaccaattttatcatgccacatcagtttgtacaaataagtttgtacaagagtttgtagttgtatcattactctaaaaatttatacaaactaaacaaagaaattaaacaatgaaattaattactaataattgcaattaattgtttgttttttattttattttttttggtcatccatgaggatgatttgaatatggtgatattaaggagggaattattctgacaacttttatatatgtcagggtaacaaaattttttaaaataattttatggatggtatactactactactactactacttagatgaagatattttattataaaatattttatttataattatatgattaaaattataatttatttttattatttttattttataatttttatcgtgtgatttaaaaaaaaatgtttgaacatatccaacgtaaccattgcttatattggattagcataaaaataaaaattctgaaagcatttaattatgcatcggttggtggttagatcataaatattg

SEQ ID NO: 84376 - DNA, 707 bp, Citrus clementina
  Intron number 1 from transcript clementine0.9_005266m (loc us clementine0.9_005266m.g) derived from phytozome v7.0 (c hr-ID scaffold_33; pos 1449782 to 1450488)
cccgtttcggttcccacaagctcgctttcgctcctgtaagtggctccttgtttgtattttgtttggttatttgtgtctggaatgttggtttaatgctcgacgaaatgcctcactcggtttccgttttatagtgattcgaatggataattgtttttatttatttatttttttggggtactgttttgatgtttgcatgtgttagacattaagtctcttctttgttaaattgtgggatcgttgatttttactttaaatattgatgaattcttgaacttgattgtgaaataagttccattttaggaccctcatatgtgaccgtgtatgaaatgatcatcaaattttgaggaagttttgcgagtgatttatctagcattgttccagacaaataaaaatataaagaaaagaaacagtgtgtctatttgctggttgaattgtaaattttagtgttatttcagcaattaattagtaaatgtttgattattaattagcactcctcaacatacctcaagcttattctgttttcggcttgattgtattggacctaagatttatggcatgggacagtttgaagaaattttgtgcaaaaaaaaaaatctaaaaagggtttatttcatggtaatatgcgttatacatcaagtttgcttaacactctacacttttattttattttatttttattttttgcagcttttcattctaattcattt

SEQ ID NO: 84377 - DNA, 539 bp, Citrus clementina
  Intron number 1 from transcript clementine0.9_020259m (loc us clementine0.9_020259m.g) derived from phytozome v7.0 (c hr-ID scaffold_1; pos 11263418 to 11263956)
aggtaccgaacgaagcttcttcttttttgtgttaattttgcgctagttgtttggattctggaaaattgttcaatttaactgctgaacacaactggacgtgattttgaaagcttaattttgcttgaatttttgctgtttgtgttcactgaagctttcaatcggtttgatttttatataaacagtattccgctcgttatggtgttgctattgcttgtggttatgttgtggatgttttgtctgctgaattttcttagctaagtaattgttttttttggcatgtggctggataactgataagcccttgccagcctaccatgaggacttagtttctgatgatatatgataagtgatatgaataaaatccaaagttatttgatctaagctttccaaattttaaatttgataacatatattggatttgactttgtaagatggcatatgtttaactttataagcttttgaaaatataatcatattttttgtgttgtctccactttttccttgatgcagctttgcgatcttctgagatctagagttga

SEQ ID NO: 84378 - DNA, 693 bp, Citrus clementina
  Intron number 3 from transcript clementine0.9_012737m (loc us clementine0.9_012741m.g) derived from phytozome v7.0 (c hr-ID scaffold_98; pos 417845 to 418537 reverse strand)
agtatgtgatctggttccattgctgttacagcttgaatgttttgagttagatcattcctttcctttcttttgactttgaaattatagcaacgaatatgcatattcacactaaaatctgacagaaatcttgtggtcatattagtactggcagctaaaattactaactttacgactaaccctagcgccatcaacggatgactgtaaatcggatctccaaaccagggacacaagttaacattgcttgtaaaagccagagaggaaaagatttattagaaaacaaaataaaagggaaaagaaaatgtctagatcaatgatttatagtgcatgcacttctttcagacttctcatggaagcttccatggcatatagaatttggctttggctttagtagttgcgctggaaacaaatgtatccattgtttagtattgctgcatttctggtccaggaaacaaatccatttgttgccatggtcaagttttattttttgatatttcattgggacaacaaactatacctttgcttggcctatttcttacaataaaaatgttgctatatgtatcccatatttccattcttctatcacatttttgaaacctcaaagttttcttatcaaaagtggctcaaagaaataattattatatcattcatcttgatgcaggaacgatttactgagcttagaaagtgcaagcgaac

SEQ ID NO: 84379 - DNA, 387 bp, Citrus clementina
  Intron number 1 from transcript clementine0.9_025555m (loc us clementine0.9_025555m.g) derived from phytozome v7.0 (c hr-ID scaffold_120; pos 392858 to 393244 reverse strand)
aggtggcacacttaaaccatgtaagatgctttgttggaaacaaaatttttaattttattacctacatactattgatgaaagtttactcattgagttttttttttcttaatttttctttcatgctctaattaactttattatttgaaatatcaaataattagatttataagtataacagcaagtttcttttttttttcttcaatttatgccttaatacaaattaattccatgaccaatggattaaatttcaactatttaattaataaaattcttttttttcttccttcatttactaacaaagctttatgtataggaccaaatggtagagatacaacaacagtaacaaatagatcctcaagaagcaaaaccactaactcaaaaggaaat

SEQ ID NO: 84380 - DNA, 866 bp, Citrus clementina
  Intron number 1 from transcript clementine0.9_033283m (loc us clementine0.9_033283m.g) derived from phytozome v7.0 (c hr-ID scaffold_89; pos 768175 to 769040)
tggaatcaaagtgaattcaacgtaaggctaccatccttgtggttcgctactatctatgtgacataatcaatcatatgatatgcataaaaataatcatatcatgttattaaattaaattgtaataaaagtaatttgctaattagttctatttacttacaatttttttagggctcttgtggattcttgggtcttctaaaatacaagatttcacaaataatttgttagaatgatatgtataattaaacttgctatatttttataaattttattagttaaacacaaaggtacaatgtatgaaactcgaaaacaggacgtaattcttaataaggttactaatgccttattaaaacttcaatataactactcgaactttatatacttattactattcttgaaatttaattcaaaccattccaatttcaagacttccaatctaccttctaattctttcttcttttctttttcttattttcttatgtctcgtccctttcattgtttcactcccttttatatttcttttatggaaaatgataaacgaactcaaaaaagacaaaaggatgacagaaacgcagcgtctaattgccgtttcacgcgttaagttctgcttcttttagtcttgcgtggacccacaagaaataataaaataaataaaaaaagaatggaaagctggtcatttctccccctccccaactactcattttcctttccttagtttactcccccttcactcattttactccccctccatttgcttcgttactggactccccctggacgacaaccgcttcttgttctcgccaagtcccttctctttttttttttctcgcccagccccatttgcttcgttaccggacgacgaccgcttc

SEQ ID NO: 84381 - DNA, 486 bp, Citrus clementina
  Intron number 1 from transcript clementine0.9_014770m (loc us clementine0.9_014770m.g) derived from phytozome v7.0 (c hr-ID scaffold_10; pos 2908724 to 2909209)
caaaggtactattttatttttatttttattcaaaaaaaatagaaatattatattttctttacatgcgagttggtctgttttttgggttagatttggggcttaggctgtctgtttgtttgacaggaaaatcttggaaaaggaagttactgtaaaattgattttttatttttggggatttattaaccttttttctcctgttattttaaatggattaattataaatatttatttctagaaacaaaaaataaataatcattatttttggtcagcaaaaactgaaaaattcaactggaaatggattcatttgtattatttttctttgttttcttagcaatcagaaatgagttttattctctcctattggttatcttgttgataatttacgcacttatggttcttttaatattgcgaatgttattttgattgttgtagcagctagttattatctgtttttttttattatttactttttctgattgaagagaa

SEQ ID NO: 84382 - DNA, 221 bp, Citrus clementina; identical to SEQ ID NO: 82389
  Intron number 2 from transcript clementine0.9_012462m (loc us clementine0.9_012462m.g) derived from phytozome v7.0 (c hr-ID scaffold_1; pos 2769782 to 2770002 reverse strand)

SEQ ID NO: 84383 - DNA, 852 bp, Citrus clementina
  Intron number 2 from transcript clementine0.9_006188m (loc us clementine0.9_006142m.g) derived from phytozome v7.0 (c hr-ID scaffold_53; pos 160358 to 161209 reverse strand)
tgctccaggggcctctgccacccaagttcaatcaagtgagatatgtgacttgccataattttgctgctaatttttggcatattttcatcgtatatttctttccttcttcctaaattcgtggtttaaaaattaggctttcagtcctatgtgtttctgtatttacaatgaagtatgggtattgtcaaaattttccttgcagttttataagtgcatgataaaatcaatgtgtaataacttctttacattaggtgtggacacatgggatagtacaagttgtgtggacaggtgaaaacattcgtctactgctttgcaatggaaatgtttttaattttgttttcttttttaaacattgagttcaaggttgttagtgtttctggttaaaactgtgaattgttaaaatttgggtgtttcattcattgcaagtggcctattaactgactaccttaatgtctggataggaaatttcttctatgacaaatagtgtttactcatctgcttattttggctaaaaataatgatatttatggtgtcttagaatgtgtgtcctttgcatattctaatatggtggttggtgacctctattctgctaaatgctattgctttttaattattttgcaaaatgagaatattttccaatttatcagtggctaacttataaattgtggaggtttctccctcaccttgatgcatttttacaaatttagttcttgtatcctatattttctttggatttgtcatcaggtgtttgaaattttatatcccttttaggctgaagtctatttcacatttcttctttggcttttaaatcaataatgattttgtaaattgtttctttttagcctaaggtccaag

SEQ ID NO: 84384 - DNA, 966 bp, Citrus clementina
  Intron number 2 from transcript clementine0.9_033143m (loc us clementine0.9_033143m.g) derived from phytozome v7.0 (c hr-ID scaffold_1; pos 1929213 to 1930178 reverse strand)
cctttcccagtgactattcagagcttcttgatcaggtacgctggcttctgcatttgtttatttacctttttattagattaagctttaggatctgtttgatatcgagttcttgtagtttttaactgtatatgtgtggtgaaaaaaaaaaaaaaggctatagctgtgatgtaaaagttgactgtgtttggtaaatatgacttataaataatattttttaacaaaactgataaaaggtgatataagttttttgtcaaaatattttgagataaaattatttgtgctcaaaagctgcggctgtaagagtttaccagacacttttatatatctgagctccccaattgcaatgccgaagggatccttaaacttgttaaatgaaaagctggagacatttcaaaaccaatttggcctttttgaagctattagaaaacaggcattgggtcctgcttgttgttttatccaaaaacattcacggggtagataaattgtggcaattttagaacagcatcaacaactttcacagtttaagttacagatatgtggatcatatttctatatctgttgaacatttctttggtgggggttttggagacttaaatcaaaacatctgcttttgtgaaatcatcttctctctacatcgaagttgttgtttttgtgtaagaatccctgtgttatagtatcttaggatgattatatttccaaaatactattagctctgcatttagtttaaaactctaaactactgtcaccacatcatattggatgagtggcacctttaagatgagttgtcaaagcagtctaaaaattacacaaagaaacagaacctctttggaacctcttggaaaacacaacttggtggctctcttgatacaacttgatgtgtatcatctgttctgtagtagttagataataagtatcggagtaggagcatctacttagtttgggcttttgacctttaaacaggcaaaa

SEQ ID NO: 84385 - DNA, 796 bp, Citrus clementina
  Intron number 1 from transcript clementine0.9_030250m (loc us clementine0.9_030250m.g) derived from phytozome v7.0 (c hr-ID scaffold_51; pos 816745 to 817540)
ccgtgcttccgtctatcctccgagaccagaagttggtatacttcatttcttgataaaccttcatttcttcgcaaattgtatggttttatgtagaaatgagattttatctgataacaaaattttctttacttaatcattctgggctctaacaaactcataattataatgcttgcttcagtttttttttttccttctgtgattcttttctcttgatgtacaaggggtgtgcagaagggggttcatgaggtagtcctctggttgtattttgaactttaagggagttagtgaaatcttgcttcattcgtttcaaagtggatgtaggcttacaatgccaaaccacttaattcttttttgtgtgctttacatttccaatttgctcatgcttcttctttattgagtcatatcgtttgtggtctagattataatctctagtttcgcttaattagggatttaaggattaattgcttcaagattgggtctaggggctaaagatcagccgcttgctggttttagaatcaacagttccattagtttctatttctttatattattgtttaatgtggtgaagttatgattatcctgtgctaaatctttttacttgcgagcttgaattttagtctgcgagaattgaagtgtgctgcaatttatgacagcaatagcacgaaaaattgatttagtagtattattgttgttgttattattggttgattttcacttgtcttcgaatatatgactctctgactttatttgcttaaatgtagagaattccaaacaaaattgtgaggaagatcagtca

SEQ ID NO: 84386 - DNA, 355 bp, Citrus clementina
  Intron number 2 from transcript clementine0.9_023071m (loc us clementine0.9_018989m.g) derived from phytozome v7.0 (c hr-ID scaffold_1; pos 8445385 to 8445739 reverse strand)
aggtagcattcatttacagaaaaaaaattgaagaattttattattgattcagtatatttagcacggtcaaaatgttttcaaaataatgtttctaaaaaacaatttttagaaaagaagatgattttttgaaagcttttgatagtatttgttaaacgtaattttaaaaaagcaaaaaaagggggggaagaaaggtatttggtaacgttttcgatacgagtaaaatagttatttcgaggaaaaagttgttattttcatttttctttttgaaaatgaaacccaacagccactgagtcttgtgtgtgttttaattatatttgcagatactaaccgagtatagcagattagagatcattga

SEQ ID NO: 84387 - DNA, 928 bp, Citrus clementina
  Intron number 1 from transcript clementine0.9_018161m (loc us clementine0.9_018161m.g) derived from phytozome v7.0 (c hr-ID scaffold_1; pos 1742477 to 1743404 reverse strand)
ttcggtgttgtcactctgctgtctgagaaaacgaggttggttactttccccttttcatgttttagtttatttagttgaggagacaaagaagctatttttgatctatttttagcaccagcttaatgattactctgggtaataactgaggtgggatcaggacaattgctttatttatttccgcttgtaaatggcgtctgtttatattttgtttgggaaagcatgtaggaagaagtccccatttcataggtgggaagacatagaacaatcgtatatgttggtgaacttctcctcatttaggacttaagaaagcttaaaacttcattaatgtttatttattttttaatcaattataatagctatttcataggaatgggctaatctgcacatttttagttaaaatctgaaggggtagctagaatttcctgactttaatgatagattggtgacagaatttgtatttacctgtgcttaggatgtcactcctttgtttgaattgactatgaagttttcttgaggctctgttaatctgactttggaaagagtctgcttgggctctaaaactcatcggatgcaggagtcctctggtacctttaacttgttatctggcttacaattgccaaaatattaatgggatttctttgaatgtgagaatggaggtacaaagacttggggcatcataagttgtagaatgtgaaatagaaaatgttaacctggaaagaattccaaatgaagcctacttgagaattcatatgattctgctgataatttattaattcttccgaatatttcaaactatttgagtttgagagtgaaggctccatgtttcatttgtcatagctaattgtttttttccccttagtttttcctctgaattctttttttttttcccctagatttcttccattgcctgaagaatccctttgcttca

SEQ ID NO: 84388 - DNA, 651 bp, Citrus clementina
  Intron number 3 from transcript clementine0.9_031517m (loc us clementine0.9_031517m.g) derived from phytozome v7.0 (c hr-ID scaffold_23; pos 3799897 to 3800547 reverse strand)
gcaaaggtgatagctagtcacgtaatttagaagtctgttgcttttatctagcatgattttcattttctaatgcttccttggtctatcacttggatgaatgcttactatcatttgtattgtattttggattttgtttgctaagtgaatgaaggaagcttcttaatcttgatttgaatttctttatctttggtcatgtaataacagttggattttcaatatgtttttccagaaatttgacaaaaggcatagtgcctgattacttccaatttgaattcgttatttagctttttaccacctttttcctccttagcagtgatgaagcactaacttgtaagaagaaacctgtcttaatggtttctccaatgaaattcactagttacgcttggcttctgagcttacgattaaaattgttgctctaatgatttttccttacatcattggtgataactgctagcttcgtacacgttagtatgaagttggtatgctcagttaagctagtcatgttctgaatagtcttgccactgcagatggtgaactgtgtttgtgattgttgacaatagtggagtttttttttttcatattatctcctctcctctgctattgcaaacatttgcaggttggagataactactaccagccagatctgaagaa

SEQ ID NO: 84389 - DNA, 606 bp, Citrus clementina
  Intron number 1 from transcript clementine0.9_031517m (loc us clementine0.9_031517m.g) derived from phytozome v7.0 (c hr-ID scaffold_23; pos 3800689 to 3801294 reverse strand)
gtgaaggagtttggaagaggatctgctagtgctcagtttagcaaagagactaacaatctctacaaatcttaacactttcaagcgctgtaatcacatgttctgtttataaatttggtgggagaaaaattgaatgctctacttttgtttttggtcggttttgtgggaataggggaaaaaaaaattaagcttgtaagtgggtggtgtttggttgcttaggttattgctgaactgctttgcttgttgaggaaatttgatttgagcttcttcttgtatgctaaagaatagatgaagatcttagtttttgaattttgacattttattattatgtttatgtgaaatgatttttttggattcgatgattccttactgtttgataccctagaaaatgaaccttggatgctgattgttttgagtccaaagatagtgttattaagttcttacagtttttggcttaagtagaatttgaagtttggcctctgattagtttagaagtttcaattgcatttcttaattgagtctagagcttggttaactagtctgcttgagatctcattttaaaaaaaaaaaatagtctgcttgagagtcttacagtgtggttctgtgtta

SEQ ID NO: 84390 - DNA, 576 bp, Citrus clementina
  Intron number 2 from transcript clementine0.9_015450m (loc us clementine0.9_015450m.g) derived from phytozome v7.0 (c hr-ID scaffold_10; pos 820888 to 821463)
gatcggtttctgtactctcgtcggttgccggtaagtgcatgtcgttccaagtttcttagctggaccgcagagcggattaccgggataattaataacgatcgcgggaagtgattaattaattttgactattgaggtacttgtttttgacttttgaaaacaaagaaaatgacacaagtgaattgactaatcaatttatggattacggtgttgtttacgcgagtaattaaacacccttttttcttttttgtccttcttgaattaactttgtagacaaaaactatttttattttaaatgaactttaatcgagtgtatactatttattatgtctttataaacattgtagctaatgctttgataaactttttaccttttatttaacgttaccatttattgcttttattaacttttttatattctttgtcagcacgtgaaattcacgtgggaataacattttcaactacattgttacaaattagaggcggcttgaaagttgaaacctaacataatttgtaatgattattttttttattattattgtaattgatttgctaattgaaactcttttcaggataaca

SEQ ID NO: 84391 - DNA, 783 bp, Citrus clementina
  Intron number 2 from transcript clementine0.9_010048m (loc us clementine0.9_010048m.g) derived from phytozome v7.0 (c hr-ID scaffold_23; pos 3777563 to 3778345 reverse strand)
caaaaattcttcaagagcaccgtgaggagttaaaggtttgttgctttattcacacatgtcatcttctactcgggaaactaggttatgggtatagtttataaacatatgttgtatgttatgcaacaacagtaactagataaacaatggtatattggtaattttgtgtagactataatggctaattcagtgaattctgtattttcctattagattgttctaataattatttcaaaagctgatatcaataatagtcaagaaaaggggatgccatttagaaagccaattatcgagccatgctagtgatatttcaagaataaagatgtttgatgcttctcccaatggagtgtatggattttagactattgttagtgggttgagtcaagctaatcttcacgataatgttgaggaaacatgtactcttcctcgtataggtcaagttttgaaagtgccaatctgaaacattgcctgtaaatggagttgagtgcttcaattaaaacttttacacctatagtgtgagtaaatacaagtataaaaaaatctcaagtttatgtttcagcttcctcttctcaaatgataatttctgaacaattattagttttacattttttattggtattagtattaccttcgttatcattttgagtaagaatgagtggcatttaacttattgaagataagttcttcataatactcacacacagagacttgtgtatgcctgagattgatctttttttgcttgtttcactagggtacagttgttctggttttccaaccagccgaaga

SEQ ID NO: 84392 - DNA, 658 bp, Citrus clementina
  Intron number 2 from transcript clementine0.9_000382m (loc us clementine0.9_000353m.g) derived from phytozome v7.0 (c hr-ID scaffold_10; pos 631388 to 632045)
atttcttcacgaggagaaccgtgagtttatatatttatttttacgctttgaattttgaattttttgattattgcagttcatttggttaatcatgggattaagctctgtaatcaaaacattagtctcttcctgctaaaatacttcggttgttgcatgaatttgatgagtgtttgtgttgaatttacttggtggaattttttgggctttaatttttaatttatttttttcttttaatgtttgacttgttaagatgatcaggtttttcttcgattagattcctcacagaaagagagacatcaacagtagtaattattcttttgttttcggttacatcaataatctatctctttgcaggaacatactttgctaatatgagatattgtactgatttttgtttggaaatctataatttgatattgatctagttgaaagtgtttctgaatttcgcaaaagcagcaatgatctctctgaagtggaaggatataatttgggataaagttctaaccatccacccacccccccccccccccctccaaaaaaaggaagatctaggtttactgactgtgctttatgaattttaaaaatttcttaactaatctattatgcatttttggataatgaagctctgggcagacccaagtggtgggaggaggaggag

SEQ ID NO: 84393 - DNA, 311 bp, Citrus clementina
  Intron number 1 from transcript clementine0.9_007971m (loc us clementine0.9_007971m.g) derived from phytozome v7.0 (c hr-ID scaffold_1; pos 9771718 to 9772028 reverse strand)
ctattggtaagtaattgaatcagttaaattaatgcttttttaatacattttcggttttttaagacaaataataaatatagtagaaaaggatatgattggttagtctaaagaaagatattgctctaaatagaagagttaagtttgtagcccacagcaaaatttgcttttttgaacagaaatagcatgttcagtattgtgaaataaaagctaatttaacaaacttgtttaccttaaattatttgatttttaatgtgtgccgtagatctagtacgtataatgttgtgttttatggcaaacaggagggagtagaa

SEQ ID NO: 84394 - DNA, 599 bp, Citrus clementina
  Intron number 4 from transcript clementine0.9_021256m (loc us clementine0.9_021219m.g) derived from phytozome v7.0 (c hr-ID scaffold_53; pos 475337 to 475935)
ctttgacggtttgtttgattcatctggctttcttttattagtttcgctaagatgtttctattttcttattaaaaaaaaagatgtttctattttcttattaaaaaaaaagatgtttctattttcatatatatataagagagagagagagagagatttgtcagaattggatctagggaaaatggtttaagactggaatggaataaaagttgaacccagttgcaaattcaagttcatttgcgtgaactattgtttgcctgaatgcattccttgttaattttcttgtatatgcacctaggaagcaattcaaggatgtaaattatcatgtaataagtttaattttttatcttttcctttatgctttgttgcaaatatgggttttacaaatttgtgactaatggtgtgaaagtgttattctttttgcttctaatttgtaaattgtaatcatagtatttctgtgatggtagcttactaaaaactttatactgtttgatcgctatcttattagttttaggtttaactgctagtcttcagtcatatccttactcgaggaatgtttgatccacgtgcaataggcatcagctgatcaaaggtcaaggtta

SEQ ID NO: 84395 - DNA, 311 bp, Citrus clementina
  Intron number 1 from transcript clementine0.9_020560m (loc us clementine0.9_020560m.g) derived from phytozome v7.0 (c hr-ID scaffold_20; pos 3990216 to 3990526 reverse strand)
tagagtaaaatttggtaacgaaaagttctaatttttgtttggttactttgaatatgatttgattgcaatacgagtaatttaattatgattaatatatctacttgtgaactctgtaaacgtttagtgaaatagaatagtacaattatgatgtgggatttggaaaatgttgaaaagtgtgtgtgttatatcatggtgattgaagaatttagtttttgttctgaagttctttttttagcttttggtgttaatagactgttcttaataaccatctttgaatgtgccgtagcattgctgtattgtacgtggtatag

SEQ ID NO: 84396 - DNA, 742 bp, Citrus clementina
  Intron number 1 from transcript clementine0.9_017643m (loc us clementine0.9_017647m.g) derived from phytozome v7.0 (c hr-ID scaffold_1; pos 6192400 to 6193141)
acaatattgcagtgaaaaagttacattaccaggtaagcaaaatggtccaattatatactttctctcctctgggaatttcccaatgaaccaatactggatttctagattgtttcttgcagtccatgattgtcagatgttactctattttaggttgaagtactgattatgttcattctttggatgacatgcatatagttttgtatttttcagtgtttctagtataggctgctttaaattctagtcagaaacagtactgggtaatcaaaagttcattattttgattcttgcttgagacatacaagtttctcacaacagtttttctctgttctgtgcttaatttacaatcttggttataaatatgagacatatttcccaaatgggttttttcagcaattggcaagtttctcaagaatatagcacattttggaatcgattccttaattgggattgtaaattttgtgaatccgctccttacctgttggagatataaggtgcttgggattaggttagctcctttaaagtattctgctacctgacagaatttaatttgccttgagatctttgaagagcaagaatagtgttactcttgaaaggcaaatgataaatgaaactgactttgctactgagttctgctctatcttgatctttggcaactggtttctccattctccgttcaaagacattaacattgctgttgttctgccaagtgctaggctggctgcttgatttttgaaagtgtttg

SEQ ID NO: 84397 - DNA, 707 bp, Citrus clementina
  Intron number 1 from transcript clementine0.9_034957m (loc us clementine0.9_034957m.g) derived from phytozome v7.0 (c hr-ID scaffold_1; pos 12841657 to 12842363)
ggcgacaaacttgccaaactctctttcactcgtttcaataaaggcctgttcctcgattccctcaaagtaaaccgttattcgtctactcgcgacttattttccttctttccctgtgtattctatacttgtattgtgcgagatgtgaaggcgagtgtctgcatcatgcattttgtaaagttgtttccgaaggactgttttgtattatgagaacgggaacttgaattttgtatgtcaagatttgagaaagacagttttagttatgtcagcgcgtctagaactacttctttttttagttatgtcagcgcgtctagaactacttcttatttcatttcttaagtactgaaaaactttttaagccgtttgtttttctaatttgaatatgtttttgaaatgaattcagcgttttctaaatcttgttttcaattatagtttggactgcattttctatcttatgttaaattggttaaataggagtttcagatatggcatatagttgtcttacaattttgtttgattgttatgtcaagcatgtatgggatgtgtgtgtgtgtgtgtttgtttatttatttatttattttttactttataaatcgttattagggatgtgctttctttgatgagaagatgattaacagttcttactaaaaaaattgcaatatgatttttttttttaatttacgtgatgttttctttgcagcaagtcgaaa

SEQ ID NO: 84398 - DNA, 384 bp, Citrus clementina
  Intron number 1 from transcript clementine0.9_010970m (loc us clementine0.9_010970m.g) derived from phytozome v7.0 (c hr-ID scaffold_33; pos 2312300 to 2312683 reverse strand)
aagacgatatcgctcttctcaaaacctatgtaccgtctattttctttctaaggcttttttttttttctgtctttgatctagttgtgaaattagcgtttttgtcttcatttggaacttggaagctaattatagtagattttgcttgtgttggtgttttactgcgatggggtttcggtaattgggtgttaatttttgtgggtttgttgaaaagattaaagtttggacctaatgagattgttttgagtgcggggatgtaatgtaattgataaatttgtacttggaattaatatttgattatggattagctgaggctttgtttcttaacgcggaagtttgtatttttatgcagggtttaggaccttattctactagcattaagaaagc

SEQ ID NO: 84399 - DNA, 867 bp, Citrus clementina; identical to SEQ ID NO: 80504
  Intron number 1 from transcript clementine0.9_014302m (loc us clementine0.9_012310m.g) derived from phytozome v7.0 (c hr-ID scaffold_1; pos 12303629 to 12304495)

SEQ ID NO: 84400 - DNA, 768 bp, Citrus clementina
  Intron number 2 from transcript clementine0.9_014302m (loc us clementine0.9_012310m.g) derived from phytozome v7.0 (c hr-ID scaffold_1; pos 12305445 to 12306212)
tcttctgtgacggtgagcttgaaaggtatgcattattatcttttgcaaatcttgatgtttgaacccaattattgcatcgttgcttttcttctattgtttggtcttttggtgattggactacataagcaactttgccggatttggataaaaaaatgcttatagcaatccatcctgttcattcttcttgtttgatttctttcccttttttcttttgtatgttaattatttcacaaatataaacgaaactttgctgactttggtgtgagcgggattcaaactccttacctattgtaccttcccaagaatattatgttcaatcaccataaagtattttgttattgtggtggtgaaagacaacagactcttctgcaatagagttgctatctttggcaagttttgaacctgggattgaattttaggagggaataaaatttagatgatttctccataacactgtgtttaacccatatgaatgtgctaggtatagagtttttaagcatcagttttttaaatttattacctaaaaggagcaacaaatgagttaacctgtctttgttgttgaagttaaaacctataatattttatgctataaaatagggaggtcatttctgtccactcaaggtcctttcttcatgtttgcaaattttgcttactaccacaactatttcccttttttgtctgtttatatgaaatcatttatttaactattacttctccacactcattccgtattcatccttttctgcagattggcatctgatatcgaca

SEQ ID NO: 84401 - DNA, 746 bp, Citrus clementina
  Intron number 1 from transcript clementine0.9_007096m (loc us clementine0.9_005958m.g) derived from phytozome v7.0 (c hr-ID scaffold_20; pos 521521 to 522266 reverse strand)
gctccaagcaagttcaattctaccgtaattttctatctctcgcgctctgttggttaatttcccatttttattgactttgttgattctgttgacatgattcggttgactcttgatttgtttgtcttgtttgggaatttttccaaatttaagtgaaattttgatttcaatttcctttattcgtaattattgtctacatgcactaagctaatctggcaatgagttaattgtcaagaaaattacttgaaattggcaaactataggttgtcatttgatgttatttagagaaatttcagttttggcatcaaggctcaatctataattttgattaagtctgcacacatttcattgaatcatgctagtgtgcgttgatcatctgtaattttttaaggaatttgatgggatgtcattagaatgagttaaatagattactgaattcatcatggatgaaatacggttagaattacgtagggaggtaaattatgcatttatagattgttcttttttttttttaattttagctgaatgtggaacacatattatgatcttgattggtggcgttcattcacgtgccagttgtttggttggaagatttgttggcggattccttactgtttatggatcttactattaactgtcgtggcatatttaaatggtttaaattgtgaagtacaataaactacacttctcattgaagaagtcaaatgacttacgaaattaattttttcattgctaggattcctttggac

SEQ ID NO: 84402 - DNA, 317 bp, Citrus clementina
  Intron number 1 from transcript clementine0.9_034724m (loc us clementine0.9_034724m.g) derived from phytozome v7.0 (c hr-ID scaffold_27; pos 2695760 to 2696076)
ctcgtgagtgacttagcctccaagcttcgaaaacggtcagtttttagtatcttctgtatacattattgctttttggaagttcttttgtgaaagtgcttcttaaaaaacttattttgatagtttgaagcgcgttttagtttttacataacaccaacgggagttcaattttttctgtgttatatgagcattgtgagtaataacttttcatggaaatttatttctgtgtgttgtttatggaatttaattacattttagtatataagattttaccccttattcgaatttaattcactctggcagaagagttcaaggttcat

SEQ ID NO: 84403 - DNA, 647 bp, Citrus clementina
  Intron number 2 from transcript clementine0.9_035135m (loc us clementine0.9_035135m.g) derived from phytozome v7.0 (c hr-ID scaffold_127; pos 68814 to 69460 reverse strand)
aaacacgttggctgaaaagccttacgcgtttgcaagtgggagtcggcttggacacttgcaacgcttaatttacaattgttggtgtcaacaatccattacgaacacacacacacatctatatagtgatcctccaatgaaggagccctcattttaataaaatgaggaagcactaatttgaagatgaccccatatatatgtgtgtatatatagagtgtttatttgtgtggcctaacaaaaccaagcaaataaatttgcaggcactcctgtggaagtggaacttgttccttccattcagaccaacggtaatcaaaatgtggatggagacatggagaaccttatcgtgacatcaaaaatccactcaaaaacatccacacgttttcgatctgctaagaaaatcactacgacattcggtctgtaaaactgttatatactaagtcttcttgaatttatgattctgaattgaaaggatttcgtttgtttatacttatgacaggtgcaacgtggcataaatcgtattggatgctctggaatgccctcatgcgcctaggtaagtcttgagaggctgtgttcaattaaaatatagttgtttgaaattaatttatttatctcctttttattgatcaaaagttatctgtcaaaagttatac

SEQ ID NO: 84404 - DNA, 612 bp, Citrus clementina
  Intron number 2 from transcript clementine0.9_024428m (loc us clementine0.9_023651m.g) derived from phytozome v7.0 (c hr-ID scaffold_49; pos 602132 to 602743 reverse strand)
caggaatcggtctctgaataggcgaaaatccggaggttcgtttatttcagtttctttgttaatgttttttgtgatctgaagtgatgtcgtttcctagaattgtaaattgtttaaaaggcgatgctagaactgtgagctcggtgatattggaaaaattgaaatcttagaattgtgttaatgtgtaatatggacccgggaaggtggggggggaggggggaagaaactttgtgatgtgttgcttcagattttgaattgaattgaataagaaccaaaaagaaaaatatgatgttgtgatggatcttgtgtttttatcttcttattttgtcttagttgcatgtgtaatcatcatgatccggcctgtaaatacttttgtctttgggttagctactgaagtattatcattgtgtttaccagtgggaacttgaaagacgtttcattcatggacacgggctacatgcatgtttgttttcatgttaagtataaggttaatagtttaagggagtgagacaataattgttctgttaggtttatgatgtattactcgcatacacatgccattttttcataatggactgatttaactaaactctgcagatcggtcgagcaatcttt

SEQ ID NO: 84405 - DNA, 960 bp, Citrus clementina
  Intron number 1 from transcript clementine0.9_032693m (loc us clementine0.9_032693m.g) derived from phytozome v7.0 (c hr-ID scaffold_10; pos 1714473 to 1715432 reverse strand)
tttctccgacgggcgtctgattattgattttataggtactcaaatcttacttccaagttctttttttcttttttcatttcatgttttaactctccgtcctcagggtaacatgcatggttaaatcaaatattgttggctagcttgaaccttggatctttaataatttctcacgcaaacgataattgttgcacgaaaattctcgcaagaataaaaaaatttaaaaaaaaaattctaccactcttttaattttcaaaatattcgagaggcatagatctcaagaacattggtccacgaacggtgcaagttttgacggtcatgaaaatagctagcgacacaacagatttggattattgttctgtaatttttgtgaaatcaattattatattttaaacagtgcagcacgtgatgtgataccaataattaaaaatgagaaacatgcataatgatgatttgactttttatcacccagatattaacattgggtagctataatttaaatattatattattaaaatatttaataaatactaattgttataatttaaaaattaagttgttttgattcattatgggtatgatgaaaaatttataatttttttagttaaaattattattcaaaagtcacatttactatatattattaactgtttttataaatttaattttttaaaataattatatcttaaaagttacaatacctcacaatcaaatagggtcaacgttttttttttttacgttaaattggaatctttatcaacaaaagttaacttgaatagttgcacgtgagtttttgccggacataattcttatcatcgagggtgctgcaatctaattaaatttagtttaactgaatctattttattgttaattagattataatttgtatctttgaaaaaaaaaaagaaattagaatttgattttacagctcaaggattgggactcccttatcttagtccatat

SEQ ID NO: 84406 - DNA, 724 bp, Citrus clementina
  Intron number 1 from transcript clementine0.9_008003m (loc us clementine0.9_005597m.g) derived from phytozome v7.0 (c hr-ID scaffold_27; pos 2764081 to 2764804)
gagagcctgctcctttgttgttggtacaatatttgaatttcttcactctgtttaatcctatatgtgtatgagttgttattatttctattcatggccgttcaggattcagctagccgttttgctagatcatttcttttattactgttttgtctcgccttgcaacagcatatgcctttgttccatcttccatgtttctttggaacccttttcctttttcctcctcctcgtatgatctcctggtgtacatgagcgagcttcgaacttcagatttcttgtactacttcaagagatttttactagtttcgcgatattgcggtgccaagtagagacacatgggcaaaacacgtgcctaaaagacaaagtagaaaacaccaagatgcagctttgctaaatctatagctacgcttgtatttatcatctttaaactttttttaaagtaaatgtttaaacacgaaaagtaagccttaatcagtacatagctccataacatggagttgtcaaagaccccatgagtggtcaccaaaaagcggtcctttcccatccatcccaccaaatcaaatcacgacttgtagtcacattactttttagcagatatatatatattttttttttgataagaaagatttcactttttagcagatatttaacaaaagtgttcagttcccaactgttttctgaatcttttgttggctacttgttggcttgttgtcattatttgcagtat

SEQ ID NO: 84407 - DNA, 544 bp, Citrus clementina
  Intron number 2 from transcript clementine0.9_008003m (loc us clementine0.9_005597m.g) derived from phytozome v7.0 (c hr-ID scaffold_27; pos 2765020 to 2765563)
gtatgtatacttatttattatggtaaacgacacactgtcatgtgatattatattatctaattaatttattggatcatttaggttctttttcttatatgcaatcatctgatgatatttaatcagtaagcaaatgcaatcacatgatttgcaagttcaacatcatatatcaaaatttcaaatattgaaaatatccaatactgaaagataagatcaaataattttgtaaggtcaaacaagtgcctgcatgaatgaccacttgactaggtacctaatatctgtttttagaaggcaatacaatgtcgcattgtcggtgtctgatataaattaatgataacaccaggataaatgacaaaatttgatcccaattttcaagatcggggcacatggttttagatgtcttgctctttgttgacttgttaaagataggaagatcagacaatcagaccaagtgggcgtattgtatataaagacatatatataaattttgtctgtatttttttaatgattttttaattttatattttcttttttctaattacagggg

SEQ ID NO: 84408 - DNA, 512 bp, Citrus clementina
  Intron number 2 from transcript clementine0.9_021432m (loc us clementine0.9_021432m.g) derived from phytozome v7.0 (c hr-ID scaffold_1; pos 5210735 to 5211246 reverse strand)
tgatcactcgttcctcccctgcataattccagactgtaagctctttcttgtgattattgtactaaatttttggattccttttctatatataggaagtgattttcccatggcaaaagggtagaaggcaagcatggggtgatgaacattaacaaaaagattattttgagaataaacataagaaggaagaaaaaaaagaaaacaccaaacaaaatgttatttatgacacatatgcaagtgctcactcgcaaatagagaacctatatgaaaggcaatatctttgtcgaacatcaaatcatccctgccaccattatcaactgtaaacaatgtcataaacaaaaattaaaccagttcagatgatgttcttctttaataaattaccccttggaagttttatagtctgattttaacagaacgaaaagcttacgggcctattacagagatgaaagcttttagttttagcaacgaggtaacgttggtttgtttctttttattttgtccaggtactcttcact

SEQ ID NO: 84409 - DNA, 682 bp, Citrus clementina
  Intron number 1 from transcript clementine0.9_028187m (loc us clementine0.9_028187m.g) derived from phytozome v7.0 (c hr-ID scaffold_27; pos 730315 to 730996)
cagaaacatattgtaagagagattgtaacatttttaatctttggtttgatattctggacaaaaacggtttgccgtttatggagaaaacggctaaccgtttaactctagagagcatgttttatggtctagagaaaacggctccccggttattgagaaaacggttaaccgtttatgtacagagagcaacgtatttgacattctagaataaaacggctcaccgtttattgagaaaacggctaaccgtttatttccagaaaggcgtcaactagaaacggttgacaagcttgaaaatttcaagtgttaatcgttgcaaattcaaaccaaaagagttttttaaagaagtaccatttcgaatggttgcattcttttgaattaacatcttcttcataaaagatatatacatattttggaaatgattatcagattttgcaggtttcatatatgttctggaaatacaatcttatttgctagagatttgtattcaggatttgatatatcttgggggtaatttgccattaatactctatagcaaaccaagattggagagggcaaataaaaccttaaaggaaagtgtgcaaacacgtctcaaatcctaagaaattattctttgttctttgcctccatattcttattttttattaacacatattaattatgacattatttaaggcagcttacaagt

SEQ ID NO: 84410 - DNA, 662 bp, Citrus clementina
  Intron number 2 from transcript clementine0.9_008391m (loc us clementine0.9_008391m.g) derived from phytozome v7.0 (c hr-ID scaffold_20; pos 1741480 to 1742141)
agggcttagctgctgctgctaagttgtccgaggaggttgtgtttttattttacagtttcctaatttgtattcctaggccaataatcttgttaaattgtttgagaaaatatttacctaactatttatttaaattgttatatattttagtaatggaaatttatcttaactatgactattaaactcactagttcaggttttgggtgatgtagtgttcagaatgcaaaaccgtagggacttttttggagtatttaaagaatgtgattatgttaggccaattcataggcttgatagaaaacttggaaaatgtttggtctaaaaaattaacatgtttagcttagaaaactattttcgatttatgcttcctatgtatccttggaccaatgcaaaatgatgactggtcttagagttctccctttcttggatttccttctgtaaggaagtgtaaatggagtttggaaataatttgataccctttatagtttgttgcactcaagtgttgctgctttctttgttgttactttctacagttgtgaagctgtacgaatgtgaattttctatgaaatcaaatgactcaaatattaatttctttttcttttcttttcttttttttcacttggggaaatgcaggctaaactcagagaggcagcgtcattggagaagca

SEQ ID NO: 84411 - DNA, 499 bp, Citrus clementina
  Intron number 1 from transcript clementine0.9_003624m (loc us clementine0.9_001776m.g) derived from phytozome v7.0 (c hr-ID scaffold_114; pos 266299 to 266797 reverse strand)
cttgtctcttctcatattgatactgtttctgcagggtatgctttctgcgcctctttaatttcctatcttttgttttagcaaattatttttatctctttgtcactgcagttctataacttctgtctataacgggatcttcttcttcggtgtgaaaatcttcagttaaaaaattgatcattgtagtttattatcgaggatgagttgtgagagttgtggatttccatgtgaaggaggtgcaaagtttgagatagggtagaaaaatcccaaatttgatttaaatacaaaaagcggttcagtaaataattaccctggtttgtcccatcctattaccatgaaaccttctttattcagatttggcaattttaattgtctcactgcatcttatcatttgctttgctttacccctcctccctcttcgattttgttattttgtacacttttcttgctaccttacgaagtgctttgcatcattcagggaaggggctggagattgtagttc

SEQ ID NO: 84412 - DNA, 632 bp, Citrus clementina
  Intron number 1 from transcript clementine0.9_015783m (loc us clementine0.9_015783m.g) derived from phytozome v7.0 (c hr-ID scaffold_1; pos 9532707 to 9533338 reverse strand)
ctcggccgagtcaaaatcaggccgactcagtgaaggtccgtaactgcttgttaagttttctgtgtttttatttcatgcactgaagaaagatttgtttttgggtccttttgtttacgcaagattagtactttcgcagatttggaaaagttctgtcggtgataagacttgcgctctaatggccattgtgaacgtgaacttatgttttattgataatgtatgcagcagagattttgcatctgtactttttatattagtattttaaaaatttgattcgcaaaatttttagttttgggaccactgccaagtttctgcaacaaatttgaagtatgcttctgtgagttttgtgtaaatcctagctgaatgtatgataatttctgtgacgcgtctgcttggttatggtctgctataggaagccattaattagttctgacttcggaattgagtttttcttaaagcaccttaatggtatattatttttgagtctgcatacttccctgagatcctgtgatggaccaacataacaatgacttactattttatacagttcgatcacattttttgttgatgttgcattgtgttaaaagctttgaatttcagggaccaaactcaaccttctggagctccatctagcc

SEQ ID NO: 84413 - DNA, 712 bp, Citrus clementina
  Intron number 1 from transcript clementine0.9_005246m (loc us clementine0.9_005246m.g) derived from phytozome v7.0 (c hr-ID scaffold_89; pos 699834 to 700545 reverse strand)
ccaatatttctattcctggttgtgacaaaaatgtaagcctttttttcttacaattataggtctcttttttacttcattttcatttttatttttattttgtcttctgggtatcttttgttgttggtaaccttgtgaagttttgtctgcatttattatatttgtcattcttttaccgattttgacaacgtgggcattcgcgaggccaggttccatgttttttaattattataattaattaatttttttttttaatttgggtttgggggatagtttagagttcaatttctggtactaagctcgaagaaagcttggtttctgttttctttacaggatggtgtgatataaaaaggacgttgagtttcatctcatgagcaaagacaatttagtttttgctcctatggttttcaaactgtattggaggttggatttcctgagtttgaaaattaaatattgcattatttgtttaaaattaaatcattttcctaagcaattagctgcttttttatcgttaaatatgaataaggtgtaattaagtcatggtctttgtaagacagtaactgctagaccgtctctgtttctccacccctcttgtcttttctttttggctctttgattgagttgaacttgggttatgtggtacatcatgcgcatataagctgtctactccattatttttgcagaatctgaacttaatggtgtttgaattgtgtag

SEQ ID NO: 84414 - DNA, 716 bp, Citrus clementina
  Intron number 1 from transcript clementine0.9_021361m (loc us clementine0.9_021361m.g) derived from phytozome v7.0 (c hr-ID scaffold_20; pos 836837 to 837552 reverse strand)
tcagccgtagggtgctttagcttctgtcaccgccggtaatcttatctcagcctgtttctctctgtttaatgttgtttattatgcaatttacagaattgaattcaatgtttcgcatatgtattagatttatattaacaataaaattaatcctaaaacaggttttatcttgtagtatgtaaatttcatgtaaatttttcagctttacgattgtcatatatttaaagatctaaattttgtttcgagattatatgacttttagattgttttgttgcattttcatttttgttttgttttaatttttttgctttgtgtataggatatccattatgcaaggtaaggttcattatcgattgattagatacatcctttttaataagatcatctcattttgttaaactttgcttgaataaatatctaaatagtgtcgaaagaagtttactgggaaaagaatttgttaagccacccaaatacaatttctcaccatgtctggctttgtatgatttaatcagtggacatggattttgatcttgtgttgctttgtttctggcaggtggctaatttaacttcatattaaactttctcaattattagttgaattatttagatttgaagcatcaagttcttaacaaacaccattttaataattgatcaaacgataaatcttcaaggaccaagtattatgaccacggtgataatgtttctgacatgcaggtaac

SEQ ID NO: 84415 - DNA, 880 bp, Citrus clementina
  Intron number 1 from transcript clementine0.9_015001m (loc us clementine0.9_015001m.g) derived from phytozome v7.0 (c hr-ID scaffold_1; pos 9400016 to 9400895 reverse strand)
aagaagcttgattctatacctcatttcatatccaggcatgtctctttctttctctttagtcatttctacgtgtttggttgctgagaaagtaagagaaagtttaaaagtctttgaattttaatgtcctgcccactgcacgtaaaaagtaggaatacccaaacgaagttaacaagagtttttttttttgttctctaatgcattcattaatttcttaaatacccatttgaaaattttaatctgctagtgaaatgttgattcgacgtaaaactgagttgtttgatgaaaccgcttgttcttttttagttattatcagattttttattggcagtttttgattgtgatatggtagctttaggataaacagcctctgatctctttgattgtgaactaagattttgtaagaaaatttggcttccaaatgattcattaaagttctttattaaattgacaaatttctttggtttttcgtttgtgattatgaattgtgtgtcttgctgtcatatgggattaatgagtctatgaagtgccgttatgctaagcttgtttggtgtgaactgaactgtaagtggctggaagaatgattggtccttatgttttgagtcagtttggcttttgagaaattataagttgtcacctcatcttagccagatggttttattagatttagatttgttttttcttttcctccgatccttaatagtgaagaattaggtttttgaagtcttgaattttccatttaagctttttatgtcatatgcaattgagttgtttggctagagagattgaagaatctatgacattgtgagtgaaacatatgatgttaaacccagtttcattaaattgattctgttttttgttttcaggtcataggcaagtgctt

SEQ ID NO: 84416 - DNA, 297 bp, Citrus clementina
  Intron number 1 from transcript clementine0.9_002809m (loc us clementine0.9_002809m.g) derived from phytozome v7.0 (c hr-ID scaffold_10; pos 3517718 to 3518014)
aagattggtcttggagcaaattctgcaagagcaaggtttttttttttttttttaattgttttaaattttttacactttaatctagtcttcttgatattttaattatagtggtagcccatctctaacttaaattttttttattggatttagctcaaatttgttttttattttgatccggtttcagatgattagtagttgtgggtaatattttccactataatttgcagattattgtttatagattttatgtgatttctgctaggctctggttctgctccttctctttgtgagttgctc

SEQ ID NO: 84417 - DNA, 518 bp, Citrus clementina
  Intron number 2 from transcript clementine0.9_022293m (loc us clementine0.9_022293m.g) derived from phytozome v7.0 (c hr-ID scaffold_1; pos 6013297 to 6013814 reverse strand)
ccaaggaggtttggaacttgttggcatgttcttattcatcatatgcttcttgaaaactagctgagccaagcactgtgttatggctgatatatggttcttgtatggtgtatcatctaaccacagaaattttgtttttgtccattctacgtagcttttatgacagtacgtaattggcatgaaagaaaccaaatttttactgccttatgtatgggatgcaaatggtgaaaatatgatacaacttttgacagaagcttaaatatagtcctgaatttctatcttctatattactgctatatattacaaatcctcgcttggtttttcaccattttgtggttatcatcaagagtcaaagccaggacttcgacgcgaaagtgtcattctattatgattaggctggcatttcactatggttggtgtaattagtattcatgctgtgtgattggatgtgaaagatcttagcatttgcatctctactctttttaggcaaggagggttacctgccgcagataccagggaaa

SEQ ID NO: 84418 - DNA, 832 bp, Citrus clementina
  Intron number 3 from transcript clementine0.9_014134m (loc us clementine0.9_013592m.g) derived from phytozome v7.0 (c hr-ID scaffold_1; pos 2814786 to 2815617)
agatatagcattctttggacaagcaacaacattatgtgagttttctttttttaacaaacttgtttctaagggtacaataccctaccgtctgggtaatatactcgacttaattatttaataatatcgaaaaaaatatgacataacacaacttaattatttgatagtatcgagattagagggtataatacctgaggaagccgttgtcgactttttttattattattatgacatatttattcttggatgtttgctttgcttgctttttttttttttttttttgactttaaatgtgagtttgacaaattaaagagagagagagagaggttggcgtttgcgtgtggaatgtgttaaatgcatgacattaaaacttgtggaccaaggattacacgcctaaatcaatatcaatttttagcctgattttaaggccaacttttcctcttgttttgagatttcccattaatgaggcctaaatttttgtttcttttttttttttttcaaactttaagaagttttctttgggaagcaatctttggtcaatttagaaaatactgttgtatattgaataaattaataaaaattcattgcatgatgcaagatcaagagttgggaccacactcaaatggaaattgcattttataaggttctgattatggtcaggctgccaaaataaagtgggtttctaaatcttctagattctaaattagtctgccatgaacaaatttatgattttacaccccaaaaaaaaaaaaaaagatatctatgagattaagtataaaatgccaaaacaacccttgacttttttttctttttatttgttggttcaacagattct

SEQ ID NO: 84419 - DNA, 699 bp, Citrus clementina; identical to SEQ ID NO: 80505
  Intron number 2 from transcript clementine0.9_024723m (loc us clementine0.9_024723m.g) derived from phytozome v7.0 (c hr-ID scaffold_63; pos 689995 to 690693 reverse strand)

SEQ ID NO: 84420 - DNA, 587 bp, Citrus clementina
  Intron number 1 from transcript clementine0.9_009906m (loc us clementine0.9_009906m.g) derived from phytozome v7.0 (c hr-ID scaffold_1; pos 8871390 to 8871976)
gctcccttccacttccactttttatcgcaagcgaggtcttctttctcaatctatagagctttttattatataagaagcgcttttttatgatgctaaaagcactttcaagtgcagtcttcataatgcaatgatacgaatggatattgtgaaaaatattattaaaaaccgtagagaaccttaaaaaataatattttacgtttctgcttttagaagcaaagatttattatcttagatactaacgaagaattgaatttggcttgttgtttgaaagaatgaaagtacttttgattaatttggaaagtttgagaattactttgcataaattatctttggaaattgaatggtaatagattcatgggttgaatttcatgagcttggttgagtgtttaagttatatggtttgtaagtttatttgttgagaagaaactgtcaagctaataagtgcagaagaatagatgtcgaactgagtgtgctctttggtcattctgtgtcttttattctttatgtagttttaaaatatttggtgctttgtgtcactgcattgtgattctctgatattcttcggtttgcagtgactaaagacttaa

SEQ ID NO: 84421 - DNA, 676 bp, Citrus clementina
  Intron number 4 from transcript clementine0.9_025194m (loc us clementine0.9_025175m.g) derived from phytozome v7.0 (c hr-ID scaffold_27; pos 12317 to 12992)
caaagaagtttgagcccaagtacaggctaatcagggtaattaattaatttaatgcttgtttatttatggtatctctaattatattctatacttaaatttaatttatctcttagtctactatgtttcacttaaatgatcaacgaatttacttttttttttaatatcagataatttataggctttgaaaataagattatgattatctcatgatttgatcttctcttgagcaaaaatacacatgggtaattggtagttaataaataaagaaaataaagaatttaaattatatccatacactatcacttaaatacacatgacacaagatcattaaaagctcaaatcaggagaggatctttatccttgaaaatattatgtattttcacttgtttgatttgttgaaaatgtttcaatggagttaaacttaaaattaattgagtggctttcagacagtttaaaagaaaaaaaaatctcaaattgttaaaaattaaaataaaaacaaaggcttgggaatgcaattacgttaaatatttggagaactttgtcgccctaatgatcttactagacttgaatatgaattagtggggctcaatgtagtattcggatactaaatggtttaataccctgaaaataaaataaaaacgtaccgttgattcataattgtttgatggatgataga

SEQ ID NO: 84422 - DNA, 738 bp, Citrus clementina
  Intron number 2 from transcript clementine0.9_022650m (loc us clementine0.9_022650m.g) derived from phytozome v7.0 (c hr-ID scaffold_1; pos 9507428 to 9508165 reverse strand)
ttgctcgtagagtttggaaagattactacgccaaggtaattggttcatttaaaacaaagaaaattgaatttagagatttttagaaagttgaattttttggtgattaaattttgtaaatagggtggtagaatcaaataatgtcaatgagcgtacggagttgatttgtttttggatatttggaattgtacgtagtatctagttaattttattcagatttatctcgttttgttgatggaggaaatcaaatgaaaaagattaatattttgcatgataacgcattaccactaaattgaaaatataggtgttatggaaaatattttgtgaaaatgcaaagttgcttcgccggtagaatccgaaagatttaccaagatatttttttcaattgttgaatgaagtacatccttcgattttgttgcctccattaatcccagataatggtttatgtgattattctgattcatgggaggcaaagaacaaataaaaatgggagttcgctgatagtacctttttgtcttctaaaaggtgttctaatagtgcctcaccatacatatatttttggcttgccattgtgttgatatttatgtagattgattgaattaccggaagaagcattgggcaatgttcggtatattgatgcattatttgcagctactggtcatcctgtatctggaatattatatgtttatctgattttcttaagcatcatctgaataatgtataatattcttgtgaaggttg

SEQ ID NO: 84423 - DNA, 425 bp, Citrus clementina
  Intron number 1 from transcript clementine0.9_031927m (loc us clementine0.9_031927m.g) derived from phytozome v7.0 (c hr-ID scaffold_1; pos 11081003 to 11081427 reverse strand)
gctcgaaacaaaccttcaaggtatgtgcattcataatattgatatgcttcttaaattaaataccttttttctttttcttttggtggggggggggggggggggggttatgttttttcaccatttctttactcatcaacaggatgcgatcatgtgactaccttcacgttaataacaatttcaatcaaacaaatattgtaaaagaattaggatgaatgattgtgtattcttgcccattgtgatttaatttaattagcttgtagaagaacgaaattctgtgatgatacatgcagccgtacagaaaactagaaacactaatttgaagatctattgaaattgaattaagatacaacacgtttctgtatatattgttaggaattagtgactaattagaaatgtaaaattttcggtgaaattaaatgacagat

SEQ ID NO: 84424 - DNA, 487 bp, Citrus clementina; identical to SEQ ID NO: 84174
  Intron number 1 from transcript clementine0.9_028700m (loc us clementine0.9_028700m.g) derived from phytozome v7.0 (c hr-ID scaffold_1; pos 3405143 to 3405629 reverse strand)

SEQ ID NO: 84425 - DNA, 976 bp, Citrus clementina
  Intron number 1 from transcript clementine0.9_035377m (loc us clementine0.9_035377m.g) derived from phytozome v7.0 (c hr-ID scaffold_1; pos 1788494 to 1789469)
gatcgtacgccagagtgttggaagtaccccttgtttattaagaaatgcattttattgtaattgtagtacatgatatgttcccttttcaaatagctcgtccgataaccattaacatggtttcaaattgtttatctttctgcaggctccagctggactggtttccaatgtaatagtctattgattcaatcatcttgtttataggttggtcagaatagaacatttattgtctcttttctttcccctttcctctcctctaatttaacatttgaagaaataacctaaaatttttctgtatcccaatggaattgttggaattcagaaatcaaagaaataccgtcatgctttttctagcctctggccctctggcatctacggaccaggatgttttggtctctagctaaccatcgtgtgcgaagaacaatgactttaatatgggattgtagttctcttcggatcttctgctagtttttaaccacattatgactgttgaaaatctagtgatcgagatcattttgatgaatttaatattgatctttagctgatactttttcaggaaaattttctcatatgtttcctcaatatgacttaaatatataggccacagcttggttttgaagttagtctaaagccttccccttgattctaacaaattcactggggaaggtttcatatggattttgggggagctctatggccaattttaaaagttcaggggggatcaaatgaatttcaaaactgcatgggttatctatttcagtcagaggatagtggaattccctgaaatttatcctttttattaaattaatcttcctcctttcctctgtggacctttgctatgtgtgttattggcgtcgaaatgacgatgggaattcttgcttccccacttattgaaattaaatatatcttttctggcactagaaatttccacatgctgtgttttgttattgtgcagttgtgttatttcgttgtagggagg

SEQ ID NO: 84426 - DNA, 529 bp, Citrus clementina
  Intron number 1 from transcript clementine0.9_010918m (loc us clementine0.9_007233m.g) derived from phytozome v7.0 (c hr-ID scaffold_1; pos 8472115 to 8472643 reverse strand)
ctcatcaggtttaaattttggatctttttgctgtttttgatttttttatggtaattctagataaacatactagttggtttgctttgtgtttttcaaatgatatgaaagtttgaaactttggactgtttcattggctttgttatttttaattttttggttcatgtttacgtgtttatggttctgtctcataattgttatgaaaaatctgagctttggtttaaatggttagttttttaaccagaatttatgtgcttctcgatttaattttagtgttaatggcagttttctgcaattgctttaaaaaaatttagctttattgttggttgttggatcaatttcattttttgtaatttgtttcctctggccattgtatgagttttagaaggaagatcagccattcttttaaggtttgctgcttgtttggtcttgttggctcattcttcttggtaatgtaaatattgacatttttattttcctctatttaaatattagctttccttttggatgttcagagtgaattcattgcgga

SEQ ID NO: 84427 - DNA, 438 bp, Citrus clementina
  Intron number 2 from transcript clementine0.9_024334m (loc us clementine0.9_023936m.g) derived from phytozome v7.0 (c hr-ID scaffold_1; pos 12768553 to 12768990)
gcaccgaggttattttattttattttttctttgattttctgttgggcaatttgttctgaaatttaagctttagctttgtctgctgatttctgtttcaagattcattaatttacacattcctatcacactaatgaattcattagagaaaagcactagaatcaaggtggagcttaaaaggctaacagtccaacacaccgttgacttaaaaatttatttttctaagaactcaaaattttgattctgtatacaaattacctaggagatatcaactgcttcagcagttgctcattgaaaatgatagagtaatttcttactgagaataagatagacgtttttttccccccatttatatggctttggacaaggtcatatttgaccaccgaagaatgtgagttctggagttatattcatttttgttttcgtggtggcaggttacaa

SEQ ID NO: 84428 - DNA, 831 bp, Citrus clementina
  Intron number 2 from transcript clementine0.9_030845m (loc us clementine0.9_030845m.g) derived from phytozome v7.0 (c hr-ID scaffold_20; pos 1300547 to 1301377 reverse strand)
caaaaaggaccaacgatcgcgttggccaagaggttttaaattaagagaataggtatttgcttttctctaattacaagtgattaattgagtgaacttcctaaaatacttgcattacgcatcaataatagcttgagctaatagatgctttacatggttatctgcttgattatttaaattcaatgtaatagtagtttcagagccaaatttcattcgctaaatatatttagcaatgctccttagtatccagaaatcaagaatcatagccatatttaatgagatatagctcaacacaaagtttgcgtaaaatccacatgatgaccaatgaaaataagcaaaatgaaaataaaggtctaatgcagccatttctctccattcattgcctatggcattgcaaacgtaatagtttgggaattcaatctgtttgaccatcatgaaaatttaatggctagaagtttgtgaagagatcttcttccccccttcaattttattagtgcaatttcatgagctttttatgtgatgctaaatccttcaggcatacgtttttggtttagaagctgtaagctctagaaaaattatgaatggatagaatccagacctcaagatcccaacaggttactatttaattccttaaatattgttatttgctttttggagctagttattgagcgttatctccagagcaggcaggttgttaagtaaagtctttatttattcatttatttttttcccaatagccatattaaacttttccttcttctgttttggcagaatgctgatccctctctatctctcgcaggtggagaatcatactcggaaagctcaacttcaaga

SEQ ID NO: 84429 - DNA, 996 bp, Citrus clementina
  Intron number 4 from transcript clementine0.9_008617m (loc us clementine0.9_004240m.g) derived from phytozome v7.0 (c hr-ID scaffold_20; pos 3748550 to 3749545)
tggagccaacaacccagtgtctagaccgtggccaggtactctatctctattagataatttaaagtgtatgacataggatgcagttcagaatctcaggattcattactaaactcgaaatcacattcctcctgttcaaaggatttaagcccagactaagatttttcagttttgggaatattgatctttagaagtgcgtgctacttgagactggtgtatgcaatagataatcaaaaaggtcaaaatctgaaatttaagctatacaaatcattctttgttgggatctgtagttgaatgaaatagtgaaattatcgtttctttttatctttttctttttaataaattggaaaagctatatatatatatttatatggaaaagctgaaaaattggaaccattgaagtaattattcaacctaaaagatggtatattgcatcttcctttaccaagagagtttaatttttgcttgcagatggaatcttttaccctatcttcttccctaaaatatcttccttcccaacttttcttgaggaatccctccatttgtcttctacattgaggggggacgagctttgtgacaacttctgataactcttctgttgggccgaataagaaagtaaaaagaaaaatatgtttctcttactgaatacagttcatgaaacttgtggttagtgaacatcaatatttcagaacaaactagttttgtacaggattcatcaccacttcattaagttacatgtttgccatgggttgtacaaatctatagataggacttatctgaacttaagttgcatttttaccgtgtttcatatttcctaagaaggaatgacaatcatgcttgccgagatatcaccatctgataggtgtattataactttggaagtgcaccaaggtttcttattgtgtcccttttggtttatgccaaaaatatcctcattagcttatatttgacactaaagttggttaatcctttctgcagattagggattcaaaccgtgca

SEQ ID NO: 84430 - DNA, 656 bp, Citrus clementina
  Intron number 1 from transcript clementine0.9_026201m (loc us clementine0.9_024908m.g) derived from phytozome v7.0 (c hr-ID scaffold_101; pos 544668 to 545323)
gggtatgcaaatgttctttctctttgactcttaactcaactttcataatagaatggaatcagcttttggttacaaatctaggtttttatttaaaaaaaaaaaattagcacaagtttttgagggttttggtcggttttgatgttggtttcattctacttgtaaaattcccagatgctcaaaagccaacgaagacaaaagaaacaatatttataatttttttattttcttttctctttgatgctgggcataaattgtgtgactcattgtattatttgtaatgtgagaactgctttgaactcaaaacattaagcaaattttctggtgatatgcctctgacaaccaataaatgttagttgtaattagctgtaagctcatcaagctattgctgcatgtggggggtttagtgaattagattctgggtctggttagatatgaaggttgtgggtgttctgcccgaatgtttggtatcaatttggaactttcaatttgtttattagttggtcaaattttcagaaggtctttcacacggtgcatgtgagaagtgggaaggttactgatattctttatacggctagttcaagcttgcattttttggtcatataaatttatattggttttgatatgaagatcaattggcttgcaggaagacacgtggt

SEQ ID NO: 84431 - DNA, 1026 bp, Citrus clementina
  Intron number 1 from transcript clementine0.9_029849m (loc us clementine0.9_029849m.g) derived from phytozome v7.0 (c hr-ID scaffold_5; pos 688207 to 689232)
ggtcagaaagctgttaaggacaacaaattccccaggtacgtaattagttaaattaattacaacttcttgatttcatagattttgagttggtttttgatattgttaccttcatgcctagtataatatattcaagtacatcttagccttattactgctttaaggactctccaaaaagtgagatttcatttgataaagaaatcaatttatcttggttgcggggataagagcttagtgcaattgttcttttcagattagtgttagctccggatccatgtaagatatatgcaggagcccttgcttggttgccacataagtaaaggaattagattttaattagttctaatttagttctagggtttctcactctcccccgaatttcctttctgtacgaatcgttttggaagagaagaacttagacaggcaagagttctagatcacagtttcaactctctgtttcttttttgtacaacaaattagggcatattaggttttctcaaaatgtactctaaagactgtagtaaaaggtgtaatcaaattaatacactgactttcttagatgtccaaataagaaaatctgctaattagatcttgggtttctatgacactgcaatatcaatacacacacaagcacatatacgcagagagaagccccaggaatttgatttagatatccgaaaataaaaaatgaatcaactgaatttatcaatatagatctcacagttatttccatgtaacctaatctaatttgatatccacgttcagataggtaggttcagaatgaaacatacgactctctttccagtaaattcctccactctccatttccattttgatgcatctagaaattgaggtgccgagaattatattaagcacatacagctgttgtaattataaacatacaatacagatcatttaattatgtcatgatcagttaatgatagtttttagtgagagtaatgaaattcataatacgattattaaatttggtatgcagaagctactaccgttgtacacacgaagggtgca

SEQ ID NO: 84432 - DNA, 933 bp, Citrus clementina
  Intron number 1 from transcript clementine0.9_025821m (loc us clementine0.9_025821m.g) derived from phytozome v7.0 (c hr-ID scaffold_29; pos 1697162 to 1698094)
aaatcgattctccagaatcttcagaagccgcgcaagtagaattcagaaactcctccctaatgtttactttcacatttaattcaatttaatttttcaaataattttttttttcccttgctgtttggtgacgtgataacggaattacataagttcgacgtcaagaaaataattaaatggattctcttacataattgaatttttttttttttacatttaacgattcttttatttattggttgctgagaaaatgcaagaaaaggaaaagatatagtatttcgatgtcaagaaaatgaaatttgtcaatcaaatggcttcttgtttattttgtttttccttcatttctagctttgattgtggaactggtataggtacgttttaattgttttttaatctaaagattcatttagttactgtttgattccaaggaaatgttagaaaacaaagaaaccccaagaatattaaatttattagttaaatggctccttgtaggtttttctttcttttgctctagctttcaccgtggaactgctaaatgtattttagcgttctacttctttaatttaatgattctcttactatggtttggttgcctggggaagataggaaaataaagaaatctgacatcaagaaatgaaatttgttatttaaatggcttattgtttgtttttccttttgttatatagctttgatgatagaactgctatttacgttttttttttttaatttacaacaaagatttatttggttactgtttggttgccaaggaaatgcaagaaaatttgagaaatatagaatttcaacttcaagaaaatgagatttactagttaaatggttttgttctggccttaagtttaaaactgctgtgtcagtgatattatagaaatactttctaaaagctcctaattatttgatttagtaccacaaactcacttg

SEQ ID NO: 84433 - DNA, 1002 bp, Citrus clementina
  Intron number 1 from transcript clementine0.9_020387m (loc us clementine0.9_020387m.g) derived from phytozome v7.0 (c hr-ID scaffold_33; pos 2344077 to 2345078 reverse strand)
ggagccccattaaaccccaatttgctcttcttcgagtaagcttctgttatctcttttgtaatcttcattttcagcttttttggtcgatttatttgatgatttcagatcgtttttaattttttgtttcagatgtgatcctttttatctgttttttttatgtcgttttttagtatttgttattattggtggatcatgggactttgacttgattgccttgtttgatcatcaaattgactcaatttgtgcccaccacaagcttgatcagaaagatgttctattttttttgtggtttaatttttatgttgtgcaaatgggttttcttttctttttttccccctcttattggctaatagaatttttttattgcaagttaaaataaaattgtttaatattgatttggtttgctagaaaatgataaataaacaaaaacatggttaatttcaaacactttagtgtgaattagtcctaaatactagcagtagtttggcctgttgttaagaaatttgatcattggaatcctgggattcttgatgaattctgatgcttttggttgcgaggatgagccgctgagcagcatagtgaatgtgagtagtatctatattggggtgcatggtagcaaaacatttgtaacatatagaatgtgatataggttttgttatataatttttgtacaatgcaatcgtgataattcttttactgtataatcttcttacaagcatataaacagaatcattttagtgtgtgattagttgtacattctgttgcatgtcaaattctcattgaattgcttaggtttcttgtacttttatgtgaaagctgcattgcatgttcctttgcctggattggagtctacttcttcataattgttagaataattgttattctctctctctctctctatatattgttaggaatttattgtctagcaagtgtctaatctatttcactttcttttgtacttttctagttgatagattggtaattttcgaggttctcacaaca

SEQ ID NO: 84434 - DNA, 823 bp, Citrus clementina
  Intron number 1 from transcript clementine0.9_009834m (loc us clementine0.9_009834m.g) derived from phytozome v7.0 (c hr-ID scaffold_20; pos 4017369 to 4018191)
cccggtatgcactagcttctcgttggttctaattagccctatctgtttgtcttctttatgtagttctggctgattatttgaggtcgccatgttgtaagacgctgcatacttggttgtccttagttgatattgattgatattgattatagaaaaatatttgaggaatatttcttttgctatatgtacatcgcagataagaactggcctgtggttccaaatttcaaatgtagttttcttcattaaaactttcaaaaaatgaatctgatgctagtgagtctgaaatagttgagaatttgttgaatttgatactagtttttggaatatcggattattgttttccaaaacatattccagatgtgttgtcttttccttttcttggctttgtaagtagaaaacaactttttgaaatcttactgaaggacactaatttccatatgaacttcaaacttggttgttatttctttggaaaagatgagtggaagttggattttataggcacttgtaagggattaatgaagaaatgtattctccagtgttttaattcttctcctgaaaccactgaaacttgtttggaattatggttggtctccactcactctcttgttttcttccgcttctttaatactcattgttcaaatctccttcaatctcaagttttgatgtaaatggagttaaaataccagaaattgcttccattacttcgtagatcaaccattttttttcctagcatttttatttcaagatattttgttaaattttataatgttaaaggcttgatttaaaattttcctgttcgaatctgccaggaggttttgctccagga

SEQ ID NO: 84435 - DNA, 772 bp, Citrus clementina
  Intron number 2 from transcript clementine0.9_025847m (loc us clementine0.9_024175m.g) derived from phytozome v7.0 (c hr-ID scaffold_27; pos 1874595 to 1875366)
gaagggtttctttcttctggcaagaacacttcaaagtaattgcctttaattttcttttactcattcttgttgtagttttatatttgtgactgtggatacatgtttgatggtttcttatgttttgttaatttgtcagtatttacactattacctgggaaaccatagaaattttggatgcagtgatgtgtacattgagaagcttggcttttaaatttttctaactgaatcatcttgactaaagctgaaactgaagcttaatcccttttgtgcgtatatagatgatgcggtttagcttctaaaatatgattccattctaatttaaattttaatttagatctaagttaaaagttttttgttgtcgcacaagtgacgggaggttaaatgttggtacctcttcagattgtggaagggaaggattatggaatagcgaaaccccttgacttacaataactcttggaatcatcagtcatggggatgtccagacagctataagcttcactgtgataaaaagtaggtagttaaatgcaccggggaatggaagagaaggtctctgttgatgaaatttacatcaaattattaggatgggtgttagtaagtgcacaaatcatgagtgtttattcattcatttattttctacagacatctattgaatactattgatttcctctatcaaattttctaggctgactttagtgggatttcttttatcttgacaaatctttaattgttatttgtagcttcaagaggcctaggaaattacagcctgaagata

SEQ ID NO: 84436 - DNA, 574 bp, Citrus clementina
  Intron number 1 from transcript clementine0.9_028128m (loc us clementine0.9_028128m.g) derived from phytozome v7.0 (c hr-ID scaffold_5; pos 6328212 to 6328785 reverse strand)
attactttcccaataagccaaatcccaccaactatgtattactcagttgtgcatatgaatgtaaaatttcttttctttcaatagcctccaaaggagtaagaggtcaattgccttattctttcaatgtacggaagtggtagtaatactagcaaggggtaacttataaagatgcttgggtggatatagatgttgggtctaagcttcttagaagaattgctaagatggctcccaggatttgagcttttggcggtcttttccctctcgataatcatctaattcttattatttgtttgattatctaggatttttcttagaatgggttgcttatcttctgattgaaaaattaacatttagtagtttcttgtgatttgagtaagctattgaaactactttttggtgttattgtattagtttgctcatgagtttctttcgaacaggtgattcttaacttgttgccggcactgatggtgtgggaactaaacttaagttggcatttgaaactggaatccacaatacaattatatatatagtgttagtagaattagcttctaatctaactctctttcaggttgca

SEQ ID NO: 84437 - DNA, 645 bp, Citrus clementina
  Intron number 1 from transcript clementine0.9_011539m (loc us clementine0.9_011539m.g) derived from phytozome v7.0 (c hr-ID scaffold_53; pos 46051 to 46695 reverse strand)
ccggtcctgaggtacactttaatccttacattcccacgtcctcaatcttttacacatcttcctctagttttctaattcttccttttagcagaatagcttaaagaatagttttttccccttttttgaggggttggtaattggtggctgtgtatgttttactgcttattagagatctgggaacttgaaattggagatgttatattgaatctgtaactgggtattggacactgcgtcggttgtttgacttgattgagtttctttttttttttgggtttatgcaatgattgttttaagtttccctttctaatgttctgtcatgacatggtacgtgaacgagtagagcaattttgtcattaacataaaactttcatcggtttgaaacaaaactgtggacagagacagagttttggagaaatttgagcttgtagaaccagctgtgtggttaaattttgggtttattttcagataatgtgcatgttggtgaattgatataagacactaatctttcattataaacaggaataaggatagtctgatatttgtgcagaattttctgcgtggtttaatttggattttgttgagcgtgtgtcctgtgtttgtggtatctcaggctgcagaagaacaagttaataggctttgtttgga

SEQ ID NO: 84438 - DNA, 859 bp, Citrus clementina
  Intron number 1 from transcript clementine0.9_030666m (loc us clementine0.9_030666m.g) derived from phytozome v7.0 (c hr-ID scaffold_1; pos 12518023 to 12518881 reverse strand)
attaaaaatatcccaaaccgttttaagtcagttctctttcattgttctcttctcttaatcttggcttgatgactactttcttgtttctcttgtttccgctagcagtattgtgtatgtgaacatctggtttattttctggtgaaatctctcaccttctgagttaattgggttgatatttttaagtttctttttttatttattttttattttttatttttttattttgctttttgtttgttcttctgttacactcctagcattaaacaaaaccctgtgtatgttgatgctcggttgcaggtgttgctttttattgttgtctttcactctttcaattaagttcattcttcttgtattaccccaaacactacaccttttttttttttttttttaatttggtgttttactttttacttttcctgagacctttgttgcatcaaataacgactgtaaaagctgatcaagagatagtaatggtcattgtttaggtagcactctacttcctcttttgtctttatctacctttatttatacggtagatggtagtaatgtttaatcaatgaccgatcacccagtatcctttgtattggatcacattaatacacaattctcgtatctgggttcttctcttcaattcaagtcttcatgctcacgattttatatttgttttggttttcatttttaagtctagatttttttcttttttttccccacctgaaaggatccttaaaaatagtttaaacaagaacttgtatgtaaattcatacgctataagtaacaagcctatctgtcgacttgggtttgctttctctcacgtttatttttacaccaagatgtttcctttggataatgagcaggaggc

SEQ ID NO: 84439 - DNA, 292 bp, Citrus clementina
  Intron number 1 from transcript clementine0.9_033285m (loc us clementine0.9_033285m.g) derived from phytozome v7.0 (c hr-ID scaffold_1; pos 9360287 to 9360578)
tcgaagatcctaacaggtgtcagatcaaaggttcggtggtaatgcactaagaaaactgcattttgattggggcctgggattatttttcagttttcactctccgtgcatgtaattattatctgtttatatactttattattttgtttccgcagctcactctctaatgctgtataaataggctcctaaagctctaggttttcttgcttcaccatgacgttttcctcagcttcacttcttagcacaagagtgaaaatgatgcttgtgatatcttttgtactcatcttagtaaccc

SEQ ID NO: 84440 - DNA, 592 bp, Citrus clementina
  Intron number 1 from transcript clementine0.9_000163m (loc us clementine0.9_000163m.g) derived from phytozome v7.0 (c hr-ID scaffold_20; pos 1122388 to 1122979)
caaaaactcgtttcgctttgtttatagttttagaggttagtcacgtgcttgaatcattttttccactccgttcacgtcgatttcttcactgtgatgatggaaattagtaatttaggtttctgattgtgaatttagggtttcctttgggtaattcggttctcaaattggagtttttttagaggttttagaaatggattttgttcgatttggagtttgacgttatggatctattcttttcgtgtgcttgatctggtaatacaatttagggtttcctttgtgttagaatgctctcaaatcaatatgttttgacgtatttgtgtcaaattcaaatttttttgagagtccaactcatgctaaatgatcagaatcactacacgcttacatttctctcaatgctaagctaaaatagaagtgaatataagcttaaaacttgattagacattggttttaatattggattatactgttttgttagctgaggctaaaatgggttttgttttatttgtattttgagggttaatttacaatgttcattttgcctattctttgttgttcaggtgtttgaaccggtttgagaggtgtgaagtaaacc

SEQ ID NO: 84441 - DNA, 277 bp, Citrus clementina
  Intron number 2 from transcript clementine0.9_015273m (loc us clementine0.9_015273m.g) derived from phytozome v7.0 (c hr-ID scaffold_1; pos 9582024 to 9582300 reverse strand)
aattcgtactgtacgagaagaatcaaaataattatttaattaaaattcatcattaatttcaaccaaaaatgctttatatttttactattactcaaactattaatttgcataaggttccaagcatttaatctattttcccttgttttcttggttttaatcatcatgaaaacagtaacttctttatgatttgattgcaacatcctgtgcataaaagattcttgtttctctttttctttgtctaggaatcatacagtgaggtactgcgcagatacaaaga

SEQ ID NO: 84442 - DNA, 798 bp, Citrus clementina
  Intron number 1 from transcript clementine0.9_001777m (loc us clementine0.9_001777m.g) derived from phytozome v7.0 (c hr-ID scaffold_122; pos 299686 to 300483)
cttgttgatattcgcggtctgctatttcttatcgcgtacgataacaatcaaattctcgtgtttttttaaattttcttttttttgctttattcggttaatttgtgttgaatttaatttatagtttaggttaagctagggtgtcgttttagaattttgaattgtcgttgcattgttgaacttgtttacatcatttaattctgtgtgctttttagctggtatttatggtgtcttattattggtgtttaagctgtgtttggtaatttgaaattggaaattagtgttaatgatagggccagtcttcatttatataccttttttatgaaaggataactttgaatttggtggcgccgaactaagggtatgttttttgttgagatgttgtggcttttagtccacggctgctgtagaatgaaatcactagcagtggatagtaagtagacattagctgtcaagtagaaaacacttcaggggccgtaaaatggaaaacctcagtgacctcagcaaaatgtttatgacgctagtgtaagttcttcttttagctttttcattgcttaagttaatgatgccaagttggattccagattttattaaagtgttttttcaatctctgagagcaaccaaatcatggagaatcttggtctaactctttgatgctggtactgattgtttttcttacagtaccagtttttgggagattgatatgctatcttttcaaatatgtttctgtataatgtactgcttatctgtgtactatatttattttctttttaattattcaatgcagatacaagcacatca

SEQ ID NO: 84443 - DNA, 913 bp, Citrus clementina
  Intron number 1 from transcript clementine0.9_005238m (loc us clementine0.9_005241m.g) derived from phytozome v7.0 (c hr-ID scaffold_1; pos 1025317 to 1026229)
caagtgaaaaaaatcatctcgtctcaacttagccggtacatttaactttcatttgcgacttctttttttccttcttttccctcaatttttttttttttttgattcatgttaaattaaagttatagttttgttctcttgtaaatgatcttcagctcttttgagcatgtgggttcttattcttttggcttttggatcatcactgctgcggtttatgtgttaagctcgtgtcgttttggtttggcttggcttggcatactgggttcactaaaatttgcagcaggctctgtctttttctctgtccttttttttttgtcttttctaatttgggattatttagttttaaatttgtcttaatttcatttaagtaaaattaacgaaagctttcattgtgatcgaaaccccgaacttccggatttgtatggataatttagttccgtgtttgtgtagcttgtgttcaagataagtgattttattttaattattcgttattattattattattattattattttttcttttgcttattcggaagggaatctggctgtaagcttctgttaaaagctattacactttttttattttttttgggggggggggggggtgggtttgccgtttatgtattttagttccaactgtaggcagatctgggctctggtaatgtgggtcattttttttttttaaataaatttcgttttgttaaaagctcttgacacattaatttgttgtaattttgttttttgttgcatttattattttattacttgccttgtttatctaattaatgggtttatgggaatttgtacttggggttatatgtctttgaatagaagttgatacagattcactgtaccgggtttatctaagctggaactgatttgttttatttatttaatttgcaggacttgacggtta

SEQ ID NO: 84444 - DNA, 652 bp, Citrus clementina
  Intron number 1 from transcript clementine0.9_013075m (loc us clementine0.9_009939m.g) derived from phytozome v7.0 (c hr-ID scaffold_10; pos 2842691 to 2843342 reverse strand)
gatcgcctccgaggtgcttaatttcactttgtaaatgaaattaattttgatttaaagtttcctatgctaataacatttcacatgcatgctcccattaaagaaaaatatacgttcatttttagtttggttattgctgcagtagctatttgcttctgaggaagtatcggaggcgaaatgaaaataaacgcaagtcatacattggggcttatacttcatctttttttttttaccctgtcaacttagcaatcaattacaatattttgttttgtgttttaagttttaaccatttattgtcaatagcataaaacatctgaatcaaacttttaacctttttctaacaacatatatattcttaagttattaaagtaaggaataagcgaaaagataagaaaaacacacattcaaatactctacaatacaaaatataattcatgttttgcttgtcttttagtttattccttacttttaataatttgaaggatcccttattagataatgactctttatgtatatgtatatatatttcctttctgcttgttgatggtcaaaaagattcggtgatgatcatcagtgattcagttccctctagtttaaactctactaaggtagctgttattctttgaacacgatgcagttcttaaaggaatctcag

SEQ ID NO: 84445 - DNA, 350 bp, Citrus clementina
  Intron number 1 from transcript clementine0.9_015999m (loc us clementine0.9_014106m.g) derived from phytozome v7.0 (c hr-ID scaffold_5; pos 2402260 to 2402609 reverse strand)
gctgtcggagacagtgagttgagacttgttttttatttttcattaatttttggcctgaattaaattattcaaattaattaagttgtgattaatactttagttatttaatttaataaattttatagcacatgttttaatttttttcttctattcaatgttcatagtatttatttgatttgatttctgtcatggtgatggtgtattggtattgttgcaatgttgctaatgaaattttgtttgttagtttaaaaggatgcacgattggtagttgatgcaaaatttgttgcattttgccaattttcttgggagttttagggcctgttcggtaaacttaacagatcaaaacccac

SEQ ID NO: 84446 - DNA, 969 bp, Citrus clementina
  Intron number 2 from transcript clementine0.9_016265m (loc us clementine0.9_016265m.g) derived from phytozome v7.0 (c hr-ID scaffold_49; pos 581645 to 582613)
aaggtaatagttttgatccaagacctctattaagggtgtcttttattttatttttcaaaaaaaattcataattcaatacacgagtaacatgaaatataaattgagattcaaaaattgagtttaacataggataaatattttgtcctaaaaaatagtaaaattctacacttaatctaactcctaaatatagtttaatccacccctcccttaagattcaaattttaggatcaaccaaataaaattgcttaaattaaattagtcgatcgaacattagaggaccttttcgaaatcacttaggggctctttatttttctgacttaataatttaatttctataagttaaatcattaaatctatatgttttttcaacttaatgaaaattttcaatcattaagttattaaattattatgctaatattttttagttttttgtttaatctaaaaaatctgaatgatatcattaaaagttattctctaaaatatccttatcttattaattaattttcatcattatataataattagcatcattacccacctctataaattgcgacaatataatggtagagtagacttttattattattattatttactttctttaaattagcataatttatcttcatcatataaaaacattacaaactacaataaaattgattaatatatacttaattgcctaagcactccacttgctgtttttaacccaatccctacaggctttatttcgaatttaataaaagaggggggggggggggggggaaaaacctttaaaaaaacttttgagggggggggccttgggccaaaaccgctaaaaaggaatcccaatttacagtattttggattccaaagggaaaaaaccctttttcccccttgggaccacccttggttaataacatggagggacctgccggaaaaaaatggaagttgcctatttctaaccatacacttacatacagtggatattgc

SEQ ID NO: 84447 - DNA, 192 bp, Citrus clementina
  Intron number 3 from transcript clementine0.9_021592m (loc us clementine0.9_021597m.g) derived from phytozome v7.0 (c hr-ID scaffold_27; pos 1651574 to 1651765 reverse strand)
acaggcatgtattatatcttctttctgttttaatttgtttaagagtttaaagagggattattttgattttcttttggaccagacttggctattattggaggtgggattattgacatggggtttctgaaagatttggttttgtgtttgatttgtgaaggtttcttgatttgagttgtattttggaacctggga

SEQ ID NO: 84448 - DNA, 917 bp, Citrus clementina
  Intron number 1 from transcript clementine0.9_003991m (loc us clementine0.9_004004m.g) derived from phytozome v7.0 (c hr-ID scaffold_49; pos 1505472 to 1506388)
tttttaaagtaatttttgttgcagtaattttactggtacgtgccattttcctaatacttatttctcgtccaagttcgtattttaattcatttttttgtgattataagtatctgatatgaactgggtctattttgtttttacttaaattttacattatgtgacggttcgtggttagtctctgctttttaattctgatcatcaatcaatcgtaagctaatatagaagtattttacatgaattgggctgtattgttgttggtgttgttgttgttgttgttgttgttatttttggttggggtaattctagtgagtagtatatgctgtgatatgaaagcacataacccaaaatttgaattctttatatcaatatagtttcttcatctcaagctaaatttaatttagcatttttcttatttttctttgttttttcgttatataattctttacttgaattatgtttgttttcagcttctttcttttattgtgatttgaaccacattgtttgagaaaatctgaaaacttctgttggtgattgactagtgcataacaggtttcctttctttcgtggtctaggagattttcaagtgcttgtaattgatagaatttcaactgtgaataagtgaattcttgataggaattcccccccacccccaatgatattagatttaatataagcttaattggttgctaagaagattagggaaagaataaaagaaacttttttttaaagctcaatagtatggtattaattgtttcagttttccaattatataaaaaaaagctttattctagtttgatattgtggggattagttcagttgaaaggtattcgagttctgggtaatgaatatcctaatatttattactgctttctatttctgcagcaaccaagttgggtgttatatttcctcaattagat

SEQ ID NO: 84449 - DNA, 722 bp, Citrus clementina
  Intron number 2 from transcript clementine0.9_004694m (loc us clementine0.9_004694m.g) derived from phytozome v7.0 (c hr-ID scaffold_120; pos 27796 to 28517)
caggcccaagccgaaaatgtgagatgcttacttcttatctgccttccttattcgtgtttgaggttcttgaagagtatatttattgttgcagtgcccttagaagaatataatgttcgagttgcatgaactcgtttgttcctttattcaagttgaggctaatttttcattttaattggatactagaagtagtttgcaaagttttctatatgtagtgtttaacatgacttagttctctataaatgggattatttattgcttaggctcatatattaaattttcttgcaccgcatttgtttattctgttcaagttgggcaattttaggattaagacttgatttcctgctgtagcatggcagcattatagatgtccttttgagtatataggttgtgtgaatttgaattaataaatttcatggcttttttttttaataatactttctaaagtagtattcacatttaatttctgcaactattttcttggtgtatttactggctcgggaaagctttcacaattagtcttttaatttagaggttaaaataattggtgaaacaaagaaaaggagctggatctatttagcattcttgattacctgatctgtacataaacataattgctttatgcttccactgacttattatgttcgcctctggaacatagttaaaacatttcgtttattgaattttttactttttgcttgggcaggagaggcaaagggtaatat

SEQ ID NO: 84450 - DNA, 341 bp, Citrus clementina
  Intron number 4 from transcript clementine0.9_018939m (loc us clementine0.9_018323m.g) derived from phytozome v7.0 (c hr-ID scaffold_5; pos 2044704 to 2045044 reverse strand)
aaccattcttggctttggctcatcaacttctttaagtaagttgctcttcttcttcttcttctaatgttttgacctgtggattggattatatatcatggtacaaacacaatggtgtttacataataggtagaggtggagttaaattgatcatgttcaagcattttgggggtccccatttgcttttgtctagttccatattacatgaacggattgttcagctttgactttcaaatcttttttcagattctatttttagcttcagctcaattgtagttcttccacattatagagagtctaattttttgtgactttaatcttatttcagcgctattcaagttatt

SEQ ID NO: 84451 - DNA, 499 bp, Citrus clementina
  Intron number 2 from transcript clementine0.9_002619m (loc us clementine0.9_002617m.g) derived from phytozome v7.0 (c hr-ID scaffold_51; pos 1042241 to 1042739 reverse strand)
aaagaaaattaagacagttgaggaatctgttgctggttagtggtttgtgtatcttagatttatttgttattgttttaagctaatatgtttttattctggcttggtgttaagagcattttgatcaatttttattattgagcttgttgcagattttctgtctaattttttgtgtgtagtaaatcttcaactcagttatatatttattcctgaatgtattattgtaacatatttgtacactatgtgaatttctcaattcattggagagagagcatataatttttgaaaggttcaagtttgccagttgtagggtcaaccgctcttcttttattcctttatagttgaatgaattgtttgtcctctacttcttccacttcatcatttcagttatctcagtaagtgggtactgtatgttatttgaacttgtcaatgtgcatctgaaaatttatgtgagactaaaagatgtttcatacaaattgtgggactgtggttgtagttagca

SEQ ID NO: 84452 - DNA, 614 bp, Citrus clementina
  Intron number 1 from transcript clementine0.9_006772m (loc us clementine0.9_006772m.g) derived from phytozome v7.0 (c hr-ID scaffold_29; pos 2018631 to 2019244 reverse strand)
cattttctactggtaattgcatcattctcagagaaattacattttctctttaaattattattattattttttaaaattcttttttcatttctctgtttgtgcatcattgaagtctgtttcaatctttggttcttaaatcaatgaatgtgggttcctacaaaacctgaagtttagcaattttcaggagttcttatcctttttcaacaagcagttgtggtaaacatagaagattaattatttctgtagccgaataaagatctgtaagcatatctgctttagtttatagcttgtgttgtgaaatctttgctccatttttcttttctttgtaaagattatgatatgctgttaaatattcaaacttgattttggcttctgggttttttctttttaatgtttttttaagctgaacacgtgcagcataaattgtgtagtttagcgatgagtggctgttgcaatttgcatattttatgccattttcaactcaattttgtcaaaagtgatttctgtcattcttcttcatttgagaaatatggattgcagaagagaattttgaaattcgaaggaccgccactaatttgagcttatcatttgattgcagctcatttttcttagca

SEQ ID NO: 84453 - DNA, 477 bp, Citrus clementina
  Intron number 1 from transcript clementine0.9_010261m (loc us clementine0.9_010251m.g) derived from phytozome v7.0 (c hr-ID scaffold_20; pos 3531818 to 3532294)
gtacattcagcaatcctcaaaggtaatgctcgaaacagaaactcacttcatcatcatcttcttcttgttcgcatcatccagctcggggtatgtttaacgtttctgatgtagccgttagtttggtgaactgcccttgaattttggatcttgaacagtaacgttttcgtttctttttcttttttttttatttgtctatttttgcgtcatagtgaaaagataataaaactaataaataagtaaatatggcgtgtgttatttgatttggtttctagttgtcatatgtcattgcataccctgccaaagttggagtctctgtgatttcgtattaatacagtgtgtaattttatttataataaataagatgtgatttgaaagatttataatgatacttaacttataagttttttctttcctttttaattttgttttgtttttgcttaagcggttacgtgagcagttcttgcatctggaagaaag

SEQ ID NO: 84454 - DNA, 824 bp, Citrus clementina
  Intron number 3 from transcript clementine0.9_010261m (loc us clementine0.9_010251m.g) derived from phytozome v7.0 (c hr-ID scaffold_20; pos 3532964 to 3533787)
attacaagtccttagaccaggtatgattacatattctgagaagcaattttatgtagtttttagtttcttctcatgaatattcaaacctttcatagcacattttaactttcttgaggttgccttgggaggaagttttgtataactactacttgagaattgcagcctaattttaatttgttgtgcattgtcttttcccaattcaaagtctttaatattctcttgtgtcattttcctgcatcattggttttgcaaacgtttaatctttagctgtctttgattttctgctattttacctgtcaaaaagaaagaatttcatagttctgttagtaccaactatgttaccaattctgttttggatgcaaaagtctcttatgggaaatgttttatttgtttaaagtttgtaatataattccataatggtggtatgtgatcacttcttggaagtattatatgcagttggttgcacagtcaacaagggtggtcaattctagattttgcttgtatgtatgtttagcttagctaagggatgcctctaactgacctaactggcaaccatattcagtagtttttaactagtgtaggtagtaggaaattcgagcagcaataattgacatcggaaaactttttctataattacctatgcttcattgtttcaatatgtatttcgtcattggacatatagaaaataatgtagttatgacattgtgggggtagagagtttcttgccttcaatgatgtattttccaagatatcgagtcctagcagaataagtaattaccttcttttcaggtgactgaagctcttgctcgtgctggccttgaatc

SEQ ID NO: 84455 - DNA, 999 bp, Citrus clementina
  Intron number 1 from transcript clementine0.9_017876m (loc us clementine0.9_017794m.g) derived from phytozome v7.0 (c hr-ID scaffold_29; pos 900218 to 901216 reverse strand)
ttctcaagctgtacgcgatctctgctctctcttgggtatttctccatattccatttgctcttaaagtttttttttttttttttttttgggtcaaatacatatttataagtttagttgttaagtttggtcaattctgtttctgggttttgcgggctcgctgaattttgatgcgggtttggttcgtttttgaactgcaactgaagaattttatattttgcatattgggatttaatgcaattccttgattattgatgtatgtcattgtacaggatatatgaattagttaaggaactacagtaagtatttgtatatcaaatctattccacattattattcgtttatgacttacagattgcatttcatctgagttcatatgtttggaagtgactgcacgacactgaccttccatatcatcagcaattatggcagcaaaatttttccgtgacaaaagatcttaggattcatcgactggccaaaatttgtctgggaaaacatactttacatgccgtaggttgcattgcggcagtaagactaagattacggatcaattaactgttcctgatgctaggcggcttgaaggcctgttataaaataaaatcaaattagttatctattgaaaacaaggacaggaagggataattaaaatcaaattaattatccagaatgagtagaaaatacatattgtatcacttatttctatcaacctaaaacagattttccaagcttgtctgtcaataacgctcaatttataataagcaagattgagccggctttggatatcacttctttgtaataaatatattaatggctgtcttgtatcgatgccaggttttactgcaatttattcatgagaacccatttcccaattaaagattgttcttagtaacagttagaaaccttgaaacatgagtgatattttggtcattgggagtgaaatgtgtcccattcttctgatgaatactaaatattagcattttgcagatacagttggccctgctg

SEQ ID NO: 84456 - DNA, 826 bp, Citrus clementina
  Intron number 1 from transcript clementine0.9_035249m (loc us clementine0.9_035249m.g) derived from phytozome v7.0 (c hr-ID scaffold_29; pos 570018 to 570843)
ggtaacgcttgattggctgacgaatcaccagacaacttatcaattcaaggtaaatcttgatcttgaagaatgattttgttaatattagtttgtatttgtcttgcttcttgattcttgaacttgaataatgaacaatgattttccaattttctatcgttattgctagcaaataattaagagtagccaactgatttttcaggcccaatgtccatcgtggaataccagaatgcttctagttattattcttcattcttacttcttcaagaaaagtttttttagctttatttttttataatgttctgttcttgtacttttgcagaactgcagttttgcgtcttcaattatattcatattatgtatatttttttttaggataagtaaaattgtattaaaatgatcaaattggccaatgatacactataagccgaaatgccgaatggaattcaaagccaaattagaaattaaaaaatatttacttaattttttaaataataattctttgccattgcattgtaaataatcctgtaaccttcatttataaaattatttttttccagattatggctaagccacaaaagactctagatgcattttttaagagaaaagactcatcagaaagtccaacgtctttgactccatgtcaaattaatgttgtacgtccaagcttacgccaagagcagcgtcctccaaaatctccaagaattgaatcaagaaaagatgataatttgactctttacaacgtgatcctggattgcgtcaacaaatatggaattatcttgtgaatgaacgagacgaaatacgtcgagcttatattaaagcgggacca

SEQ ID NO: 84457 - DNA, 852 bp, Citrus clementina; identical to SEQ ID NO: 84383
  Intron number 2 from transcript clementine0.9_008529m (loc us clementine0.9_006142m.g) derived from phytozome v7.0 (c hr-ID scaffold_53; pos 160358 to 161209 reverse strand)

SEQ ID NO: 84458 - DNA, 287 bp, Citrus clementina
  Intron number 1 from transcript clementine0.9_011219m (loc us clementine0.9_011219m.g) derived from phytozome v7.0 (c hr-ID scaffold_53; pos 653426 to 653712 reverse strand)
ctttgtcaggttctacttctaagcttcttcttaaaacaatcaaaatcagctgaatatattgattgaactgtcagacaaatctgttgtagcattctattatctgtttagttcactgattgaaattgttttttgaatttttttgtttagaacaatgagcatatatattagctaggagttcaattagcatcattccatatgcttattcttcacatttaagcaagcaatgtggttcactaactaattttcaattattttggtaccaggagttgggatcctgtcaaccccat

SEQ ID NO: 84459 - DNA, 534 bp, Citrus clementina
  Intron number 1 from transcript clementine0.9_015742m (loc us clementine0.9_015742m.g) derived from phytozome v7.0 (c hr-ID scaffold_1; pos 6153499 to 6154032)
cgattcttcccagagaaagctttcacgttcgcttggtaagtagttgaagcttcagactatctctttgtcgtttcataaatcccagctattcgtttaaagtcagctttttattttcatttttttgggttctgcccagataagattttctatgtaagctattaaagtttcggtttttatctccattgcttcaagattttgtacttgaaatctcgagtttgacgtttgtgtattattttgttatctgggtgggtttatatcactcaaaagttttaatctttcttcagttttgttgagtgttttctattgggggctaatcttagtttagttgaaaatctctaggtttttcttcaatggcaaaaagaaaaaaaaaagaagttatcgtgttcattttctcggctaccaaaatggttttttcatttaagttttgaagtttgaatgaatcaactactgtttggataccgttacatgttgttgttttctctgatccattctcttttaaatgcttctgcagtaacttgaaaaaaagaaaaaaaa

SEQ ID NO: 84460 - DNA, 465 bp, Citrus clementina
  Intron number 1 from transcript clementine0.9_004384m (loc us clementine0.9_004384m.g) derived from phytozome v7.0 (c hr-ID scaffold_29; pos 451762 to 452226 reverse strand)
tttttatttttttatttgtgggttcttcagtttaggtaagattgctggtaccattttgtagatcttcttcattttgttgttttcttttttcttttttttctgtaaaaagcttgtttggtttctgggaaaatgagtaataagaaaggaaaattaagtgaaagtgtaggatattgagtcagttatgtattttgtattggtttctaagattctttgcaataaagaaatgaaattgaactaagctagatagtcgtacagcactcaacagcactcagtttagcttaaaggtgaattttgatatctaaaatctgaaattaaaccagtggatcattgatgttgtttcattatgctattttaattagttgttaattattttgaaatcaatgtttttctgggttctttttgttagagtttaacttgaagtttttaacaggagaaaaatatatcagtggagattgagtgggaaaa

SEQ ID NO: 84461 - DNA, 794 bp, Citrus clementina
  Intron number 1 from transcript clementine0.9_023250m (loc us clementine0.9_023250m.g) derived from phytozome v7.0 (c hr-ID scaffold_120; pos 114107 to 114900)
atcaacagtccgtcagttgcgtgcagctacttaaggtttcatttttttttaattttttaatttcgagtgtgttctctttcttctgtagtgtttactctcgattaacaaaagtatcaatttagaaaaactctggaacacaatcatatcaatgtaaatttcaaaatgatccctaaaatataataatttttcactcgtttatgaactgaaaaaatcatcatttttattcctgtctttagtttctaactagttaattccattcacaaatgacttgagcaaagtatttaattttgaatgcccttagatttattgaaatgtggtacttgatcaaattgccagtttaaattaagagtgatgctagagcttcaagctcaacaaactggtgcgggagaacagtattggttggatgaaagcacgaaacaacggaaataaatcatgtgggtagccatatggtgttttcatctgatcaatgctgttattccatgtcagtttatagaaagagtttccacattttgcaatgttgagaattcgaacaatttagtaacttaaaacttttaagtattaattaagacaaagtaaattttttgtatgaggctgtggagtcgtcattattttcagcgcaaaaagaaaaatttaaacatttgttagtgcagtctataaaactaggtttgtggttgcttgcaatctagtacattggatatactaacatgtggatatgtgtagagttattgatattctattatactgatgttccattttgatctggcttttctaggtaggcttgttgttgcatacat

SEQ ID NO: 84462 - DNA, 567 bp, Citrus clementina
  Intron number 3 from transcript clementine0.9_023250m (loc us clementine0.9_023250m.g) derived from phytozome v7.0 (c hr-ID scaffold_120; pos 115402 to 115968)
ggtaaagggaaaattgctgcccagtgcaggtaactattgtttttactctttagatcaaattttgtgtttattcttgtctttcttggtacaagctttgtacatttatatctaatatttttaactattaggtgtcatgggagattagcatccatcaaccccccaccctatcatcagatgcttcatatcttacgtgcctgcttgaaaatgttatcactgtttaattaattctttaatcaatgaaattaaaattctttatttgtagcatagaagatgctactgtttgtgataattggaagaagtgccaattaggctgcaaattgtgtgagtagaactgttaagaaaagaagttggcctccttactggcaagtaatcctctcttgattttattgggaagaaaagggaaggagagttgggggggaggactgaggaggtttcactagtgtgctagtgtggcaaatacattgaccttgatgatccttaattgtcatattattttagatttttttactattaaactgcttttttgctttgattaactatccaaatctgtcccttctttggatagtc

SEQ ID NO: 84463 - DNA, 825 bp, Citrus clementina
  Intron number 2 from transcript clementine0.9_029485m (loc us clementine0.9_029485m.g) derived from phytozome v7.0 (c hr-ID scaffold_43; pos 1775500 to 1776324 reverse strand)
tgctgcacctagccaccttgaagaaacaacgccaggcaagtccaatcttatatttaatcccgtattcaataattttcaatcaagttagttcttgtttctattgttttcagatcattataaaggagtgtttgactttagaccgtgaggccacagaaagatcatgtcttattaagcttcactagcctggatatctcttgaatctagagaaccatgtatctgcaataaggttcctaatttgcttcaattagaaatttcaactgtaagtcaggatgcggttaaactagtcaaaatctgttataagatccttacagttttgtacagtggtttagagaattgattagtgtggattcaaaatggtcataaagtaaaagggaaaaatatgtttcctaagagcttgaactttcctctattttaaatttatccccctgaaagtgctaaactcagttcaatcctgtgtttctgtggcatcatgtcgaccaaccactattgaagttcaaaatgatgttgtctacagaaactggtgaataaaaaaagtggtcactaaaaaaatatcctcattgcatgctccaatcttattttagttttagcaactttgttagctggaaactccatctattgactaggctcagtgtttcataacctaggacgggttgacttccaagttagacacacttcatgtcatgaaaactttgaaaatgattgatataactgctaggaaagaaaacacatgtccagtatcatatgatttatcttccgactataaagaacaattgaaaacttggattcacttgcaggtaatagaactcttacttggccatcaagcca

SEQ ID NO: 84464 - DNA, 355 bp, Citrus clementina; identical to SEQ ID NO: 80566
  Intron number 1 from transcript clementine0.9_004321m (loc us clementine0.9_004321m.g) derived from phytozome v7.0 (c hr-ID scaffold_20; pos 290459 to 290813 reverse strand)

SEQ ID NO: 84465 - DNA, 615 bp, Citrus clementina
  Intron number 1 from transcript clementine0.9_009343m (loc us clementine0.9_007921m.g) derived from phytozome v7.0 (c hr-ID scaffold_1; pos 13104793 to 13105407 reverse strand)
ggatcaagcagtcaaacaagtcaggtgagcaggatcagtgactttcaagcaattttcttgaacagaagtttttcagatttcattgtccaaataaaatatctccgctgaaatcattattaatataaattcagccctgtatcaattactattgtttgcttacttctgctataaaaaaaaaaaaaaaaaaattcaaaatttgaaggttcctcaaatttatggtgaattttacccatatcattttttccccataatggagagcagtgtggttctagttacctcccacaagtaattggttgaagattatgctgctggtgtgagtgatgataagtataaccttgagagtttgagatataccgatagaagaaattcctatattatagactttgttgccaataattttgatgcaaatgaaagggaaaaccagtgtttttttcatatcaattatatgtatttaattacgataaaggtgttatagttagttatatagtctttgcagctattctggggttttacatgaagaatctacagatttcattgtgtgtccttctgtccatcagaagatcaggtgaaccttatttgtcttctaagagttttctatgatcttgcagatactta

SEQ ID NO: 84466 - DNA, 522 bp, Citrus clementina; identical to SEQ ID NO: 83462
  Intron number 2 from transcript clementine0.9_034210m (loc us clementine0.9_034210m.g) derived from phytozome v7.0 (c hr-ID scaffold_33; pos 50797 to 51318)

SEQ ID NO: 84467 - DNA, 419 bp, Citrus clementina; identical to SEQ ID NO: 82328
  Intron number 1 from transcript clementine0.9_004595m (loc us clementine0.9_004597m.g) derived from phytozome v7.0 (c hr-ID scaffold_1; pos 8404828 to 8405246 reverse strand)

SEQ ID NO: 84468 - DNA, 763 bp, Citrus clementina
  Intron number 1 from transcript clementine0.9_016760m (loc us clementine0.9_016760m.g) derived from phytozome v7.0 (c hr-ID scaffold_67; pos 1007234 to 1007996)
ctctgtctctcagcaggcacccctcactcctactggtatgttatatgcttatattcaatccaattattacatttatttcatgctaatttatttatttatttatttcatgcatgtttgtcgctttgacccagatgacctttttctctcttttaattgatttgtggattaaaatatcagtgcaatgaattctatgtgctcctcttatcagtttcttgcatttttcttagttaaaactctgttgggagtgacttgcatctgtgaatgtctttattttgttgtttcattatcagttaaataaattaggaaaaataaaatctttccatcagctttttttttttttttaaattttaatcatgttttaaataatcatgtgtgccagtgcttctttgaacaaatttcttcaatgaattatatccataaatgaagtctgattagccatctgttgttgctaagccacagcagttttgcaacttcgattttgaaaattaattgaaaaactaacctgaatactgtagtcaataaaggttacttgaataattttgcaattctgagatgattcgatttcactgacttctccatatggtgtaatgattttcatatcaataaagcagcaccttgctgttctttgcggatgttgatagacttgtataacttttaaaattttgagttcctaaacaattggattaagtcgtggttcgcagtttgacatgcaagctttttcgcatctttttgttcatgtttgtttgctatatacaggatttcg

SEQ ID NO: 84469 - DNA, 904 bp, Citrus clementina
  Intron number 2 from transcript clementine0.9_016760m (loc us clementine0.9_016760m.g) derived from phytozome v7.0 (c hr-ID scaffold_67; pos 1008139 to 1009042)
ggtaatcctagttcttctattttgcaacataatttttctgaaattacagttgttatatagtttcatgtaatattttaaagccaaattagtacctagttatagcacagaagaatttagctgttcatgcctagatgtttgagatatgtgatttctttcctctaatctattagataatcaaaatgctatattgtggagtttaatagcttttcttatgttccctgaaaagagatgctgggttttcatttttctttttttctctctaaggttatcaaatctctttatatttgagtatataagttgagaaaaattcataagaggttataatcttaaagaattctgggattgtctaatgacctgtcatacctcatgtttgtgaattgaatctcctatttactgcagtttatccatcaccacaagtggatagcattttttgctgcttaaataattcataatctaagattcagtgatcattctcacatatttttttgaattagaggaaatgaggcgggcaaatagtatgttctatttgatgtggacaaatataaatatagtgttagttgtgatggtggttaggactgtatcctgttacgccttttgtacctgtcactcaattggtctatttttttcaccatgattcctttctatcatttcaaaattggtattaatggggatagttagtagtgctttgggcgcatccagcttgatcttcatagattgatctattttcaaatattatttatctttgaatgaaaaatttatcgcaactgtttcttattctggagtttgcattaatatgcttctttttttcttctcagatagaacatgagttgttttttgcctgttgttttatctgattttcaaattggactcgactgtttcctgtacagtaataagagctccaggg

SEQ ID NO: 84470 - DNA, 985 bp, Citrus clementina
  Intron number 1 from transcript clementine0.9_034075m (loc us clementine0.9_034075m.g) derived from phytozome v7.0 (c hr-ID scaffold_5; pos 6908323 to 6909307 reverse strand)
cgggctgctttcggtgtgaaattggagtacgacgggtaccctaaacccatagagattgagttttgagtcgaaagccggtctttttatgtactgggtatcggataattttggtgataacgcacgcacagttatattaatcttttttttcccttttttccttggataatttgatatgatataactatagtccaagtatttgcttaattagtttgtattgtagtatttttttgggagtactatggattgccttgaaggttgaagttaagtaaatttccagtaacacttctcttatcatagtaacccatccatgtgggcacacatgtgtgcaaaaatgaagagataatcagtacattgaggttttgtgtgttggtaagtattctggtcgagtatgatcaatattgagtagacatgagtttcttgctggaacacttaacatgtttagctatgttggtgacattgtgatggaacatgtgatgagttccttgcatcactgatcgagatgaaattgttatgtgagaaaaatcaaccttggactattatattggacaccctggaaaatgaaacggagctgaaagaggcagattggcataattgaaagaatgttgcatattgggcagcatgatgtactaatgtagggctattgtgttttgtgaactcaaatatggattaattataaaaaattacaagttggcttttcttacttgagtttatacaggctttattttgcagtctaaattgtatcaatagttatgatacttctcacacaatatagttttaagcagagatggctattctgtactgacatctagatttccgattttcttcagctttactatttctggagtgttgcttgaaagtttatcttcttaagttgctagaggttggttcccaattattatggccacataagttcctgataatggcatttcattagcccaatctttctttgttgtgcaaatggtggcatgcaccaaggtggagaaaa

SEQ ID NO: 84471 - DNA, 629 bp, Citrus clementina
  Intron number 1 from transcript clementine0.9_006586m (loc us clementine0.9_006586m.g) derived from phytozome v7.0 (c hr-ID scaffold_109; pos 635257 to 635885 reverse strand)
tcttcctcaccagcttcttgttcttcctctgatcggtgagtcccccacaaatcactctctttgttttttttttctttttaacattaattttttgtttaatcactcattgtcttgtcctccatcgtttcttgtgagtttatgtttaaaatttttttctcattattagttattcttagtgcttatcgagtttgatccagatcttgatctcgggcttatattcccttccctttctcttttgggatcggcgtgttcgtgtttctggatctgttttaatcgcgtggtagtgatgatttcactgatctcactatgatagagatcgtgtcaataactcgtttgtagttgttctcatttttaatgtattcaaagccattaaccagattactctagtattgttggccaaggaatagtgcttaatcttagacattgactcagtctggtggtcttttcagctattgtggttttcttatattgaagctttaaatctagaatccttgaggattagtgttgagtgagacttagttgagctccattttatctattgcagaaggctctgaatcatgagtggtttcttactctaggactctaactttgtcttcctgtcatttcaggactggtcgactgaagtcacc

SEQ ID NO: 84472 - DNA, 739 bp, Citrus clementina
  Intron number 2 from transcript clementine0.9_030697m (loc us clementine0.9_030697m.g) derived from phytozome v7.0 (c hr-ID scaffold_40; pos 1671265 to 1672003)
tgggtttggttgcggcggagtatcccctgtcaagaaaaagcacaatcttgagtatttgagggataacatttatttacgaccaaggacaaacacggtaatctccttttttttaccccttcatttatttatttatttatttgtttctggtgtgtaaaattatgagatacatacatgtctttttgttcttggacccctggatccatatagagaatttttacctcgatttttctgttctttaaaattgatagactttaatttactgttaggcttttgatgagtttaatttattgctagtctatgattaaatgtgattctatcggattgtaaaatgagaaaacaaaatagagttgttaatttttttagtcttcactgttaagcttttgttaattcttttgattgggaatttttggagttttctaggaatcatcttggagaaaagttatatgtatatagtgtaccataaattcggcagagatgcttgtcttaacccattagtgtgtaaatgacaatccagttccttgttcttgtttggtagccaatagtggattttcttggcttgtagtgatatcgaatcccttttaaaaaaatgttttgattttttgagttactgtgaacaatttcagtagctgcagttgcatgaatccggaatgctcttgctcattccactcattaattctttcaattgcatggctttctctacattcaaactccaattatcactaccagtggttgtggtgaa

SEQ ID NO: 84473 - DNA, 1018 bp, Citrus clementina
  Intron number 1 from transcript clementine0.9_011168m (loc us clementine0.9_011168m.g) derived from phytozome v7.0 (c hr-ID scaffold_5; pos 2859081 to 2860098)
tattcatccactgtcggtattctccccgctaggaggtatttgcatggtgatgcgttgcatttatgcttagtttaattcaagttgttggatatatcattgactaagtgagtgctccttaattgctgttaaaagattccattggcatttgagttgtgtcatacgttcttggagacgacagaagtccaatcttcaatgtcattgtcatcattattataagattatattgtcaccaagaggcagttctttttttctttttttttattagaattctattccaattctagttttttttttaaatcactattccaattctagttgtttgcctataattataataaaatttttgttatatatggaaaattaaactattctctttgaattggttttgcttttggtacattttaatcaacttaatagaatagttatataccatatactgtactcttttctgtctttctttctaatatttatttgttttttttcctttgttcttttgactaatttggtatggtgaagttggtatttgatggtttcctaaatatgatttctaaacaataactttgaaaaaaataatacgaaatttttatcaaataaatgtgggagtaagtcacctaactttcaaactacagttgcaagtgtttactaaacatactagagttatagtttaaaaaagccacaactgttaaataataatagtaaacagagattgagtcagtttcttgaaaagtgaaagtaatttaaagtttgtaaaatgttgagcattctgtggttatctttgaatgttgaacaatgagatggggaacaagaatgtcaactttgtaacattgaagatgtgaagagattgatattagaaggaaaggtttatatcaaaggggtttttgaattatctcatagataactgcaatcttggtggttaatctgaatattattggaacagaaagtggactaaaatgtacaacctgttcactgttgtggaatttcagggctatcgcagattatcttaatcgtgacctcccat

SEQ ID NO: 84474 - DNA, 694 bp, Citrus clementina
  Intron number 3 from transcript clementine0.9_023518m (loc us clementine0.9_022554m.g) derived from phytozome v7.0 (c hr-ID scaffold_33; pos 1628356 to 1629049)
gtggaggtgagacattatatagtttcatgagacgtgtgtgcgcgcatgattttaatggtgatttgcttttttcatatattctagatcagtagtcagcagtactgctatttccaagtgttaggtttcaggtttttttggccatttccagggcccttaattgtcagtgacacagtctaaagctgtgttctctgatctgatcgctcattagtgattaatctttcatctactgtaaggttatcgaaggaaatgagctgctaggcagtcgaacagacaaagagaaggaaaagcttaagagggtacgtgtataattaaaggcagtatatggtactctcaatatgagagcataagtgctgatgctgaacccgagatttaatcatatattaatgtttcccagactcaaatcgatgactctattcttagttatcggctgtcagataccgagaggatatgtaacatacttcttgaagataaattgattatgatattgatttggatgcaatgagatcaccttcaaagatgagatagcttctccatattcaaaagaaattcttcttttggagatttgctctgtgcaatatgtttttacagtgtaattgctaatgtattttgtgcataatgtatcaaatagttgaatgctgaagctcatttgtcgtatgcagaaaccaaaaaattggagattggcttgccaaaccac

SEQ ID NO: 84475 - DNA, 625 bp, Citrus clementina
  Intron number 1 from transcript clementine0.9_019253m (loc us clementine0.9_019253m.g) derived from phytozome v7.0 (c hr-ID scaffold_49; pos 58615 to 59239 reverse strand)
ctcacagtaagttcattagcactcaatcttaacagtaattttatttattattattttttcagtaaattctataacaagagggtctacaaaactagcgaaagtaaaatcaaagttcaaattttgaccgttatgtgtttgcctgctctgatttggtttatatgttatcaatttttgcttaaagtgtagttaaattttatattttacaattaggcttgcttaatagtccattttcataacagttcaaatttatataccccactttggcttgaagaaaaatttgagcttttgtgggttgagccatagatattttgattcttttcccccctattttttcagtttaaaactagtataataatattggaaaattatgtccattatggtgtaaaattttctcaaatttctttgtatgatgtttacaatcatttgttgtaagaacgtgatattgggttttctaaacttgctcttgtatactttaaagttgtgtttattttagctgttttaaagtttctttaactcagaagtgttaatttcttatgcttcaatatatctactgtcatttttttttccttttggtatagaaagcagaaatgcgttgtttaatccttctttctcactggcagttgtt

SEQ ID NO: 84476 - DNA, 1003 bp, Citrus clementina
  Intron number 3 from transcript clementine0.9_019342m (loc us clementine0.9_019342m.g) derived from phytozome v7.0 (c hr-ID scaffold_27; pos 1201889 to 1202891)
caaacattagactcagtgtaagattcttttgcttttttgttggctgaaattttgaagattgttagttgaaacaattttactttattagtgtgtatgtaatgttcgttagatttcaatgacttggtgcatattgtaagtaatgtttgaagggcagtgaaagaaaagacttgggatctgtccatactgggttcgtttatattcaatggaagggatttatttctcttgatgtttgattcaaaactatcaatggttgtacattgacttggttctttgtattttgtttcatgaggacaatgctaaatataatttccatgatagacatttatatctttagaagttcactttctctgtaggtggtccagactttaggttggaagagcgagtagtggttacaaggaatgtaattcaaacatgctgattaacttcaacttttgtttcttatcagtgacgaattgctgctccatggtctgttggctgtcctagtggttgttagaatcatctataatgatttttattcattatggattaagctgagacatttttcaattttcacacacacagtatgtgagcttgaatcggattttggctacttgaggaatcttattttatacttttagctaagtgattgtagcaacatgtcttattgtggaaaattttaaatcagctgcagtactaatggccaagtttgaagaagccctagcctggctgcttcaactccgttctttataactcaaatgaatggtcctgccaggcttgttcattttctttatagaattttctgtaccaatgagctatattggattaggtgaagcagcctttcacctctaaattatatacacatggtataaatgtttggctgtaaatgacattgaacattttgttctattatccttgttgtttctttggattgatagatgcagatgaaatgcctatatcaattagtttggcaatgaagttctgtcatattataactctttcatgttttatcacttttgcttatagg

SEQ ID NO: 84477 - DNA, 1031 bp, Citrus clementina
  Intron number 1 from transcript clementine0.9_030152m (loc us clementine0.9_030152m.g) derived from phytozome v7.0 (c hr-ID scaffold_108; pos 172106 to 173136)
attcaaagtcgtttgccttggcagagttgaagcatcttgaaaaactaggtttttcaaattgtggaaatttggaagataaattacatttataaactgtggatcgccctttataagtattaggcttatcccatactcgagcaatgtggaatacctttataagcattaagcctctcccatacaatttctgtacatgactttaaaagtggttgatgacccgttttgtaatatcatagagggatcatgaattccttttcttttctgtggctaggcaacacttttgggccaaagtaaggaaatctattttaggtaatgtaaaaaccagttgtgggatgtaatagtttattatgcactgacaacaactttttgtataattgtcagtttaatgaatacgagaggaactctgttggcaaattcatccatgatagatgctaaaattataccagttgccttaactaatttttctcaacactggtattgaacaggaaaatgaatatgcaatttgtatttgtgccattgtggagaatttggatattcttagttttagtaacaaggagagtatttgcctcatctttaaacaatgaatctttgagaaatgaggactgggtgattggcagtgtcagagtgtcttcatgtaaatgttcatttatttgtattttgaactattattagaatctttatatgccaaattagtaatacaaatgttcagatgatttttcctggtgatcatttcattcttgagagccatgtacaatactaggataccagagaaaccaaggtagcattgaagttgccccagtggctagttttccgatcattttttattcaaatttttatgtttcagaaaaatgtaagaaatttatagaaatgttgatagctatgattttgaaactttgcctaaaattgttatcatcacttattgtttcttatttaaagagaaatcctagaaacgtgacatgattattccatacttgttttaatattatttattagcagcctaattcaaaattagacgtgattatttgttactttta

SEQ ID NO: 84478 - DNA, 511 bp, Citrus clementina
  Intron number 1 from transcript clementine0.9_000066m (loc us clementine0.9_000066m.g) derived from phytozome v7.0 (c hr-ID scaffold_82; pos 105207 to 105717 reverse strand)
tggcctcatcaacatcactggaaacccgaaatcaggtttgacgataatgcgctgtcgtttcattgttacttacctgttgttactgttattgtttaggcaagttggccaatagtgagaacttctcttcatggacaagagtttacatgaaactattttttttttttttgttttacgatattgtcacatatatggcactgaaatgtcttacagaaagtaaagtaggagaaacataattcactgtaatagaacgaaagaaagaaattggaggagtgtttcgttttgtttgtaatgttcaagtatttgtgtcctttccttaaaatttgtattattagaagttatgatttgtttgaactttgtgttattcaatcaaatagtagtttttattgacggtaatgaactgatttctcagtgcgtggaacagtgcagatatgtatggattgtttttgtttactacttggtttggcatctccttggacttatgaatttatttttcatttcaatatagagggag

SEQ ID NO: 84479 - DNA, 1007 bp, Citrus clementina
  Intron number 1 from transcript clementine0.9_025553m (loc us clementine0.9_025553m.g) derived from phytozome v7.0 (c hr-ID scaffold_20; pos 2759783 to 2760789 reverse strand)
ctgtggttcagaagaagctctctgttgatttaaaggtataagcctcattttgattctttactttgtttctccgcgagcaagaattaacatacagaaattctgcccctaatttcgatttttcgaccataagcataatctgttcgtttttatatatgtatatcgagaagcagtagtatctgagttaagggtatattgaagcagtagtcactttggtacaattgggttgctaaaatattgcataatgtaaatgttattttgtttgatttcatattctcaataagttttagtgacatgaatttctgggtcagtgtcatttggcttataagataggcttgtgtgatcttagctggggtgactgcttcgtgtccgtagtggttcagataaaatgatcacataatattaagtatgaggtgagtgagatgtttgagttcaattgtgaaaaattggagggttgtttccgagtttttgaaatgtgtggctgttaatagtcttatgcataatgggcaacttttgttacttgaatttttgagtattttgatgatctagcttcaaagttctacgtgattacaagtgttaagtctgtgactatattttttctgtatatggggaaaaatctacagggcttcaacagatgtgtgttctgcttcatagttatctttgaattatgtttatgcatttgattgtacttgaaaagataacttatgcatggcaagctcattgtttctgctgcgcattgtctgagagtgtcttaaatggctcaatgtcttccagtttgctctttcaggtgtttcttggttaacgataggttgaaaaactttgaaacacatccattgaagtttgaagtatacacttgacatatttgaatttgacatttcttccttagtctgtattggaacaactaatgatcatgtcgggtctgttctaagatgctgtgtcattaattttctcttctgatatcttaaattttgcctggcaggggaacaaaacagatataatcatttgcagtt

SEQ ID NO: 84480 - DNA, 631 bp, Citrus clementina
  Intron number 1 from transcript clementine0.9_017746m (loc us clementine0.9_017746m.g) derived from phytozome v7.0 (c hr-ID scaffold_53; pos 234952 to 235582 reverse strand)
catttgcttcctctgctcccttttctgggttccaggtaatgtcgtcccggggtttattttctcttttattttttagacaattctctctttcaaacttctcattttcattgatttggccttttggttatgtactacgcggtcttttcgacataaagctaggattttttttaactacttaaaagctgattaaacttacatgccaaaaaaaatggtttattcttttttaagtgtagtgcatataaagtctgttgtataatgaactcacttcagtttggttacggcgactgacatttgttatcttcatgataaatcttggtcctttatttcatacggaggaaagttgagggttatatcataagaactttgatagtgtgtgactatcataagaacggccggtagattgttgttgcttcaagttttgattctcatcttgtgtttgaactacttgataatcttcgggagttctagattgtgaaaggattgtagtgttatatcattttcccttcttcatcacgtgtgtgtaaacggtatagaccaccgctgcagcaaaatgatttgattgctgattttgttcattttttatttgacttttgcagtgttctatcaagaagcaatctgctgtctggaaggt

SEQ ID NO: 84481 - DNA, 645 bp, Citrus clementina
  Intron number 1 from transcript clementine0.9_011541m (loc us clementine0.9_011541m.g) derived from phytozome v7.0 (c hr-ID scaffold_114; pos 36566 to 37210 reverse strand)
cctcaagcagaggcgttcgaagaactcattccaaggtagaattctttaatgggtttgctcagctttttctctgtctttgttattgaattgggtctgctctattttattcttgtgagttattttcgtattagtacagtactagtgggtgtaattttgatgggtcctcttagggctcagttgcagaatttgatagtgggtaaaaaaaagaaaaaaagttttggtttcttcatgtagtcttaatggcaattgaggtttggtagttgtgagctgaatgtatatgtataaataattgatggtccgtatagtcaagtgaaattgtggtgaagtagtgttacgaaagacaggagaaaaacaaagtgaatttatttaggcctttttgcttatatgaaacttgatcttttattttatgtattattatcctaattcctagttccatgcaaatgaatattattgttcggttgagagtttaattgggaattttccattctaattatttaaaattgtataatactcagctgtttaagaaattccttcatagaatagtatttgagactatctgttttatttctttgtgtgcaataactatgttgcatctactatttcatggcagtaagagcagtggttgctccttcggaagctgtatct

SEQ ID NO: 84482 - DNA, 963 bp, Citrus clementina
  Intron number 1 from transcript clementine0.9_014523m (loc us clementine0.9_014523m.g) derived from phytozome v7.0 (c hr-ID scaffold_90; pos 403730 to 404692 reverse strand)
gagaagatctacctcggtggcaaagttcgtaaattttcttcatttctcgattctttgtttatctttttaagtttattttattcatttgtttgtttttacttgtgaaacgatttctgcggtgtgatggagaatatacggcgtcggtttttgtgattctccgatccttacatttttcttttttaacggtcacagtactattcagtgttagtaggtttaatgtgtatttttttatgctacattacattcttttttggattttatttgttaatttaattaattttgcttcgtttactttcttgttcccgcatttggatttatacatttcttcttgtgaagctggaatcaatttcttttggtttattcaatgttttatctttcttcctttttttttttttctggcagtccattgcagaagcattgtttatgccttttttttaaaaaatatattttgatgtctagctgttattattaatattttttttttgttacatttgagttttaaagtcaatgtcttcttttgatgcaagagattctttttaagatgtcttagcttttgtaagaacacaatgattaaaatcaggaatcactaggtattatttcttgattcgtttattaactttttgataagttctgttaatttggtgtatcaagtaattttatgtttccctaaaaactatagcacatggggaagaagccctttttagggaataatactatctggttaaagtaggagctttcttttctttaaagggtctaagctatagaagacaaatgattgctcttattttactgaagccaattcttgctgaacaagtatccgactcatctgaaaatttaatgggagttgagtgtttgcaagtgttaatagcttttagtattagctggaaaatttctgctttgttcttttctcacgcaattatttgtttgttagtaatgtgtttattaaaacttttcaggaacatc

SEQ ID NO: 84483 - DNA, 836 bp, Citrus clementina; identical to SEQ ID NO: 78560
  Intron number 2 from transcript clementine0.9_026991m (loc us clementine0.9_026991m.g) derived from phytozome v7.0 (c hr-ID scaffold_23; pos 1856544 to 1857379)

SEQ ID NO: 84484 - DNA, 708 bp, Citrus clementina
  Intron number 1 from transcript clementine0.9_010949m (loc us clementine0.9_010949m.g) derived from phytozome v7.0 (c hr-ID scaffold_5; pos 242652 to 243359 reverse strand)
aagataaagattctccaggtcagtcttcgttaatttcttttcttactctcgttttattttattcttttgttcatgtttctgtttcttgagcacattgtgatatgaaatggcctcaactgtttcttctaattataatttcttttctgggtttgaggagttttgattggtcaatattaaaccaattaaagatgacatcatactgcgaatagaaaaatcaaaatttgcccttgaacaaatgatgctcattacgtaacaaatccaagtgcaaaagagaaaattatgtattttgagattcaatccccttcaaccattaacgtaaagattggtcaacaggtttataagagaactgtccagttgatataattatgtattccgagattcaatttccttcaacgattaacataaagattagttaacagggttataaaagaattgtccagttgattaatccttgaaaagcctcgccatctttgatagctgaccttagcaatagttcataaagtcatgatttttctttctttctttctttattattattattattttaataatctgatgcactgtactgaatttgagtctggaaacctctgaactttatctgctgttacaaattggaatctcatggttcatgcctgaaaatttaattaaggctgtgttttgtttaatgaatcaggtccttcgagaatcgatacagttgagagacaggaa

SEQ ID NO: 84485 - DNA, 253 bp, Citrus clementina
  Intron number 1 from transcript clementine0.9_014087m (loc us clementine0.9_014106m.g) derived from phytozome v7.0 (c hr-ID scaffold_5; pos 2402357 to 2402609 reverse strand)
gctgtcggagacagtgagttgagacttgttttttatttttcattaatttttggcctgaattaaattattcaaattaattaagttgtgattaatactttagttatttaatttaataaattttatagcacatgttttaatttttttcttctattcaatgttcatagtatttatttgatttgatttctgtcatggtgatggtgtattggtattgttgcaatgttgctaatgaaattttgtttgttagtttaaaagg

SEQ ID NO: 84486 - DNA, 382 bp, Citrus clementina
  Intron number 2 from transcript clementine0.9_009646m (loc us clementine0.9_009660m.g) derived from phytozome v7.0 (c hr-ID scaffold_98; pos 307116 to 307497 reverse strand)
ggtaaatttctatcttatgcattggtggaatattggaacgagatagggtcaggaaactgttatgagatttatttctcttttcatatgtttctcttgaaaggggtttattttctttacccactctgtatttcttcttttataatttttaatatttttttgaagattcttttgattgtaacaattgttaggtaatttactcattttgtccgatttagctggacaattttgctagtttagctctcttgaaacctatggatattccctcccttttcacctacaaccttggcattgatgttaatcccatgtcaaacataggtattaaacttttttcttatggttctggttaggctgagatttcttggtaaagtcctttcagtggaaa

SEQ ID NO: 84487 - DNA, 819 bp, Citrus clementina
  Intron number 3 from transcript clementine0.9_000227m (loc us clementine0.9_000227m.g) derived from phytozome v7.0 (c hr-ID scaffold_1; pos 6206257 to 6207075)
aggtgccaattcattttagaagcttatattcctattatttgcttgcaagcaatggccattggtttcaggatgtattatcaatgcagagagcccaatatacatattggattccagtttctaacctagaatatttttactgaaaaacacaagttcaaaatattctgtcaaaaatttcttggttcacctaggcaaacactggttccattctgctttttgatagtcatattcatgaaattagttatcaggtttaccagttgggagtgcatataaattctcctgattagaagcagagttacttcccctcacaaatatttccctgaaatttttatttatttcaataacaactgaaaactctggggatttactaacttattttgaatctagatcatacatatctatcttggtcttttccataggatttgcttgggtttaaataattgtttgatatatttgaggaaaagtaatcaggagcctgcttatttatgatacctttgtaattcatttcattgctcagacaactaatcatagattagcgttgttagataatgatacgtcccctgattttacatcgcattgccgtcttaatgaatttattcttcaccatgttattgacatcttgggagaagtgattaaacatgcttaattaacatttaaaagttcccattttgtttgtgcacctgatggtatgaatgagagctactttttgattagatatctgccctggattattaaagcacacattccattcattgcatcccttttgtacaatttacatttcttgctttgagttttgttactttttattaatttcaggacaat

SEQ ID NO: 84488 - DNA, 740 bp, Citrus clementina
  Intron number 1 from transcript clementine0.9_011224m (loc us clementine0.9_011229m.g) derived from phytozome v7.0 (c hr-ID scaffold_49; pos 1130508 to 1131247)
ccctctttaccgatcttgtcttctctttgcgcacggtaatttctcagcttttccttgctttttctcgttcaattttcttatctgggtgtcgttgattgagtacgagttttgatttttgtcatcagatttgtcttgtttccccttctatgtttttccttgcttcagaaatatgttgtttgtttgttgtttaatacgttcagtttagcccttttatggaggttggcttgttcgtgtgtttgttttcctaaagtttttgtattgatagatgtgtacatataattttgtgatgagaattactttttgcttctgggtttgattcatttgcctgatatttgtttgatattttactttactagctcataattctgagataagaaaagctattttttgaaaaagtgtattttttttccgaagcagagtgattttctgttttatttatttatttaagtggatcagacttataattaataaaagagtaaaattttcttgtttggtgctgttttatttgctggattcaaatattaatttgtttgtttgtgtacgtacaccatctgtggtgtttaatcagggcaacagtactttgtttttgcattttatgcagctgtattaaatctggtgtgtctatacttttatctctcggtttgtactgagtatttttatctgtgggtttgtattaagtattgtttttgtgtgatatttttgaaggttgcaattacaacaaagggatcgtcgtcgccact

SEQ ID NO: 84489 - DNA, 874 bp, Citrus clementina
  Intron number 2 from transcript clementine0.9_011224m (loc us clementine0.9_011229m.g) derived from phytozome v7.0 (c hr-ID scaffold_49; pos 1131885 to 1132758)
tccacggatcagcgaataatccacctttgccaaaggtaaatgctattttgaaattcttcattctgattctttaaaagttttattgaaatttcagcaatccagcatgttttttctttgatagagtaccctattgcactgcagtaacatctttctgtgtctataggttaatggtttgatgattagtgcttttttttgtgctatttcactgttccaaaatgtgttaagttagttgaacatattaccatcaaggatcaaactaggaacccatgggatatggtatccaaggtagagaaaaagggagagaggtgacaataagaatgaggggacaaaacctcatgagagggagggaatacatacaaacccttgttagttttgaaaagaggcagtggattttcatcaaagggacaaaaagatagagtttttaagagatggggaggaaaactaaataaatcaataattttacttcatcctaaattgagtcgtcgtgcaaaatagagttacaagtatcagtctcgaatgaaatcaattttcacctggtgagcagtttcgtgcatgactacattgttgttagaacaatttggtatatatgcattattcattttacgtgcattcttattctttgtattggaatatggaattctccagtttagaatgatctgctagagctcagatttgatttgaactcgcatcttgccgatgtaagttgtgttttgtgaagttttttgtctcttgtggttataggtgtttttatgtctcatgaagctattgttcaccaaatttagaatgctcagttgtttgggtgtctgtgcttattttcgttttatttttatttatcaatgacctttgcaaatttttacttcattgatgtgcagtt

SEQ ID NO: 84490 - DNA, 673 bp, Citrus clementina
  Intron number 1 from transcript clementine0.9_028393m (loc us clementine0.9_028393m.g) derived from phytozome v7.0 (c hr-ID scaffold_5; pos 5495613 to 5496285)
gataggcttgtcaattgtctttgtacaggtatctctttgcctccctctctctgtacttgtgtaaatctttgggtgaaaatcatttatttggtaattttagctattaatttaagtggaatttgtagaattagtggaaaagttattaaatactttaatgtggccattactggatacttgaaagttgtaggattaatcaactctaattgccatattataatattatatggtactccatgtacacagaactatgctcggacctcaggagagtatctttttgtttgaggtccctggtgatttgcttcctccctattgttttgtgctagttgtgttcattctgtcacatctttatccattttgaagttattgtagtaattaatgccctggatgtagttcattgaaatagtttgttttacgtggaaatatgcgtaactaatgatggcatttgatttgaatgtcatcatccttttgtctcttctttgtttttctaggattatagtcaccactttgcaaccaggtataccccctgtatttgtttgtcttcggatgtaacgtaaagaatttgacatttattgaattaagtgtcctttttaatctctttgatgctcacatggcttatcatctatgtcctccatttgcagggactgtcttttatactggcagtgattctcaaaac

SEQ ID NO: 84491 - DNA, 822 bp, Citrus clementina
  Intron number 2 from transcript clementine0.9_028142m (loc us clementine0.9_028142m.g) derived from phytozome v7.0 (c hr-ID scaffold_27; pos 2898116 to 2898937)
ttaaaggtaattaagcttcatatcttctaaggtctactagacgcaaaaataagcttcatttattagtctgtcgctgcaatcagatatttgtaatgccctactgcttccttgactaactctatttaagtcttggcatataccacatacgcagaattggattccttgagcaacttaaaggtgttggacatgggcatgaatgaaatcgaagattttagtgttcgtcctaaaggtaattaattaaatgaaagattcaactacatttggagaacatttaattcatcattttgtgagggaaggctaaaaactcagagccaggaatggttgatttggttgtgtattttgagaataatatgtatattgtaacataaaacagttagtaaaattgctttgataccagttcgctaaagacgttatgtaatattttcgtgtttgaattcagttctagattttaattaacaatgtttctaaacagattacagaagcttgaggaggttgtatgcacttgttctagatcacaattagagatggaagcaagttttttcaggcaatgggatcattcccatccctcaagactctttcccttcagttcagtaatttcacaggaactgtgaatagtcaaggtgcggaggttacaaggattaaaataaaagataaagaaaaacacacactcacatgctatctaataatataatgtgttttgtcctttagtacattagaatattattttttattttttaatttgttatttgattaaaatgagtgaacctcatttagaaaaaggcctatatatatatatattttttttttcttttttcaatagaa

SEQ ID NO: 84492 - DNA, 695 bp, Citrus clementina
  Intron number 1 from transcript clementine0.9_019815m (loc us clementine0.9_019815m.g) derived from phytozome v7.0 (c hr-ID scaffold_20; pos 1423893 to 1424587)
tcaagggtcttgacaatttatccatttcggatcaggtaccttctttatttattttttattttttactttttattcccttaggattctacttgcagatctattaaaattgaatagatattagttgttatttttgttatatttttcatctgttttggtctctgagaaaatatgtgcggctgttttgtttgatattcggagaaattgtgagtattgtttatagatttgaaaatggtcggtttctgttttaggtattaatgaaagaaaaaatcaagattgaatcttttgttttgtgtcttgttttctattttttaaaaaaatttccctgctttttatcaggtacgaaacacaacgttagtgcttagttttggctctggaaaaatcgtgggattattgagagaatagagattgcactcaaaatgttttaaaagtctctcaggttccaacattttgtacatttatgatgcaaaatttgcttcttctttttgccctttttgggtttgattctgtgaagtaatgaattgaagcgaatttcgatgttttggggatcaatgttgttgttagtttgctgtttagagaaaccatttttaagctttggtcattcatcattgattggttgtgattgtaggttcatctttatttcattctagtgttgaagttatacagttggatttttttcctctcatttttagggagaa

SEQ ID NO: 84493 - DNA, 850 bp, Citrus clementina
  Intron number 1 from transcript clementine0.9_015934m (loc us clementine0.9_015934m.g) derived from phytozome v7.0 (c hr-ID scaffold_5; pos 6901304 to 6902153 reverse strand)
gattttggccctggaagcaaggtatggattcctctgtcttgatccacattactttctgctaggtttaatctcttcatcttctatttttaatcggacatcattctgatcttttagttgtgttctttcctgaagactgattaagaattgtttaacttcttaatgatttctttaccagacagacatcttctaagaagctgtccacctttgaaggcagattaatgctaagacattacagtagcttcttgattttctttcttctttctgttgagtttctttttagcactgcattagatattgattaaacatttggattctgatcaagatttatgagcttgttgtgaatgcgcattgtccagttgtttcttgataaatcaggggaagaaccaaattatttaatattaaaaaaataagacacctcacacttgtccaacatttagaagtaaagacttgaacacgtgattcatctttaggccatacagaaagtttcttaatggaaaaaaaaaaaaaaatgaagtaatacttctattaaaaaatcaaaagaagtttttggtaagattcaacaagtttaacctgcttgataacaaataaaaaaaaaaattaacaaaacacacacacacgcacacatattgtagtgatcgagtttagaatcttagactttgtttattttttcagaccttaataatatccagatcttaaattagaacatttctctctctctatatggattagtattatgtagtaacatattacttgttgacacaattaaactcctgatattctaaatttctaatcgcaatttttccttttgttgtcagaaaaacaagaacaaaaaaattgctaatcagtccat

SEQ ID NO: 84494 - DNA, 587 bp, Citrus clementina
  Intron number 2 from transcript clementine0.9_010740m (loc us clementine0.9_010598m.g) derived from phytozome v7.0 (c hr-ID scaffold_23; pos 1666716 to 1667302)
ttattaagattcttaagcctgttaagaagaagaaggtaagtttcgacgtgggaaatatgtttgttatttctaagttttattttgctttttttcattatatgcacgtgtttctagatatttagtttttgtggatggaatcacgtcagttgctgaagaatgtgagaattgaaagttatgttggtaggcacatgtattcctggaagagttttgaattagaatgtgtattttgagaacttctttattcattggaatgttatactactgaggagagcgttgattaaattgttgtgcttatgttaaaatggaaaagtttttattctattttattatacatgcatgtatgcatagcgaacagatactctttagttgaatctgtattgaaaactatggttggttatgcaagctttgtttttgccctccatttccatggggaacttcttatgtttctggtctgaagaaattcagattgtgttaactatgcttgtgaagcttgtgatttatggcttagcttgaaattggaaagcctgacattgtttttcttgtcaaatgcagattaagagggagataaaaatacttcagaatctttg

SEQ ID NO: 84495 - DNA, 933 bp, Citrus clementina
  Intron number 2 from transcript clementine0.9_023523m (loc us clementine0.9_023523m.g) derived from phytozome v7.0 (c hr-ID scaffold_29; pos 2713099 to 2714031)
atcaagtaattttcacatacgtactacccttttctttatttttcgatttatcacttctcttggcttctgcttgaagccgttgatcaattattatctctgagcccgttaatttgtttcttcggccgccaaatatatgtgggaactgggtatctgggatatcagagtagggtgatggggtgctgttatgaacaaattgtggtatcaaacaagcatcgatttacattgttctttgacggttcatcatgtccaaagagaattgaggacaccgatgaagcaattttgatattcttttaagaaacaagtgatcggcgtatgagcccgggggaatatatgcttttggtatcattggttattagactttagtttttagcgatataatgaaactgtgaagtgaccctccgtttaaattgctggtgacgagagtctgacagttgctttgcttttggtttgatgtactattcccttgcattcaagattcccttcaaaaagaaagaacaatggtttaataatgaataaaaaaactagaacaaatcatgacgaactggaatcactattctttaatcttttcattttttttactttaaatgacaaatttgtactgaatgaaaatcataaggtatcccatgtggaaggtgagccgttaaaccgttgaaatgtaatggggttagcagtgaagcaaagatttcttcattcatattcatagctgagtttactaaaagacacagtatgaatttttcaaaatatttttatctacattaatgaatgatgaggtgagaagatggttaataaagtagcatttggtatcatttttttcttgttgatttgatgtttgattgcttgggaggcctaatcggtaattaaacacaagttaaccagattttaatgttatccattgataccatttctttgggtgcaggggacgagtacgttggg

SEQ ID NO: 84496 - DNA, 524 bp, Citrus clementina
  Intron number 1 from transcript clementine0.9_027457m (loc us clementine0.9_027457m.g) derived from phytozome v7.0 (c hr-ID scaffold_1; pos 5560643 to 5561166 reverse strand)
agtgttagtaaatttctcttctttttgttttatttgatttgatttgtttgtttaccaagtattgatcttttgggttttctggtttctggtgggatttttatgcgtttattgctgggagctctttttgttctgtagtgtttgctagttatgaatttttgaggctattgaaggagaatttggcattttacttgaataatttttaattgaatttgtggcagaatggttcatggattgtacttatagatcaagataacgtttaaaatctgactttggagtgttattgagtggcttgcgtgctctctcgtggaaattttcttaaaggaactcaagaacagaccaagtattttgtattcttgaaatttattgggaaatgaaatgcttatgcaattgtgctttgtatttttttcgggagacatttgatatttagtactttcaaacatgtatgtttttccaatatcgctgtggataattgaatggtatacttggcagctcccaagtgtttgtttccaccagaaccggaacat

SEQ ID NO: 84497 - DNA, 940 bp, Citrus clementina
  Intron number 2 from transcript clementine0.9_010809m (loc us clementine0.9_010822m.g) derived from phytozome v7.0 (c hr-ID scaffold_82; pos 1093790 to 1094729 reverse strand)
tgggcccatctcttcttcatctgatcttgcttctggttagtcttttttttttttaaagtctttgaggtttgatcacaaatgggtgtcttctcttttttttttttttttggtctaataatgtgaaaaatgtttgctttatatgtttttgcttttgtactttgatgagtggctttgcaatttttttccccttctggtgttatagatcgtctagctggaaatttttttttgttctttctctagtttagtgggaaagcttgtacttttttgtggtttagggatgcatgctgtgtttttgtgtgcgttattaaatgggtggccttgattttcttttagtcatgtaacaatccctctctctttctcatggtcgtgggggtgggtgtctttgttatggattagttttagtgaggtcagtgatggatttgttagcttttgtctgtgaattctagttctctcttttattttgcgtcattaaaattttcttcaagttggtttgtagagtttgcaaaaagctttgaacttttgtttgattttgctaatgttttctctgctgttgcctttttgcctttggatgatgtggctttacaatgttgtgttttgtgttttcttttacttaatttttgttacctcttggggaatgagcatgttgaaactgttgacaatgttgagcaatttattcattttcttcagagaatttttcttcatagtttgagatatttaattaagcatctctttgttttcgtgtcattcgttgtcttctctcttgtattggctacctcagtggcggacttttttaatgttgaagctttcttgtggtaattgtatttctaaaatttgagtccttatgttttgtggactgggactagggtatgaaaatctaagtttaataccttctctcatcaatttagtagaaaagcaggtcggaaatcatcttgagggggtt

SEQ ID NO: 84498 - DNA, 490 bp, Citrus clementina
  Intron number 3 from transcript clementine0.9_032563m (loc us clementine0.9_032563m.g) derived from phytozome v7.0 (c hr-ID scaffold_10; pos 1207988 to 1208477 reverse strand)
gccttgccaattcctcagactcgattgcttcacatgtgagcatttctttctacccgcctctttcattacaacaaacataactttggtcggcacaacatggtctgattagaaagaaacatgagttactatttattaagtccttcaattggaaattatcaaaaacattgactgacttgtcaagcttaagttgattcttcacagtgtttttcattcattgattaataagactgaatgtctggccaagtcagctcctttacaaacagaagtaaaggcctaaaatccaaatctatgagcttcgacacattctttctgaaagtcccctgccaagcatgcattattgtcaattaattagaaacaaatatatgcatcttactttattgtctgtactaccgaaactaatgcttaatgtgatgattcattctgttttgactttggtgaatgttatttctttacagcaatcaaattccactcgagttctaattcctgtttt

SEQ ID NO: 84499 - DNA, 633 bp, Citrus clementina
  Intron number 2 from transcript clementine0.9_013669m (loc us clementine0.9_012800m.g) derived from phytozome v7.0 (c hr-ID scaffold_1; pos 10685083 to 10685715 reverse strand)
tgcttagtttttcagagctccatttttaagctgaggtttgactttttaaagctttgtaatttatgaatctcttgtttttctttgttattaatcagcacagttaatgcataacgatcatgttcaaccctaccactattcttttgaaacacatttagatatataatttgttggattttgaattctttttaaagcaaagcaggactaagttagaccttagttcacatcacatgtgcttcagttatcctttctgcccatggatgatggatctgttagttttgtactggtagaatctcttcttgtgacttagttgcttttggcatattctgtttggaatcatatgcagcataatttgttatataaagattgtttgattgtgttggaaatttcaatattgatcattcatttagtctacgttccattgattgctttacaagaatagacagctgttattgaatggaaaactctttttgagtaaaatatttcctaaaggatcaaattgctctttatttctctgtctttcattttaaattctgggtgtttgtgtttagataaaattctttgaacgtccaagtgtggtagatcttcttatgttaaacaggttgtacggaattaaagtatcagattttagatttt

SEQ ID NO: 84500 - DNA, 568 bp, Citrus clementina
  Intron number 1 from transcript clementine0.9_013669m (loc us clementine0.9_012800m.g) derived from phytozome v7.0 (c hr-ID scaffold_1; pos 10685765 to 10686332 reverse strand)
ttcttctccggcaagtgatcaacaaaaccaaccaggtgaggtcagcttttaatttttttaaatttttttcagttgctcccgtctcgttggtctatgattactgtaactgagtgatttcttttattttttctttgatttttctatttctggtggatttcttgttagtgttggtgctttaatttttttttttaatttaaatttctgtgccttgctttgctgctgtttgcttgtaaagaaaattaaagcaaagaaaatgtgcaagtcttgtgtaaatgatttctgtagttagcttccgtacagataacagtgaaaatgctcaacgctgctgtttcatcctttcaaaaataagatttttgtattattcaggaacctaatattggaccttctcttttcttttcttttcttttcttttctgcatgcatttatttttctcagcattattggttgcagttacctgtcgagttcaactctgttcgtaatttttaattttagtttcaataaattgtttgatttgtcttttagttacgtgcaatctctgtttgtagtgtgtagaaacttatttaacaaa

SEQ ID NO: 84501 - DNA, 452 bp, Citrus clementina
  Intron number 1 from transcript clementine0.9_007352m (loc us clementine0.9_007352m.g) derived from phytozome v7.0 (c hr-ID scaffold_40; pos 638196 to 638647)
tttacgaattggacgttattagtggtatcaatttttattaattaattttgttcttttctttttttaagaattttaaattctttgacaagatatcatacaacctgctgctgctgctgctgctgttgtttcttttatattattaatatcggggtcctacttttaggaagaggagtatactaacgatcggacggtggtttctgccagacagtgttcattaaaattggaattttcccccccttcagtcagcctctaagatacaaccaaataggggctcaaaattgagctctgttgtcgttttgtatttatttattctactaagaggatataattaaatgtttgatgctgtatatgtaaatacaacattataaatacatgcaaatgcattaattacttgagttattaattacttacacatgaggtttttgttttgtgattcaggaaaaggagagcta

SEQ ID NO: 84502 - DNA, 923 bp, Citrus clementina
  Intron number 2 from transcript clementine0.9_020250m (loc us clementine0.9_020213m.g) derived from phytozome v7.0 (c hr-ID scaffold_29; pos 544404 to 545326)
cctccgtgttcgttcgccatcgtcagccgcactaggtaatttcaaatttacatacgttttgtagcaatttcaaatggtgtatgaatgggataggtctattataatttcaaatttgtataatagctgtttataactcaaccgggtatggccaaaaggactcgttgaggatgttttattggtaattgatatttgtttttcaatttttttcattagtgatctggccattagaataggcaatttagaaactgatctggggattataaacatgaactggtaataatgccccattttcttttaaatttgcaatgtgttaggagtcaaagccgcatccaaaataccaaacattgtaccgtgcagaaaatattcatactgctgatactaaggtcgaacctgaattgcaatccaaaccgagaatttacaactaaattttcaatctgaaccaatccaaaaatttaaatcccaaaatttcagttcggttcgggtttgagcttcaatccaaacgggttgaattccccaacccgaacattttggaacgcaaactacatcactcggctcgcgcgcaaccccgctgcgttatgttatggaagaatttaaaccaaacaacccgaaccgaaacccgatttgcccatcccgaactagaatgcctatgtggtgagatactttggccctccatgcccttttggggaaggatcctacttaaaaggtcttacaaatcatattaccgagagattgtgttttgtgtaattctgcaatttttgtttagcccttgatcagaaatgaaatggatttttatcagctgagatctatataattttttttgtcatacaattacgcctcttgtatgttctaaaatcacatgattgtttaacatctgtttgattcttttttcttttttaattctcaaattgctgtaggattttctg

SEQ ID NO: 84503 - DNA, 855 bp, Citrus clementina
  Intron number 1 from transcript clementine0.9_023510m (loc us clementine0.9_021533m.g) derived from phytozome v7.0 (c hr-ID scaffold_1; pos 1736269 to 1737123)
agtctcttcggcctcggaaggtgaaaacaaataactgaaaattaatattttattttcactaattaattcaattaattttctcgttaatagaaattcaattttgcattttgttgtagcgcgagcagatctgtatattttcatgtgatcaaccgatgctttggctaattttctttttctttttttacttttcctaatttgtgcgatcgtattcaatttactttttggatgcggtgcaaaatgagaaaatatcttgataatttgattgtaatatgaaaaatcttaaaatttagattttatttagtcgctgctcttgatttgttgttgaaatgcaattatcattttgtgtttttatttgaatttcttgtttattattggaattgactttgtctaagactaatttttttttttcccgttaatgtgccaataggaatgtgatttctgagcttgatcatgtatgtaagccttaaagcaaaccgatgatagtgtaatatatgtaacttttcagagatctttctatagcctctgttgttaaataacgttgtaattatgatatagaatgtctatcttatgtgtaagagcttgtaggatttagcaattatgtaaatacagtgtaaaataaatggtcttcgcgttaaatttaaatttaattcttgcatatggatgtgggggagagtgtgaaggcatgtacaatttggagaaagtgaagttaaatatgagtccccatggtaacactatctgtttattattgatgccttgtagaactttgtcttttatctttttcagtttatgaatcttgctttataaatttttgttgaaacagaaatcagagaacatttcgcccaaaaaagagtgcac

SEQ ID NO: 84504 - DNA, 945 bp, Citrus clementina
  Intron number 2 from transcript clementine0.9_023510m (loc us clementine0.9_021533m.g) derived from phytozome v7.0 (c hr-ID scaffold_1; pos 1737103 to 1738047)
ttcgcccaaaaaagagtgcaccctcggggagtaaggtttgtactcttcatgccactattgcttttcttgctgattcctttcttgttggaaaatgatataatacgtgctagccactgattggtattgctctttttattttgttttgtttgctcaacatattgaattttactaaatttgttgagaatctggttgtttgactcgtggatggaataaatacttggttcaactttctttgttttcagtaatatttagttattagttaaattatttagggccagtgtcatccttggaattgaaccgtcctgcttgaaaaaagggcttctgtagtatttaatctgcaagcagccgaccaatacattcaaaacaaaaggtggtttcattatgaaacatgttactgttgaactgagcagatatgatttacacaaggcataaaagctgtaagttttgatggtgtttggataatatgctggtttcttatttcataaggatattcaagggtactctgtatatttggtgaaacagaaaattctgctagaagggttataatgttgagggattgagcaactaaaagaaattgaaacattgttttagtttggcatgtaagccctcttgttgctcatgaaacttattaatcatcagaatttagccttcggaaggtgcaaactaaaatataatcataggaaatggacatctaaacttcctgaatttggaaaaattggcaactgttttagttttatattttcttttcattttggagatgggagttgtaactttttggttatgatcttaatttagcatttgtcacatggtgctgctatatttgaaagtttcctttatattcgacttctaagtttttggcatttgtatctctatgggcttttaattttgaatttttaattagtcttgaacttctgatgcagggtgcacagcttagaaaacacattg

SEQ ID NO: 84505 - DNA, 765 bp, Citrus clementina
  Intron number 2 from transcript clementine0.9_026074m (loc us clementine0.9_026074m.g) derived from phytozome v7.0 (c hr-ID scaffold_1; pos 9735299 to 9736063 reverse strand)
ttaagctcaagaaacttggcattccttgcaagcatgtaagcatttcgaattttgctggtgcttttatttcaatatatgtcctgttgtttgtttggggaaatgaaagatacatttattgttggcaagatttgataaatctcattatgttatgaatatcagatacacctgataaccaatatagtccacacaaacacaattattattattagtacctcattcaagtacatggtttctcatgtattggatttcagcagctactaatctgctacatctagattaactataagaagtagaatccttccataaattatatgcatggttttagctataatgatagtgggctaattatcattgtgtccagctctgagcataaacaacatccaaatacttgcaaatgttttaggttgtatatatggaagagcgggttacatgttgtatgcaatattctgaatttctgcttgctatctgtcatatcctgtatatggttatgaattatcaaggttggttgcattgtcaagttaaaattctgacattcatatgcatttaccattgtacaaagaaatagtggcacaaagtgtatctcaggaatttgaaaatattattaagttttgaagtatgcatgtcctttagtttttactcatggtgaatatgaaacttttattgttttttgcttccagaattccttttgttacaacttacaagttttgacttgtgttttcttgtttgccagaggaagctgatactgaaacacacccacaaatatag

SEQ ID NO: 84506 - DNA, 689 bp, Citrus clementina; identical to SEQ ID NO: 80463
  Intron number 1 from transcript clementine0.9_026074m (loc us clementine0.9_026074m.g) derived from phytozome v7.0 (c hr-ID scaffold_1; pos 9736151 to 9736839 reverse strand)

SEQ ID NO: 84507 - DNA, 817 bp, Citrus clementina
  Intron number 3 from transcript clementine0.9_000668m (loc us clementine0.9_000668m.g) derived from phytozome v7.0 (c hr-ID scaffold_1; pos 11278080 to 11278896 reverse strand)
taaaaagtacaagtgaaaaggttggtattattgtctgtttggatagtttctatattttgaattgacttgtttcagaaatgttatgtgcttaaactttgagaagaactttcacttttgtcctacttttttgcataatcattaatactgatcttttaccctttattcgcactagctataattggtgctatgtcaaaggtaagtgcatatagatttgagttgatttgtttattgtatatttgtgtgggttttctttttggtaactgtgttccaagcatgaagtgtcattactagacatgtcaatacaaaaatttcacttcatcctcagcaaaatacatctttccttaacatcatatattttagtaaacttcaagacgttgaaccacccattatgattgaaacttccctagaagatgcattgatgaaaatccacatatcaaaagattttggtggtataaacatgcctgttgcactggtacagataatccatttggtctacagagcattgcccaatcctctactaagatctttgacatcatataaatttattttttgtttttccaccagagcgcctcctttcgcttttcaaagttttgtttgctctgcataagcataagcgaatcttcccttttcttttgagaatgccttggaaatctctccttacagaaataaagatgaatacatattatttttgctaatatgcggaaatcaagttgaatacgtattatttttcttaacttttgtagcctaattctcctttaattgtatgtaatgctgttgctatcttggcctatttttccaggatttgcgttccagaaac

SEQ ID NO: 84508 - DNA, 566 bp, Citrus clementina
  Intron number 1 from transcript clementine0.9_003983m (loc us clementine0.9_003983m.g) derived from phytozome v7.0 (c hr-ID scaffold_20; pos 410871 to 411436)
cctcacggagttcggtcgtcagagctgtgtccacggtctgatttttcgtatattttctgaattttaatttttggaatattctctctttctctccttttttttaacccctccgcatgttactatttaattttcttttattatgcgtattgcgagaagtatgttagttaaacgtatggcacggcgtcgttttttttttttttttttgagaggtgttggacacttttttggctttactaaatgaagaatttgtttgttgatttaatttgaaaagatttgaaacaacttttggaaaaagtaaaacagaaaatgaaaatgtaaagttgaatatttgattgtcgagatcggaaaacgtgattgataactaaatttaaaaagaaaatgttttttgagtcaaaagataatagggctctcccttgaacattctaatcgaaatattagggtaaattttgtgttaatcaaattcgtattctgttgttaatgtgttaatataataaaaatggtggaataaagtaaggtgcttgttttgtgcagccagtaaagccggagactgagaccaagactgagac

SEQ ID NO: 84509 - DNA, 667 bp, Citrus clementina; identical to SEQ ID NO: 82364
  Intron number 1 from transcript clementine0.9_003830m (loc us clementine0.9_003465m.g) derived from phytozome v7.0 (c hr-ID scaffold_29; pos 844155 to 844821)

SEQ ID NO: 84510 - DNA, 246 bp, Citrus clementina
  Intron number 1 from transcript clementine0.9_004313m (loc us clementine0.9_004313m.g) derived from phytozome v7.0 (c hr-ID scaffold_29; pos 684641 to 684886 reverse strand)
tttcagcctcctaaatctacaccaagctcctccaggttctcctctttgttaatctttttgtttttgtttttggttttatttttatttttaaaatttttactttgagcgtttggttcccgagaaaacgcaagaagatttcggaaaatgaaacactgagggggaaaaaaatggcgaagctatcttatttatgcatttgtgaaatacagagcatagtattaacattttttctcttctaaataaatagta

SEQ ID NO: 84511 - DNA, 1047 bp, Citrus clementina
  Intron number 2 from transcript clementine0.9_019770m (loc us clementine0.9_018606m.g) derived from phytozome v7.0 (c hr-ID scaffold_111; pos 271251 to 272297 reverse strand)
gtatcggctgtaccagtaccattcagtttagctgggtaagcatgtttacttattctgttaaaatggttcctagaaacaatctttagatgacgattgttccatggtccatcagaacttttggtttgagttgcaactttgcattcttttcatattcaactcacggataataataatctaccagttctacggaaatggctataaaaaagaaaacagatcaaatgatcaatttatgaagagtaatgatacagccacaaactcttgtacaaacttattttgtacaaactgatgtggcatgataagattggttgaattaaatatcacttagcccacatgatttgcttttattaatttatattttcattcaaccaatcttatcatgccacgtcagtttgtacaaaataaatttgtacaagagtttgtggctgtatcattactcatttatgaattcaataaagatttagctttgcataaaatttctaatatgtgtgattaattcttacactatgcttatatgggtcttttttttaatcacatattaattccaatcaaggttataattgtacttttgtttgggtcaaaacggtcaatcgtcagatttacggttttttcccctcctttaaatggtttctcagccttctcattaattctgtgatggagtagtaaattatgtatttaaatgagataggataaattttagaagttctttcctttcgattttaatcttgggatagccaatggactcataggtcattggcaactcatgcgcccaataattttgggagcatgagtttgagttctctttttataagggtttatttgactccccgttttggggtaaaataattttttttttattattaagtgagggtcgttgtttggtatgtgccatactagaatcataaaggagattcctaattgttataatgttatctaattgtaaatatcagtatttcaaaaaaaaaatctaatcatgggattttctgattttattttatttcttttttttttatagtgttctaggtcaatctcagtcttcagtgcgaatac

SEQ ID NO: 84512 - DNA, 350 bp, Citrus clementina
  Intron number 1 from transcript clementine0.9_017049m (loc us clementine0.9_010481m.g) derived from phytozome v7.0 (c hr-ID scaffold_5; pos 3304514 to 3304863)
gctgtcggagacagtgagttgagacttgttttttatttttcattaatttttggcctgaattaaattattcaaattaattaagttgtgattaatactttagttatttaatttaataaattttatagcacatgttttaatttttttcttctattcaatgttcatagtatttatttgatttgatttctgtcatggtgatggtgtattggtattgttgcgatgttgctaatgaaattttgtttgttagtttaaaaggatgcacgattggtagttgatgcaaaatttgttgcattttgccaattttcttgggagttttagggcctgttcggtaaacttaacagatcaaaacccac

SEQ ID NO: 84513 - DNA, 295 bp, Citrus clementina; identical to SEQ ID NO: 82214
  Intron number 1 from transcript clementine0.9_007995m (loc us clementine0.9_004597m.g) derived from phytozome v7.0 (c hr-ID scaffold_1; pos 8404828 to 8405122 reverse strand)

SEQ ID NO: 84514 - DNA, 450 bp, Citrus clementina
  Intron number 1 from transcript clementine0.9_014000m (loc us clementine0.9_009631m.g) derived from phytozome v7.0 (c hr-ID scaffold_29; pos 2882104 to 2882553)
acgtttttcttaggcttcggatatctcattggctggtaattgcttttgacttttgttgattctgcattaaagatagattattgcatgcaatcaaagtgtgtacttaattagtttttttctcagtgcgatattcaatgacaaatataacagtagttgcagtagtcaaggctgctgatgattggcgactctattttatatgtgagccaatgtttgaatttctttgctatgcgcggccataaggctgtttaaagcaatttagggggatgtacttttgaaagagggaccgtagagtcatccggcttactttgaagtgatgagttgattttccataacatgttttgctgtaattgatttttttaaattacttaatgaatatttattttatctgcatatgcttttttgttctcggaattcttgactattcatttaatttgtagccacgtatactac

SEQ ID NO: 84515 - DNA, 447 bp, Citrus clementina; identical to SEQ ID NO: 81040
  Intron number 2 from transcript clementine0.9_014000m (loc us clementine0.9_009631m.g) derived from phytozome v7.0 (c hr-ID scaffold_29; pos 2882591 to 2883037)

SEQ ID NO: 84516 - DNA, 570 bp, Citrus clementina
  Intron number 2 from transcript clementine0.9_002286m (loc us clementine0.9_002286m.g) derived from phytozome v7.0 (c hr-ID scaffold_38; pos 169478 to 170047)
ctgcagttgagggtttcagtagtttttcctgctttttttttctgtttatgtttgaaatttgaattttgaattttgagctcatttttcagctttgttggctatactgttgattagagaacaatttgaaaaaattagtgtattactaggatttcgagtacaacattttaaagaaagcatttcaagcacatttagggtcgatgagtatgtttggaattgagatactgtaattcacaacttggaagataatgcaatcactagttgttatttaagtgggtgttttgtctgtagacattaactgttgcgtttagttagtagacattaaccaccaagtaaaagtgggttatcaaacacttttgttattgttctctcaaagttaattaggaaacaaagtgaaaaccacaatcttactgaagaatgtgttatgtggcttaaggttttgaaagttagaatcaaaggagagaagtgagttattctagtgttttttaataatcactacataaatagaagcacataattttgatttggaagctgattgtttagatgtttatttcacaggaactgtatttgcat

SEQ ID NO: 84517 - DNA, 563 bp, Citrus clementina
  Intron number 1 from transcript clementine0.9_008012m (loc us clementine0.9_008012m.g) derived from phytozome v7.0 (c hr-ID scaffold_53; pos 1226352 to 1226914)
cagcccggcaagcatttttcggaacaagcaacaaggtcagttcttggtacccgagtttgaagttgctctttttttttttttttgaacttgatctgttcgtcaatttgatttacatttgttagcgagaaatatgagtgttaatttaggataattttgcaatttgcaaatctttacttgatgaaaatgaatggtctagttttgttggtacaagaaaatctatcttacacttgaacagaaatgttctagtatccatctaacagtccggttggtgcacctcttcaagccgggctttgtaaatttaccgaaatcatcagtttttggtttctcttttccagtcacataaggttttttggtaggaaattaacagtgtagcctatggctgaaggcattaagaagattagtaataatctagtatagcacttacactgttgtggatgttgttttctttttttttggtttctcccaattgattcacactgcctggtgagtattgctctaattccatcagtaaacatttcaacattcaaagttatgattaatttgtgataatttttgcaggtttt

SEQ ID NO: 84518 - DNA, 545 bp, Citrus clementina; identical to SEQ ID NO: 82857
  Intron number 1 from transcript clementine0.9_033658m (loc us clementine0.9_033658m.g) derived from phytozome v7.0 (c hr-ID scaffold_38; pos 159306 to 159850 reverse strand)

SEQ ID NO: 84519 - DNA, 966 bp, Citrus clementina
  Intron number 1 from transcript clementine0.9_032522m (loc us clementine0.9_032522m.g) derived from phytozome v7.0 (c hr-ID scaffold_1; pos 12239628 to 12240593 reverse strand)
tccggtcgtctcagtcatttttctggcagaaaaaggtgattatatattttgtacattttgatatttaaatcgatctacactcttggcatttgagaatttgctataattattttcaaatgaataagtataagagcatcttgatgagtttctattcatcctgattttgttgccattgattagtattgattctgtgagatctttcatggctatcgtttatcctataataataataataggcgctttccactatttctgaaaagttcatgtctaaattggtttctatatcaaaaatacaaaacaatcaatttcttgtttatattttttctttcaattaattttacaaaacttgtgtaacgcaaattactagagcctaaaatggtatcacgatctcactaggccatagccacataaattgtaataattaaattgtaatctacatgaaataatgccatttacatatgtgccgacgaacatcgttctttctttttctttgggatcaattaataattctctgcatattatatttaattaaagaagaaaaaaagttcgtgaattaggttgtaaacatccccagtgaaactaccgtaccagacactagtattttcttcgggttctcgcttcttagctccacatgcacagagatgcaccccttttctttgtttattttatttatttgttttgaatttatgcagctgctaacttatgttatatgcgacttacagcaacccatacctagttaccttgaaaatttttcaaaccatcaacaactgcaaaactacatagggttttggttttggctacgtacagcatatgtttcacttaaaaatcatttattcgttgaacaaaacaaataaactacatggggttttcatttttctcactttgattccaatttcttatgcctgctgcaatcatttattcgttgtttcacttaaaaatccaggatcgaggacgtgttttctcgct

SEQ ID NO: 84520 - DNA, 1050 bp, Citrus clementina
  Intron number 1 from transcript clementine0.9_006317m (loc us clementine0.9_006296m.g) derived from phytozome v7.0 (c hr-ID scaffold_23; pos 1395019 to 1396068)
gaattacctagtcttccgctacttgcaggaatcaggtaatatctattctgaaaatttatttcaagttatgattttgatttttttttaagcaagacggattttctttatctagggtttgtattatacttccaagactacaacctaatttggctgttttagatggtttctcttattcaatcactgttgaattaggttagggttggattgggagaaaaaggtataatcttggagatgatttttgtattttgtactgttatggaataacgtgcacgagtgtttagatccattcatgattttttttaagggtcattaatatgttgccgtgataatttttcattttcgtttgtttgtttcaggcaatgttcccctagggtttgctattacaggatgcatttagttgattgattgtggggttgtatttgttgttgattggtttaagctgaagttttcgttagcagcagatatggcgtgaccatcaattcctttgttttttgctgtgtaaatatgtgcgtgacggtgaatctcgcttagtatgaagtgaagattagtcactgaatttcattagagtagtgaggcagcttggctttcgtatttattatgcaaactttagcttatattttacaatggtaaaaactttagcttatatttcagcctgttcattggtttcagatggccaatatatagagaagattaacaaattattgtatcgtctactgtttgcaaattttagagagaagcctgaattgctagttcaattaacagtgaagatgtaaattactctgcgcttgcatgatgataatgtgatgtgcactgaagtaatatacttaattgctaaaaatatagtcttgactaatttccatgattcaataatgatcaattactaatgtttaaatgcaaagtggatttatatgattcaataatgattagttgttagtagagctgtaaaattatggcttctccatgattttagaaaattatatttaagtattttctcacttgtagcaaatctcactcctgcagggttactacactcggcttttgttttaggat

SEQ ID NO: 84521 - DNA, 963 bp, Citrus clementina
  Intron number 1 from transcript clementine0.9_008083m (loc us clementine0.9_008094m.g) derived from phytozome v7.0 (c hr-ID scaffold_53; pos 440413 to 441375)
gtgtcgttggctcagattctgcttcttctttctctgtaagcctctcttttatctctctgtatgtatatgtgaatgtgaatggtggtggttgtgtcgttttatttgtagaatttggtgtcattttggattgattttgagatctgttgttgtgattgatagggttttgttgaacatgtattcaattgagaatcgacttttttggtttctagttttttaagaaaatctgggtttttgggtttgtgatcgatgttgaccttgacaagatttgccgtttttgcagctaaaattttgttgtttatttttttattaattacaaataattgttggatttcattttactgctagcatgtactaaagagcattaaatgattgaaaattcttcctctgctgaataaatattttttaaatttttttttaaaggttatatgtgtgctaagaacacaattagtttgtttatttttagattcaattatattaagaaaagagctgaaattggatgatgcctatggctgtcaatcttattttgcttttgtgtctgtagagtacaagatattagcttgctgctgtctttgtatgcatattatgatagattctttctttcgagaattaaacagagtgaaaatttgtttaaagtagtgagtagatttagagcttatagaggccaagaatgctagaattttgcactggagtatggtattagagtttgaaattttataattacgaggactccatgtaattttaaatacccaccgtcttgatgtagtagatgtgtttgcctgaagaatctgctccttagtttagctgtcttgatttagttgaaattcttggagtggctcctaaaatatttttcatccttccatgtatttgtgttttactaacatcctccttgtaggtattcttagttttcaaaatagtcgtgcacatgcttgtctaatcttccaatcttcctttcaagataggaaa

SEQ ID NO: 84522 - DNA, 312 bp, Citrus clementina
  Intron number 2 from transcript clementine0.9_008083m (loc us clementine0.9_008094m.g) derived from phytozome v7.0 (c hr-ID scaffold_53; pos 441556 to 441867)
gaagagaaaggtatgatccaagtttttggacgatgatattttctatcttcgtgattattttcatatctgtttatttggattcaatttaatggtagtgagttgaggcttatagattcatgtattgagccctaataattgtggttttcgtgattatattctcttagtttggcagtaaagaaatgtttgatttgtttttcatggggtcataatttcatttttacattgtcatttgatctatgtttatatcaatcctttctcttacatttaataattcttccagtgagacgagagattaaaatcttgagattgttt

SEQ ID NO: 84523 - DNA, 950 bp, Citrus clementina
  Intron number 1 from transcript clementine0.9_024398m (loc us clementine0.9_024398m.g) derived from phytozome v7.0 (c hr-ID scaffold_136; pos 84389 to 85338)
ttaggtgttgagttttacagctacacttctttttggtaaatcttttcattctcttttatattctttcatttcatgtctgaatgtttctgattttcttggatgatcattttgtttcagtttcatttttggcattctaattctgtaaaatgaagcgacagattcatgtggttgatcttgatgaattagttagtgaatcagtttatctaaagattatgtttgctaacatttggttgatgatcgattatatttttggaagctttacaggggaattgcttatgtttttatgctgctaattaattttttttttcttttttcctctttggaataagaagaatcagtcaacctttattgttgaattggttttgacatttcagttgtcctttatcagactgctacctgcaatatgattgttgcatctctaagtaatgttttagagatttgagaaatttgcatcttcccatatgaatttatttagtcatcactcaccagagtactttacccatggcagcctacagaaatttgagccggtcagcgccggctctgaaagcccttaaaaagtctgatgcgccggcttagtcagcaaggagtgacattaaagtattgaaatttggtttatggtgcagcgattctctccatattgagttgactaccatcagaatcattttatatatccataaatcccctgcattttaatgttcattagctgaattaagtttctcatgcagcatctgctcaatataccttgttgctctgaaatgtcagctcatttcaagaactccattatttactctcttaagttgcaaaaagcaactgggtacttttttttatctgcctgtaatgtgatgagagtcatattgatattagattggatttcttctgtttcaaactagactgaaatgttctgattttcattggattggtattaaactttcagctacttggtaacaata

SEQ ID NO: 84524 - DNA, 842 bp, Citrus clementina
  Intron number 1 from transcript clementine0.9_030070m (loc us clementine0.9_030070m.g) derived from phytozome v7.0 (c hr-ID scaffold_139; pos 61160 to 62001 reverse strand)
tggttagcatatttgttgagaagcataatcactcattaacaacatcttgaaaaagacatctactgaggtctcatcggtctgtttcagaggtaaagaaatgcttgagtcaacagtttgattcagtaaatattccaactcatcaacaaattaatctttttgaattacaagctaaggcttgtagaacatgggttctatggaaaaagatatttataattatgaaagagattagcaaaatgaattaaaagggcatgacgcattgttgttgtatgaccattttctagttaagcaagaaaaaaaaccatcatttttttttcaaaattaagtctggatttgataatcgaataactaattgtttctaggctgatgtaataagtcgactggcatataattttacagagatgtggttatgtttgataccatgtacaacacaaattgttatggtatgattttagcaccattagttggagtaaataaccatggtcaaactactgtttttagtagtgtatttctgagtaatgagactatagagtcatttgtttaactatttgagcagtttaaggaagttatgccatgtaatgacccaaatatgattatcatttatcatcctacaaacaaaagctattaatcaagctttgccgaacacttaacataaattttgcaattggtacattttcttaaaagttaaatacagtggtgtatcaagatcattattggcactttcaaaaatgcatttaggaatcaaaaactaccgaagagtttgatgtaatgtggatggatgttgttgagaaagcaaatttggttgaaaaagtctagctacagagagtgtatcaaatcatatcaaa

SEQ ID NO: 84525 - DNA, 622 bp, Citrus clementina
  Intron number 1 from transcript clementine0.9_021193m (loc us clementine0.9_021193m.g) derived from phytozome v7.0 (c hr-ID scaffold_51; pos 742535 to 743156)
ttgctcgattttggattaaattcatcgaagacaaggttcgcaccacaactctagtaatcccgtttataaatatattcttctcaaatttatttatttatttgaggtttcgattagaccataagaataaagaacttcacccactaaacccccaactcttgtcctttgttactcgaactcgggtcatagtacgtatagcggattcacagtcaatcaagcctagtcgctcaatagcctttttcatatttatttgtaaaaaactctttaaactttcaactccttgtttcttcactattttgtttctagaaatttttattaaccagtagtggatttagcttcatcagggataaatattaaaagatacaaaacgttaaatttaatataattgtttttaaacatgaggggattttgattattttaaaaaaacatatagactaaaagtaatgaatttactaactctcttaactgacttttcaaacctttaattaaaggatattgtgacttgtgtacatattgtctaagttttttagcatacaacatatatattaatcatgtggtgataataattagattaaaaaatactgtggcagattgtcgctattttgggactgtttcgtagcattac

SEQ ID NO: 84526 - DNA, 737 bp, Citrus clementina
  Intron number 4 from transcript clementine0.9_002825m (loc us clementine0.9_002825m.g) derived from phytozome v7.0 (c hr-ID scaffold_10; pos 5522915 to 5523651)
agcttgctacatataaagagcttcttcggtcccaagtgagtgctcaaattggtgtctaatgaaagatttttttctttaatgatattggacaatgagcatgaggcatacaactcttttatgctttttgtatctctgactcatccaaactgcctaggttttgttcttgtggaactttgttaacaggctttcactgctaatgttgcactcaaaatattgtcgtttgcattgcttattttctgtgctttcttttacttccaccccaaaccacaacaatcatgttttacgtttaacctaattgaaagatgcaagccttccaatccctaaatcaccaggatgggcgggtggggatccaaagcattctaatctgtccaattatacttaaattcatttccatttccacctcattaagaattggatgaaggacattatgaagatgcaaaggggctgaaaaatcatgcctggacctttacattaacatcaaagaagtgaagctaattcttgaaagtatacatacatacatacgtacatacgtgcatatatatgcgcgtgtgtatgacatcctcattcatgaggatgccactgaacacacaaaaaaaaactttaatatatgtttatttatataacaattgcctaactacgatctcaaaagaggccttttaccgttgctgttatacatgattctttagtctattttatgttgtaactgagttctgagaaatgtatgttgcaggttgagc

SEQ ID NO: 84527 - DNA, 872 bp, Citrus clementina
  Intron number 1 from transcript clementine0.9_025585m (loc us clementine0.9_025582m.g) derived from phytozome v7.0 (c hr-ID scaffold_29; pos 1440333 to 1441204 reverse strand)
agcagcacacagcactcacgcagggcaagaatcgggtgagtgagcgagcgagcaagcgagctaattcttttcttttaattttttgttatattttcccgtcctttctcggctaccaaacagaattttaggttttcagatttgtttattttacattttttttccaagtttatctgatttgatctgttctctggctgttttaaaaccacatttcatcattaggcatacttctgtgaggataaaaaccttagatgtccatatcaaaaaatagcatgcttaatttaatgttttgatgttgattttaaggcttggttttgcttagattatctgataatgacatttattattattattattattattattattattattattattattattattattattattatttgctataattttatgttgattttaggtttacgttgctctttaaggcttagattacttctgttttcttaaataaaaattcattaaattaatgcctcatgtagatttttatttgatactttggttgtttgtggggaaaccttacaaattcttatttgatctggctcttttgtatcttccgatgcggcaggaaaattttggatgtcatttgcttttcataattttgttgtttttcttgatcttttttggatctagtttttgtaaaattttacatcagggctaatgattagaggaactatcttaagtttgagccaggctgggttagtctttgaagacttgtttatgccctaatttcatgttacatcaactctggaatgttggttgaaatttgtagtggctaacacttgcgttgcatttacttctgttgcaaaattagtgcaggatctaggatttgttagataaaagttcaagagaga

SEQ ID NO: 84528 - DNA, 664 bp, Citrus clementina
  Intron number 4 from transcript clementine0.9_007311m (loc us clementine0.9_007311m.g) derived from phytozome v7.0 (c hr-ID scaffold_27; pos 3196729 to 3197392)
ttccagaatgtatgcgtttctgatttattgccctgtgccttctgtgttaaatgtataagtttgtctgtaaggatgttttagtcagtacttaaaaagaatttgacttttgacttcatttgtttttccataaacgtcttttttagcagattaccaatttgctgccaagttatcagcttgtaataagctctgattcttatggagatctttttctttccatgtaacatgcagtctcccagcttttagcctgtgtttttcatccatattattgtattgtttctttatcattaggtctcttcattccataataatttagaatgtacgacatagatattatgtcttagtgttttcttgccaattacttctatgccagatttatccagtatactttacaagatagagctatcgtaagatttttgttttgggatcccttgttctgtgctcttttaatttttttaatttttaattttgaaaagtgatacatcttttataaataatggtaattgtacattatttaatgcatttacaatttttttactgtaatgttgctgatttcttggcgacacttcttcaaactcaagatttgaattgatactaaattttatattttaatatatgattctttatgatatttcctgacagtcacatcgtttgtctaattgtagga

SEQ ID NO: 84529 - DNA, 764 bp, Citrus clementina
  Intron number 1 from transcript clementine0.9_030189m (loc us clementine0.9_030189m.g) derived from phytozome v7.0 (c hr-ID scaffold_23; pos 1480717 to 1481480)
tgagcctgtaagtttttcttctctccatagtcaaatcactatttctcccttctgctgtaagacaccagtaacaattgtgattgtttaagcccttgttcacaaagaaattcattgatgccatggactgtctgataaggaaatctttcttgtcactatctacatcaaaccccaatctttcttgatgccatgaatgatctgttgacaccttctgcaagaggttttgccccacttctgcaagagattttaccccttgctgggattgttgaccggtcattttaattttgctggtggtcttgctttgatctttccatgttctgcttttgcttgctgtaaaagaagctcagctagtgtgagcaggtgtgtttgtgaattgatttaagccctgtttcgtgttgaggttgggcaatgcctaaaagtgttgggtaaacattagctgttgtagcttgaaagataagtcgatttgataaaccacttttatgatgaaaaaatctataatatttttactatctttgttaaatttattgtttaaaagtcatatttattacacattattaacttttacttcataattataattttttttttcatagcaactacagcttaaaagataaaacacatcaataccaaacaggaccttcattttgggaacattggaacttctaaatattatactggcttaattaaactaaaaaacggagttgcttttccttattcatttatttataatggaattggtcacccttcacaggtacagcaaaaggaca

SEQ ID NO: 84530 - DNA, 509 bp, Citrus clementina
  Intron number 1 from transcript clementine0.9_007247m (loc us clementine0.9_007247m.g) derived from phytozome v7.0 (c hr-ID scaffold_51; pos 1021797 to 1022305 reverse strand)
tccccagcttcacatttaaagccactatttccaaggtaacctttcaacaaaattatgtttctttttttaaaattttttttccatacgtatacattaactgcacaaacggtttcttcaatcgtatatgtttgataaatttgaataaagcaagagtcttttatttattcagtggtataatgcatctgggtttattgaattttgttatttggattgagttttgtctatgttcagttgaatgcaattgtattgattcataaactagaactgcgcaacatactagttctatggaagaagattactcatgaattgagaattaatctaatttttaattaattaggaaatggttcagactctgagctagctgttttgtgtgttaagttagttcatttatggtgactgtgatattgggaagtggattgctgtcaaatttgcagaatgtaaccattattttaatgatagagatgccattttggtttataactttgattggaatttgtactagtgcagtc

SEQ ID NO: 84531 - DNA, 955 bp, Citrus clementina
  Intron number 1 from transcript clementine0.9_029159m (loc us clementine0.9_029159m.g) derived from phytozome v7.0 (c hr-ID scaffold_136; pos 263965 to 264919 reverse strand)
cagaatctccacgggtaatttcctcttcctcatctgctgttaagttactgagagagaatgattgtaacgatttcacacctattatatatccatctgcagagattctttaattgctaacttgatcagttttataagtttatttcacttgtttgaggaatccaaagtaagttgtcatcactctacaatctatgtgacaatgattcactttaatttgcaacgcggtcgaagtggggttcattatgtgggtctaaaatttgaagcgtgtgaaatggaagtacttagacaaaacttaagagatatatagtgaaatttcaattgtttagtgtggctttgccaagaaggttttataaaactcttggacccacgaatttggagtgtcgtacttctacggaattcataggattcaacaagcaattgatatttgacggtcaagtgtgtagtcttgtttgtagtagcgatccttatatatctaatagacaaaaatggagagagatatatagttaaatttcaatttttttcttttttttaaaggtaagggagtgggcaaacccaaatacaatttttaccccccttaccacccctaagaatcgaatccagatttttagtagaggctacagctgtactgcagtcaacccgaccacgcacttggggcctagttaaatttcaattgtttagtgtggctttgcttcattacaaaccctttttaaatgcatcattactcagcatcatttcatcagaaaaatcattacgagccttgagtcatttatatcacatgatgacgtcaaattcggtttctttatggtgcattatacgttgtagtcttcttgcttcagtagcactgatcatagaagcattttgttggttgattttgacttgcttctaatagattatttactaactttattcgcataaaaatgtagaggattccaccattctttgcgagaaagtttggaca

SEQ ID NO: 84532 - DNA, 591 bp, Citrus clementina
  Intron number 1 from transcript clementine0.9_024060m (loc us clementine0.9_022922m.g) derived from phytozome v7.0 (c hr-ID scaffold_27; pos 276911 to 277501)
gcattgcacaaaaccccagattctcctatctcgatgtaagtttttattttaatttatttcactgcatgttctgtttatgttgtttctttaactgtttatgtgtttcttgtttaaatttcaagccaagaacggttctagagtaggctaatttatccattaatgtatgtatcttttatgtatgcaaacttagtttagccaattgggtcgtggtatttcttctgtttataagagaaaatgactagaaaagattccattagctgagaattgtgaaacccaagatgggttctcgagtaatcttgtttatcgtttgatacagttatgaaatgtgaagttttaactgaaatacttaagtttgctatttgttgtaattttgtctattttgttgctgtttcttgtgtaatttgatttcggaagatggtgaattgactgcaaaagcatttgtcatttgtaatgttttgatttgctaatatgttgccgctaaggcttataagttgatgggtgcagttttatcctttttttttggctaacttttcttgttgttttgtttttattgtagcttgcccaggcttcctgtgataaggatcttcagtt

SEQ ID NO: 84533 - DNA, 704 bp, Citrus clementina
  Intron number 1 from transcript clementine0.9_011880m (loc us clementine0.9_011880m.g) derived from phytozome v7.0 (c hr-ID scaffold_63; pos 899648 to 900351)
tgttgatttggattacctctgctgagatcactcaagtaatgagttatttatagttttttttgcccttttcatttgattctttggttttgtttgttggtttccacagaacctttttatttcctcaattttacgatgtttctttgcatgcgctgcatatgatgatttgggtagaattgtattaacatttttgaatgggaactttttattgttcataagtgatgtgtatgttgcaatgggaactaggaatagtgcgtttaaagcgctgaactgtttttgccattttgatattgatgtaaagtaattttcactgttttaagggaatggattttggttaatattgattgtaactagataaatcccattatgcaatatgtatgaaggactcgtgttgtaaattcaatgcactgatggctcaaaaaaagctattaaatcgacttaggttgctatgagctataactatatcggtaacatactacattttacttccacaaaattagttcattcctggtatggaggagcaaaatttgtacaattgtaaattagaatcaatgtgattttcaagaataaacttattactcgatgaactactcatttgctaattcttggtctgtaggattaatccgtgactaaaattttagaatttcaactcatactgcttattttctgcagaaaattttcacggagtataggcaaccatttgcact

SEQ ID NO: 84534 - DNA, 944 bp, Citrus clementina
  Intron number 1 from transcript clementine0.9_016891m (loc us clementine0.9_016907m.g) derived from phytozome v7.0 (c hr-ID scaffold_10; pos 2993401 to 2994344)
cctccggcttcgttcgctgccgtcagcgccataaggtgaggttatacgtgcgattccaaattgtgcatgaatggatgtttgaaattcaatcttattttgggctttttaagaggcgttacaggcactgaaactgttcaatcttctttgtataatggctgtttgtacttgttgctgatttagtttcttaatattgtaattgttcttgtcttgagtgttgatggtgatgaaagatcaatctattatatatgtttgtcatttggagttgtaacttcagtagcttgcggccttggtactggattgcgcgttattttttttctttttcgtcagcttttttttttaaaaaaatacttgttgtggttgcttggtagttggtattcatttttgttttcatttttgcatcattgagctgggctggtacttgattcattttgaaattgaattgaattttggaataggttgtaacccgaattgcaaccaaaactgaaatttatatctgaatttgcaattctaaccgatccaaaactcgaacccaaactcaaccgagccgaattaaattcgctttcggtttggtttgcgttttgaatttgattgggttgaattctcccatccgaactgcttgtaacccaaactgaaacccgaacaacccccgaaacctgatatgcccatcccttagtatctatattccattactgttgatctgattagcctgatcttcaaaattcttctattctgtagctgatcttttattttattatcaaaatttattagaatgggatgagagcaagagttctattcaatattgttgttttcaaatctttctgtctttttaatgattttggacttgggattgggaataagtgtgatacacagtgtatgagtgattagaggcaaaaaggatcgttactgatgttctagtctaatctcagggccaactgttttgactg

SEQ ID NO: 84535 - DNA, 600 bp, Citrus clementina
  Intron number 1 from transcript clementine0.9_020129m (loc us clementine0.9_020129m.g) derived from phytozome v7.0 (c hr-ID scaffold_5; pos 3715985 to 3716584)
tgagacttcagagctggtagcatactgcacacatagtaagtcttgatttaaattcagtgcggtccatttttgctaattttgctgcttcccacttgtttgtataaatgcctgaaagaaagaaactatccttcaactcaacttcactgattaggcggctgcttagggcatgttggatgcagccttcaataattatttttaggtttctaatcgaaaaggaaatactacaacagaacgcattggcttagatatattgttgttactgaggtttgtctaattttgtttgataaatgaaatttgaagctaaaaggaattctggttctggattagtaacaagtttacagaggggctcctcattttttttttctttgcaatgatggtgttattttcccttgatcagaggaaattttcaagcttgaaagagtttttaaaacaataaagactttgggaagaagggaatgaatcttataggatatagcccagctagttttattagagcaaacgactaatcaaaagctttagttgagaacttgcttatgctttacttttaatgttatgtctgttatagatattgaaattcccagtgcaaaagttctcgggttt

SEQ ID NO: 84536 - DNA, 947 bp, Citrus clementina
  Intron number 1 from transcript clementine0.9_025481m (loc us clementine0.9_025481m.g) derived from phytozome v7.0 (c hr-ID scaffold_27; pos 2100664 to 2101610)
agttccatagtcctagaaacttacttcttgctgtatgctttttaattaaaaaaggctctttgttattattattaattttttcttaatcctcatatctaatccaggatcctgttgcatctgaaacaatgctaaaacattttccagttccacgtgtacttggaagattgttacatatgaatagatacgatgttccttcgaaagtgtcgttgttttgtatttgactatggtcttatttagagctgtaaggcacttcccaagccaaaggaccctgctgtcttgtgaatatcaagtgtcactatctggcatattggtacaacatgaaggcttctgttatttatcataagaataggtaaatatcaaagtgactgtgtagctaatttcttgtctatcaatttaaaatgctcccttatgggcttctacgagattaatatatgatggttgaacacaaaccaatggtttaggagcagaatcataaggcttctgtcggttcagaatcgacagaataatcggagaattcaacatgggtgctaatattgaagttgatgtttcattttgtccatgatttgttacattaggagcatgctgggcaaatgaatggctcataagcacacagcatatgcttatgcaagtgtagctaaatcaggcatctttaaaaagtcaattgtacggtctgagtgccaaacaaaaccagaatctctgaggaagttttcacttgtggaagatttcagggaatttgtgcttggggaatttgcaacccacctttttcgttttaaaaattttggaagatgcttttgtcatttctcagtaagatcaaacttttttgccgcatataaaaaatgatgatgaaaataataatgcaaagccacggttgatatgcagtctcattctaactttaaatctcttgatgtgcaggttggggaagtgggagagctatcagaaatattcca

SEQ ID NO: 84537 - DNA, 465 bp, Citrus clementina
  Intron number 2 from transcript clementine0.9_002925m (loc us clementine0.9_002925m.g) derived from phytozome v7.0 (c hr-ID scaffold_1; pos 6268233 to 6268697 reverse strand)
ccaagaaagtgtgtcgggtttgttcctcgtcttggaataattgtttcttctctcagaagagtgccgtagcatgcttcaatgttgaaacaccaatcaatttgaaatttataatcttttccttgcccaaccatgtcttgcttctaaactaatgggacaatgaagttacatctcatctctctcttttgaagtcatgatgctgcctattcatgattttattttactgcatatggttccacaatacatttctcttttggtcatttattttgaaaacatagcttgaggagagccttgatcagcttgttcttgagcatggatgtcttaactactttcaatggcttagttatttatatatatttatatatgaacttatattattgaattttgaatagtataatctttctttttcaaaatctttatacttatttaagggatgtttacagggttccatctaccgtgtcgaggctg

SEQ ID NO: 84538 - DNA, 746 bp, Citrus clementina
  Intron number 1 from transcript clementine0.9_006701m (loc us clementine0.9_006701m.g) derived from phytozome v7.0 (c hr-ID scaffold_1; pos 9622597 to 9623342 reverse strand)
ctcaattagggatttttgtgttgaaacaatcgaaggtaaagttccttcttttggactccgtgtatttcttgggtgatttggtgggatattaattcgattattgctggtttatttgatgctactatatgtgtttgcttcaattttaaccattaaccttagtagctatggctgatgatctttcgttttgacttttgagatttttctgttgtttctaatttacatggatattctgttctgtgtttccttatagcttgtattcaaggtattttgcatctgctatgttttgattctctattatattggtgaatgattcaatgaagaattatattcaatctttataactttaataaaaataatcccatgttcttctatggttattgttattgttcaattttgtttacttaatttgattttgttcatatcacagggctcatacattgatttagctatcttaagtttctatatctcttatttttatgaaaaggctaatcttaactgtaccaatttgctgctaaaatactgccagaagcaagtatggagataatgtttttgccaatgcacaagtttttctttgtatatccaaacattgtatatacttgtgcacctttatttgagaaatatttggattagggaagaggtatattggcaataagcatgctgtttttgtgcatctattgactcacatggccttcttgtttggataatgaacagcagcacttggcttgtgctttgacaagtttgataat

SEQ ID NO: 84539 - DNA, 373 bp, Citrus clementina; identical to SEQ ID NO: 84343
  Intron number 1 from transcript clementine0.9_010660m (loc us clementine0.9_010660m.g) derived from phytozome v7.0 (c hr-ID scaffold_38; pos 1798436 to 1798808 reverse strand)

SEQ ID NO: 84540 - DNA, 407 bp, Citrus clementina
  Intron number 2 from transcript clementine0.9_025803m (loc us clementine0.9_025779m.g) derived from phytozome v7.0 (c hr-ID scaffold_1; pos 12271013 to 12271419)
gccaaaaggttgtacatataaatcttttcaactcaatttaattacttagttcaatcttgaattgtatgtgttttttttttttttttccaatcttgattcattgtcttttaacaacataagttggtgtttcttgtagtgactttgttttcttgattagacgtgttatatgggatatttgcttaatctgtttacatatggatatactattctgtatggatggcttaaacgtgtaatcttgtcaacgatttacaaataatgtatttattttcattcctattaattcttatgtgttgatacctttcttctgcatattttgcttgttgaccccaaagtctgtctctctgttggtaagtggaattgactcaaattcttcatgaatttccatatctgtttggcagaaaaagaaa

SEQ ID NO: 84541 - DNA, 700 bp, Citrus clementina
  Intron number 3 from transcript clementine0.9_025803m (loc us clementine0.9_025779m.g) derived from phytozome v7.0 (c hr-ID scaffold_1; pos 12271547 to 12272246)
tgttctgcgtccttctttacctgacaaaaaaggcggtaatactcataaccatctgatctaaaacttcatataaatgtatcttaatttcaattgtgtgtttgtacctctgtaggcatctatctttctcgatcttgtgaacaaacggttctatagattttgcttttagatgaactttagaccatctttcatcgccagaatgttactgccaaaccatagcattgtatgcttgttcggacactagcatcttccttatgatgtggcaaaacttgtaacaattaattgagtattagctgctgtttctgtaagaaagatgtcatagtccctcatccaacaaaagcaggtttttgaattttataaaattttcgtttgccgtcttgctatctagtcctctttctcatttggccatgcaactcttgttcttattgcttcttattttggtctgtatactgctacacttccctatgaattggatgcttcaggtaactattttctttctcatatgaaaaaaatctcaagcatggagaaacttgggtggatcaacaatgtgattcatttcctcttattgacaattgtttatggtagttcatggatatgaaagaataatgtaagcaatgaaataaattgcagattagtttaagaactaacatctgatgcatctttttcagaaaaactgctgagtgattcttccaagtccaggtgt

SEQ ID NO: 84542 - DNA, 832 bp, Citrus clementina
  Intron number 1 from transcript clementine0.9_001870m (loc us clementine0.9_001870m.g) derived from phytozome v7.0 (c hr-ID scaffold_23; pos 2907179 to 2908010 reverse strand)
actcgttgctctcggtgcaaagctgttcgttactggttagttagccggctcgctttgttgcattttgaatcaaaatcaattttttattttattttaaataatttatgtcagtgctttgaagtttgaagtttggaaatttttaaaatgaggagaattatctttcttcgttacttactggttacttcactgcttgctttatggtctcagcagtaagacctctaacatttttagtcatctgataaatatttattcattgcgacactttccatgccagtcatggtgtctcactctatgtatatccatatatgaaaatgtctctgcagaaaacactaatttatttatattgtgcttttcatgttggttgagagaggagctggagtaggttttcataggtttaccaagtaaaggctatctacataatacttgcaacttgtcatgtcttttaatatgttattgagtatagacctccaagtaatttctgactgtgtcttttgcttgttccgtcaataatgtttcagcagttgcatgacttatctaattacattagagctagttaagctggacctcaatcattgtgaaaactattagcttcacttggcacatgtcatgaaagtttttgatagagggataaactacaacacctatagagatgagtgtgttttattttgcctacatattaaggtgtccgttaatctttttgctgactatctgcagtagtttcttttgaatgtgcccagttgttcttcttcagtgtctcattatggtatttacttttttttttttttttgtacttgtagttctggcaagtgtcaaatttttcactggaggcaag

SEQ ID NO: 84543 - DNA, 640 bp, Citrus clementina
  Intron number 2 from transcript clementine0.9_022281m (loc us clementine0.9_021544m.g) derived from phytozome v7.0 (c hr-ID scaffold_53; pos 492076 to 492715 reverse strand)
attggactaaggttgctaagaaagggcaggttgacgtaagtgactgttacaagcattttacttcttctgttcattagtactttgcatttgtcttgtggtatctttcaagatgatttggtatgctaaaaactttcttttaggttaataccaattatattcaagatagcaagatcaagttgttttaataataccaagtaaactcttcttcttttaaactaaaatgatatataatttggttctataaatatgtattctgtcaattaaccataatgccattaaagttgctggacaagtccaaaactctatttacaagagaatttacatttgtacaaggcctgtactatttcattattgttggtgtacgggttagggttgcattttgtgcttgtcaatatacaagagttggttaaggaggggcatggttggctttctctttgtgatagttaatgtatgtatgaataatgtgatctttatgtgactttcagcgacgttatcgtatattctttggtttggtaattgttgtttccatgtacaaaattttttctattttaaaaaaacaagataattttatattcaaactatcacaagagatctaaactttatgattgttattgatgtatgctttcatcaattgtgctag

SEQ ID NO: 84544 - DNA, 613 bp, Citrus clementina
  Intron number 1 from transcript clementine0.9_014751m (loc us clementine0.9_014733m.g) derived from phytozome v7.0 (c hr-ID scaffold_33; pos 1568361 to 1568973)
aaccaactagtgcccctgctgcaaagtaagctcatcttcaattttctttttctttcatgggttgcttttgtttatacctattactttttttttgttttttttttgcctcaaggaattgacttttatgggcagaactcagccttgattttgtttgtatgaagttctgctttcctgttatgtatcttttttacattattgtatatttttaattaatcttgagtatatgtgtctcgtttctttagtttcgaatgtcttggtcgattgatgctcgttcaatgcttacgcttttgttttgaacttattatgtctttactttgtatatgattaccacctcattttttttaatttaaacgtttctctgttgttagtctattcggtttagttagtgttttggagaagaatttcactgagctgcatataaaatatcttcaaatggaataatcggcccttctttcacagctagatcataaatttgtttgtgcactatttatatttgctcccttttagctatttttgcattttcttcttatgttgtattcatagatgtatgagcacagttcatgtggatgcattattgagacaaatcttttcgtgacagggcacaggtggtggg

SEQ ID NO: 84545 - DNA, 737 bp, Citrus clementina
  Intron number 1 from transcript clementine0.9_021391m (loc us clementine0.9_021391m.g) derived from phytozome v7.0 (c hr-ID scaffold_1; pos 9158786 to 9159522)
gtgcgtgacacttgagaactcaatactctctgtcacatttcggttactttttgttgagggccgtttttaacacccctctaaaatctttataatacttattttgaatgttattttttaaaacaccatcggttttattgacaagatataaattcgtatattaaaattaatcatctttccacaaaattttactcaaaaaaagatgtctctttttaagtcgcttacaattctaaaatattaaatttaccttaattttctcttcttattatatagtttgtatcgttataattctaactttttttttaattttcttaaaaagatattttttcaattaaaacttaaaattagaatataaattatgaaacaggatgggtgtaaaaagtttgttaaaagaataatttatctaagtgtttagttgaacttctgttaaaaaaaaaatgaaataatttgtattgggttatttaagtaacttccattaaaaataaatttaagaggaattttgaggaaggtgaaaaggcttaactcttctttgttaatgtcggcaggcccgtttattttctaagcccaaatttcacgttcgtaaaactagcagatgggcccaatgggaaaccgaatccgattcgtgtaaagcagcgcgggccgactcttgcaccaaagctgggcgttcagagctcataaagctgtgatttttcaactgtcgcaaagaatcggcaaaagagcaactcaagcaagaagaagag

SEQ ID NO: 84546 - DNA, 1024 bp, Citrus clementina
  Intron number 1 from transcript clementine0.9_023719m (loc us clementine0.9_023693m.g) derived from phytozome v7.0 (c hr-ID scaffold_1; pos 11084795 to 11085818 reverse strand)
cttttgggtttcaaaggtaccttcttagaatgaataatcttccttattgggttttgtgaattttgattatatatatatatatattttttctgggggggctttgaatcttcatttaacattccaagtttaagctacaaggcaagcattctctctctctctttttgtttttttcccctctcaagtttttgcatttctctttttcgttttccaaaaaaagatacttaatttgttaaaggaacgtttttgacaatgaagaaatatgaaaaagcttgaagctttggttgtcgtttaaatgctgtggctaagcttaatttcttgtttgattgatgaatgtataaatttgaagggaaaaaaaaaataatcaaattatgggttttattttttaaaagatgggtattttggtttgaataaatgagtcacatcatgcttcaaagtttagttatttatcttacgatttatttctatttatggtaaagctgtgtcttgtatttatggtcagttttgttcctccgagctttttttaatatagaatgattaggttttctatttggttgtcttatgaattcattgtattatattgacagcatatgtatctggctgtattgtaatttttagttaatgtcctgttactttctgttcagttgttcggtgagggaaaaaaaaaaaatagtgattttaaatgaattgaagttcctgtttcttttgtgcaatacaaaatgaaaagcttgtcttgattgagctgaaagatgttaaaagaatttgctgagatgtttgttgggttcattgttacaacaaaggaaaatataaggttttgagcttttttttttttttttaattttttctgcttaattctgcctgatgtaaaatttgtgcacatagtgaaagaggagttaattcttcttaatcatcagcctcgtccactgttattgatttttgctataaaattgtttctgttgttcactaattattttcattgtttcctgttacaggcaagcaagtttgcaaccatttacggttgattgaa

SEQ ID NO: 84547 - DNA, 584 bp, Citrus clementina
  Intron number 1 from transcript clementine0.9_017624m (loc us clementine0.9_016849m.g) derived from phytozome v7.0 (c hr-ID scaffold_33; pos 2115161 to 2115744 reverse strand)
actatcctcattgatcagcctcactttggtaataatttattaattttattcaattacttagcttattttttcttcaataattgctcataattactcaccaagttttttttgttccctttttcattaatgtttgatcaattgtactcagattttgaagtttcatcgtggtttcccagtttgcttttctcacaaatcttgaatgaatttcaaaaaaaaaaaaaaaagttgcattgatttagttctaacttttatgcactattattttttttatttttttttttgactctgttgtctaattaatctttccttataaaccaaactagggtttctgggttatatttttttttttctataacttgttgttttaatttaattccatttatacactttatgggctgtttttttgtttaatattttcaattttctcaccaactcattcgcttacaaaaactgtatcaagaaaagatattttttttcccccgatagttaacattaagtgatttatttatttattattactgtatttttttttttttgggtttaaatcaggagttgaggtacaggaaaagaaggtccctattgat

SEQ ID NO: 84548 - DNA, 652 bp, Citrus clementina
  Intron number 2 from transcript clementine0.9_022672m (loc us clementine0.9_022672m.g) derived from phytozome v7.0 (c hr-ID scaffold_1; pos 12785987 to 12786638)
cagtgacattggagcctgctgagggcgaagtttgtgtatgttttcatctgttgcccccttttcttttctattcagttaatgattttaatggtcaaagtttattggagcaatggagcatctttaaatcccctttaatgatgctccaacgacgtgggaagcgggaactttgatttattgtcagcgtcactctgtaatttactctatatatgtttccactagtggagattaaaaaaagtattggtcattctccaaattttttttttaatggttaaattgacttacgggtttaaggtgcattactgcaatgatttttgtgagaaccgaggtctctgaggttattctagttcacttcttttaatttataggtcaaaactatgctatttattggttctcacacgttgacaacgaaacaaacaattgattttgatagttcaatgaatatgaacttggatccatagagtgtattaggcaagcttatcatttatatgtgaatgacaggctatattgtgtcctctatttgctttagatttttaatgagtcgtgttctttgttataaccataagattatcaagtgagatcattttgtaaaacaaattctttggtttgcgagttcatagtggggagctgcatacaagatcaccaaaaaagaaga

SEQ ID NO: 84549 - DNA, 766 bp, Citrus clementina
  Intron number 3 from transcript clementine0.9_022672m (loc us clementine0.9_022672m.g) derived from phytozome v7.0 (c hr-ID scaffold_1; pos 12786623 to 12787388)
tcaccaaaaaagaagataaagaagttgcggtgacggtatgtgcattaagttaattactggaattgctttgttgaattagtaagatcctttttgtcacaaccttttcccattgaattaccagcactttcctccatcattttagtgctcaatatttgtaactcatgattcattatttaatcgttccttggtattgaaatatttatggtctttggttaacttagcagcaaagaataaccgtaatgacatattgccaccaaatcaactaagcctaggccttttcagctatttatctgataaactttaaatcataaatcttgcttttatttgaagtcctaatttgactaaatattcttgcctactattgttccaagatgaaatattcattttctgggtaaaactggacaactaatgtcttagtaaacctttgtcttaccatatatttcacattggatctgttctagaagtaccttgtcgtgagtatgatggtgaaatcatcttgttagaggcacaagaaatcaattgttagttatcaaatccataattaattagaacttataagcttgcatagtacctgtccttctcaaattctgaggtctacctgatgtgttgcagctataatctgattggtccttctgaaatatcttttttttttgggggttttggtttttaactctgtgcttgtatctgcttgtttacactgttaataagtctctatcgtttttgtttttctatggcttgcagtatttagaagtgagggagaaacaat

SEQ ID NO: 84550 - DNA, 989 bp, Citrus clementina
  Intron number 1 from transcript clementine0.9_025050m (loc us clementine0.9_025050m.g) derived from phytozome v7.0 (c hr-ID scaffold_114; pos 359162 to 360150)
gctttccgcatcaagccgttcatttcaggtatcttcccataataactatatgccggctcgccatggactttcagaaatggctcaatagttgggtccagaatggccttgtgcaccaaaggccacatgctcataagcgcatcctggtgatgttggagcacgtagggcgcgtacgatagaccctcgacatcagtaacgagggatttcccaatctcggtgaggctgtacatccttttgcctccaaattcgcgatgctctgagaacacgccgtagctggtgagcaagcggaggatacgttgcaagttctcggcgtccccaccgccggatgggaggatacgtgtcaagatttgggaggcggagagaggggtgttggccagtcttaccttcttcctgccatctctgcactcgttatcttccattactgcttactgacctttgatttcgcagcaccatgccggccaaacaaaaagataagacctgagcactttttgacaatttggatgttagggatttttcagatctggggagcttaggagggaacgaatactttggtagagggagttgaaaagttgtattttggataagataagacttgtccatttgttttgtttttatccactcaaaaagcacaactctaaaaaaattaaaaataattcgtagcctagtggtcttttgattcaatgtagaagctctaggtttaagaggtcttgggttcaaatttagactaaaacaaaattaaaatgataatttttaattgctgatacatgagcgtcattgatcgctattactaaagctattgatacttcagtattagtaattagtgatacatatctgttaaacgcggaaaatgatccaaatatatttatatactgctacttttaaataaagtgtcagaacacaagtattagtaaagaccatttttctagtagtgagagtgacataattctaattgtctgatttcttaattgtataatattttacaggtattgagc

SEQ ID NO: 84551 - DNA, 783 bp, Citrus clementina
  Intron number 1 from transcript clementine0.9_006554m (loc us clementine0.9_006554m.g) derived from phytozome v7.0 (c hr-ID scaffold_63; pos 859454 to 860236)
gagcttcggtgtcatcaagatcggtgcccccataggtaacccaaaacagaaacaatttccctttcttattgtgttatctgggaatctggctgaggaaggacagaatttagtgccttcagcgaaaaatttgcagtgtttacatattttgcttaaattatcgttgcaaagtacaatagaagtttctagtacaatagtcatttctcagttgaagtagcattatacttgtatagactctaaacaaggtcataaggggcgttaactctagatgggcctgttttttttaaatttagcagtataacttgtttcaaaggcagttccttttagtcgttttgggttcaaactctccatactgctactgcttcttagttaacataattataacagatcagttgtaaaagtgtttttcaactatcagatcaagagttcttgaaggtagctgaagattttgttaaatgaacctttggtgaaagttggcaaatgcctttttatacccttatatttgcttgaatcaactagttatcgaaaagtttctgttcttagttgaaacggttgctgccgagtagactaatattactcacgctggaagatgttgtggtgcattcttgtgcctgtgtgacttagtccatatatctactatgaattcggaattcctaaaatgattttgataatgtaccttttaacttgagagctttggcattgcaaatctttaattgatgatctacatttttaactactccacttgatataggttagcaaaactctctgaaggccaactgattgacg

SEQ ID NO: 84552 - DNA, 840 bp, Citrus clementina
  Intron number 1 from transcript clementine0.9_000213m (loc us clementine0.9_000213m.g) derived from phytozome v7.0 (c hr-ID scaffold_29; pos 2022428 to 2023267)
gtttgaagtgaaaaaggtgttaactttttgataattttatttgattcccatttgcttatttgcataatgtgatgattttctgtatggatatttatatatgcccgggttgattactaaagaaaatgaaccagaagatgaaataaaatgtgaaaatttgagtcttgggtcttttatttttagattaaaactgtgatagtgagctcaattaacctgaggttttcaatgcctcttcttttttctgcattttcaggaacactatgtgaatcccttgactgaataattaaattggaattaagtctgcattctgactgttaaaaaaatatgttacatattggtgctgaccctgaactttggtatattggtattaagtagtttgaatgtgagtgaggaaattctattgtccttcttttttgaactgtaaaactgactgccaattgttaaatctgttaggatgtcttcttcagaatggttgttaatttccctgagctgcattttgtttagtaagaaaacctgtcaagattactcgctttcacatggattacattactgatattttcccctgttattaagaagcactttttgtttcatttttcatttctgtagtatatacttaattttaggatgagctacatatttttcaattattatgttttgtaaactacggtcacatggttgtgataagatttgattaccagtcatgtgatgcttaaaatggagaaaaagatatgttaacaatttcaatcaaaacgtgatccaactgagcgttgttggcttgcttaacttcatattttgatttcttgtctagaaacataaaagtagctcaaagatttccctgcaaag

SEQ ID NO: 84553 - DNA, 969 bp, Citrus clementina
  Intron number 1 from transcript clementine0.9_015174m (loc us clementine0.9_015174m.g) derived from phytozome v7.0 (c hr-ID scaffold_33; pos 1715433 to 1716401 reverse strand)
taaagagagaacacaaaacgacccaaaacccacaggtactttaactttcatcccatgtacttattttttcaatttatctttcgatttacatgtcgtatgggaagtggagtgatgaagatgaaatgtagtgtgcgaactcaagaatcgattctttgttctgcttgtttgattttgcttttgttttgtaatacggtgttccaatttgtaattatattatatattttatttcggttcttggatggtattattattatttatattaatggaaaactttagcttcttcggctggatttgtgcatttatctaatcggacaatttactattttaatcaattttagcattcagtctttattttaggttatttatacaaaacaatccttccaaactgacttgggatgatataattggaagacatcatattatttttagtcttccaatcatgtcacattgttacctacgggtaggtttgtatagactgtctgtatgtattatgctcctttgttttgggtgtatttaagctctctgttattgttgagaataaactgggaaaaaaaatgagttaacattttgaacttttagtgtttatgtttagtaaggtctggctgtagtgcccattgaaaatccctatgctgatgcaagtgggctgagaatttttgggtttcaaaagataaaaaaggattatgatgagttctgttttgaggattgaaactttatttacaagtcaagtaattagtctatttgaacttcatatacttttttccatttaccctctttttatacaagttcggttggtaaagcctgtttgggtggtacaagaggactcaggttccatgctcactcgcatcgaggtggacagggatttggtttaaatttatgaatattaaaaaatgtttccgtaaaaaaagaggattgattatatggtttatcatttgttgcagtgacccttttttgttgggaggacttgttaaa

SEQ ID NO: 84554 - DNA, 630 bp, Citrus clementina
  Intron number 3 from transcript clementine0.9_017682m (loc us clementine0.9_017682m.g) derived from phytozome v7.0 (c hr-ID scaffold_20; pos 1359669 to 1360298 reverse strand)
gcatttcccttatttccgttgtatgtagtccccttgaagctctttctatagaaattcttgtttccataatattcattaatttactgacatattccatcaaatgcagaactgtggatttagattcttatttggactgttttcttgccctaggtcgttggcttctgtcactattgttctcctggtattaaatggtctaatgatttgatttagatagaaggatggatgagataatttggtatttttgcaacacaggcagtagcactgtcgatgttataaaagcatcagaaacactatgagattttttctagtattttaatacgtttttggcttgtgatattgttttggcagtctgacagtttttcagtttacagctttgttaaaatcatatgtttatcaaccagcatgaatctatatacactcttcatggatactgttagctgagtgcaaagcggattttaatcttttgagatgaatccctcaacatgctaaagcatttatgttggcatttgttccttcaacctttcatttgatttagttgacagtatcttgctttattatgcagaatgatttttttctttaaacctttcttacacagctttggagattgagttcacaaggtctcagatcatt

SEQ ID NO: 84555 - DNA, 967 bp, Citrus clementina
  Intron number 1 from transcript clementine0.9_018110m (loc us clementine0.9_018110m.g) derived from phytozome v7.0 (c hr-ID scaffold_1; pos 3413023 to 3413989 reverse strand)
ccgtcaccgccttagctgccatttgatcagtcaaggtaattttagaaattagcgcctttacttgcgacgaggccgtattctttgaaacttggttgaatattactaagtggtattattgtacaagtttgttcagtgatattggatttattattacggatatgcttgatggatgattatcaattcgttttgtgttgaaataatcttgttattaattacgggtatgcttgatagctgaattcgttcgtttgaaatgttgtttgcgctattaatttgctcatttttaattttttttcaaagctatgtatgcaaaataattaattttttttgaaggacccgaatattcaaaattatcaattttttaaaaaataaataaatgggattatcagggatatccccagttaaagttttttggttatggtacggagattgctaccagtttgggtttggggttcatgatctccaccccgagcccgcccattgccatccctagcaataagtgagctactagtaattatggctatgttttggacttcagtacctttgaagagctagctagctgtctttgtagttgttgtttgacattatatgctagggaggacggttatgttctgttctggtatcatcgcttctacattaacacttttcccatgtttgaatttcaattcatgccaaattttcatcaaacaaagagatctttttcattgttaatatgcaaggggcaagtagtcatcattctattttggtaaaattatattagaaattataatcagtcaaattggtcgtatttgagctgttttgtaatttcagtttagttaggatttaatttattttcttaattttttaggatataattaagtaaattttaagttaccttatcttcaaaaaaaaaaaaaaagttaccctaataaataatagtccatttttttccctaggatcggtagcagagccttgtgccttgcccttgcca

SEQ ID NO: 84556 - DNA, 741 bp, Citrus clementina
  Intron number 2 from transcript clementine0.9_021407m (loc us clementine0.9_021407m.g) derived from phytozome v7.0 (c hr-ID scaffold_67; pos 976808 to 977548)
gaaagcctctaatcttccgtcttggtgtgggcgaggtacgtaaccaatgtgctaacaagagtaatagagttaagagttggagtttggaattcgataataaccagctgtctttcgaaacttgttttccaatcttcatctggtggctgtggttttacaatggtagtaaaaccataatttgtcagttacttccctatccatgagatttagccagtgacaacccatctacatggatgtatgaaggttggtgatctattttgttggttttcaatagggtttaaattccatcagaagcttgacaatagtgcttgataaagaaattggttctaccatttgtagtaataaatgacaagaaaactccttctgaggggtagagtgtgagtgggtcagacaagggatttaactattcacagactgcaatgtgatctatattttatttttattttttaactcctgtgtgtgcttggaatttgtcacaagtggaaatcatatttttcataatcaagttaggcaacaaactcaggaaatataaatgaaagataggataatgttctttttcaatgtagttggtttcattggtaagacctcttgatctggtacaagaggtttgggtttgaattccgctcacatcaaagtgtaggaggggtttggtttgttgaagtaatacatattttggttaaacatattatctcgacaactaataggaagtcttatttttaatcaattggaataggtcatcaaagg

SEQ ID NO: 84557 - DNA, 836 bp, Citrus clementina
  Intron number 1 from transcript clementine0.9_009602m (loc us clementine0.9_009501m.g) derived from phytozome v7.0 (c hr-ID scaffold_23; pos 1898105 to 1898940)
tttcgcgtgctgtcaggtaagtttttttttcactttgctctgtcttttgtcttatttatttattccttttgaacgttttaagtatgggtgttttgattttttattttttttctgctttgagggtttaagctgtgtaagtggatctgctatgcgagattgagcaattggtactattgttaattgaagttggtattgagacggatatgattgtttgatgattgattatcgatagctggtttttctcatgttgaagtgataaaaataataataataaataataaaatgccccgcttttctttatttatagataaacgtgtaaaactaacttcattgtccaatatttaggaagtttttgtggtaacagacactggatttattgtttttatattgatctttttttttttccccactggctttaatgtttatgagtaagcatgaagctgggattgaatttaattctcttcccattttgaatttttggcaattttttaactaaatcatgaagttaataacccggtatatttcattttatccaccaatgatcctgtatggcaatcatgaaagagcgcaatttgagaaatttaggggattttttacaatcaaatcagttatatgaaattctttatcatgatattgctcaaagtttctgaaaatgatagctttttgaccaaatagagattagcatggttgtgacttatgtttggtcgggtttattatctccgtaggttgcattttcttaattgcagcattatcttggggataaaaaggaagagaaaaatgaggatgaggaacaaatacaaaaaaccaaccactttcccttgcaatgcagggagcaa

SEQ ID NO: 84558 - DNA, 972 bp, Citrus clementina
  Intron number 3 from transcript clementine0.9_017561m (loc us clementine0.9_017561m.g) derived from phytozome v7.0 (c hr-ID scaffold_20; pos 3391044 to 3392015)
aaaacccggctttgtttgatgtaactttttcatattcctgttccttttttttgggtttttttttttttttgtgtgtatgggtgtgtctctgtctgcaagaatatacacccaatgtcatcttttctatgtgtaaaacgtaacttggaaaatggtatggcaagtacctttaggttagatggtagttcttatgttaacagacaatacttagaaatagcatatgcattgttcatcgtaggccagacaaccttgatcctgatatctagaagttatacgtagtacttatttatcttcttgcttagcagcatctcgcatcttgaaccttaacatcaaagcttattagacaatccatggagtatacatagtactcatttacattccataaaatatgatttcagtgtcatatagatacaatggtatgaaaagcacatcatatatttacaatgaaactaagtatctggtgcatcccaatgatcaaaaactgtatgaaaggatgggattgtttaccatggtattgtatcttgattcttgattccaaagtctatcaaggttttaagttcccagtgctagataattgagacatgttgaagtctttggatttgggcctgtagtattggctactgtgcgtgctttggggatatttgagtctacacctggaatattgcctacttaggacatttatttaatctaatgtttcatccaatttcttaaaattcctgctatgtctacagcatgacttctactgcattctgttttttcacatcaatatactcacagcttaattatgaattctgtcatacgtaattgcctcaattcttctgtctttttggttcatttttttcttttttggtctaccaaagaaatggcttcaagcagtgttttatggtattattatatgttatctgttgtatttggagcaatgtccgaacttaatttacacgtacctgccagtatcattcaggatatcaggagcaa

SEQ ID NO: 84559 - DNA, 179 bp, Citrus clementina
  Intron number 4 from transcript clementine0.9_006741m (loc us clementine0.9_004490m.g) derived from phytozome v7.0 (c hr-ID scaffold_82; pos 347474 to 347652)
caatatctgtaatgccaacaaacttgcacgatgctttgattatagagatttcaaattcttgaattaatgcatttaaaattttttccatgttgagttattcacaataattttttttttcttctctatatttgagcaattgaacagtagcctgggcataaacaatttcactggtcgagtgc

SEQ ID NO: 84560 - DNA, 430 bp, Citrus clementina
  Intron number 1 from transcript clementine0.9_010780m (loc us clementine0.9_010741m.g) derived from phytozome v7.0 (c hr-ID scaffold_1; pos 8265139 to 8265568)
cctttaagtggcctcacttttgcaattaaagacatgtaagtcttcagataacttgaacacataacataaatgaatttattttgattctttctcattaaatcactctttttcatgatgggtacataatattttgtagaaccattcttgttctcatgtgcatttaatttcatacaatattgtaatcgtttcaccttttgggtatgctaaaattgtttacaagctcttaaattccttttaatttcttgtaggattgtgtctttggtaatgtacttaccaatttcaactcttggagaagtgtctatgctaactattgcatcaattgcagtgtatttatattatcttaatgctcaatgtgtgtgtttttgcaagctcatatactctgtgcagttggctgttgatattttatcttgaatttttggaagcagatttg

SEQ ID NO: 84561 - DNA, 909 bp, Citrus clementina
  Intron number 1 from transcript clementine0.9_003912m (loc us clementine0.9_002377m.g) derived from phytozome v7.0 (c hr-ID scaffold_139; pos 136108 to 137016)
gaactcgctggtcatcctcaggtgatcaggtttgattcctggttttacttttgaaattcagaagacagcgagttgattcattttgtagaattatgtcaaatttatgttatctttctggatattattaggttattttggaatgagattgatatgcctaagcgtgatgacccccttttttcttattaaatgtcagtgaactagatataatgctaattttgagatctattcatcagtttacattctttggtttccctttttacatgatttatgcttcttaaagctacttttgttgctaatccaagaactgaacagcatggataatttctttctcaaatatttaggaagatgacatgataagatacagactagtgaattgtcagataggtttaccagctttccgttctattatttaatgtgttttaagaatagatggattttatctgactccttgaatccatgagaaaagaaaagaaaaaaatgaaaccaaaggggagtcattgagtagtttttgggccccgggggtaggtggtttgtcctaggcttatagggtggataggccactctaccaaatacgctggtcttttggttaaaccccaggtaacatttttatttggataccattaacttcctggaaagttttataatatcagataacgcttaatgcatggcctgtcacacattatctggtgcctactgcagcttggataggaatgatattgcatggtcaaattctgcatgtcatatagtttgatatttacggattattaatatttgctactgctcctctccaaacaacacccccccccccaacccttctttctggcttgatagattacttcttgaattccaagctgtaaattttatcttagcttttgacaaggtgtcacttgtgcatgttggcagcgggtt

SEQ ID NO: 84562 - DNA, 860 bp, Citrus clementina
  Intron number 1 from transcript clementine0.9_026262m (loc us clementine0.9_026262m.g) derived from phytozome v7.0 (c hr-ID scaffold_63; pos 932700 to 933559 reverse strand)
ccttgctcttgacgctatcatcgctatcttcagtaattaatcgtcttctctttcgtttaattagcatgaactgcaatagtacaactttacaggttcttaatttctagtatgtctcgtaagcgagggttttgtttctcttccttctttcgaacttcgaagttagggttctagtttttttttttagcttcgctaggatcatatcttttaattgcaccaaaaaaaaaaaagaattctatgaggtgatattggcgtttgtctgagctgttcttgaggtactgtgttttgactggagttgacttttttttttttttttttgggcggggaaatgactcaccgttttgtcttgaattgaactgatttgtggtacaagttatagcttcatttgtatttgaacgactggaggaatgaaattgttaaaggattttgttgttgacattgaaacttgacaaatagattggggttaccatttacgattgaagcgtgtggttgatgttgcaccgataatctcttgattttgttataagcaacttttttttttgccccaagtctctgaaagaatgcaactttgtgctagatactgtaattgagcatcactctagtgtttggttacttttcctaaaattaataaccatatgccactgggaaaaggggaaccctgggaagttcattagctaccttgcagatgcattttgcggcttctccctattttttatcagaaaatctgtgaaatactcttattattttattcaactctttgtgatgtttttgagattgtagtaatattgtgcctaaatctcgtttgtgttctaaccttttgactttatattcatgtgtaggctaataggcacaccattattctg

SEQ ID NO: 84563 - DNA, 673 bp, Citrus clementina
  Intron number 2 from transcript clementine0.9_013040m (loc us clementine0.9_013040m.g) derived from phytozome v7.0 (c hr-ID scaffold_23; pos 1747182 to 1747854 reverse strand)
attattgatttatcaagttgggaacgaattattaggttgttgatcgttacaatctgatgattcaaaaatattgttgcctgactgttctgaatgctttggatctatcgtacacgtatctctgccacattcatcctcttcgaaatgaggagagttttgtattatgcaaattatcatctgcagaggatacataattaatttactgagcataaaacaaattccaagcaaaacttaaaagcattcttctctttgttgtctctttaacatgatattataatttaaaaatgattgtttggttctttctcaaagcttaatcttttgcgacgaatagttccttaacataggatcagaatcaggttgatcaaaagatccaatgtataaatcttccattctgttaaattattactcagaacttgaatttggatatttatgtgatggggtgtgctgactgattaaaaagacaacttaatataaccatggatgcgatcaaaaataataattatataaaaaaaaaaattaaccggggatgtaagaggcttgtaatgtgttgattaactttgtttgaacgtataagctacagaactctttacagttcttatgcgctgatattgagccaaaaactgatagattttcattgtgctttaaatttttcagaaaaggatcttaaaaactttat

SEQ ID NO: 84564 - DNA, 550 bp, Citrus clementina
  Intron number 1 from transcript clementine0.9_013040m (loc us clementine0.9_013040m.g) derived from phytozome v7.0 (c hr-ID scaffold_23; pos 1747892 to 1748441 reverse strand)
tttgtttttcccccttgaagatcaatataacagaggtaggtgcttctgggtgtgtatcatttccttttgaatctaatgatttgggttggattctgattatacaaccatgatttcccatgcatattatgatttttatcgatctttgattggaaagtttgctggaaattattatatacgtaaatgcaatcctttattgaatctacggtcctgaacatgacaaatttgttctatcgttgttattagaatcctgacaatagaacaagaaaccatgcttctgaaaatgatgattatgggatgttttagatgcccttcgaggggcttcatttgtttctttctcgacttgcatcaagaaaaatagtctgtattgggttaacactgacagatgttaatgtttaaggaagacagccatatcttgaacacttggttttgtaatttcattgatttttaaagatttaagccatttctgttcaaaaattactttggtaacttctgtctcacatgctctatgtgtacagagaaatttgaggcgtggtcggtcatagcctcgggc

SEQ ID NO: 84565 - DNA, 614 bp, Citrus clementina
  Intron number 1 from transcript clementine0.9_023688m (loc us clementine0.9_023688m.g) derived from phytozome v7.0 (c hr-ID scaffold_20; pos 394864 to 395477)
ctccaataagcaaatcagctctccaaaaataaagggtacttctcttttttttttcttttttttcctgcaattctattttatacatatgcttaattttctgatttatatatagatatgggtccaattgaagtgttcaactttacaattcaaattgccttcgagcttttcccatttgtagcaaaattaagtaattccccttaatcagcaaatgaaattcatgtttgttgatatgaaatgcaatacgtggctgagcttaattatatggatttttgataagacaatatgttgatatagaagaaccttcagcatgcatgtaaacttgttggcaccctctagcattctcataattaggtcctttatttgcagtttctctgctgagtttgaatctgcttactacaaatgtctcagaagttgaaattatattatgtcaaagtgacagaagattaaatacaggttttgattttaacatcacttgttctgataaccaatcagtagtgaacacagtctgtcaaaaatcgaattcatttcaagctgccaattagcaattctttggatgctaatgctagctgcaactgacctaacttgtaactccttttgactaattgcagctgcgg

SEQ ID NO: 84566 - DNA, 819 bp, Citrus clementina
  Intron number 1 from transcript clementine0.9_029259m (loc us clementine0.9_029259m.g) derived from phytozome v7.0 (c hr-ID scaffold_43; pos 885399 to 886217 reverse strand)
atttttagctcccaaggtaaatcacttaatcttaatgagaacttcgaagagtataacttcaaaatgttacgtttttgagatcacaagttgttgatattggactaggagtatggcaatgaagccatgagtcaggacattcttttgtggatttgatgacttggtttatcggcagtaagtaggagtgagatataggaattaagaaatgtgacttgatgaacatcagaggaaggatgcagaaatatctgatattcatggacaaatgaagccttgttggtttcaatgtgtttgtgttaattccatcacacaatatcttattcttttttttttttttaacgtgaaggatgctatgattcatagttaattgttagatcaatttgtctattagaagctcagcaaaaatatatattctagtatatggtgaaatttatcattaatttatagcaaaagatcatttctagtagatttggtcatgccaatagcttatctgttgtgtttggtgggtgtctttaaaccaaattctcaatatcaaaagcacattgggatcattttctattcagcattatctgcttttggcatgtaatgtctgtgcacataggaaactacgcgttgttatatgccccattcctggaaagcttcaaacggttttgataacaacgtggctaagaaatgcatgtatcttggttgcatatgaatgttcaagcatgtatgcttgagggtttttctttagctgccacttatttattctcgtccaaatgattcaggattgtatttaatttaattccaactattcgattcacgttgctttgattcaggagattt

SEQ ID NO: 84567 - DNA, 697 bp, Citrus clementina
  Intron number 2 from transcript clementine0.9_026987m (loc us clementine0.9_027005m.g) derived from phytozome v7.0 (c hr-ID scaffold_1; pos 10029174 to 10029870)
tccatccaggtacgcagtacgctgctgctaatgcagtaatgttattagattgctcttctaatcttatcctctttatcatttcctacttatctgatcagtttgattgtcatgtaaaagtcaaaatatcgaatctcgatttttgggtttagaatggttgattttaattaaagaattggttaagttaacaagcaactcaatttgtatgaatggtttgtactttgtgaatttatgtgtatctttttggaataaaaaacatatattttatctatgtatattaaaatttgtatctttttgtcttttatcctattcctaactaatcacggatctctctaagaacacacacatatatatatagaggccagcattgtcagatgtggaggaaaatcattaatgttgaatttcacatgagcaattgaggcaactcaaattgctttgaattatttgtgcccaaggtaaagggattagaaaactggttttactattgctccttagtcagttattttgttgaccatggacactgttggtggttatcgcagtcacagactgcgaattgctgtgttgcttgggtacaatacttgtcactgtcgtcttcttgatgttgtgatgtttagttattcaattgtgaagagggatgaatgtaacagtgatgagagaaaatcattttttggttttgttgctgttgattgcagtgcaaggt

SEQ ID NO: 84568 - DNA, 1046 bp, Citrus clementina
  Intron number 2 from transcript clementine0.9_007617m (loc us clementine0.9_007617m.g) derived from phytozome v7.0 (c hr-ID scaffold_1; pos 4240567 to 4241612 reverse strand)
agcatagcacatcgtacgcgacaagcatcacggaggtgagtaggataaagtaatagatccttggaataccctgaattattcaactccttgttatattccatcatcttcccgatatcctcttcttatatttaagtttggaatcttttggggggggggaagctaattagaaacaattttgcattcacattgctggaagtacaaacaaactcatggaaaaatcaaaggcaggagttgctataagtgatcattatcaaccattatctcttttctggtgattttattaggatagatagcatattgaagaggttgtcatttgctcagggtgggagtgaacacttttagttcttttatcactggttcgatgcagttggggaatgacaccattaaaaatcattgccttaattatactttagggaggaaatttcttgatagtcagtgaaaattaacatagacaatatagagtggggattggaagtagaaagagaatactgaacttgacacatgcggcattagcattttgagcttcattctactttaatcattgagtgtgtctaacatgaagctctttctggaatgaggaaaggattaaacttgcaaatgttagtttgagaaagttaatttaagctcgaagcatgttaaaatcggattgctaaaatcttactattttgcgtgatactcaaatagacaaatgtaaaaactgatctacaaatcttctacagaaacataggaagttgatgctaaataatttcctgcaatatcagttttcatatacatatttgtcatgaatctgaaacttgccaaagttttatcacaaaaacatcgaataagctattggatgaacaggccttctcaagacaatatgtagactagggtaggaaaattgactcgattctacatgatctctcagacaacatcatctttatttaatgttctttaatgtttgatcataagattctcttcaaatcatcttgtcacatctttataatatgtgtttactctgtaacttaatttcaggacatccacagaacttgccaatttgtctagtc

SEQ ID NO: 84569 - DNA, 753 bp, Citrus clementina
  Intron number 1 from transcript clementine0.9_007617m (loc us clementine0.9_007617m.g) derived from phytozome v7.0 (c hr-ID scaffold_1; pos 4241630 to 4242382 reverse strand)
aagagctgttcaagagctggctcaccaacggagaggcaagctcttgtgtgatgtgttttccttgaattatgattaaatttggataataatctatgggttaatgaaagaaaccaactgtatttacacgtgatgtgcttttaggctcaagagatcatattgattgatgctctgtttatctatatccagcgtaatattatttttcttgaagggagaagaaaacaccatgcattgctaaccctttttttccctctttgattgagtagtgaccagtaacatttccataatattgtagcttaattgagatatgatagcatgttttgtatgccatttcatccaagtaatagttgagcttttgcaatcgctaacttgtgcttgttgattattttgtcttctcttttgcgtcaagagttaggattgagaacagttgagtgagatgctttgtcatcttattgccaaaaatctcattctcattattttgcgttgttggaatagaaaactgaaatatgatggattattcggagatgatatttggtatgtttttgccaagtgtagtatggtgtccataaatggtaccatctgtatgattatgcaacttatttgaatgaattgatgaggaagttcaagaaccccaaaaaagaagccaaatataacttgttattcaacaatactcacatatctatgtggtgcagattgagatcgattccttgtattctcttttgtcatttaattgatgcacttcccttttgcagaatc

SEQ ID NO: 84570 - DNA, 895 bp, Citrus clementina
  Intron number 2 from transcript clementine0.9_021323m (loc us clementine0.9_021323m.g) derived from phytozome v7.0 (c hr-ID scaffold_90; pos 902425 to 903319)
aagtatgaagacgtataatgtttgatttaatttcttctttatttattagtttccttttgttgttaattctgtttctggtttaattatttcttccacttgttggattgtatttgatttggctgtgaaatggaataaggggaatttgatggcgtaaaagattataaaaaaggaaaaaaaattgaaatttctattttctgattgtgtggtgctatggaacttttcaaatagttactttacattattatctaaaggtattgttatattatgaacaaaggaaataaatttgaaatttgtattttctgatggtgtgtgttatgaaaattttcaaatagttactttacattattatctaaagatattgttatattatgaacaggtttctgaagcaaagcaattgggttaaagaatgaaattttgatggataattgtttttttgttactaaatacataatattaggtttgttctgatttttggaatttcattgaaaaatatgtctttgtttgtttaatgacttttctaccttggattgagggaaggtaatgagtttgatatacaattccttgtttcttgttgcatgtattggtgtaatttcttgtttcattgttatgtttggtataagtgtttgtttatctccaaagaactgatatcttgatgatatttaagacccttttgaattattggaggctagtgatgattcttggtctggattatctttttttaaaattagccccggaattcatacatcttatgtgcttttatatattgtcacttgttcaattatgtattcactgagatgtacaagattgtgcttgttgttgctgttgttgtgtctctgtcttttgtcaattttcttaatcctagttctatatttgatgtgttgtgtagactcttgaa

SEQ ID NO: 84571 - DNA, 666 bp, Citrus clementina; identical to SEQ ID NO: 80927
  Intron number 3 from transcript clementine0.9_023842m (loc us clementine0.9_023842m.g) derived from phytozome v7.0 (c hr-ID scaffold_1; pos 5174205 to 5174870 reverse strand)

SEQ ID NO: 84572 - DNA, 698 bp, Citrus clementina
  Intron number 1 from transcript clementine0.9_023842m (loc us clementine0.9_023842m.g) derived from phytozome v7.0 (c hr-ID scaffold_1; pos 5175186 to 5175883 reverse strand)
tggttatccaaatctcctccttctcttcagggtaattccctgcatttcttcttcctctgtttacactctccttattattcttggtagatttgtcattgttctgtgatcatgcatgcaaaatttctgtttttgtgggtttcttgttccttttacgaccttgcttatctgctcttccgaatgaatgaacaaaattttattggaggagataagcaactggttcactggggagggggggggggggggggggagtcgttagcttttgattgattcgatgatttgagaacagagtacctctgtttttattatatacattaaacggaaaaaggctgaagctttttatgaataaaaattcttacttttacagtgtacttaatctttgtgatgatattcctctgctttgattttgcattggaagaaagcctcagttagcatattcatttggtcagtgatgtcaattggcacaagtagaaaacgacgaagaaggaggggagtgggtgagagtggataagccgatagagtttccgatttcttagcatttctctattattttttattaaatttttaattgcttttttttttgggggggtctataatggcgcgtgatagtggcatctggcagaactcttttatttttatttccgttgattttaacttctctctcagaccaaaaatcaaacgacagcagctgcaacagcggc

SEQ ID NO: 84573 - DNA, 948 bp, Citrus clementina
  Intron number 1 from transcript clementine0.9_034569m (loc us clementine0.9_034569m.g) derived from phytozome v7.0 (c hr-ID scaffold_49; pos 1283786 to 1284733 reverse strand)
aaattttcgacccacctcacctgttacaacaaaaagtgtactcttttttcgttcaaacttcttgttacttctttgcatgttcattttttgttcttgctttaaagttttgtactttcttgtgtttcttgaaattcttgaatttaaaactcatgtaaaaatgtgctcaaatttgaatgtggcatgcatgctgtaatgggttgtgtgtgatttgtattcgtgggtttgtttgcatttttgtgtttgtttattatatggcgatgattgtggtgcaagaagtggttttatttaaaaaaaattaataaaaaaattgggtagtgcatctgttgatatctgataaaggaagttagggttttaaagaagtgtgtgctttgaaattcttgttttacaagattattagatgttagggatggagcaggggagcaagtaattctagtaagggtgatgaaaacctttgatgatctctagctagataatctctagcaagtaatccttaacatacaacatggttttcttggtaatgaaaattttgagtcttatatttaggattctaagtcattttattttgattgcgaaggaaggcgtgtgtgttttgtgatgtatggaacttctggatcacaattccatgtgcgctggctattttctgaaaattttgtttcgttgcttgtcttgttcaaaacaaaacacgtaagcttccaatgttttgtttgcatgaggagttcttttgagcaccaggagattgtagattttgacatgatttggctgacatcagtatctttttctgtttaatggtagattgcagagcttgcagtaatgataaagaagctgcggaactccttaagaatcctatcatattgttgacttgcaggattaataaccaaagccttttttaagttttcttttcctgcacttgcagagtaagcatctggtggcatttacaggtgcagggat

SEQ ID NO: 84574 - DNA, 695 bp, Citrus clementina; identical to SEQ ID NO: 82687
  Intron number 2 from transcript clementine0.9_021725m (loc us clementine0.9_021725m.g) derived from phytozome v7.0 (c hr-ID scaffold_29; pos 670722 to 671416 reverse strand)

SEQ ID NO: 84575 - DNA, 441 bp, Citrus clementina; identical to SEQ ID NO: 81174
  Intron number 1 from transcript clementine0.9_032827m (loc us clementine0.9_032827m.g) derived from phytozome v7.0 (c hr-ID scaffold_20; pos 430904 to 431344 reverse strand)

SEQ ID NO: 84576 - DNA, 265 bp, Citrus clementina; identical to SEQ ID NO: 81566
  Intron number 3 from transcript clementine0.9_011858m (loc us clementine0.9_011868m.g) derived from phytozome v7.0 (c hr-ID scaffold_49; pos 1244032 to 1244296 reverse strand)

SEQ ID NO: 84577 - DNA, 637 bp, Citrus clementina
  Intron number 1 from transcript clementine0.9_011858m (loc us clementine0.9_011868m.g) derived from phytozome v7.0 (c hr-ID scaffold_49; pos 1244742 to 1245378 reverse strand)
cctcacgtgatccacactcactctgaatctcgcaggtaaattccatgatggagtttttttttttgtttttttgacccctattattgaagtaattcaaatgaaaaagctaaaaaaaaaagtgctagatgtttaattatttgtttcttcaacttagatttagctgattttaatgtttatgttccgttcgtttttgaaaattctgtttggttggtgagaaaactgagggaagacgaaaatgcagaagatattttattttttctgtttttcctacattttctcggtagtcaaatgacggtttgaaattggatagttagttgttagttacgcattttatctactttagaactattatttaatttaatttggcaattatttatttacgctactgtaaatgcgaattcaaatattaacagagatttaccaaatccaattactaacgtaatattcttcatgattagattagtctatatgcgatctgattttaaacgatttcttcaaatctcttcttttttttttggtaatttatttcctaattattaacttcttttttaattttttggtttttttggaaaaaagaaagagtgaaaatatagtttatttatttatttaatgtttctactgtcttcatgcagttatt

SEQ ID NO: 84578 - DNA, 576 bp, Citrus clementina
  Intron number 1 from transcript clementine0.9_011383m (loc us clementine0.9_011383m.g) derived from phytozome v7.0 (c hr-ID scaffold_67; pos 597431 to 598006)
gggtatgttatgtgtatgttatgttacgtcactttcttcttagctttctacaaatgcttgatgtgtctgttagttctttgggctgttggtttgacggccactcactgaacagaatgcttatgatcagatcacatgaaagttttatgttttggagtttctaaaaacttcttatggcatatgtgaataccctttaattgtgaaattactactgctgttaaaaattaggcagtacaatattagtgttcactgttcactactgtgaacagtctaatctttattagaaatctgacaatatttgactttttgtttgtgtgctatctaagaatcactgatgattactaaatgaccagttgaataatatatagtaacttctgtcatttgttctatgattttaagaacccacaaatgaatttgttccctgtacattattctgaatttactttgataaaaccttttaatatattccctggatgaaagatttgttttagatataacaggctgaaaatggaattgaaaaagctggtggtttccttttctgcaggtggaatagttggaatcattttaactgcaaaattg

SEQ ID NO: 84579 - DNA, 155 bp, Citrus clementina
  Intron number 2 from transcript clementine0.9_011383m (loc us clementine0.9_011383m.g) derived from phytozome v7.0 (c hr-ID scaffold_67; pos 598010 to 598164)
agaaaatcatcagagaaacgggtaagtattatccactgtaagaaacatgatcctcaagctgagtttcctattaaagaagattcatcagggttgtcacagcatagttaagtaaataattgtatttgattttgttttcttggtttaattggcagctg

SEQ ID NO: 84580 - DNA, 739 bp, Citrus clementina
  Intron number 1 from transcript clementine0.9_027720m (loc us clementine0.9_027720m.g) derived from phytozome v7.0 (c hr-ID scaffold_49; pos 446197 to 446935 reverse strand)
ccgttattttctcagttaagtttaacggtggaggggtaaaattgaaagtttattccttaaattaattttaatgggaattctctttattgcaattaaaataaaaatctttaaaaaattaaagaaaaaataatagtggtgacaatgtacatgtaacaagaaatgttttattacaattaaaataaaaatcttaaaaaattaaatgaaaataatagtggtgacaaatgtacatgtaacaagaattttttttattaaaattaaaaaaaaatctttaaaaaattaaaggaaaaataatagtggtgacaatgaacatgtaagaagaattatttttttattgcaattgaaaaaaaaaccttaaaaaaattaaatgagctaaaaattttgtttttttacatagaggggcatttttgtcattcaatcaaaagttagatggagccgttagaaataactgaaaaattaacggaattgggggtgtggtgcaaaatgtcaatttttttgggtgcgtggtgcaacaagttaaatttgttggggacgcggtgcaaaatatcaatttatttgggggtatgttacaaatttcccattttaataaaagtgttaaaaacttttaaaaattgaactgttgagaaagtcaggtattggtaagaggggtaatttgatagaaaatatggattttctgttttttcgttgtggatttgatattttattttctattgttgacattttttaaggaagaggaggctgg

SEQ ID NO: 84581 - DNA, 706 bp, Citrus clementina
  Intron number 1 from transcript clementine0.9_004586m (loc us clementine0.9_004586m.g) derived from phytozome v7.0 (c hr-ID scaffold_1; pos 9674847 to 9675552)
gggctgtttatatctttggggtatgcatgatttccaaaactatcaacttttgaattatatgtttcataatttagttgttgctttcttgatgttgtatgcttatttatttatttattgttcatttattattctttggttatttttggttaaggacacacaaactttcttagttagttctagtatttttccattttttttattcttcttcttctgcttcttgtctggagtttgttcttgtttagtttctttaattagtgtcacagttgtttggaagggcggaaagtgctactaagctttcttgatatagaaatgtttttctgtccctgttttcattattatccttgcaatgttttaatgtgttatacaagtaatatgagaccataagaaaaattttaaaatattgatgtcagtgaaaaagcttttctattttctttctgatgttcatggtttttggatcttcatcttctatattttagagaaaataaaagttgcaaattgcactgtctggccgtagaaacgttattaaggaaaagaataatagttaactttccataacgttatgttctacatgtactgtaaaatctttttattggtgtgaaagaaaataaaaaatgctataaattagtttgccgatgaatgtgaacgtgttgtgaaattctgtttgaatattctaattgatcaatttcctcattctgttttttcaggg

SEQ ID NO: 84582 - DNA, 525 bp, Citrus clementina
  Intron number 1 from transcript clementine0.9_001259m (loc us clementine0.9_000747m.g) derived from phytozome v7.0 (c hr-ID scaffold_29; pos 744564 to 745088)
aggaggttcttgaagattggcggcgaaaaaagcaggtatcctttttttgagattgttgtcagcttagatgcggcttcctttctaatttacaagcttaaaattgtgtttttaatggtcgattatatgccaagtttgtgactgaataaactgaactctgtttgaaagatgataaactaggaaaatttagggaatttttagtttaaaggaacacattgttggagaaatgcctttgggttgtttatgatgtttgtcaagcctgttatgatgcagtgaacttggcgcaccatgatcaattttgaacattttcagtttacattaaggtcaaaattttgataagtattgatgtacatttctaattgtttttttgcgtgttgtgctttctcgtcttcagtttaggacgtggagttgacatcagtaaatttcttcttttcaattttacttttcttttttttttttcactgttaattactgtcttttatctgttttccaggatatagaagtgaacaacagaaaagtgaaagtaca

SEQ ID NO: 84583 - DNA, 718 bp, Citrus clementina
  Intron number 5 from transcript clementine0.9_022966m (loc us clementine0.9_022925m.g) derived from phytozome v7.0 (c hr-ID scaffold_23; pos 3379357 to 3380074 reverse strand)
ggggaagttctttatttagaaacacattcttgcaggtagtcttcctatcttgttattgacataaattgtttgcacaggttgtttgattgtcatttgggattttggaacatgatattttgttttaataaatttgttatgtaattgttttctatctgcctctattctgatgttattattgtcttatttctcttttgttcttaatgctacatagcaccaatgatcaaattaaagaaactatactgagatatgatcacatatttacatcatcatgtgatttcgtggaacattggaatacgacaatttacggatcagatgcattaaacctgaacttaactggagatgctaagttccaaatttaagatccggaagcatcctagtgaagtttccaagttgatggaataggattaggctttgcttttatgaagagctgcatatagctttgaagttctgcattctgcttgttcctgttggtcttggggtacaactttatcaattcttttttttttttttaactgatagtattttctcatttcatatctgttatgaatgaaactagtcacttgaattaaagtctattgtcatttgtttgtgtaagaagaaaatgatttatagcctcaaatcagaataattttctggatattggaatctctaaagtacatgtggcaatttcttggtaatggtttgtattttctgatcttttgagttgttatctgcaggt

SEQ ID NO: 84584 - DNA, 307 bp, Citrus clementina
  Intron number 4 from transcript clementine0.9_022966m (loc us clementine0.9_022925m.g) derived from phytozome v7.0 (c hr-ID scaffold_23; pos 3380116 to 3380422 reverse strand)
aaccttggtatgcatataatcttctttttcataatttctagcatgcatttacgtacatatatcagtttattgttggaaaatttgtttgaatgtttatgtgcacggagagttgggacgttgtgaccttgcttttctcagcattacagttagaaataattgaatatacctgataattgcttttcttggtttttatttatttatttattttttgaatctcctcgatattcaagtgttccgatactaattaatctgaatgcctgcaacttattcaggattaagtacagtataagtattgttgctgataaag

SEQ ID NO: 84585 - DNA, 839 bp, Citrus clementina
  Intron number 1 from transcript clementine0.9_022966m (loc us clementine0.9_022925m.g) derived from phytozome v7.0 (c hr-ID scaffold_23; pos 3381350 to 3382188 reverse strand)
taggaatatcactcccggcctccgggtcctgctgggtaagaagatttattctcttcatatagatattattaattcaaagtgaaaaacagtgtctattttgattttcgcaaatacaatgcttttccatctgtttgaaacggaaacccactaaaccctaatttgattctcattgcaacggagcataacctacatgtctgaattgtgagtttcactttcttttacccttttactcgggtttgagtttgagtttacaattagtgaaaaagaagctgaaattgatattttgctgtttttctgatcttctaaagcattttagatcttgacttttgtttggacttgatggttatagattgtgtctacatttcttaagttgtatccaacacaccttgtgccaaaacaaaacacaatcctcatgtgtgttcacaattagtaagaaaagtgtgtttggatagactgtggtagacaacttgggagacaattttatgtctctgtttgcagaaggtcttattcctggatgacacttccacagtcctactttgtcgatatggagaagtaatgtgctgaataatgcagtgcattattcttctctatgtttatcattggctttcaacccaataatagttattagagaattcgacctgagttattgactgaagcatattcggaagctgattaatttttctttatttaactagttgtaacttatgctctctttttatctctttgcacttctgcaattcccatcacaatgtttgttttacttatgtgcattttaacaaggctaacctccactagctttgttaggttacacatctgacaaagaaataacgtgtgttccc

SEQ ID NO: 84586 - DNA, 758 bp, Citrus clementina
  Intron number 1 from transcript clementine0.9_002247m (loc us clementine0.9_002247m.g) derived from phytozome v7.0 (c hr-ID scaffold_33; pos 971178 to 971935 reverse strand)
cagaacacattaaatcccctccatttaagtcgctggtacgatcgttttaaacctagaactctaagctccgagatttgagttcgaatttttttctctttctataattcttagatctgtgcctttctctctatagattcgacttgtatgtgaacaatttaatcttttgattgtggatgatagattcagcttgttgcgcagttaattcttggcttttattgttgctttctaattacagattcactcgccttggttttttttattattgcttcttttattttttcccctctggatgtgatttgttttctggatttgaatttgatatatttttattttggctatgattgttgctgagtttttctgttttattcatgtttaggctgttagatttaatagtgtatacttggttagttcatgcacattggttatttctatgatgcaatcgttttctctgatgtgtgcatgcgattggatttgcaataattatcatgaagaatcagctcaggtttcattattgaagttcattgaattagttgattttgttcaactgttttattgtgtgcattgccttggactcagggtgaattcttttaacatacataaatttcatgtttgcttggtgtttcaattattttagagtaattaggatccgttatgttttgtagataatctttctggtcaaatttattactgttaatcctgtagttgttttcttttctttttcaggagccgaccaatttaatttaataaattggttaatt

SEQ ID NO: 84587 - DNA, 1012 bp, Citrus clementina
  Intron number 3 from transcript clementine0.9_015210m (loc us clementine0.9_015210m.g) derived from phytozome v7.0 (c hr-ID scaffold_23; pos 3666894 to 3667905 reverse strand)
acgctctcatcatccacatcggggaccagatcgaggtactttccacttaatgtttcctacttatcttcatttatttttatctatcgatcttaacggaacggaatggctcaactacaaataaactcattgtttttattcatgtatgaattttaattaaaaccgaaaaaataagattaatatttgggatctattattttatttcaatgaaaatataatgaacacgaagagtgaagctcatgattttgcatgattctagataatattaccattctcctaagtctgacttttgaagtgatttagaaaataacattttaataggtaaattctagtgaatgaaggggcgaagcgagaggtaaataaggtgttattttttgaaattttagggatcaagtgccaagaacattagtgtaaatatttgactagccaatgcaacgttactaaacagtagtcggagacataaaagtggtgaaccctcgtggtgcgcactcgtaattagtaaaatcaatccatttcgaagatgcgtcacttttagtatgtggcccgtaagtcattatcaatttagaaatcgttttcaacaatttttgtttttttttttttttgttttttcatgtgattacattttccgaagctagccttccctacgtgtcgtcgattgatcgaatcaatcacgtcatggtttgtttgtccaaccacggaggagaagtcattttaagttggcatattttagctaagaataagtattttattaggcatctcaatatttaaattttaatttaagtatgagtcgatattgatatttatctatcaagtaaaaaataagtaatttttataaatcataaaatctatcattgaatattgaatatacaagtgacatatggttattaagattttaggttgaaactcaaatattaggaccccgtattattaatccattttttttgtttttttttggcaatcgggtccgctacggacatgattgatccattggtgtttgatgtgcagattctgagca

SEQ ID NO: 84588 - DNA, 704 bp, Citrus clementina
  Intron number 2 from transcript clementine0.9_029037m (loc us clementine0.9_029037m.g) derived from phytozome v7.0 (c hr-ID scaffold_20; pos 1417855 to 1418558 reverse strand)
ccctcttgattctaaagattctcaaggccgaacaggtcatctttattgttgcctcttgtttgtatcgctacgaatgtgtctgttgcttcttgggttgtttctattttttcaaagcatgatttcataggtttcgagttagaatatggaattttgttattttgttattacgttgttatgaatgaaaccattcaaaaatagacaaagcagttatgttttccaggtgcattgtattggtgattttgtgggttgtttcggaagaaaagatagcgagggttttgtatgattctataaagaaagatgcaaatttttgtggacaccatacgagttattaacttctcttccgggcttcctttgaggaagttcatggtgctttattctttattcatttaaattgggaagcagtttgaaggggtttaggttgattttttatatttttttatcgtccttgatgcagtttcttaaggctttctgaaacagttcgattcttcttcataggctagatagaatcagtccatataaaatcttcaacatattggggatttaccacattttaatctgcttttgtggaatgcatgtatgattatgttctgccaaatttggggaaaaaaacaaaggtttatgccgtcctttttaattttttttgttttttgtagtttcatgtatgttgcacttaattgtattgatgtttgtgtccagcccttcat

SEQ ID NO: 84589 - DNA, 490 bp, Citrus clementina
  Intron number 2 from transcript clementine0.9_030660m (loc us clementine0.9_030660m.g) derived from phytozome v7.0 (c hr-ID scaffold_49; pos 433778 to 434267)
ctccaactgaatttacaatccgtaagtacgagggttatgaatgaatgtgatctttgatattgcaatgtgaacaataagatgcttttactcttggagttcaaactgccacagatgattgattaaatagtattttttatatacataccctttgaaagagtttttttttatttggtaggtgacttacaaacatagggaaatttctcaaaagtagcaaaaatgcaacaatgaaattgttcagtgtttttgagaagaatggaccaatttacaagtaaagtagaaaagttccgagaaagggatttgcttttgtaactggtcacttttgctgtcttgatacagaatcttagtatagccaatgatctattcttagatttgccttggtttctgctttagtaactgttctttttggagcaacctgacctgtgaacataaatatatttcagatattggaatgaaacatactcatctgtaaccttctatattggtattccag

SEQ ID NO: 84590 - DNA, 384 bp, Citrus clementina
  Intron number 3 from transcript clementine0.9_034836m (loc us clementine0.9_034836m.g) derived from phytozome v7.0 (c hr-ID scaffold_20; pos 1649610 to 1649993 reverse strand)
cgggtgatcgggtcatcttctctgatcagtccaaggtatatatacacatcttcatatttctgtccaatttgttttttttttttttttgctttatgattttttttttggtgacagtaaaataagagaaattaaattgaagaagaataagaaaccaaattgcttttctgctaaaaccatcgatatcggctctcccgcatttaattttcttgcataaaatttctctacccttgaatatatatatatataaagattaattggttttcaattaatttgctaaagagtgaatagggggtataataatttaaaacttttctttgaaaataatttaaaaatttgctttgaatcttaattatgttatcctaaaaggttgttagtatattttta

SEQ ID NO: 84591 - DNA, 591 bp, Citrus clementina; identical to SEQ ID NO: 83853
  Intron number 1 from transcript clementine0.9_008591m (loc us clementine0.9_008515m.g) derived from phytozome v7.0 (c hr-ID scaffold_53; pos 1115379 to 1115969 reverse strand)

SEQ ID NO: 84592 - DNA, 478 bp, Citrus clementina
  Intron number 1 from transcript clementine0.9_001823m (loc us clementine0.9_001818m.g) derived from phytozome v7.0 (c hr-ID scaffold_20; pos 1831254 to 1831731)
tgtactagcgacttcaattttcattcagcacaaaggtactctctttcttctccctccctctggagtatacgtgtgtgtttgcttcatactgagttgcgagttgcgagttgcgagttgcttcatttggtttatgtttcagctccataaactttaaattttgttgttgtgttattcttttgtggacatgcatgttgaatcaagttctaaatgctgagactgggaattgggttgcattctatctgagttctaagttagtgtatgtgcatattgccgctacttaagattcaatattctacttcaatgttattctttttatcttttcgtctattctttgaactttggtttcttagaaatcaaactggttgttttccatttatgtcataattaagatggtaaaaactatgtgcagattgcattaacgagacagaaatatatgtgtattacagctgcgcagttgattctcaattagtagaaagaa

SEQ ID NO: 84593 - DNA, 811 bp, Citrus clementina
  Intron number 1 from transcript clementine0.9_010317m (loc us clementine0.9_010317m.g) derived from phytozome v7.0 (c hr-ID scaffold_5; pos 227537 to 228347 reverse strand)
atttacgggtttatcagacttggaaaggaagcaatgtaagtgttttgtttcccctttttttaattttttttttgttctacgtaattaatgtttctaagtttggttaagtaggttatttttctattttttgtttattggattttatttttgtttttgggcattatgagttgtaattatctaattttatcggtctaggttttattgttatttttagtcttttacgtatgtgtaagtgagttttgcggggaattaaagataatgaagaagaatttgagctgaactctgtctctgtcagcttaaaaatggaaactttgatgtgcccctccattacttgagtgtgacactttttagaggagcttcagtagagctgcatattattgtgtttgtgtacatgattataaataaatttatctaaaaattgaaaatttaagaaatatgtgtatgacagctaagattgagggattattatttaggtctaatcattttttgagatgtggatactggtcacatgtctatgcagctaataatatatttgaagttgttgaattaaagatgcttaactgtggttgtttcagttgattgaatgtcaaaggccaataaattaggtgattaattgatggagcaactccattcaaagaaccaaagtgcagtgttaagccttcagtcgtgcctagactttaatttggcatagatattcccatcttttgtgtatgggggatttgagtgtttgtgcatgttccttcaaatgcattaatcagttctatttgttgccgcagatattttttcttcaagggaggcttatatttggacc

SEQ ID NO: 84594 - DNA, 643 bp, Citrus clementina
  Intron number 1 from transcript clementine0.9_017242m (loc us clementine0.9_017242m.g) derived from phytozome v7.0 (c hr-ID scaffold_27; pos 2874731 to 2875373)
tggtaatttcttatactatcaatttctcttgcaagccttgataaatttcacagaaaggaagaaaataaagataacctgctgttagaatatgtagtttttctgttaataagaatattcatgttttcttaatgcaagtataagtttatatgcagacatgaaagcatcaggttctattcagctttccaaactgttttaagaaattctgcatcacttgctatatttgaaggaaattagcactgaaattcattaatggagttgtataaaattggtgtttatacttcatgacacctattgtagggtagtgctaatacagtatagtgagctaaggttgaggccatagggggtttctgctgtatggacttttaagttttttattttaactactcatataacaaaagagtccttatagttcctttccgttttgtgttgacagagtaatgaacttttttctctgttcttgggcaagtcaatgatgtactcatgtgcaatatttaagattaggatccaactttacttcaaaaacagaagtgatcttctttggttgtgtactacagctttaattcattttatgttttcactttcaagggaaaattgacaatgttttgaatattgattcttgcatccatttgtttacagagtgaat

SEQ ID NO: 84595 - DNA, 554 bp, Citrus clementina
  Intron number 1 from transcript clementine0.9_005252m (loc us clementine0.9_005252m.g) derived from phytozome v7.0 (c hr-ID scaffold_40; pos 1704126 to 1704679)
ctgaaggtatgtaatatcatttaatgttttattttctgtattttttttggtgatttagttctgttgactttggatgctcgatctttgtttctctattactgttgctaaatcaaactatctcgttctttgtttctctattattgttgctaaatcaaacttacaagttgccaagaatagaaaaaaatgtttttcatagtagaaaaaaccaaaaaaaaaaaaaaaagaaaattgaaaaaccccaactcacaatccgagtttatggattttcagttaatgggttgacttggattctgagattagttcgtattgcaagatgttccctcttcgaatgcctttacgatcaccaattgaaacttaaaattggttataagctctgactatttctatattttgatggctaattggtttaactgaatagcataaacagctggtcttttgtaatgaagcgagttatgatcaaagatcggatatttcatgtctattatttgatatttctaatatttgagaccagcacctgaccattgttttattttggaaaacaggtgacgctttga

SEQ ID NO: 84596 - DNA, 423 bp, Citrus clementina
  Intron number 3 from transcript clementine0.9_033022m (loc us clementine0.9_033022m.g) derived from phytozome v7.0 (c hr-ID scaffold_20; pos 3540954 to 3541376)
gtgaacaaattggtatggatacattagctggaattattcttgtagtttcaacttttatgattccaaaataacacgaaatctgataggtgttgattttttgcttgtttttaaaaaataaatcagaaattagcgcctttttttttttttttgagaaacagcaaaattgatttgttttaagtttttatttttcgcactatgttttcctgcttctctgcattttgttcctttcccttttacccggttaagctgcacgtcttgtttcatactttaattttttcgaggatttgtttgtttgagcttgtgtatttcccacattatttcttgtattctttcgtttgtgactaagtcaaatggttaagttcttcttcagtacattaacttgctattgatgtttaggtggaaagaaaaggtcctcattttatt

SEQ ID NO: 84597 - DNA, 1034 bp, Citrus clementina
  Intron number 2 from transcript clementine0.9_024035m (loc us clementine0.9_021714m.g) derived from phytozome v7.0 (c hr-ID scaffold_20; pos 3579403 to 3580436 reverse strand)
atattacaaggtatgaccctgagcctgatcttcaatcaatccctgaagtgcatgaaatacttacaaaagagatcggccattattgaatacttatcatataaatggacgataaaattaatataatttttttgatatgtattgaaagagagagagagagagagatccttcggagatcatgtcttttataaccaacagtgctggctctccaggactagtagcatggaaactatcattgtatagaagggtaagaatcatgcgacctccacacttcaattcttcagaccgaaatttgagaaatgctgagaaatcactcttaaattgatccaaaaatgctctatggatatcaaattcactcattggctctttaggcatctgataaagcattaaatcaagggagctgattagtcaagatgattaacaaattcttgaatttgaaattttttaagtgataatttgatttaatagatattagataaaaatattctaatatttttattagaatattaaaaaacagaataaggtcccctcgcccgcatcgtttattgtcaaaataactttgttttccattaacatattatctatatatatttacaatttgtgctcttactgtgaatatacgtatcaaattatgtagtacaaaatgtgtagtcagcataatttaaaaatctatagttacttacacattttgaaaatatatcaattttttctagtgagggcatctgatcttcattagttgtttgtattgcaaaataatttatgttatgattatggggcatgatgtatctggaagttgttgacagaaataatgtgaagttattaacataaataatgtgcatgatatatgatatgtgaatgattactcttccgtaactggcatttgaggaggtggacagcttttattggatacattccatgccctcacctcatatcacaggctgctttttccatacaataattggtttttcttgaactcaaatccaaagctcttctgacatccaggagagagacatttaatcatctatcaagctggctgg

SEQ ID NO: 84598 - DNA, 578 bp, Citrus clementina
  Intron number 1 from transcript clementine0.9_003536m (loc us clementine0.9_003536m.g) derived from phytozome v7.0 (c hr-ID scaffold_82; pos 287335 to 287912)
ggtgagttttctctaattttttcgtttacttctcaattttttttaattaatttcagtttgttcttttgacttttgacctggcatttttttttccattttggtgatagtgagaatttaatgaaatgtgacattttttttttttttttgcgattaacgattgatcaataatttggagcttttggcgattgtttatgcgtgtttaattaacgctgcgttggttattttcgtaatcatgatcgatcaagtgcaaatctcggattgagtttaattggcaaaatgtgtaaattcttctccaaatcaattttgatttggaaagagacgagatttaggattatagaacgtttattattgaagctaaggggttttcttttcataaatgcaacatgaaatgtaatgccgtaataagcggaaatagtttgacattcactttgctagcatgctttatatgctttttatggtatctcacacaatagcagtattctcgatcgatataatatcgtcacaatgatttatttatttataaacgggaaggataaaaatgtcctgggatccttaataaatttgtttctttatgcaga

SEQ ID NO: 84599 - DNA, 526 bp, Citrus clementina
  Intron number 2 from transcript clementine0.9_003536m (loc us clementine0.9_003536m.g) derived from phytozome v7.0 (c hr-ID scaffold_82; pos 287988 to 288513)
tcttaccaaaatctagagattcagatcctgtagtggtaatcaaatttaatgacttctgtttttgtccatactgattactgagtgttagatattgttttttatttatcttttgtggttgaatgatgtattctgattttgatttcgtatggtcgaatttatttttcttatcggcttgtgcaagatctgaaactttctatagcataaatggggaatctaataaattaccatttaatatctacacccaaacttcgcatggtagaaactttatttaaaatttagtataatgctgttaaaatcacactcgcctagatctgtttctctacatattttcccgtgatttgtttttctgcttatcttctgtaaatatatttggtggagataacatatgttatgcatcatcatttttttttttttttactgttaggcagatgctcttaacttttttatgacaccttcccagcattgcacattttaacattcttaaggggcagttttacagggttcaggttggtttacaatcaccaga

SEQ ID NO: 84600 - DNA, 688 bp, Citrus clementina
  Intron number 2 from transcript clementine0.9_000776m (loc us clementine0.9_000776m.g) derived from phytozome v7.0 (c hr-ID scaffold_1; pos 6474097 to 6474784 reverse strand)
attttcaggtgaaaactggagatatacggtttttggcaagtacatctttccttctggtcaaaaagaattggtcttctgaaatccgattacatgcatttaaaatgctccaggttcatgcagatattcctttaccttgtctttgccatggatctagcccatccaaattgtgaacttgatattgatgggactcatcttatgttttaagatgttatcattgatgtctgactcatcttatgttagaatcatctgtaaaatcagtaatatgcttttgaatatgtccttccaactacactgttataagggtcggcggaaacttttcaaagcgctgtctcttgtaggaggagactcttctatatttctacaatgtggatgtgggacaaatagataccattgaacccataccgaacaatgttttattgatcaatatgatgtctttttgttttttgtttcctaatggcctaatcttaaagaacaaatgcaatcatccgaaaaaacagaaatctggctttttgttcctttctatcgaaagaggttgtattgctcacttgatatgaatattaggttccagctatttgatttttgaaaattagcgtttgtattcttatgagttgtaaagtttgaggataaattgagtgacgtgactataacatatctatctttctacagcatttggtcagattaaggtggg

SEQ ID NO: 84601 - DNA, 408 bp, Citrus clementina
  Intron number 1 from transcript clementine0.9_006533m (loc us clementine0.9_006508m.g) derived from phytozome v7.0 (c hr-ID scaffold_1; pos 8182874 to 8183281)
aaattacaggtaactccccccatctcaccctctctatctgtctgtccatctacatgctgtaacatcacgtctctgtagtacccttttcattttttcatcttcttttgaagtttttttttatttttggtataatatggtcttgtttatttctgttcttgacttactcgagtaggagttgtttttttgtacttattttgaaaatttccctcgctctttgcaactttaagttttgagttagttttatccctaacaaggtttattttctttgagattatatcgttctcatgtaatttagaagctatatgtttgttcaattctttcttggattttttttttaagttacatcaattaacacaactttgtcttcttaatggttgcttttgtagcagtcttgtgttctcagagtta

SEQ ID NO: 84602 - DNA, 783 bp, Citrus clementina
  Intron number 1 from transcript clementine0.9_035041m (loc us clementine0.9_035041m.g) derived from phytozome v7.0 (c hr-ID scaffold_5; pos 986013 to 986795 reverse strand)
ctgtcgacacaggggcactcaagtctcaacctccagtaagatatttttttttttttcaaatcttcatgattgattcatattactctttctcttggatttgtcgactatttgcttttcataaatatcttttatagttgattcacatgtatcatgatctcatatggccccagagattaaaggaaaaagaagtttcacatttgatttttcacatttgattcacgtgtatcacagtatggccccagagggaaaagaaaaaggaaattaatgattgttagtagcatcaggaattttagaaggtttattccctccaaggtctttcaattttttttttaataattattgattatgtttctttctagattagagctttaaagtatgaaatgattagcccagccctaaaggcttaactgagtttcaagtaatttttttattgctggccaccctagttcgtttgccacccgaatttaaattttaaatgtatgagttaaaaaaacatctgggctttgtccacacccatctttaaaaaaaatgaaataattgattaattgttggcccaaactcttgcacaatgttatctaggcactgatggtataataaacatctgaagcaaacatggcatcattaatacccaaagggaagagagttaatttgcactaaattcttttggagcttcatgaattatatggagaactagtacataaaaaagggtccaattttctcttttcatttgttgtgtgcacatgtgcaggctgataaaattgtagctgactccagaatcaataa

SEQ ID NO: 84603 - DNA, 568 bp, Citrus clementina
  Intron number 3 from transcript clementine0.9_004588m (loc us clementine0.9_004588m.g) derived from phytozome v7.0 (c hr-ID scaffold_133; pos 365895 to 366462)
gacttctctccgaatacttagcggattactcagtatgttaatttgacagatcttacaatttttctatctagcactagtactatattttcttagtttcatcattttgtttttttttttggctcttgtacactatcttttcactagctaaaccaaaggatgaactagatgaagaagatcctcaacagaatgtcatttctcgaggtaattaagcatcattatgacgttatcttacatcatagtatctaatattaatcaagatgagctacataataatgatgttatgatataaaacatcagagaaggaagataaagaagatcatttctgtcctccaaattgcaccacatttgttctgttttccaagctgatgatgaaggccttgctaattgttctgggcataggtatgtattcattcatttgtctgcttgcataggttcgaaggttttacgagctcatttaagactttcttgtttacattcgttgaggttcgtccatatcttagaatcaaacaatttttacatgttatggcacttaggaatttggaggataagcaggatcaaagaaaagaaa

SEQ ID NO: 84604 - DNA, 871 bp, Citrus clementina
  Intron number 1 from transcript clementine0.9_006158m (loc us clementine0.9_006158m.g) derived from phytozome v7.0 (c hr-ID scaffold_10; pos 1852317 to 1853187)
ccatcgtcgaccttcctctcattaaagccttccaggtaaccccatctaccatacctactgatgatcagctgataaatacattagcaagcgaaaaatcataagtattttactttgatcactttcccctttgtgacacgtctggcatcaaaactttaacaaaataaaaagtagctgatttgtataggctatgacttggaacgactttattttcccataattctaggaaactaaagggtataatggtaaattaatgttatataaggacgtggcaatctcccgtttttcttttctcttgacgtaaagagagggggcccacaaagcatggtagccagtaaaaacgaaacatttctattttctacgggtttggttggtcaacgttgaatttagcctcttaaagttaccaataaaatgtctacacattaaacaaatttatttcggaaagaaagatctcttttatacttggaaactatcgtttgaatagttcatacttgagagatggataaaagtagccaaaagacgtttgtgacgaaagcaatgatgagtttgatgaattgatggtgacaaggataaagttttattctcctttttatttatctagttagcatcggcttggctgcttccatgctaacgtgtactctgagaatatcaagtatcaacaactccaaccatatggattaattgccagacatgtgtatagtgtgtgttaacgttgccataacaaaacactttattggcgtaattaatattcggatgtagtaataaccttatcttaataataataataataataataataataataataataataataatttgttttaggaattaatctaatttcaggcagtggtggcaagccttgggaacaaca

SEQ ID NO: 84605 - DNA, 715 bp, Citrus clementina
  Intron number 1 from transcript clementine0.9_008584m (loc us clementine0.9_008584m.g) derived from phytozome v7.0 (c hr-ID scaffold_10; pos 1462098 to 1462812 reverse strand)
ttcgcgatcgcaagctctattaccctgccctcaaggtttcctacccgccctctctctcttatgagtctgttaaatattcatgatttagattttgattcattttacggggggaaaatatcaaatttctatcctacggccaatttataatctaatcaatcttgaattttggtttttatcatctagttaaggcaattagtgacactcgtgtattggctatctgatttgtggaatttgggcattgttatgggtttgttttaaggtatgaatagaaagttgaagtagatttgtcgaaaggattctgaaaaaaatccgtgggttaaaaatgtttgggtacatccaatgaatgtcacctatttcatcagtcactaggataggcagtcagatgagtgtgctgcaggttgtaatattatctttctgttttcattctagcgtgtagaatgctagttatggtctttgttgcttgaattgtcatgatggcattgtcagactcaaaactaaaagtagctctctcagctcatctggtcattgctgtttgttgtcttgttagcaaaaataaaaccctgcattggtcttctttcatttagtctgggaaaggttggggcagttacaattctttggtcgcatataattcccccctctcaatattctgtttctttcttttctctttgttttgtgggtttcaatctgaattgtttatttgcagttatcagaaaat

SEQ ID NO: 84606 - DNA, 844 bp, Citrus clementina
  Intron number 1 from transcript clementine0.9_016698m (loc us clementine0.9_016698m.g) derived from phytozome v7.0 (c hr-ID scaffold_10; pos 285387 to 286230 reverse strand)
agctgtaggtgctatataattgggtctcttttgcaagttgttaaattcatgctctgccatgccattagattaggtcaatggttttgaaattttcagcgaattttcttgtagaagaagaaacaattttaaagcaactatattgctaggctattacatgggtagttgataggaggtaggtattatttgggatagcctctctgatgtaattgagattttatacagggaccggtttaatcacttcttgtaatattccatttacagacatctcgtatagagaagcttgctttgaagctgctttttccaatctgctgtgaagaactgtgtcaatttctgtctgttagcccctctttttttatttatttctagtacgtagtgaattttatttagtattgctttggctataaagctttagattgttttatgatagacaagcctttgtttcaatgtctgaaagagaaagaaatgcttggtaaggaaattgcatgatcacatgaatttgatttcatggtcataaaatttaggacaaacattatgtgtgtttttgttctaatgttgcttcttacgtttttgtttgactgcttaataggttacagatataattcacagctttcaagtttccattataccatctcaatgctattctgacatacgatagtttgtgtttaactggatttgtgatgttctggatgcatttgacagatagtgacagctttttcaagaaggccctctattctagttcttacatgggccaattcgttgaatttctattgcttttgcttcctttaattggtcaatagattatcattgattttcgtagctgttctgaattaggtataatcagaaa

SEQ ID NO: 84607 - DNA, 962 bp, Citrus clementina
  Intron number 1 from transcript clementine0.9_004736m (loc us clementine0.9_004736m.g) derived from phytozome v7.0 (c hr-ID scaffold_63; pos 981497 to 982458 reverse strand)
acctccccggcgtcgctcctcaggacttcgtgaaggtatgtccacgcatttcttctttcatttgttttgattgatcagcaatagaattttggatctacgttgactgatattcgcattgttgactgtttgatttgcgtgtataaataataaaatgagaagctgcagcattgatttatccaaatctaatctgttcactgcattacgtgaacatatgtaataatattggtttcttgcaaattatctatacgtacaatacaaatcgaggccgcatgatacaattggacgtttgaaaacgaaaaagccaatgcactaaacgagaacagaaaattgtcagtttgaatggaagaggttgtctaggtagctgttcgtgtgtagtatcactgatacaagttaatgaggggcttatggtttcattggtggtcattcgcgggtgattttgtaatttgatggattaggaatgcatagatgtatctggattctggatttcgagtaataatgcatgattgcatttgagtgactgattgctttgtcttataaatctggttgattaaatatgattaattggtcaacagtttagattcagatgaacgacgaatcgtttgggaataggatttgtgaaaaattgctgcaaacagtgaaatgtgtttgggctttttacattcttttagttgtttgaatgtggattgccgccactgaatgaaacgaagttgttgtaactaataaatgccgcaagctgtttgtgttttacgctcttgagattcactttagtccatgttatctatctgtcatgcttgtgagtccttttataattatagtgcgagagtttggtaattaagcttaatgaaaaattgaagtgaaatatatgaatcagtgtattaggatttgctcttgagagctgttgaagtcctttaagaatcctttgagaaattgtttgatttaatttttgtttcatatgcagggag

SEQ ID NO: 84608 - DNA, 725 bp, Citrus clementina
  Intron number 1 from transcript clementine0.9_017671m (loc us clementine0.9_017671m.g) derived from phytozome v7.0 (c hr-ID scaffold_29; pos 2512356 to 2513080)
agtccaaaatcgcgtgtttgcattcacattttgaggtatttttttcttcaattttagttaatttttggattttaatatcgatttgagcttttacgatccttgattttgttgtcatttgatcttgactgtgtttctttttcaagtttctggatgtttggtatttctgattcgattgaatgaggaaaataattactttgttcttgttggtgtaatttttagtgggaatttgaattggggattgtttgtttgggtggttgctcttgctgtgtaattgagggaaatgagaatttttatttcttatttttttgaaaaattgacagctgagctgggagaatataatttcatgcaagtatggttaggcgtgtaaagttcaattttgagtatattgaacctccaaaccgaatttgaaatggttgacctcggggtttgatgggtggtgtgggaaactctgggtcttttgcggaattgtagttgttaaggatcaactttttgttttaatgtgctctatcattattgggtttagaatgaataagtagataggaaaatgtatcttcacttttaatatgggcaatcacctattcacctggtattaagattttttagactttgttcttgtagattgtatctgaactcagtgccgcgacaatgggtattatgattatgacgtgtgaattttttggactgaaatgtggtgtttgttcattttgttcgtaggaacaggaata

SEQ ID NO: 84609 - DNA, 481 bp, Citrus clementina; identical to SEQ ID NO: 82235
  Intron number 2 from transcript clementine0.9_017671m (loc us clementine0.9_017671m.g) derived from phytozome v7.0 (c hr-ID scaffold_29; pos 2513332 to 2513812)

SEQ ID NO: 84610 - DNA, 516 bp, Citrus clementina
  Intron number 1 from transcript clementine0.9_005594m (loc us clementine0.9_005594m.g) derived from phytozome v7.0 (c hr-ID scaffold_1; pos 12618021 to 12618536 reverse strand)
atcaaattcagtccgataattcgtcagccattgatgttcgtttctcttttcctcactttatttatttattttttttctgtttgtttgcttagaaaatatggtgaggaaaagaaagcaccgagaatgaaattttatgttttcgaaatttacttctttatttttggcatttaaaagactaaaattgaaaacttagttcttgactggattaaatttgttaacggttaatgtgactaaagtaaagcgagctattaatttccttgcttttcttgaatttgaaatttagaattagataaaaatcggtgcttctcattcttgtttgttaggttaaaagtgggaatttgagttcctctcaaatgggttaattgagagatgtggctttatattcataatcaagtagagaaccaaaatgtagttggtgattatatgttgattgatgaatggatattatggcgtaaattaagatgtttcagtagtaggctaaaattctctctgtttctacttgtagttgtcctctgt

SEQ ID NO: 84611 - DNA, 682 bp, Citrus clementina
  Intron number 1 from transcript clementine0.9_010944m (loc us clementine0.9_010944m.g) derived from phytozome v7.0 (c hr-ID scaffold_1; pos 10308377 to 10309058)
tgattttcctctagacgaggaagaggatttgggtatggttcttattggattatttatgctagtaatataatagctgaattcaaattgactataaagtcacttgatcacatgatcatggaattttctattacttgatggttgcttttgtcatattgcaaatgcattaccccttatgattttactgaagtgtttactttgatattctgatttcactttctaaatcatctgtgtactgatagtagtaaatattgaaacacaaggacttagtgattctggttatacaaaacaatggtcgagttttagtttcttgtcccggtcttttatttataggttaagctttggagttttctttttttctatttgagacctccttctacgtgctgtccagtccttgaagacttgtgtgaggatgtagcgtttggagaacctgggtatgtacaagatcgggtagctgtctatttagttgttctagtttctctgatcccacttctcctagtagggacattccaaaaccgtagcatgaaccgaaaaacaaactcttcctcctgggaatgagctagcatagttggtggttctgatttattgaatgtatttcttatttttacccacattgcttcataactgtgcactttcaagactttacatggtatttatatgcctgcctcttttttcagattttgac

SEQ ID NO: 84612 - DNA, 566 bp, Citrus clementina
  Intron number 1 from transcript clementine0.9_004688m (loc us clementine0.9_004688m.g) derived from phytozome v7.0 (c hr-ID scaffold_10; pos 3502798 to 3503363)
taaggttgtgtgttccgttcagatctcggaacccggtaagcaaattgatgttccattagattaaattaaagttgttcaaactaagatgttaataagttcaattaaatttgttttattatttaagcgttttatttctttcttcttttaaccgtcgtgacgttactagtgatcgtggaagtttcttgaatgagtagcaataatgttttaatgctgaagaaaattttgtaaaaagattctttgaatgttgaatagtgcataaaatctagatccaaaccctcacatgagttttgttttatttatttatttttttctcttttgaaatttacttaattagtaaggaaccaatggatttattaattgtagcttctgataagtaaccatcttttaccataataattttttgcataatactcatttgggagcctgcgttttttgtataaccattgttgagtacatagccatattttcagctattcagtgtttgtatcaagtttttttttttttattcaatttgttttctttctatttcagattcttgactcctgatagcccctggctttttatca

SEQ ID NO: 84613 - DNA, 769 bp, Citrus clementina
  Intron number 1 from transcript clementine0.9_018956m (loc us clementine0.9_018956m.g) derived from phytozome v7.0 (c hr-ID scaffold_89; pos 393207 to 393975 reverse strand)
gtactgtaagccaaactttactttgttctttttttttttttttaaatgtatatgtcaaatttttacgcaaagcatatgttggatgattaattaagccattaattttagcgtatgattgatctgctgattaaactagaaaatggaattctagtcatgggtccaaatgagaaattggtgaaattataagaatcttctttatctggattgtctgtccttaattgattttgattcttaatttgtgacggaatttattttccccctggttttgggcatagtaagcgccgataattgctctgtttttgcttgagctattcgatcttcttatgaaataagtcaaatgactaaattaaaacaccatagatgacttgttatgcattgaaatatccaataaatgacttgctaaatgacaaggattaattgtcaacatttgtgctgactaaggcccgtttggttttgagattaaacaactataacttttaaactacaacacttgttattgtggcttaaaagttatatttgttatatactatctgttttattttcataattacattttttttattgtagctatggttcaaagttactacacctcaaataccaaacagggattaaaattttcctcttctatgatataacctcaattttagataagagtataaatatgattcagtgcaatctcttctttgaatgaacgggaaatcttgaagctaacgttaattgtcattctctgacagagctttgtgctggataaagaaagcgggaaaaagtg

SEQ ID NO: 84614 - DNA, 905 bp, Citrus clementina
  Intron number 1 from transcript clementine0.9_010674m (loc us clementine0.9_009100m.g) derived from phytozome v7.0 (c hr-ID scaffold_1; pos 933577 to 934481)
aaggtctctcagctgaagctatccgtacggtacaggtatctcaatattctttttgcgaatttttttatttttaatttacgagctaattttaatttttgattgaagttacggtgatttgatattacttacatttcttacctgtggttctcttttttcaggaatctgtcttttttgaatacgctgtcgtatcgaattcagtgtagtctcggttactactgttcttaactatttagcaaatcaagcctttttaatacctgaattgtgaccaaatttatgcatttgggtacaagctttcgagtcgaaaactaattgtaggatttcagatctttaagattgcattttgtttccgtgaacttttaggacggttaatatgtgattaaaaaaaaaaaactcatattgtggacttaatgtaatatatataatagatgctttgttagctttgcttgtttaatttttatttctttttctataagaaaacctgaagaaaagaaataaaaaactgaagaaaaattctgctgtctatgatacctttgcttgatgctaggttccagcatatgcatacttggtctttgataataatagaaatttgaaatctcagtctactgttggactattgttagactttgaaaagggatagagatttaagattcaattgtttggtataccagggattttttttttttttgtttttggctgtacatgtttagagtttcctccttatcatgctgaaccatcaatagcagttacttccctatgtaaaaacgtatttaagaatgcataagtaactttttttttttaaatttgtgtcttgtgaatattcaaaaaaatttcaactcatgtgctttattcgtgtgatttggatccaaacagggactgtgttaggcattttattttaaactgtattt

SEQ ID NO: 84615 - DNA, 990 bp, Citrus clementina
  Intron number 3 from transcript clementine0.9_010674m (loc us clementine0.9_009100m.g) derived from phytozome v7.0 (c hr-ID scaffold_1; pos 934921 to 935910)
catctgctgaagatcctgtacttgttagaaaagtaaggaccgtattgttatacacctgtatgttgcactcgcccctactacaaaattttgataattattgcctttcattctcactttcatccctctatttaatgctctttttcaatcaaacaatatctgtagctgattaaatcgtaaacaggcaagtataggatataaccgatgcatgatgaaagcatagtagagttattattactgatttaaacaaaccagctcaaacatttatgtttccttctagaaaaagttctaaacttgcaatgaaatattgtttgggtgaaaagtaaagttgcctaaacatacaaatttaatataccttgaagattcccgactatgagaaatttccggtttgaatgtgttttgtcctcgaatcctgtaataaagattttatggactgtcaaagatgtgacagttgcggaactttaagtggaggacaccagattgaattacatctacattctcttctgatcaagtaatattctcctttctttttttggttgtgctagtggaaggatcataaaatatgaataaatgatctttgtttcttagcaaaaaatgtgaataagtgatcacatttttccttgcttaattcttttcaactaatgttgataattggctccattgattccattgctgacctaccaaagtaaaatttacatggatgatcatgaccagtagtgtcaaccttaagcccgatggatgatgactctctcaattctgatgagcagtgagatttaggttttcagtgaaatttttggcatcatattcttctacaataattcttcttttttattttaattttctctttttctttgagttgaaatcctatccataaattagtttgttcatagatccattttattgatctagttagtcgaagcatttgcaactatagtccttcagctatttaattctgtttaaatgatttattctgcaggattctccacctcctgc

SEQ ID NO: 84616 - DNA, 469 bp, Citrus clementina
  Intron number 2 from transcript clementine0.9_029680m (loc us clementine0.9_029680m.g) derived from phytozome v7.0 (c hr-ID scaffold_111; pos 597823 to 598291 reverse strand)
agcatcttattcagtcacccaattcctttttcgtaatgtgccttctattaatgttttattgttgatgttgttactgtgtgagtatcttctgttagaatgataataggcttattttccaattcttccaaaggttgggatattgtaattctaaagtttttatttctcgaagtacaaaatctcaaatgtcttgctcatagaataatgatgataagaagtaaacttctatgaaatagtatttgttttaaaattaaatgtttgttataagtttgaattccatctttgagtcataacttgtcattaactcttttttcttcttaagtaaaatgctactaaattagtgccaatgcatctggctgagtttggtttttttagttcttcttcatattatacaattttttggagtgacactaactgctttttccttttcacattattgatgtaggatgcgaaatgttagggttgcttcaac

SEQ ID NO: 84617 - DNA, 753 bp, Citrus clementina
  Intron number 1 from transcript clementine0.9_029680m (loc us clementine0.9_029680m.g) derived from phytozome v7.0 (c hr-ID scaffold_111; pos 598352 to 599104 reverse strand)
gtgagttcatatcgctcttctactactagcccttttgcgttttcggctttacatcttctgggtgtttgtcatttaaaattgatctatatattattcttttaaaaaaaagcaattttttttgttttatttgttatattttatgatgctcgtgtgtttttttttttttttacgaggctactatttcttatgtgttttgtgttgttttgtttttctattgattcatgtaaatcaactagtttttgtaggtttttgggaattgataaaatctagttctagcaaaaataaaatgttcatatagatttttttgtagtgctatatcttaacttgttaacttttgattttcttttagatatgcattagttgtaggtaatctagaactttctgttacatcttaaaatcttgtgtacatatccgtatcttttgtgtgtgatatgatatatgattgtatttgtatgtacaacacaaatttaaaagtcagcaacagaagacatggaggcctaactgagaatttgagatttgtgacaaataatgaggattgttcgactatttcctacactccccagttatctgtaaaatatttagctactaccatacatacataatgttgattgaagtacaagattattgggatcaatataaccaaaaattaatttgtaaatataattttgtttttgtatttatatatttatattttccattcaataatgttgctcctttctttttatttgtgaatgtgggaataggttctccaaa

SEQ ID NO: 84618 - DNA, 881 bp, Citrus clementina
  Intron number 1 from transcript clementine0.9_029002m (loc us clementine0.9_029002m.g) derived from phytozome v7.0 (c hr-ID scaffold_127; pos 45520 to 46400 reverse strand)
tctcatcgacgctagtttatacggtcagtattgttaagttatacgtttcaagctaacacatatgattcacatataaaccaattctcaagttatactgtccatgtaaagcttgtcggaacaagtttttcttttaaaacctcaaggctagctaacgctaaaccatagctcacaattaacatatgtttttgacaactctgatatagaggccttctgtggtgaaaatgtctgcatgaaattctgtacggactaggagtttacaatgttataaaagttatttacaacattgtaaaagtggacagcctgtatctgagaattttactctgaagcatatttttcaaattctacgcacatgattattagtcaaataaattcttagtgcccattcgttaataatattttcattactttgatgcccattgataaaatatatatctcagataaataaaatgattaattttttgtttaaaagaaaattactcacaagacaaccaacttactcaacctacgatagaaaatattgggagggcaaaatttttcgaagatgaacccattaattatcatgcaatggttaagaactcctcacggaatcgagcagaacgacctgttcttcctgactatccaacaccgcattaatttaatcggttatcccattgtgttagcaattttatcgaatgcacatttaattgtttaaatatatacacttaaattttgtttgccgctttcacataatgtgcttcgctaaaccaaattcctgtttccactgttgattgcttggttattctttggttttgttatcttcatttatatatgtctacatatgatgctcgtattgtatagatatcaaatacatcgccaccactctgacattgttcatgaatcag

SEQ ID NO: 84619 - DNA, 869 bp, Citrus clementina
  Intron number 1 from transcript clementine0.9_017456m (loc us clementine0.9_014943m.g) derived from phytozome v7.0 (c hr-ID scaffold_1; pos 10741294 to 10742162)
tcgaggcaagactttcgttgtttctcctctctctggtatgttagttatctcctatttcttctgcggccagttgggaagcgtataattgttatgttgcttcttctgattagccatctgttgcatgttactttgcaaggtgcttttgcagttcttgcttaattaattaacataagatatggacattcacggtctagattgactcggtaccggtttgatctcttccatgctaattttttaaaatgttgcgattgaggactgtttggtattagcttatccgtattgcagttgggtaactataacttttaaactacaacaaatatttgataaaatttcatttaaattatatttatatttgtggtaatagtactaccaaaaagccaagccattgtcaaggaagttggattatgaattatgggaaaaaaataccaagtaattcattcgtggatgtattccattccgaataagaaatttctggtgatacaattttttgtgcaagcaaataaatacgataacatgattgattgatgataagaatatagtaaataagtaaattttagacaaaaatgtatatgcgtcaagagatcatttaaatctaccaaccttttacctttgatggcatacttgtatacatggtaaattctttttggaaaaatttacaatgacattcatggatcaccctatatattatttatgggaacttgtaaaacacagattagaagcgtatatatgctgcatcattgagtacgatatatgctgtaaattacctctagctagtaattccattttgtatttgcctaattacttagttgcatgcgatactcttgtactctccttgcattgtttctcagttgtatcatttgcagctctgg

SEQ ID NO: 84620 - DNA, 969 bp, Citrus clementina
  Intron number 2 from transcript clementine0.9_031650m (loc us clementine0.9_031650m.g) derived from phytozome v7.0 (c hr-ID scaffold_40; pos 416489 to 417457 reverse strand)
ctggttgaaaggcagcggcaacttcaccctccacggtaatgctcttcgacttcctttttccccttgtttaatgagaatgtgatggattatgagtagctagctaagcccttaatcttatatccttcaaatgcatttctctgttgaaaaatactttgcgcagtatgccttatgatcaaaagtacttagttaatctcataagctcttttttaaaattttaatattgtttggttgcatttgagtagagtttatgcagattaaataagttattttacctttatcagtaaaaactcaaatttagagcttcaaatactatttatttatttcacaattttatttcattcttttcataatataattttaaaaactttgtctattaaaataattttataatttttataaaactctcatcaacaaccaaacaactataatatttttggtaaaaattttataaaagttcttcttgaataatctctatttgaaaaactataccaaatagagtcttcctacaataacaccctgacctagaagcactttgtggaaaagcgtttaccaaatgtttcttgaaaatgcatttatagtgcttctctaaagtagatcaatcaaatggttatccgaaagacactcttgctggtccttttttatttaataatttaaaaaaatataattgtttcggtttcaaacaaatacaaagaacaaaaataattgcattttcattctatcgtgcctttgtctatttgaatgcttgttaaacagtgccaaaagacctgccaggctcagtttatagcacttctgttttgagaacaaatatagaggcgtgtacaattcctctatagatgttaacggctttggtagacccaaactgctagttgcactaatagtgagtttggtaattatcattttctcatcatagctgatcaactgcactcatgtctaggtttatctgtggcatacttatctggaaggcaatca

SEQ ID NO: 84621 - DNA, 961 bp, Citrus clementina
  Intron number 1 from transcript clementine0.9_032006m (loc us clementine0.9_032006m.g) derived from phytozome v7.0 (c hr-ID scaffold_1; pos 8360004 to 8360964 reverse strand)
ccaaattgctcctacttttgctcaaactggtgagttttgcttcttttttttttttccctggtttctcgaaaacattttgtttgtttggcgagtagtttggaaactgaagaaaatttggtcatatcacttgaagaagaaaatctgtacaattttctaaccaaatgctaacttactgtttgtactcagttccaagaattttacaatgttattatgcattaaaatttgacttaaaatttcgtaaaaatctttatgaattggtagttgttgttcttgttgcttgtcatatttcttgattatttacgaagtagtatttaagctcttattgttattttaatcgatatgttttggagtttattctagagatagaatcttaaattttaatgaaagcttgttgcatataaaaaaatataaaatgttcacaagagatggatgcaggagattttatttaatttttcttcggaaatttgaggtgttctcaggaaaaaaaaaaagaaaaaaagaaaaggttagtgcgtgatttatttggtcatggtgggtcattaatttactgctttctttagtttcaaattttagtaaattattcgttcagcattaataaatgagacatccaaattaaatatgcacaactcgtgcacatgtgtaattggtttaaatttgacgggttcttcaattttgatatccttaaagagttgtaataatctacggacacagaatgtatacagtcagcagtcatgattctgattgtgtgaaaatttggtaactcagccaacataaatcaatttcctaattaagacttatgtggcattagacaattgcactttcaatttccgtgaaagtattacctaatccggacaccacgacttcttcaaaccttcatacgtaattcatttttcttaattttgcaaaattaacctaaaattaatatttgagtgcttttattttgatttacaggcaaagaaat

SEQ ID NO: 84622 - DNA, 944 bp, Citrus clementina
  Intron number 1 from transcript clementine0.9_014142m (loc us clementine0.9_014142m.g) derived from phytozome v7.0 (c hr-ID scaffold_20; pos 391950 to 392893 reverse strand)
gcaccagagatcccaattccgataccccacctagggtttgccctctctccccccctcaccccgcttctcttatgtcccaaaacggcacttgcccaaatgtcgtttgcttttcaatttctttttctgggtctaatcgctgatctggggatatttgatcctattatcacgcggggtgtttacaatttttgaaattttgtgatatttttattgtttttgttatgtggagacaagaaagttatgtttttgattaatttattgtggcattttttctgttttgaaacactgtacctgttattagttttttgaaaattgttaatgcaaatacgtttggtatttgtttatatgtatatattgtatgtagtaatggtgttttttttttccaacatctttttttaaaaatatttttgttctagggaagtggaagtgatgataattgtgtaatatggctagttttgagcccaaggaacgaaatgtatgaatttatcgcataaaaaggccctgttttcagcaattaacaaactttgatgatataatatatgttacttatgggtgtgaaggggcttttggaaatcaggttttttcctgtttatttccttcttcattatcttagtatgtttaaatgcttacggactggaagtttggtttaacctattcatgctttgacttggcgtgccttcctgcttatatctggttatcgcatcattatcaaatgtttctcgattatttgattgatgctctcatattgctttgttaagacttgattctgatctgtgtctggcaatttcttttcatcttctgtatgtcgatggatttatgctgagttgctgacctatatttatttctgatcgtgctgtaaaatttttctgttttgtcatttttccctgctttctaatgtttgtatatgtgtgtttttctttttttgtagaaacaagctgccaagaagg

SEQ ID NO: 84623 - DNA, 691 bp, Citrus clementina
  Intron number 1 from transcript clementine0.9_012178m (loc us clementine0.9_012178m.g) derived from phytozome v7.0 (c hr-ID scaffold_10; pos 2118367 to 2119057 reverse strand)
gtgatccctccaggtcttctttattgcttttgttctacaatttgtgatttcaatgcatttctggcatgttcatgtgggaatttcatgatatgattgtcagtacctgcaatatgcaatatttgatcttgatattgttgcgccaaagttgaaggatacatgatatattgttttgctgtaaaacccctcagagtgtactctgttttaggtactatatgctttgttctcctggaagctgaaacttgtacaattgctggtgtatatgcagagaattagatatatcaatgttagctgaaattttttgaggaatatggaacttaggaaaactttacaagtgattaataaatcaaaattatagagggaaaagggaagccttacaagattttgtgccgaagctaaaacattaataaataaataaaggttaacatcaaagatagcagggaggaaacatttgtatagattattgatcttcttagggaaatttttggtattacatttcattgactgtattcctagttaaataggtgccaattacatgcttatatctcttgattgttcaaaacctcaattgatttgctttataccttatttaattgatttttaatttccaattcatttctgtttaaacaaaaactaagttagtcctgttatcaaaacaggtgtgttctccttggagtaagcagtggtgcaaaca

SEQ ID NO: 84624 - DNA, 392 bp, Citrus clementina
  Intron number 1 from transcript clementine0.9_034575m (loc us clementine0.9_034575m.g) derived from phytozome v7.0 (c hr-ID scaffold_98; pos 726680 to 727071)
tgtcgccatcaacgatttcaagatcaagacgtgtggtgtgtatcgtttttctttatatcagtgggaaaatgatcaaaatcttcctattgttctagtagatttattatttttctccttacgtttcaaaactcattaaaactctttggcattaaaatgattacgtaaactttgtacttttttgtctattttttattttaccattaaaatcagacttatgactaatttttttctcttattgattaattgttgacattttatgtatcataagtctaattatagggataaaatagtaaaaggcacaaaaaaattcaaaacgaaacggaatctttttaacaagtagttttgattaattttcagggcacaatatccctaaaagcgtagcgaatcaagtt

SEQ ID NO: 84625 - DNA, 808 bp, Citrus clementina
  Intron number 1 from transcript clementine0.9_034862m (loc us clementine0.9_034862m.g) derived from phytozome v7.0 (c hr-ID scaffold_20; pos 3500464 to 3501271 reverse strand)
atcttcgtctactgctacttcgttgtcacttgccggtatttattttgtttatgagctgaaatttttgagagatgatttgagtgatttttaattctggaaatttctgaggttgttcatatatagtgacaaattgtttatttatgagctgaaatttttcctcatttattttagagattgtgaaatctcaatttgtgttcaaaaaataataattctatttccaagtttgataatgcaacctaaattaaaaaaaaaaatccttcatagatttgtgtgaaaaggaagaaaaagaaatgcacgagaaaataatcaaattgtaactggcaatttgattgcagagtagaattgaattcatttttgcataaactcccaaaatctcttttcataatgccaaatcataataaaaaagctttctctcatacgaaatttttataatgaataaatttatattgatatattaattccaaaagtaataattttgtataaatcacttgatgaatttgtaggtcttaaattgtcctggaaaatctaccctttatgctagagatctttgatatttccgctattttttatgaagaaaatagacataagagtatgagaggaatctttattggattaaaatgggtgttttcttgtttgttttatatatcttaattatataacccacgagctggaagcctaattttgcttgataaatttacattaccgtttgtgattaaatcatgtgcggggctgttgtgtccttctttgggaaagcaaattcatgcccatgtgtgtaaatttgggctgaagtcgcattccataacagaga

SEQ ID NO: 84626 - DNA, 462 bp, Citrus clementina
  Intron number 2 from transcript clementine0.9_022008m (loc us clementine0.9_018945m.g) derived from phytozome v7.0 (c hr-ID scaffold_27; pos 139545 to 140006 reverse strand)
tggctttcttattggatctggtattacgtggttgggtatgttttttgaacttatgttatgatatattggatacctactggcattattattgtgttccatttaaacaattttcagttttatttttgatgaaattctggttgtaggctcagtttaatctgctaacttgggtgcaatagtaagctttgtttttctgaatctgaagattcaatctttggctaagagttgtgtttatttagcaagtaggattttagtctacaatagttttacattcatcatattgtgcacagataactggtgatactactgctgctgcagttattatttcttctactgctcttgtagtgtgtgtgtgctttcagcattcacacaatctcagttcctttctcaaatgttcttgattacccactcttcatcttccttcttgcaatattttgataattcttaggcttctcttgcagcaac

SEQ ID NO: 84627 - DNA, 513 bp, Citrus clementina
  Intron number 2 from transcript clementine0.9_026223m (loc us clementine0.9_024374m.g) derived from phytozome v7.0 (c hr-ID scaffold_98; pos 69064 to 69576)
cagtggctcctttcataagggatagtttttccgtaatttttcttcttgtttctcttttataggtgcagttatttttcctatgggattcttatttgaatttgtagagtttaattctgtgtgaatttagtaggttttgttatttggatcttaagagcaatgaaaattaggatcctttttcattatttctaattgaggatgcttgtgctaagataatatttaatgctatctttgttggctgaagtttgggctttggaattccaatttattataattgtagacttaggtcttttattttttattctatcctattctagttttatggccaaatttcataatgccgagtacaagtgtgcaactcaaaaactttgattgcatctttgtgtctttatttttttatttttttggttgcgtcttattggtggtgttgggctttatctttttttttcccccctaatctttgttgctatgaataatttagattggcacagctgttggtggtacaacaagtgcatt

SEQ ID NO: 84628 - DNA, 550 bp, Citrus clementina
  Intron number 2 from transcript clementine0.9_012673m (loc us clementine0.9_012382m.g) derived from phytozome v7.0 (c hr-ID scaffold_5; pos 912141 to 912690)
atattgaaaggtaattttttttctctcctggttttcttctaaacatggtttaatcactttcagtcttgtttgacaaaatgggaagtaagaaaaagaagaaaaaaaaaagtgtagatgactgttactttacacttctttgtatttcttaaagagggaagagttcaagagaagagaaagtgctatatgttaatttgaccattgtgttcttagattttcagtgtttatgctgtccacattgtaatatttaggctgacgaaatataaaacataaaaaaaataaaaaagaagcatgaaggtattataaatgtttattatttccacccctcttatgtgtatctatgtattgaacaaatttttgagttcggagagattgtatgtccgtctcccatttttccccttattttttctttccagcaattcaggggaaacagtctctctatatcattttattttcctccccccttcactgtctcctaccaatctaggccttgaatttttttatttattaattgttttattgatttcgttacttatttgctattgcagctatt

SEQ ID NO: 84629 - DNA, 478 bp, Citrus clementina
  Intron number 2 from transcript clementine0.9_013494m (loc us clementine0.9_013494m.g) derived from phytozome v7.0 (c hr-ID scaffold_65; pos 176885 to 177362)
agccaactgcattcagtgggagattccctgcacaggtaaacgatttcataagccacatgggataacattcatgctaaagtgggtggaatgtttgatgtaatgcaatgtgtggttattttgataaaattgagtttccaattgattccgttacctggtgaaaatttcttcagtttggcaattaaattgacctgaatgaaattgtcaacttggcatttatctagttagaaactggattgagctaaaatatccatggatgagctttattgagttttcttgcttactaattagaaaacaacgttataaaatacttacttcatgattatgggatatggagaaattaggatccactgtctgcttttatgtttgtgggggggggggggggggggggaatacaattttgtgtactgcattaatctctctctctctctctgtggtgctctggctgggtggggttgtttaggtgaaatttaggattttt

SEQ ID NO: 84630 - DNA, 500 bp, Citrus clementina
  Intron number 6 from transcript clementine0.9_013285m (loc us clementine0.9_013285m.g) derived from phytozome v7.0 (c hr-ID scaffold_23; pos 3565919 to 3566418 reverse strand)
aattggtggtaggtacagactcagaatttttcaatttggttttgttatttattagacataattggtgtgatgctagtttctttgtcatcaaagtttagttaactgaggaaggatctttattggtttttctcccatcatcactgctagtgctaagaaattgatataaaagagactgaaatgagatgttttgtttcctgaaacttttacttctcctgttgtaaaatggtttttttttatagtgcttattaaggaatttcattgaaagttcttttggctggggcagtagcaaattctatcctacatgtctatctttttcttttacgggctttgctggagagaggcagaaactgttcagtaattttatgtcttatctccttctgatgtgctctattggctaataaaattcttgttaggataatatttagtggaattctttttattaatttttattaattatttttgcagagtgcaggagtacagtttcctcaaagacctcgtac

SEQ ID NO: 84631 - DNA, 1036 bp, Citrus clementina
  Intron number 1 from transcript clementine0.9_017159m (loc us clementine0.9_017179m.g) derived from phytozome v7.0 (c hr-ID scaffold_10; pos 4669917 to 4670952)
tgttgttggtaatctcttatttttattttattttttgtttggcattttgtactgttagtaaatcactctttaggttgaatagtaagaagaaaacaaagttttatggggtggtttctaatcagtagttgaatcaagaaattattggttggattcttaagcgaatcattaaacatcataagtgggcgttttcagtctgtggttcaaaacccaggtatcagatagtgggttttactgtttggatccttgtaaactgacaatgtatagctaccatttttagaaaggtttttttccttaggattcataatctcaattagaggtttcagttattatctttttttttttttggcccttaaaaggaatttgtcgtaaatggtgaaactttaacaagccatcttagactaatatttccaagttcttgatttttctttttagttgtatttgatgttttaattgaattttggttggatgtagagttgaccatagatagttagattggctctgccacaagttcatgtattttgatatgacaatgtcaaatgttatggagtttgctgtcattaattgaggagtgcatatgtaattactgttgattctactgtctggtaaattggcagacgaaaacaaagattgaagggtactggagaggatgctgtaaaatagaaggtttaaaagcactgagggttataatggaatatatttctgtgggcctgtgcggttaaaagtgttgttgtcaagtaaagcttttggtttactgggttttggtggaattgcaaattgaaaatttgaatacttctttctatgcattatagacttctaggtttttcttctttgttttgtttctctactgtatctttcatacctttcactatccaaaccctaattcctaccttatagaattcactgttacagttatatttccatttactgcatctacggttttatgatttttagatatttctcatggtctaactgaactttgttggcttttcatttatcaataggtcagcaattcacaagagtccaatttttgaattgt

SEQ ID NO: 84632 - DNA, 732 bp, Citrus clementina
  Intron number 1 from transcript clementine0.9_009741m (loc us clementine0.9_009741m.g) derived from phytozome v7.0 (c hr-ID scaffold_109; pos 479655 to 480386 reverse strand)
ggtacttcatttttcttagatctgaatcattttcttcttttaattgctgtagatctcactcacacactgaactttcgtggatctgatctgactttttagaactttatgcactttattgtaatgtaaatacccatttcttagatttgcggtttgaatctgcttggatgatttgggatctgggtcacgtttgtttttctctttgattggttagaagaatgtactcaagtttggttattaattttaccattctgtaggagccaagaggttgctttagtgtctgttataaatacattgtcatgacttgtgtgtgattcacgtctgtgggagagatctcttgatggtatttacacattagatcatcagctttctctttagttagtaaaggatcatgtaaagtcatgtttcttgctaacgagagatgtttactctggaatacgaattgggtcagcactttgccattctaaataatttgactttgatgggtagtcgttccagaagctatcaacaccagtcatgggtcatggtaatatatcactaagctttgtggtttatgccacatttttgcactgggattctcctcctttagctgtgatctctacttatctgttgtagtagttgttttataaaataatctgtttgaattgaattgaaatttcttgatgtatttgttattttttgtctgatagtttgctgtttacttggcaatagctggggattggttgcagggtcctt

SEQ ID NO: 84633 - DNA, 676 bp, Citrus clementina
  Intron number 2 from transcript clementine0.9_025087m (loc us clementine0.9_024364m.g) derived from phytozome v7.0 (c hr-ID scaffold_23; pos 1867985 to 1868660 reverse strand)
tcaacacaaaagtaagttctttcttctgaactttttcttccactagaagttcctatgatggccaacttagtcggcctgcttttagtagcttggtattcaaggatagaattgaaatgtagttcatcacaatcggactagcatcttcataaccactcgatttcatatccaaatctaattccatgttactaaatgtagttttgtcaaatgtgaattcattttagttgaatactacctcttagtggagatattttctctagaggccttttagtggaatgcaatattataaacgggatttttcctgagctaccagactgatcttttaagtagtgttatttacagaacttatatacattttgctacatttgtgcgccacagagtagttgagcttcgttgacatatttcaaagtatatctactcttctcaaattcgtggaaccaaatattttgtggatgattctagacttttcgtttggtagtatcaatttcatgactaatagctcaattttatgaaacttgtgtgcattactatgttgttctaaaacaaactgcttgttttcacccctcatatttacattattattttgattttgctttcactaaaattgttagtatgtaagatcacatggccaacagtttctcatcactaagtaaaatgttctaggtgggaaaatccattg

SEQ ID NO: 84634 - DNA, 619 bp, Citrus clementina
  Intron number 1 from transcript clementine0.9_025087m (loc us clementine0.9_024364m.g) derived from phytozome v7.0 (c hr-ID scaffold_23; pos 1868704 to 1869322 reverse strand)
tctctgggatccccgaagagcatcttcgtagaagagtacctctctctatgcttttctcttttcttaattaatttagtttttgacttgtttcagacggatcgcattttattttttgcgcgatggtgtgggaataataattttttagttagcgaaatacttgcattttagattgaattgattaattagggtttctaggttgatggaagacgcagctattgcgattgctaactaggattttgtttaggttttaattgtgtgacgtgctagattaatctgattataaacttttaaaaatgcaaattgaaacgagagaaatctcttggaattgaaatcatagcatttatgttccttcttgtagctttaaaataattcgccctaatgacttggagtaaaccaaatgttgcagccgtttccttgtcttcattttttttttttttttggtgttggtggtgggggtgacaggtggacttctgctgagtgcacaacttcctgtgttatacaaggcttttatgtttctttaatcagttatgtgtgtttatgatattccatcaaaatattctttcatctgttgatatgcatgacaggtggtgatttacacacctgctagaactgctactca

SEQ ID NO: 84635 - DNA, 388 bp, Citrus clementina
  Intron number 1 from transcript clementine0.9_013641m (loc us clementine0.9_013641m.g) derived from phytozome v7.0 (c hr-ID scaffold_1; pos 11315890 to 11316277)
cggctaggcaagaggctgttgattggattgccaaggtgggttcttttaaatcaatatgatattagctcattttcttcatttttggtcctgtctttgattcggtgaatgtttaaatatgaattgcagtgatgtattaatgtttaatgagttcggtgggttctttcttttccgctttttggattgataccaatatgtgaatgtgttttaattatgtgttcttttatgcaattattaccaatgcgtatgagttgtttcttgctatctgatgttctctgtttcatccaattgtgtggctgattccttcctaataagcttttcatttatgatcgatgctaatagccttggttcaacaggttcattctcatttcggttttggacctctttgttc

SEQ ID NO: 84636 - DNA, 207 bp, Citrus clementina
  Intron number 1 from transcript clementine0.9_000282m (loc us clementine0.9_000282m.g) derived from phytozome v7.0 (c hr-ID scaffold_122; pos 228549 to 228755)
cttctctttctctcacctcactccccccgtcttaagtaagcctaatgttcatttatatatttgtcttcgtttcttacatggttgatcaaaaaaaaaaaaaaaagaaaagaaagaggaaaatgatataaatatatgtgatttatttgaatatgaaatttgtttattgattttaatttttaataattttgattttgaagatttgagaaa

SEQ ID NO: 84637 - DNA, 908 bp, Citrus clementina
  Intron number 3 from transcript clementine0.9_035845m (loc us clementine0.9_035845m.g) derived from phytozome v7.0 (c hr-ID scaffold_5; pos 1702989 to 1703896)
tcaaagaaggagctgcacaagtaagtttgttaattactcaattaagacctacgcctataaattcggactatttatgacaattaatttctttattttaatttgggtgcagatgatatttgactatttttgtaagaaactaatcagttatgatgaaactcaagatgtgaagaagctcagagagtatttcaaagacttcatggatggtcttctctcatttcctttgaacattcccgggaccgccttccatgcttgtttacaggtaccgtaccagaaaaatattttgacatacatagagtattttttttaaaaaaatactgtactaccctatatgatcatgcaagatattttagagtatttttgttgatgtactatgcctatttagttcatgtataatatgtgtgaattaattataactactgattacatgataaattttcaaaataaatatatacatgtcatatataaataagtgggtccaatacaatagaagtatgagagatacaaattataggatttagaagaaaaagaaaaaactaaatgcttttatgtttcaaagtgagatattaattattttagcttcattggcattatgggcttttattgttgttgcgattgaaattgaaaatgttgctaccttacagcatttgaataaaaatagtactttattattctgcgactgaataaaaatagtattttctattttctgtcaaatccgtcagtacttctctatcaaaacagcattaatactactgaatactcatactatatttcaaattaagaattgaacgaatttgctagtattatataattaattatagtcaatgtagatattttcattaaattttcaatctcattgtagtcataattaattagggacgcaaaaaagcaacaaaggtgattgagaacat

SEQ ID NO: 84638 - DNA, 677 bp, Citrus clementina
  Intron number 1 from transcript clementine0.9_019636m (loc us clementine0.9_018424m.g) derived from phytozome v7.0 (c hr-ID scaffold_20; pos 3585477 to 3586153 reverse strand)
acgccttgttttcattccagtgggatcaatctcaggtgatctttttggttttcgttactgaaacctagcacgtttctttttgtttgatttcagtaagattttaaccttaactactgttgatgcattaaatgttaattaagggatgagtgtagaactaagtgtagtataaaaaagtttgtaataggatcaaaaccctaaattattttccttcaactatatttacagtgcaatcaatttagtatgggaagttgaaaaattgaaaatggtattgtattggaagtagttttcttgtttttggtagcaagatctgctttcaagtagccgatttagtgtttcctttcttctgaacaagttaggggttggttttaaatgaattgttataatttgttcctaatgtattagaattggttcaagggtttggtataacgttaaggataattttttcactattcaacagggttaataattcctaatttaatcaataaaattactctgccatggaatccccttggcgcttttagctattttgttcagctatcttgtgttattaatgtggtggtctgtgaggtgaaaaactaatatgctaattgacataggttgaagaaagtttaaaatgtcaaactctgcaatagatgttccttccaggggtggatttagttttgatctctgccggcgga

SEQ ID NO: 84639 - DNA, 884 bp, Citrus clementina
  Intron number 2 from transcript clementine0.9_007773m (loc us clementine0.9_007773m.g) derived from phytozome v7.0 (c hr-ID scaffold_29; pos 2311982 to 2312865 reverse strand)
aaagtaaatatctgttagctttggattactatgatgttatgttcaagtgtttgtgggtgccaacgattttagcgtttgtgtttttttcaatgttttgcttgtgtgccttttctgttattattaagtgctatcatttttaatgctgcctgatgaaatcactggctgtctggtaaaagtggattgaagcactttagctgctttgcttttaaagttttgttgaagcacgacagttacctatgtttggatggagggaaggagaagagaaaaagaaactagggaagtttctttgggagggacagaagaagaactaaattaaagctttcaactgtatggtttcactgcaattgaagtgaggagaaattcatttgttgtcaattagatcttatgactatgtgttaatttgttagtttggccttgttctttctgcctataccgtgaaaggattgggcttggaatgatggcacatgcacaacattgcccttctttcattgatttttcgagccaaaccggagaaattcctccctatctccttccctctcattattattttttagccaatcactgttttttgctttttccaaaacaatatttggacccttttatggcttaagacatgtcaaagaggtggagctttctttgtttaatctatttaagtttgaaccttattggataaattttgagaaacttgtgaacattgaaggtgccaacacagcgttttagcctgtaaagaatcgtgcaattgggtttctgttctgtcacatttgttaataaaacaagagttgatgaattttgtgtgcaatttacagttatggcattatggttttatacttttcatatgtgataactgtttacttcttgatgctgatatgttaatatctgtgcag

SEQ ID NO: 84640 - DNA, 188 bp, Citrus clementina
  Intron number 2 from transcript clementine0.9_009520m (loc us clementine0.9_009520m.g) derived from phytozome v7.0 (c hr-ID scaffold_51; pos 31799 to 31986 reverse strand)
tttgtgaaccacacaagctaccttgactggagagagtatgatttgatttattcacgtttcatatttgtatttctgctttatttttttaattatttttcttgtcagccgctcacaatgatgctttttttttttagtaaatgaaggttaatgatatgaatctggtttggtttttttgtagttcgagtaga

SEQ ID NO: 84641 - DNA, 1045 bp, Citrus clementina
  Intron number 4 from transcript clementine0.9_010763m (loc us clementine0.9_010763m.g) derived from phytozome v7.0 (c hr-ID scaffold_29; pos 623290 to 624334)
tcaattcctaccagttgagtccttttatcacgaaagtgggtcatccttttgtcttctaaaaatttttgtattttagtaattaagtgtggaatttactgcagttcacattgatcagactctagtactaggcttgtttcaatttgtgttgatgtgtgatttgagtctaagtaaattttgttgggggcctatattagagggttttatgagcatggcaatgcttcttctgttgtttccaatatcaacattcatctaagcaaataatatatccagttgactatcacaagatgtggccattgaaaagggctgcatgctttattttggaaagagttcttgacaaaaaattaggatgtacacaataactatattgagtaaaatctcacaattttcgatcttttaatgttttagtatagccttgagattgtttattctccattttattctccttagccttgtattttctctttttttcccgaaagttttgtattttctatcattgtggatataatgataattccttttgattggccattttcaaacatcttttttcttgcttattcttttgaataagtgtagattgttttattctatcaatgtgtattgcaaaatgtcataacatatgtgctgttacaattagttgtagccttctgcactttctatttgtaacttttttttcccatgaattttatttggattgtgtatctgatgaatgtataaatttgcaatgagttttcactgatttgcttcttttctggatgttatcatgattgtgattttagctgttatgtaatattacattaagatgtgcaattacttggaactcggtatttgttaagatagcctgaagtaatttttaaagtgaattaaggtattaaaggtactgttattgaatgaaatttaaaaattgttggccaaaaatacttatattcattttataacattgttgactttaattctttgaaattatcatgtgtaattattttttaatttttgaagatcattggagtgtcatttacatttgactttaaataattttaggtgtgtaaaa

SEQ ID NO: 84642 - DNA, 735 bp, Citrus clementina
  Intron number 3 from transcript clementine0.9_030120m (loc us clementine0.9_030120m.g) derived from phytozome v7.0 (c hr-ID scaffold_5; pos 1646472 to 1647206 reverse strand)
gagctgctaaggaatatagtaattacttgcagactcaaatatgttaagaaaaatatttcacattaacggagtgttgaacttgggttaaatatataagatttagacagctctcaactcttaaattagtttttaggttgagttagaactatagactttcttacagtatcagagacaaacttcttaatgagtggatccacactatcttacctatctatataaggtttgaaaaaccctcaactttagctaacttaatttttgggttgagttaaacttatagaattttatataatattaagttgagttaagcctatagacttttatatggtatcaaagccaaactcatgcatatattagctcacacacttttggaggcttatagacttctaaatcatagtcgaactcacacatgagatcggcttgcacacttcgtctaagccaaactcatgcttgagattagcttgcacgtgatggtaaatattgaacttaaattaagtatattaaatatggataacgcttaactcttgagctagcttttatatatgtgtgtgtataattcttgaatgtttatttattgccttcaatattgttgtatctactacatatgactgtatataattgtgtaggctgttggtaaagttctgccatcattgaatggcaaattgactggaatggctttccgtcttccccgtcaatgtctcagtggtcgacctcactgtaagactagagaagaaagcc

SEQ ID NO: 84643 - DNA, 731 bp, Citrus clementina
  Intron number 1 from transcript clementine0.9_026162m (loc us clementine0.9_026158m.g) derived from phytozome v7.0 (c hr-ID scaffold_10; pos 3194515 to 3195245)
tccagatctgatccaaatcaatcccaactagtaaggtaatcctttcttcttcttcttctccaatttttttttttttttgcctctttttcattttcccgcttctttattattactgttatgtaccttcaagatctgttagttcatctccaactgttactcccccacccccccgggggctttggcacagtttgattggttttaacatttgatataagaatttatgtataagatatatatatatatatatatatatatatatatattttcaattatgtgggcgtcgataaactttcaatgtgaaggttttacttgggcttgtttgctttaacctgaagtgtgtcaatgtgtaatttgatgtttaggtttaatgaaaagaactggaaggcaagaaaagaataaggaaataattaattctgttgatcaatagtatggaagaaaaagatggttgtaaagcattcaaagattttgataattttgggcccttaattatgtgatgattttaggggcaatttctctctcttgaacttgaggcggaaacctacactcttatgataacatatctaatctgattcgatgggaatgttttttaggagttaaaaatttattatgttttgctgatcgtgtttgatctggctttctggattgagctctattttgattctactgtctgtcttcttgaattttcttggaagacagggtgtggggcttttggtcttagaagttggtgagaa

SEQ ID NO: 84644 - DNA, 945 bp, Citrus clementina
  Intron number 2 from transcript clementine0.9_026162m (loc us clementine0.9_026158m.g) derived from phytozome v7.0 (c hr-ID scaffold_10; pos 3195459 to 3196403)
gtcagaacactggcaacttcattacggtatgattcctattccaatagctttgtttgcatattctgtgatgcttgtaatgcatcagtgtgtgatttttttaacttgtttgtttgttctgaacattctaaaggaatggttttgtctctcttgggaaattaataaaattgttcttcaggaatagtttgttctatagagagaacagcaaccatcattctgtgtgaggcataaaaattgtagtccacaatattttgatgcttcggtcttgggtagttcaaaagacttttgttttcactacgtttgtgttttggggatttgaactgtaaaagaacttctattcttgtttcagatttcctattgaagttagatctttgttttaaaatttttgtgaagtgagactattgccggaaattgttaaccattttgtaaatcaaatgtcttgctatggttctaggaaatgtagtaggcccaactaactgcggtgtacatcaagacttaaaaatgcagctggtacatgttgcatgcttttatgaagtaatgaggaataatttgcttcgtgtcacatacagagtcaagaaatgagtatctgagcccctattagttggtttcaaataatcaattcacttgcgcatgaaccacttgcgttcattcccctccaccattagcatgattttcttgttagacattgtgcaacttgaatttagttcaaattgtttttacatgatggttgtatctgtcatttagtttcaataagccttaaatgtcttgggcctcttaactatgtaaaatccaaaactaagtttcccaaaagtatgcattattctgtgagtctatttagattgcgtaagcttgttttaactgtctgttgaacggctaaatttatcattgtgatgacagtctctctgcgtttttttttttttttgcaggatcggccttcaaccaaggtcc

SEQ ID NO: 84645 - DNA, 771 bp, Citrus clementina
  Intron number 1 from transcript clementine0.9_010445m (loc us clementine0.9_010445m.g) derived from phytozome v7.0 (c hr-ID scaffold_82; pos 400830 to 401600)
gagctttgattgctgctgcgcggttttcgaggtaaagctttgaaactctcgtttggttgctgtgagagttgagggaaaaatatgacacagaacggagtcgttttgggtcttttgttaggaattgggtggcatgtttgttccggttttgagtagatcaatgtgaaacgactgagtttgtgttcgttttgattgatattgagatcttttcattctctgattatttctttgttttgatattcaatttgtgtttcaacttgttccttttgtttatacatcgctctgatttggttctatttgttttagtttttaaaatttaacttgctgcgactaatttattataagaaaattcttttttttttttttcccttcaaaaaaaggttatgaatgcttcgtttattacttggaaagtatagagactgcaaatgaaaaaggaaaaaaaaatggtggcttgtttattaatggtgttcggggattaggtttttatttaaaatggccaattgtttcagtgattaaacatttgccatctcccatttctttttttttattattaaatttaactgagaaaatgtgttctgcaaatcagtttgattctcatatatgttctttgagattatatgttattacatagctgtggagatagacaaattagataaatgttttctgtgttaatgttacgctatcttgtttgctcgaatttttaatgagttttgtttttgcctaggatacgtaactatcattgcttctgaattttcttcttgtttgcagtgtgtg

SEQ ID NO: 84646 - DNA, 333 bp, Citrus clementina
  Intron number 4 from transcript clementine0.9_010445m (loc us clementine0.9_010445m.g) derived from phytozome v7.0 (c hr-ID scaffold_82; pos 402320 to 402652)
ggaaagtctgatacaccatcatctgaaggccttgcgtatgtacttcatgcactgtttttctattttcatttaattgcactttctatttcttcaccatgccgctgtatgtctgtatacgattcttacaactgcaatacatttcattgaatttgcaagggtacagatataaaaatctttattgttgccctttgaatttgattaatgatttctttgtttgtttttttttgccttaaaataaggggtgttgatgacatcattttcctccagctatttgtgaacttttattttgtggattcagggagaagactaaatcaaaacctttgaagaaaggac

SEQ ID NO: 84647 - DNA, 877 bp, Citrus clementina
  Intron number 1 from transcript clementine0.9_003693m (loc us clementine0.9_003694m.g) derived from phytozome v7.0 (c hr-ID scaffold_20; pos 347790 to 348666 reverse strand)
atcgcactctcctgattctgtaagctttcatttaaatttgatttgaatttttgttttttaatttaatttgctaagatggaatgtacttacctctgttaattaaattttattattttttgttattttttgtgtcagcggttggtatgttagtgtgatgtgactgtttgatgaaattagattttagttgatcaaaaatggataaaaaaatatttatgatttgattttccgttggtttggtgagaaaacgtgtgacaaatttttttttaaaaaatttttacaagatttagtaacttaaaccagttggttttgtttctgttatattcgaatttctttatttattttctctaaattatcttatttgttcttgctactcttttatgtttttattacccagatcagaataggaaacttaaaaaaaaaaaatatatattcttgggcgataatcattgactgtatattatttcccgcatatattgagagattttatttctttccctttttggatttgcagtgacacttattttctaaaaatatttctgaaattctaatcttgattgactccttgttttgctttttgactaagcaatccgtacgcgttgcttgtctgcaaattcttggtgagttttatgtttatgtgtttcgtagttgatttatttcaattgggtagctttcattttgttaaatagattgttgggtgttttttgttatgttcctttattatcttttgagtgggggaattgatgctaaggaatcattatcataatcggatttgtttttggaattctgcatattcttcatgtgcttggtgttgtagatcagtagttgactatttgtgggatttgttcttttcagattgttctttcaaaactatttaatc

SEQ ID NO: 84648 - DNA, 702 bp, Citrus clementina; identical to SEQ ID NO: 80926
  Intron number 1 from transcript clementine0.9_012955m (loc us clementine0.9_012965m.g) derived from phytozome v7.0 (c hr-ID scaffold_1; pos 3333599 to 3334300)

SEQ ID NO: 84649 - DNA, 394 bp, Citrus clementina
  Intron number 1 from transcript clementine0.9_007132m (loc us clementine0.9_007132m.g) derived from phytozome v7.0 (c hr-ID scaffold_131; pos 233804 to 234197)
caaaagtgcttctacaaagggttctttctttataggtaaattaaccatgcacttattttttatgtttatttggagatttttcatgttttctcatccaattttgcatatttgctcttctttagatcttgaaatgttgaaatatatgaaaattaatgagggtttcaattcaagatttagaaggtcaatgttattatttcttgttcttatttaaatctggattttgataaatgcttataactttactaattgttttctctgtcattaaaaggattgactaggatcattgtttgatgtggaatttattcgtgttacatgtcatgtaaagttcctcaagtgtctgaatgtagattttgatgtaattacaggtgaagaaaacactgaaaaattgagtctg

SEQ ID NO: 84650 - DNA, 968 bp, Citrus clementina
  Intron number 3 from transcript clementine0.9_013820m (loc us clementine0.9_010605m.g) derived from phytozome v7.0 (c hr-ID scaffold_20; pos 2583060 to 2584027)
aagatagaactattgaatttcttagtcgttgtcaggtattaggtccaatttaattttcactgtatttctttgttcttttttttttttttgggttagtgcaatccccattttgttatggttgataatactctctctctttctcgtttttggatatcaactaccaatagatagaagtagttccaaacctctttgtctatttagagattgaaaatctagtttgttaccatcacatttctacatcagaagttctgctcccattgtcttggaagcttaaaaacttgtttggagatttcaagcatgtacctctgcttccctagaaaactgtgtgtttattctctatgaactttagatgttgctgttgctttaaaagtactcagtctatgatacgcacaaatgctcttagtttgagtttagcagctatatcaaaccaggtggaatgtatatatgcagtcctaaacatatatcaaggacacttgtacttacgtaaacactaacataaatgcagacccttatctgttgatacatacgtgcttagactgtgtgtgcttataaatatactaaataatagactggacatattagccttgttgccctttttttttaagtacttattgttttgtttgacattagtgagctagatcttacacattcaagtggactagttcagagatgctctctgtggtatttatacccaaataaaatgattgtggacattgacatgccttgagacaattagtgttcagccctttgaggcatccaaaagcacaagcatctattgacatatttgatgttgccattattggtgtatatgctttatgtttacctattttgtgtatgaaatgacttatttgatattaccagcatttggaggatatgatgtttatcgttctctagtgtttgctgctaatattatgtcttctgcttataaatatccatcttctgtgtgtgcttcctctggcaggacccaa

SEQ ID NO: 84651 - DNA, 498 bp, Citrus clementina
  Intron number 4 from transcript clementine0.9_018499m (loc us clementine0.9_018499m.g) derived from phytozome v7.0 (c hr-ID scaffold_23; pos 2992684 to 2993181 reverse strand)
atccccagttcagtgcccatctcttcatattataggtcagcacaagattcaaaaactctgcataatttctattgtttacaagcttccaaggaaagaatacaagattaagcttatggtgtcaatcattaatcttgaagcttaattgctcttatcatttttcaaggcattgtcacatttcaattttcaagtccacatgttcctgctacgtgtcagggaaaatttgtaatgaaccattacatgattgtattttcagtgctgtaacaatagcttgtctacaaaaggtacaaagaaaagaaaaggaaacaagattatataacgcttacaattagatttagaacaaatttccatgaaacaaaaaagactagagcagatgtatcattttgttatctctgaatacgcataatttttcaataatgtgggaagggaagtttataagagctggagacataatcacttttaattgacgagcatgatatgtggattgtggtgcaggagaaa

SEQ ID NO: 84652 - DNA, 1007 bp, Citrus clementina
  Intron number 1 from transcript clementine0.9_024204m (loc us clementine0.9_024204m.g) derived from phytozome v7.0 (c hr-ID scaffold_1; pos 12156838 to 12157844 reverse strand)
cggctttgagacccccgctaccacctacatcgccggtaactcactaacattcacttctcctaactgtttctctttcagatccgtacatttcattgctagatctgcatgacggcatataagttttgacgccttcacgttaagtgacggcgacttttaattaattttataaaccatgctcattttttattgactcaatgagatctaaatatggtgacctactaggtgtttgctcgtctttgagtttgtgtgatatgataaaaacattccgatagaaataattacttgagcagttaatccccaaattagaattaacacatggcttatttctgtaacatctcatggatggggatggggatgcagttgtggatcacagacagcgccgcctggcagtatcactcatgatgatttgagcaacttcgcactttagatcttttctagaactactactaattgatatcacagcaatgtaatttgaatactaacttccagtcacggtccgattaattccttgaaatatttgggagcatttggttattgatttttagttagtttaaatattaggaaagtgtcttggagttttgagtgcaatcctggtataatttcattgaaagcactgataaaagtctataattgcaagttttaaaaaccccaaccagaaacattttcattttcttgtctcatattttcgaaaatataaaatgtatcctgatgtaacacattgaggactcagtttgggaaggaggaacagtggttcttttttgaccgctttatccaaacacgttagcagttatggtttcaaaatagaaagaatggaagtaatgacagtgtcggtgtgttgtattgaggtagtgtgttttgttgaattcctcttagctattgtctatatggggggtttattttgtttttatataacatgttgctccgttgaggtgcggctgcctattgaaataattgtattcttttgttaatcatcttttgttgtgtccaggtgccaaggttaaggttga

SEQ ID NO: 84653 - DNA, 300 bp, Citrus clementina
  Intron number 1 from transcript clementine0.9_004604m (loc us clementine0.9_004604m.g) derived from phytozome v7.0 (c hr-ID scaffold_1; pos 10874144 to 10874443)
cttcttgggtgcaattgcaaattcaggatcatcatgtacatccactttgtgcaatgatttattattagcattacttacagttttttttttcctttaatttgtgtttttttaatatttggatagatatgaggatggcaaaacatatgtgacataagtataatgtacttattcttcgcaattattattttttcctttgatatataaatctcaacagtacaagaaaattttattaaacaaacctggtgtttgttctgcttaattccaatgtagataattaattgaatcaatgtgcaggtggtg

SEQ ID NO: 84654 - DNA, 298 bp, Citrus clementina
  Intron number 4 from transcript clementine0.9_020596m (loc us clementine0.9_015975m.g) derived from phytozome v7.0 (c hr-ID scaffold_27; pos 430489 to 430786 reverse strand)
ttgataaggtaaataaccttctataagcatttgtttgcactttataatgcccttctgctgtttgattttggacctacctttagctttatgcgactccttttacttcagttaattattagtttgtaccaagcttctaatttgaagatatatgtgcatatattctttggtccattattctctgcttgaacttatatttacatttttctatgttgaattggttaatttgtatatctgactcatggtggtcactgtgcattgtgcaggcatttgagtcaccccatactcacggcagttgttt

SEQ ID NO: 84655 - DNA, 595 bp, Citrus clementina
  Intron number 1 from transcript clementine0.9_020596m (loc us clementine0.9_015975m.g) derived from phytozome v7.0 (c hr-ID scaffold_27; pos 431663 to 432257 reverse strand)
atcaaacaagacccttctaatccaactcttttcaggtactctctattaatcgaaatgcaatctttgtttggtatttgaacaattcacttgagtgattcaaatgggttctttaatttacttgtggttggactttgaattcttctcaaatttctgtttatgtggctcttttgttcacgtctcatttacttaaatgcttcttcttgtttgaaaattgatgggattgcattctatgctaattgataaataagatatttatgattaggattaaagagtttttctttctttcagattgatcactggttgaatttatactaatcataagatatttatgattaggattcaagagtttttctttctttcggattgaccaaaggttgaaattatactcaatgccttcttttactccgtttataggcatagagtaaacttctgttttgtgctttcatttattttcttccccattagttccatttgttatatatgtatgcctggaaatcagtgtattgttttgataatgcattaacgcatgttctccgtttctatgttttattattggccagcaaccgtgctgcagcatttctacatctagtcaagc

SEQ ID NO: 84656 - DNA, 805 bp, Citrus clementina
  Intron number 1 from transcript clementine0.9_027056m (loc us clementine0.9_027056m.g) derived from phytozome v7.0 (c hr-ID scaffold_1; pos 12865817 to 12866621)
ggtgagttcctaataatttctctcttgaatgtttggacttgagtgctataattcatccaaatttatttgtcaggcataccatccttcctccctttgctaactatggtttgtttctttggtttgttagagacttgagcaagagtctttattttttgtttcaatttcttttatggttactcattacttgtgtacctagtccctgcctctcaggaatctttttgtcaatttattttacctacaaacaaaattcatttttattgaatatatatttcatgattgtttgtgtgagtgctttagtgggaattcttctcatgttaattcagactctttagtaatattactgttgatggagggctatgagatagttaaactctatttgtgtcaacatagtgtgagtgtgtgtgtgtgtcattgtgtatcctgtgacataaatgggacagaagaagagaccaagctgggactcaacatttatcattttggttagcattttcagttttcctttctttctttttcttttcctttttttctcttccctatgcccaaggaagctccagaggtgctgctttttgcttattgagatacaagttcttttaattttgtagtattctatttttagctgctttagcatttagcaaattgttttgagatttctgcaggagtacatttgaccttaggcatatacattgtaaatcaagacatttttcttgttttggatgtcattctatataagcttgacatacctgttatagtgacatgccgcattcttgcagtaatctacacaaaactgttgatacattcaaagaca

SEQ ID NO: 84657 - DNA, 857 bp, Citrus clementina
  Intron number 2 from transcript clementine0.9_027056m (loc us clementine0.9_027056m.g) derived from phytozome v7.0 (c hr-ID scaffold_1; pos 12866662 to 12867518)
tgggttgttttgtggaagaacagttcttttgactggtaataatcggtgtatttatttacccttgaattctctaaattgattgaattttttttatagccttaaaacagcacatgttattagctattcattatgtttttgttcgcatattttgtaattacccttattttagtgcagtcagatgtcacaaccttgtttagccgcaatttgagtttgttctacacttagatgccatgaaagttaattttaaacagcttctgtttttctgttttctttaaatcttttcttttcttttggtagtgttaacataaaagtaatgtgacaatttgcggtggtcatactaatgggtagcaccgggatttgaaaaattgaacattagctcaagcatttcacaaactgttcattaaatgtttaggctgtaacttattgagtgatggcacattctcttagtactttattggttggctgacatattcctaagaacctccattagaggcagaccaggttggcgtggagtgtggatactagattttaaatttcagatccattatatgagctatttagttttcacattcctcttttaatattacggactccttactctggatgaagggtttgcatgcctaactactagaactgtttgcctgattctttgaagtgtctccctgctgggtcaaagcatgattcactacgtgcaacttacatcctctattattgttattctttctagaagttgtgttatataattttctacaagtcaggagtgtcttaattctttggttaagtttatcgctattttgttgctgttaattggctaatatgtaggatcagcaaaggggaaacgggggaggaaagtttgg

SEQ ID NO: 84658 - DNA, 413 bp, Citrus clementina; identical to SEQ ID NO: 83806
  Intron number 1 from transcript clementine0.9_010967m (loc us clementine0.9_010967m.g) derived from phytozome v7.0 (c hr-ID scaffold_53; pos 360876 to 361288 reverse strand)

SEQ ID NO: 84659 - DNA, 838 bp, Citrus clementina
  Intron number 1 from transcript clementine0.9_002484m (loc us clementine0.9_001776m.g) derived from phytozome v7.0 (c hr-ID scaffold_114; pos 267001 to 267838 reverse strand)
ccgttggctccgacgctcttgatcgtgctcttcaggttgtattcgttgtattaagttttagtttgttatttttttttttccttttaagtgaataattgaaggatttcatgtatatcagtatatggccatgcattttgtgtgtgaattgagataagtcatgctgactttcaaataatctaaagcattcttcaatgattgactctttcgcggataaaaaccacgttatattgaagagcgctaacgtgccttatattatttagtaaagcaacctttcgcgctaggatgtttttgtctgggtggaagctggcggcagggcttgcttaaccggatacacggaattgggatctctctcgcatgcaactatttctccttttttaatttttcattttttttctgaaagcatatgaataaaaagagtgctttttagattttaaactcagtggaagtgctttctgcagaagcactcatcatgtgcttctcttggaagtgcttttgagtccaaacttgaaaacatgttttcggtcacggtcatagaaaatactcctgctcagacatttgtacttgaacttttattctttccaggaagcactttcaaatgcactctaataccctgttgtgtgaatgtgcttatctttgttattgtcttctagatttacttggttacacatcataaaagcaaaatgaaatttgtaaatagtttgaaccacatgtgaatttattttatttctttccttctgtctcattgtgaattcattttatatcatgtttcataatagaggtgatttttcatcagcaatcatttcatttctgtcatagttgacatgctcttcaccacagt

SEQ ID NO: 84660 - DNA, 530 bp, Citrus clementina
  Intron number 2 from transcript clementine0.9_024323m (loc us clementine0.9_024323m.g) derived from phytozome v7.0 (c hr-ID scaffold_29; pos 919865 to 920394)
gaagtggtcaaaagtatccgccgtggtcataaagggtcggttatttgtatttccgatatttatgcttttttctttctgtaaatgaagttaattcgggctctatttgttcctctgaatgaatgacaaatattacttgtggtattagggaaatagattttaagtcagtggccatggtcatagtgtaaattagaactttcaagctctcatttagcatttttttcgagcattgtgattcttatgcttaactgatgacaattatcaatgtgttcatttcttttgttttctctttttgtaaaagtagagagattatatgagtgttggtgtgttgttttggtgatataattaagaacgaatttttgtttcttctccagacaaaatagaaaaagaaagtgttttgggtcatatttttctcagaggttactttgatcatacattcttgatatgtattatagaaatgacaacttacattccttcaattgcgtgggagttgtgaatgatccccttccccttctttttcatgagtgcagatt

SEQ ID NO: 84661 - DNA, 935 bp, Citrus clementina
  Intron number 1 from transcript clementine0.9_004446m (loc us clementine0.9_004446m.g) derived from phytozome v7.0 (c hr-ID scaffold_10; pos 3744238 to 3745172)
gtgactgactcattatttgctaagaaactagctcggtgggtgctctcttagttaaaaatattggtttttgatcccatttcgttcctggtatttttctttcaatgttatttttttatctgggtatttctttttttctgttcttcgggttgtttagttggttgcttgataacgtttgtgcaagatccatcgttgttggaacagagtttctaagccttgttttgtggtcataggtttgtgtagatttgtgttttgagtttttttttttttttttcagtttctaatgtcatatataattctttatagctcgtgtgtgatcatacatgcgtcatgtggtagatcaaaagatttgtatttttgtttgcaattgtagcttcatatttgtgtgatggttgttgtatagagtcactgctggttggtatcgtttgtgatatcaatacatgtatttgcacttaatacaatgtaatgccggtaggagttgagctgcctgacttgcatcactatcatgtgaaaggtccttagttgaaattgtcggaatcctatgattttggaatgtgttactgaattacaaatatacttctgcgtgataaaagagagagatgatgtatgaatttgaactaatatttttgctagcagcttagcaaaaagcttggaattgtctcaatcataataagcttaacttaatgattgttttgttgcttgtactccctggaacatcattgaatgctcatccaatgcacacattttatggctttgcatcccaaatgtctttgatgtttaccgcactaatttgattttatttgattagtttgtttccatttagcctttacagttattacactctagttatctcaatatactgctttgttttgtactcttccaaatttaattacctcatgcattttctgtttgttttcatcagtgggagccacttttca

SEQ ID NO: 84662 - DNA, 675 bp, Citrus clementina
  Intron number 1 from transcript clementine0.9_022666m (loc us clementine0.9_022666m.g) derived from phytozome v7.0 (c hr-ID scaffold_38; pos 531822 to 532496 reverse strand)
ctcgtggacaagcttcttgtggcaagtgcttaagggtaagataactatatatcacaacgtatgagatattattgatatttccaatccacagtttttgggttttattgctcgtattttttctacgattttcattcttgattgttttgtggttgagctgaattttctgtgaaattttttacattagagggtagcaaaattcatcctccctttcaatatttcatgtgtttttattttttaaaagcaaaatgttttcgagattttatatttattaccgttttttagaaaattgtgacagattcatagatatttattaataaaataaagaagtattattatatctacttaaatacgtgctaagccttaccattaaaatgaacacaaaaataaaacaagtaaaaaagttaaaagtaaaaattattaggaagtcgcttgacccaaaagtttaagctgataggtaaaagctcaataatagtatttaagacaagtgttaacacaaatttataaacaatcaaatctgcttatttgtgtactttaaacatttgtaggatgagtaggatgagtaggataagtgttagtgataaattaagagcttgatagtcagaagaggaaattaattaattgaaattgcatttgcatgcaggtgactaacagagccacaagagctcaagcaactgt

SEQ ID NO: 84663 - DNA, 743 bp, Citrus clementina
  Intron number 2 from transcript clementine0.9_009100m (loc us clementine0.9_009100m.g) derived from phytozome v7.0 (c hr-ID scaffold_1; pos 933739 to 934481)
ctgtcttttttgaatacgctgtcgtatcgaattcagtgtagtctcggttactactgttcttaactatttagcaaatcaagcctttttaatacctgaattgtgaccaaatttatgcatttgggtacaagctttcgagtcgaaaactaattgtaggatttcagatctttaagattgcattttgtttccgtgaacttttaggacggttaatatgtgattaaaaaaaaaaaactcatattgtggacttaatgtaatatatataatagatgctttgttagctttgcttgtttaatttttatttctttttctataagaaaacctgaagaaaagaaataaaaaactgaagaaaaattctgctgtctatgatacctttgcttgatgctaggttccagcatatgcatacttggtctttgataataatagaaatttgaaatctcagtctactgttggactattgttagactttgaaaagggatagagatttaagattcaattgtttggtataccagggattttttttttttttgtttttggctgtacatgtttagagtttcctccttatcatgctgaaccatcaatagcagttacttccctatgtaaaaacgtatttaagaatgcataagtaactttttttttttaaatttgtgtcttgtgaatattcaaaaaaatttcaactcatgtgctttattcgtgtgatttggatccaaacagggactgtgttaggcattttattttaaactgtattt

SEQ ID NO: 84664 - DNA, 629 bp, Citrus clementina
  Intron number 1 from transcript clementine0.9_003294m (loc us clementine0.9_003294m.g) derived from phytozome v7.0 (c hr-ID scaffold_23; pos 2806725 to 2807353)
attctctgctccatcgtcacccttttgattgcaaggtaaatcttattcatatgaaattattctattcagtttagcattttttcccattattcgaagaaatttctatcgttacattactttttttttatatctaaatgattcaatttttttgggggggaaaaatctatgtttaccatttaaaaatctatgttttgtttgttttaatttaacattttcttcagtgagtcaactgatggaaagttataggcatttaggagagttgcatttaactgatgaattggaaaataatgaaaaatttgatattgaattacatttttagggtttcacaacaaataaagttaattttttgtccttatgtgaggtaaaggctatgttcaaagtaatttactgagaaaagatgattctcattctgaaatgaaacttgacaaagttactagttaattttctttaaatgattacatactttcaatgtcagcgtctgttccaattcagctttttaataatcaggaatgatgaattgaatttgtctagaaagtttcaaagctaacatttgtatctgtccacgatggataaattttaattcttgtgctccagtttctgaagtcgcaaggtagtcaaatcctgtttgt

SEQ ID NO: 84665 - DNA, 993 bp, Citrus clementina
  Intron number 2 from transcript clementine0.9_004447m (loc us clementine0.9_004454m.g) derived from phytozome v7.0 (c hr-ID scaffold_1; pos 12207419 to 12208411 reverse strand)
aaagaggtgagctgttcattactttattgaatggcctttttcatattctatattaaaaaaaatagattttttttaatttaattatgaggagaaataatcaagtaatctgctgataatgattttatcctgtgacttgtatggtgattaagtagtgaaagagaggggagggagaactgtgtcccccccccccccccttccaattgttgatggaatcatggggtagtggattgggttttgtgtatttaataataaataaataaaaataatgtgactggcgtctggttggttttaggtcaaattggtttttagggttccaaaaggccatcattgattcttaaacttttaattactttgaaggtatagcatatttttaatttgtgaattaatatttaaagttaaatgcttgggcgctgtttcttttaaggtcgttttcaagtaaaatagaaccacgttacaagtagctgcggtaaagaattctattgtttttatcgtgtaaaacaaggcatatataattcaaagcaacattggtaaataagccttattttcccacatcatagactcggaaccgttgctttgtgttaattgtttctttttataacttgtttgcttgtcttattctctggctcctttcaagtgaaagggcaactattacattggctgtaactatgtgaaactattatatgggcagtaactatgtaaggcaaacttaaataatatgatcttgtaatacgtggaacaggatttgatgtttgatagttattggccaaaaactcctctttcaaatgtgaacaatttacttgattattaggcaccagcagcaccatctgaaaaaaaaaaatccaggctttcagagtaataaataagttaattgaaaaaaaaaataaaaaaagaagaagaagaaataacacccgaaaaagaaaagggactgaaaaggaaaatgtatgttgtatgcttctagttttttttcttgctaccaccagctcacctaggtca

SEQ ID NO: 84666 - DNA, 664 bp, Citrus clementina
  Intron number 3 from transcript clementine0.9_023466m (loc us clementine0.9_023466m.g) derived from phytozome v7.0 (c hr-ID scaffold_63; pos 253888 to 254551)
atcttggtgcctacgacaatccaagcgccaccgttgcaattatcgaatatctccctaaaggttccagaatttggcggctccattcttaacacttcgcatatcaaattccataagtacttcatcttttttgtgtcctcagaagtcaactcctcttctgctcctttcgaatttgctatttccatttgctcttaattaattttccccaaaaaaaaattcaattctagataaaataatgtacaatcaatgccaacaaaaaagagtactttgtgtaattaattaggaaaatcaaagggtactctaatgtgtatttaatttagcataagttatatacttataccatatatatatattttagtatactaatagataaaaaaaataattttcaatatattaaaatatttttttacattttaatgacttcatcactttgttaaaataagaatatcttccctcgaaaaggtgtgtctgtgtcacaaaaaagttgtaggtagtttagttgtttgagttactgatcgtctgttttttccccctccaaattccatgcttgataaaatatacatcagttatattgggcagtacatgcctcgtataaaaaccaagaatatttgaaaaagccatagaagatttagccgtctagatttgaggggaaggaactggttccttt

SEQ ID NO: 84667 - DNA, 801 bp, Citrus clementina
  Intron number 1 from transcript clementine0.9_009623m (loc us clementine0.9_009623m.g) derived from phytozome v7.0 (c hr-ID scaffold_5; pos 1783916 to 1784716 reverse strand)
ggcgtgtgcttgaaagcaatccaaggctgacaaaggttagtatttacagcctcattaaagtgttcttattctaccgttttgattagatgtggatgtgtggtgaattgtgaattgtgatgttctggaaagtcgcgtggccgcattctgcttttaactcactttaactaaatttgtttttcatatttggatgaattattccagtataacgacaacctagttagaagccaatgaatttgtgatgattaatggtttgatgcgaatatcgctgtaacttattgcttagcatagggttttccttttgaactggtttttttaactttctggttggtaaagttgattttttttttattattttattgtaagagcatagtctgaagctactttatccaaggatttggactgatgccctgcagtttttcttaggcagaattgtggtgtctcttgatgtcctttgacagtgtaattctattctattgtgcacataacctgacatgtaaaacttgctctcggataagattgaagctatgatttgaactgttatcaattaaactataccctcttttctgatgttggtgttttgcatagtacaatgtagtgttggtttcaatacatgttcgttcttcacttgattgaagtttgaaagttgtcaggatttatagattttaaattttcaagcctttcagcggattttggttttgtagttccgtacttcctgagttatatgctctgtagtgtgatgagcttacaattcggattttgtgtgcagctttgcgtgcctggctgttctagactcaccgttga

SEQ ID NO: 84668 - DNA, 533 bp, Citrus clementina
  Intron number 1 from transcript clementine0.9_019929m (loc us clementine0.9_017136m.g) derived from phytozome v7.0 (c hr-ID scaffold_65; pos 208546 to 209078)
tccgtgaggtaaattttctttttcgaataagctcaattgggtttcatttcatttctcatgcatgtgattagtaacgaacaaaagaagactggatgaaagctctgatgaaaactcaattgagaagatgatttgaagttagttaatttacgagaaataaatataatttttaaataatatttttaagtatgaaactgtctaagctacagctcctcaacagtagtaccaaacggatccttaaggtcactggctgagcctgactattgtatgattttgctattttatgctaacataattttgttgttcaatgttactgccttcacagtttattgttacttgtctgaatcattaatacgattagtatgccgctcagaactacccccattacattccataagttacatgttaatgatcaatatcattacattgacttagtattctagaattggagaataatccacgataaatgaattaagtgatagtttgattttgttacgacaggtgattttgtaccgatcagggttagtaactgctgc

SEQ ID NO: 84669 - DNA, 813 bp, Citrus clementina; identical to SEQ ID NO: 78239
  Intron number 1 from transcript clementine0.9_009387m (loc us clementine0.9_008037m.g) derived from phytozome v7.0 (c hr-ID scaffold_23; pos 3472459 to 3473271 reverse strand)

SEQ ID NO: 84670 - DNA, 294 bp, Citrus clementina
  Intron number 4 from transcript clementine0.9_013243m (loc us clementine0.9_008990m.g) derived from phytozome v7.0 (c hr-ID scaffold_82; pos 229086 to 229379)
ctccttatacttttggaattattggtaagatgtcttcactcttataatctcttgaaatgcagataagtttgattttcatttattaacaaacaggacatttagcttcctgaataaggaagtaattgtgtttttctgacaaaagatataatgtatggtatagatcattttcagactccaaacagactaattagagttgctggaaattacttattacattttcagaattttctctattataattggttttgtaaaattttaggtgatttgggtcaaacgtataattcactttccact

SEQ ID NO: 84671 - DNA, 1049 bp, Citrus clementina; identical to SEQ ID NO: 80507
  Intron number 1 from transcript clementine0.9_016979m (loc us clementine0.9_016979m.g) derived from phytozome v7.0 (c hr-ID scaffold_5; pos 1142565 to 1143613 reverse strand)

SEQ ID NO: 84672 - DNA, 651 bp, Citrus clementina
  Intron number 1 from transcript clementine0.9_021962m (loc us clementine0.9_021962m.g) derived from phytozome v7.0 (c hr-ID scaffold_63; pos 340147 to 340797)
gagtccaaggaaagaaccgttgtgattgagcactggtaattcttttattattattattattattattgttaggtctggttggctgccgtggaagtggagtagaaagaaaggttttgtttgtgttattcgttcctttgatataaaaattaaggcatagtaaatgttcatgtgttaattttctgttttgttgcctagaaaatgaaacaaaagagcatatttgagtatctgtggttttagattaataatctggactcctgttggttgtagttttttgagtctctgttacgcatcgggattcaatagttgtttgtatattaattgtcttatacttctgtttcgttgctataatagaagacatgagtttttagggcttctaatccgcaagaaaacgagactcaatatttttctgtgtaatgctcttgagaatattgttgtttacagggtatagttgttgacaatgtacaataatgatgtttggtgttaaaaatttgtcaaatcatcatagattttctgtatagctacttttaagaaattgtcatggtgttgtacatagtcttctgggtgctgtttgatcttttgtgtcatgaaatgttgttcttaactgtgataattattttttcttaagtaattttttgttgaatttagcaaaca

SEQ ID NO: 84673 - DNA, 753 bp, Citrus clementina
  Intron number 4 from transcript clementine0.9_020393m (loc us clementine0.9_020393m.g) derived from phytozome v7.0 (c hr-ID scaffold_33; pos 2396869 to 2397621 reverse strand)
ttgctgtcgagaaacgcattacttcaccactgctggtttgtttaattcttgttgtgctttttctttacttgtaaatgcttggtcttgtgtgagtatatatatccgtaaatttcatgcttctacaattctttaggcatgtgctttaatgtactacaaagcaaaaaaagatcagtccctcatcaggagggcaataaaatgcatattaaaggatcatgattcacattaatcgtttggatagaaaaagggcaatgttattcaaaataacaacatgtgattaagataaatagcttttaaaagccaaatagcaacaaacccaaaggacaagcctgggcattgatataccgaaagcagattttcttctatgacgatggaagcaaattctgcagccaacacacatatatccccaccatatgtcttaattgggctgggatgtttacatatttatgagatatgtgtatggtttgatgtttacatatttatgagtttctgtacagtctgagtccaggaatctaatttgatgtagggttttcaattggagtgcagttttgcatttgtggtgaaaaactgtttttgacttgttatatgacaataaggaatatggataacaaagtttgtatgtagataaaatggtatgatgacatttgcttatgtttgcagttagaggttgcaattttttgaagtcatcatttatttgatgttcttttttcatttcctaattttatgtttcaggagcccagcagtgtggagaagatt

SEQ ID NO: 84674 - DNA, 424 bp, Citrus clementina
  Intron number 3 from transcript clementine0.9_020208m (loc us clementine0.9_020208m.g) derived from phytozome v7.0 (c hr-ID scaffold_53; pos 573036 to 573459)
tatagagctggtattgttcctgtaatctacagaaggtaagtgtttgaaatgaaacatatgtaaatattatgttctaaccgttacagttaattacagtttttgtcttatgctcgccttgagtttgttatttttcattatggttccttatggaacaaaaatgttagtttcaccgctaactaaaaggtcttttcaagtactccaatatgtttgcataggtctctactttcgccttttgtgtgagaagcatgtttgatgtcagtcttgtacgctaaagaggcttggtaaatactgtttaatttttgtgagccatattcaggcttaatcatttggtatcagtcttgcattattatttactaattttcagatcttcaccgaccggcttaagctgttaaacctgactttatgcaaactttttcagggtgag

SEQ ID NO: 84675 - DNA, 432 bp, Citrus clementina; identical to SEQ ID NO: 81615
  Intron number 1 from transcript clementine0.9_017680m (loc us clementine0.9_017680m.g) derived from phytozome v7.0 (c hr-ID scaffold_29; pos 2846947 to 2847378)

SEQ ID NO: 84676 - DNA, 441 bp, Citrus clementina
  Intron number 1 from transcript clementine0.9_011696m (loc us clementine0.9_011696m.g) derived from phytozome v7.0 (c hr-ID scaffold_1; pos 2744377 to 2744817)
atcaattgcggcttttttttgtatttaaaaaaccggtaattgaaatttatgtacgttggtttcgttaatttgtcgattccagctgttaattttatgggttttatttgtatatagtatttaattgtttactttaagttagggttttgatttggggactcgcaattttgtttctttctgtacaaaaaagttgaaattttgtaagtgttaggcatgttattttggggtttgttttatatttatatagaatattgaatattttagggttgtttttggcgattattgcagcaatttcacaataatgaatgttatttacaatttgaattttttttttcagtgtttatttcttacttagggtgcaattttaatttatttatctgaagatagtggataagaagtgggttttaatattcatgggagcaatgttgcaaattttattgcagg

SEQ ID NO: 84677 - DNA, 913 bp, Citrus clementina
  Intron number 2 from transcript clementine0.9_016842m (loc us clementine0.9_016842m.g) derived from phytozome v7.0 (c hr-ID scaffold_1; pos 2178683 to 2179595 reverse strand)
gtttccccaacattatccagtttcaagacttttaggtactcgttattttgctaattttttcttcatgttacaaatttacaaatattcgagaataaacgtaggtaggcttcagacttcgagccacagctgctgcaaaataaaatgtgaaaaatttggatgaaaataaacagttttgatgaaaatagtaaagatattgagtttttcatcacggtcgccaagtggtgaattcacgccctcgttgttcgagctcctgaggctccattccttggcagatttttagaattttagtgatttttttagtcaaatgactgtgggaatcactttaacttctaagctatctgcaagtttaccaaacacttttagacccgcggcttgccaaactgctaagtcaaacggattcttagttgtcacctaattatcgtattgatgccactagctttgcaaaagatgtgaaaattaacaatatctggtcttaaacaaagctttgaagctcagattcaagtttgacttgaatttggtggactattgggtccacttagctgcttttcattttcattgataatctcacacaagctttcactctctatgttgtgttatgtgtgtatccttctgatggtctatatgcaaaagtcacggtaagtcaggacattgcttgcagagagaaattggatggcgtatgaggtgaggggaaatgtgtaatgaagttgttttaccaaattattgaagttctttccaatttcaagtgagagacggtcctgagtgttttatggctcctcttactattaagctagaatggaaatcacgttggagaaattatagagacaatagtattgcttttttttttttttctccaatttttgacatatctaaatatgtagggtgtgttgaagtagtcggctgcgttcgctgcgaa

SEQ ID NO: 84678 - DNA, 646 bp, Citrus clementina
  Intron number 1 from transcript clementine0.9_022925m (loc us clementine0.9_022925m.g) derived from phytozome v7.0 (c hr-ID scaffold_23; pos 3381350 to 3381995 reverse strand)
tctgaattgtgagtttcactttcttttacccttttactcgggtttgagtttgagtttacaattagtgaaaaagaagctgaaattgatattttgctgtttttctgatcttctaaagcattttagatcttgacttttgtttggacttgatggttatagattgtgtctacatttcttaagttgtatccaacacaccttgtgccaaaacaaaacacaatcctcatgtgtgttcacaattagtaagaaaagtgtgtttggatagactgtggtagacaacttgggagacaattttatgtctctgtttgcagaaggtcttattcctggatgacacttccacagtcctactttgtcgatatggagaagtaatgtgctgaataatgcagtgcattattcttctctatgtttatcattggctttcaacccaataatagttattagagaattcgacctgagttattgactgaagcatattcggaagctgattaatttttctttatttaactagttgtaacttatgctctctttttatctctttgcacttctgcaattcccatcacaatgtttgttttacttatgtgcattttaacaaggctaacctccactagctttgttaggttacacatctgacaaagaaataacgtgtgttccc

SEQ ID NO: 84679 - DNA, 601 bp, Citrus clementina
  Intron number 2 from transcript clementine0.9_016451m (loc us clementine0.9_016444m.g) derived from phytozome v7.0 (c hr-ID scaffold_20; pos 2929521 to 2930121 reverse strand)
agcaaagggctgcctcagctaggtaagaaatggagtttctcaattataaattactttattattattattattatcatcattatttatttttatagttttaagtttgaatcttgagttttggactacgtcaataacactttaaatgaagttgtgtacagtcagcttttctagcatgtcaaggatgtcatctaaaggggtgaaagaaaaaagaagcggatttgggatggggaagatctttggtttttaagttaccaagcatttgaaggcatagctcattctcttaagacacagtcctagggcataagttttcaataagttttccaaagttaaatttaagtcctgtccagttttcagtttccctcattagtcattcctagaggaaattttagttgctcttttcctcagaagaaaattcaagttcagttataggttcgcctgattctatttccttaaaattaagattcctatttcgtttgagggttggtgttcagggcaagaagatacattcacgtcgtccaatttgtatgatatatggaaatattctcatgatttcatttctttaacagggaagactttgagaggacaggagtgagcagctttg

SEQ ID NO: 84680 - DNA, 623 bp, Citrus clementina
  Intron number 1 from transcript clementine0.9_024153m (loc us clementine0.9_024153m.g) derived from phytozome v7.0 (c hr-ID scaffold_29; pos 2186083 to 2186705)
acggctacatcgtcatcaaaagccgtccctgcaaggtttcttttctattactttttattttaattggcttttatctctttttgttttctcggaatcctatatttcctcgagaaaattttatttctttgcttccaattatacataaaattaggtatgataatcctgatgcataatcgtttattcgtagctagattttcctgaaaatatgttaattttttttcttttttgctataaaatccgtatgtctttgaattattctactttgtttagtgcaaattgtagtgtaatttgctcgtttgttttgaagacattttagtccttttgattggaggtcaatgtgaataatctcaattttaatcgcttgtaagaataaatattgttaagagtttagtaaactttaaggactggcctttagcttttagatatataccaagtgtagtctattttacttaatattggtgataggatgtggtaaatggttttagtttagttttagtttttgcttcaagtgatgatgcttgttttgttaattgagacgattacttagatttaaattttcttaacattgctcaacatttaatttaacaggttgtggaagtctccacctccaagactggaaagca

SEQ ID NO: 84681 - DNA, 573 bp, Citrus clementina
  Intron number 2 from transcript clementine0.9_020150m (loc us clementine0.9_020150m.g) derived from phytozome v7.0 (c hr-ID scaffold_1; pos 10376003 to 10376575 reverse strand)
agctccggaagactgttgactgggtctattctcaggtagaaataatatgtttccatcaaccttaaagtgggaagcctgttttactacactattacttggatgttgctgattgtttattagtgttcactggaaatcctttcaaacagatgttcaaggttctgcatttgttctgctgcattgaaggttttaatttgtgttcttgttatttggaatgtgcgtgcacatccccatgcataccagcgagtttcaattcttaagcaagattgttttctaacaacaaaatttgggtccgtagcttttgaaatttgaagactgagatctcttttcattaagtttagtatactcgatcctatgtttgaatttgattcttatagtaatggatggattgaatattttgtgtctctagcacggtaagttgatgaatatgatttatttatttatttattattgtttgatttatgttccagaaaatatcatttttttttttttaaatatcattggctgatggagctgattatgttgtaaatgcaccataaagttaagcaggccacagtcatcgtggaaaggagcaag

SEQ ID NO: 84682 - DNA, 639 bp, Citrus clementina
  Intron number 1 from transcript clementine0.9_013715m (loc us clementine0.9_013715m.g) derived from phytozome v7.0 (c hr-ID scaffold_1; pos 3494920 to 3495558)
agggtttcctagtgactgcgtagtcatcttgacaggtataaattgctctctactaagttaataagctagcattattgcatttttttgtctaataccttccgtttaaagctcgatcttatttttcagttaccaatatatggcattcgattacttttatgggtacatgttctgttcgttcctacagtttgagtcaattatttttcagttaacctttgtattttttcaaattgtttgaaacatcccgttgtttctttgcagctgtaatcttaattttcctttttctttgatttattttttttataaggcagaggagttgacaaaactggaacttgattaaaaaattttcaaggttgaaatagtattgatgtcggatattttgagttcaaacaaatttgacatgcaacccgtttaaaataaatgaaaattaaatatattttaacaaaaacaaatatataatataattcttttagataactttgaaaatacaggaattaactaagtagttgactcaaaactataatgatttaagaaaacatttaccatcactcttacattcttatataatatccgccaatatgaacaaaatattcgtataatttgacagaagaagagaaaaatccatataggattccaacaaag

SEQ ID NO: 84683 - DNA, 547 bp, Citrus clementina
  Intron number 1 from transcript clementine0.9_018640m (loc us clementine0.9_018142m.g) derived from phytozome v7.0 (c hr-ID scaffold_29; pos 2075123 to 2075669 reverse strand)
ttggcaattacttcccctcttctcttcctgtaactgtaagtatcttttttttttaaatatttttaatttttattattggataattgttgaatttcagctgtgttatgtagttcatgtataacaacaatacccttttgaatttttcttttgctcgttataaatttataatttttgggaatttcttttttttttttttcatttttcacgaatttgtggtaatttttttgtaattgcatgttttaattagatagatatccactcttaagagcttcattgcattttggcataatttatcttgggacttatgatacacttacagagttggatacagattaccttgtgttgataatgtcacatcaattgcccaagattattgtttgtttagggtgtatattcatttatgattaatttgggatattaatgatcaaccttattgcttactttttggcaggttgtatccaatgtgatgggtggttttgattaagaagagtttactgcaaatatatctttgttgattttttccaagtcaactttttactcatttaca

SEQ ID NO: 84684 - DNA, 410 bp, Citrus clementina
  Intron number 2 from transcript clementine0.9_031560m (loc us clementine0.9_031560m.g) derived from phytozome v7.0 (c hr-ID scaffold_179; pos 42897 to 43306 reverse strand)
gttcctttgtggagctgaaccacgttagtttcttggtgtgttgagaatctttgattgctttgttcttctttgttctttttcgtaatcttgttttttatcaattctggtttcgtgggttgcttaattcttgtttaagagagtgaaataaactcatttgccataacaattaatataagagaaagtaatttattttggctaactccttctcctacatttgctaagccattaaccaaaatgatgaagaatattaataaagtaagcttgatggatacaaaagtactatttctttgaatcaacaaatatgcaacataaaaaaggaagtggccaatgtggtacacaccacataattaaatttgctaagccataaaccatgtgatgataatgatattaccatctttgggtccgagatt

SEQ ID NO: 84685 - DNA, 535 bp, Citrus clementina
  Intron number 2 from transcript clementine0.9_020930m (loc us clementine0.9_020902m.g) derived from phytozome v7.0 (c hr-ID scaffold_10; pos 2113493 to 2114027 reverse strand)
cactggctcgaaatcttgctgcagttatttatcgagtaagttctgttctgcttcaactgatttaatttataattcatttgatttatagtcttgtaattattgattaggaggaatacatgtttcttaatcttttttaatccctttttcgtgaccaaagtttattatcccctttgcccaaatttaactttcaaggaaacttgttatgcgttactcgaacacataaaggcaaatttagctatttataagttgggagtcattgttgctgttttgaggtttgtcatgcagctgtggaggccttctaatggccatttcaatttttaagaaggatttggagagcatcttctgtttccatctgatcaactttaattcttagagcagtattccatctttagtccaattagattgagagcatagagccctcactttgagttgtcttatgctcagtcgacattgctctgtttatctttggtctttcctgatcattttacatctaggtcccatccataacttcctgcttgcttttatttccaatagg

SEQ ID NO: 84686 - DNA, 395 bp, Citrus clementina
  Intron number 1 from transcript clementine0.9_014684m (loc us clementine0.9_014684m.g) derived from phytozome v7.0 (c hr-ID scaffold_1; pos 10711859 to 10712253)
ccggttttctgtcatttgcttctcttctgttccaggttactcttcttttcccttgatctttctttattttatttaatatttgggaattaatttgtttgattaatggttaatgggcgcttaaagcttttttttttaaaaaaaaaatcttacattgtaatgttttgattatgttgtggtggtgggcattgttgtgttttactaacctgggcctccatgcccccagatgggatctagttgcttgtctagtggaaccagtaagttttatcttatttttattttctgctcttaataaacacacgctgcgcgtccatttttatcaggctttaattaattgcttgtcgcacatcttatgctgttgagttttgatcttgtttgtttgttggtatgcagacggt

SEQ ID NO: 84687 - DNA, 702 bp, Citrus clementina
  Intron number 1 from transcript clementine0.9_019194m (loc us clementine0.9_019170m.g) derived from phytozome v7.0 (c hr-ID scaffold_5; pos 1554192 to 1554893 reverse strand)
agggcatcattgtcttgcttttgtgtttgggtcaggtcagtcacgaactcattattgagtcaacaagcctttgtttgagtttaattgctgctagcttagctgctgagaaacggcaggaaacaaaaagtaaggagaagttcgaaacttgtcttctaatttgattatgtctttgaaagaataggagaatctgtgctattacttgaattaatttatggtgattttactcatttttgttttttcttttgactgaatgatttttcgtacttgccttttgtaaattgaaaattgttggacacaggcttcctgctattacgctgtttcaattttcagggacaatgaaattttcatctgcagattgttaattagtataattaatcgtttgtagtagacttgttagtgaaatttgaaaattataatttgtttgattttccaatacttttttttataagaaaatgaaaaaattatgaatgttcaatgttaaactggacaaaacctgtcccctgtccctgtcaatggttcgatttgttagttattattattttttaaaatttattattagcagtagtaggtagttatttttttcaatagttattatttatattataagtacaataaataaaacccagtttaggggctaaatcgtttggttatgaaactattgatttccaattttcttgatttattgtagtttcggaaaggcac

SEQ ID NO: 84688 - DNA, 741 bp, Citrus clementina; identical to SEQ ID NO: 82866
  Intron number 4 from transcript clementine0.9_001417m (loc us clementine0.9_001417m.g) derived from phytozome v7.0 (c hr-ID scaffold_1; pos 3723666 to 3724406)

SEQ ID NO: 84689 - DNA, 888 bp, Citrus clementina
  Intron number 1 from transcript clementine0.9_024651m (loc us clementine0.9_024651m.g) derived from phytozome v7.0 (c hr-ID scaffold_27; pos 71747 to 72634)
agggttcacgcacttaaattagattcaagaatcaggtatgcctttttaagcttcactcactcttgtttttctcttactcacgaatacgatattgcttggctctctaaatcttgttgtgtttaagatataagaagttaagtgatatgtaatgtcgatgatcccttcactatcatgctgtctccatcgatttctgttgatataatttgtaagtagttattgaatacttgaaattctttctgttgttcattgtaggcccatttttcatttatgctttttctctttttgggcattttttaaacagatgttttgggtaagagatgttttacgttgtgcaaattttaatcgcattagtttgacatatctgacacttgaaaccattgagacagtctaaactatcttgtgtgtatccaagcataaggtaacaacttgattgatggatacgacttggttatagtttaaaagggtttgaagcagtcaaattctgcttggacctttgtttcagcatgggcatcgtaaaattcgagcgttttgcttgtatattggattccttgacaaataagtgtcgtatgtacatatttttgcttaccgtgtcttttcgatacatctaacgtgtttgggcaatgatcctaaatcttggcaccttctgtttctgctttaaagaaattttattttctgatatgaaggaatattgttttgattgctcttgttacttcctagaaagttacatttacatctaatcaatgagttgtttgctgtttgctggaaatggaacctatgtctgccaatgcttccaactttttagccctctgttttttattcatataaggtggagatgtaattttgtaagtggtcactttcttcaaaatcttctttttttcttgcagaatc

SEQ ID NO: 84690 - DNA, 625 bp, Citrus clementina
  Intron number 1 from transcript clementine0.9_018624m (loc us clementine0.9_018539m.g) derived from phytozome v7.0 (c hr-ID scaffold_29; pos 2590908 to 2591532)
gatcaactttctcactgtatgcgtttcttcttttaaaaatttattatatttcttttcattttacatttggttttttgtctcgcaaatttcgttccttgttgcattatctagtgacccttttttatgcatgctccatatcttgatttactgtcattatcttgtcagctgggttgtaatgggtttgttttctgttcctttggttatgtattttgctaccgttttatttgtcgttggatttctggcattcgagtttgtttgttgtctacttggtccatttctgtacaatattcttatgcattgatgatttgttaatgctgtttttctttttctagttctgtattagatttttttctttttggtaatatattatagcaaaatacaagttttaaacctctatcttggtttatcctaaggcaacatttgattccccccccccccccccccacccccccttccgcggcgcgtgagttacttgatctagtgggttatattgtttaatagctgtaacttaaaagaaatggaaatgagggattggattgtatcttgctcattcttgtgatttcatgcttatttatatctctaatgtgcagcttttagctataactattataatttttggggtgtg

SEQ ID NO: 84691 - DNA, 871 bp, Citrus clementina
  Intron number 1 from transcript clementine0.9_014631m (loc us clementine0.9_014632m.g) derived from phytozome v7.0 (c hr-ID scaffold_20; pos 384442 to 385312)
ttttttggtttcaatttcttctcgattaacaccaagtaagtgccttttttcaatttagatttcgttaattatgatcaagcttttcgatcattacatcaatttcattgaattgtttgtatttcagtcgttgcatgttgtgatatgatgtcagttccgatgtttcgtgaatttgggttcaatttgatgttctgtcgatcaaattctgttaggttgcctagaaaatgcgagaaagttgagactttttttgggaataaaataatttagcttgatgtgagtgtgcgactcagtctaagtggaaactaaaacagaaaggaacaatgaaaattaagatgttatgttatgtggttaggctattaactacacgatcttagcttgaattgttgtaaggtttgttgcttatgattgcatatgatttgattttgctgtttctcatttgattggaggagaatggagttgaagaattgaagaaaagttatggagtctactgtcaaaagattcggtaaaaatttacgaagggtttaatgttgcatgatatctttactgagtgctatgaagtccacttaaaatttttttgtgggttgtatgaaagctagggtatgattcatattttattttcttttatctactaggtggtttgagcttctgggttattaagagggaggttttatgaattctgattaattgttgttcctttctgtcacttttagtttctgttcagtagagtcaggttcacacgattcttgtttatgttagttctatgtctgactttgtagttagcatgctgcttttctggaggtctgctgactcggagctgatgtctttgtatggttggtcagggaataagtgatttactgttgtttaaaggaatctc

SEQ ID NO: 84692 - DNA, 718 bp, Citrus clementina
  Intron number 1 from transcript clementine0.9_033827m (loc us clementine0.9_033827m.g) derived from phytozome v7.0 (c hr-ID scaffold_67; pos 185637 to 186354 reverse strand)
cttcagtgttctacaatcgcaggattccaagtaaggtagaagtgttagaagttgtgacatgggatcattacaaaattgtgaaattagctagtaggtacatatgtgtagatgatgctttcataatttgagctttttatgccgcgcgttctcaggaatcttccgtagcataagctcatattaagagcgatttatccgtttggtacatcttttcaaataaagattatttaagtagagcttttcgcagtagagattttacaaatagagctttcatctaaaaaaatttagttgtttggttgtcaataggagtttttattaaaaatctataaaattattttaataggtaagtttttttaaagttatgttatgaaaagaataaaataagattgtcaaataagtagaagatattttggatattttaacatttaaaaaaacttttcaacctctaaaaaaagcttttcaacttctattcccaaaaactttaaatttgaacttttactgatagaggtaaaataacttatttaaaccttaaaagctctaccaaaaaaaaaaaattcaaacaacaacaaaaaatatgatcagagcttatgcgattaaataaatatttatgaccattaaataaatcataccaaacagacccttaatcatgttcccataaaagatatatgtaattgaataatattttaatggattttcatttgtaattttcacagccagccga

SEQ ID NO: 84693 - DNA, 275 bp, Citrus clementina
  Intron number 3 from transcript clementine0.9_004901m (loc us clementine0.9_002330m.g) derived from phytozome v7.0 (c hr-ID scaffold_67; pos 19662 to 19936 reverse strand)
ttattctgtgggaattatcactggttgacaaaaaggtattctaatgtgccattgtattctgtctttagaatatcttaaactgaaagctatgtgaccgttcttcttttctgtttcattttctgctacatcaaagtgttagtcaattgtcaaagtctttcacttgaagagatgcaaaccattattaatttattttgctatcttaacagtttgtctgagtaatattctttgtaagtattgttgtatgtttttatttttctcctttacagtggaggcat

SEQ ID NO: 84694 - DNA, 675 bp, Citrus clementina
  Intron number 2 from transcript clementine0.9_007113m (loc us clementine0.9_006607m.g) derived from phytozome v7.0 (c hr-ID scaffold_10; pos 1757264 to 1757938 reverse strand)
gccttgtgctgagcgtcgtcttggtggtatatcaggtagactcaggctctttaatgaataatgcgtgggtattttcttccctggtttttattgtcatatgtaatgtaggcagttttacagaatggtgtataatttcatcaagtaggataatcacttgaggacaaagtaaacatcatcctttcaagaaatatgccctttaatacagtttgaatgcactagtacaaattatactatgtatttgtaaatagtagctgaaacatatttctgggattctttacagttaaacctgattttataatgaaaatattttggctgatcgtgtatattgagaggggtttagctatcagaattaccatccatcatgactcattttattggacttaatggactcattttagcaattttatgaaatattcattcacttatctttaaatgtgttcccaaatattccctgtattttatttgccaccacaaatacaaaatgtagttctggaggcaaatttgtgtttcatgacattttatgcgggtgtgtcatgcaattcatattatatcaactttttctgaaatatggttatatgtttctatttcatgttctagcttgtcttttgctgttaattttattaaaattttgagttgtaacctctatcaactgccttgcagaacttcctcctgaga

SEQ ID NO: 84695 - DNA, 889 bp, Citrus clementina
  Intron number 2 from transcript clementine0.9_014184m (loc us clementine0.9_014206m.g) derived from phytozome v7.0 (c hr-ID scaffold_27; pos 123197 to 124085)
agtaaaactaaacagcttagtcctcctgagtaagtttcttatacttttaattttggtgggtttttttccttttaaaaaaatggagtcaatacatggagcatgcaattgaaacctatgtctgtgaaagaagtgatgaacattgaagcatgcacgcactgcaatgcaagtctgtaaccagaaaaagcttcaattttgacttccacaactagaaaaagctcaatcttcttcttctgatattcttaaaattgaggccaaatgataacaattttggtttaaaattgaaggatcagaaaactattggctgtttctgattagttgtgtctgaaaaaaagcttttttccttttttgggaaaaatgatttttttcttctttttccttgtgggtgcaaaaatacacgtgccaaacaggttataatggagattgagcttgtgatcttttttcaataatgctccaaaactggttttcattttgctacatgaaaacctgctgctgctttcaaattattttggcaagcagattacatggtaacttgcggagcattctctagagtttacactggagagagcaaaactttttactgaaatgtgattctagagtatatttgcaaattatatgggtgctgtgtttgaagaacatgaacttagaaaggaagagaagtctaaaatcctgggcatcttcaactctgaaattgggtataatggcagatacaccttgtgactttgtttaaatgatcttaaatatacactgaagcatggaagaagaagtctttcttttactgcaaactagtcttgcacttttacttggttataatacttgtggactattggttttttcagctgctaaacttttggagaatgatatccctgactgaaatagtggttgcaggcaa

SEQ ID NO: 84696 - DNA, 771 bp, Citrus clementina
  Intron number 1 from transcript clementine0.9_022829m (loc us clementine0.9_022829m.g) derived from phytozome v7.0 (c hr-ID scaffold_5; pos 3129917 to 3130687 reverse strand)
tagcaggtttcaattacccctatgctctgtttcttgtcattttcacttgactatatatatatatattggcaagaattgttcatgttccagtggttgttgttttcaatttcctatcacttgtattttgtgtatgaggtgaatttttaagatgaaagagattgaggtaggagataatagtttcgggaaccaaggaaagtgcttgctaaagattaggttattgccgtttgttatcttttctgtcttttatgcatcttaagatttttggataatactcctaatacatcttcagacccaaaaaaaactctctactcacatgattagcttatactgaaagcagtaacttaatctttagttagtaaattgatgagtttgatagtatgtttgaattgagtgattctatccgtatgcaattattcttaatggtgtcttttagtgtttacagcacgatgattccgtgatcttgtttaatctggtcatgtgtgatttggattttagtgtatgtgtcttctgtgcaagttgaaatttttattataatgtataattggaatcaatccaattttgagcagctagctttataattccactattagataccttttaaatcttttccaaaaagggaaaaaaaaaaacattgtataagggcacattgcttgttgcttaacattgttatgctgcttctgatatctttctcctggaccatcaagaaacaagtagtggaactttatttgttgctctgattattatgattgggaatgttgtggagcagattcc

SEQ ID NO: 84697 - DNA, 1005 bp, Citrus clementina
  Intron number 1 from transcript clementine0.9_033879m (loc us clementine0.9_033879m.g) derived from phytozome v7.0 (c hr-ID scaffold_20; pos 1717852 to 1718856)
ggcagctcttcccctaggcaacttagccggttgcttagggccctactatagatgaagacttctaattttatttttaaattatagttattaattatttatttatattaattattattttataaatatattttccataaacaaactactaaatccttacaaagtccccttctaacattataattaataattttaatcccattaatttcctccatatttttcatctaaaactctataaaggtcacattttttttaaattattatccattaatatatttttccaataaaaaaatacatgaaatcttcattactttggtgaaaaaaactattttctctaccctacttttcacttaagaaaaaaaatttaattgttttatttttcattgatcactgctactcaaagcatcaatccatcaaagttaaagttctcaaattttcaggttctatctttccattctcttattaattaattaagttgtttagttgttttttttctttttaaaaatattattgtgttcataggttgtttccttgtaattatctagcataattgtttagctaattactcttgtttcactagaaaaaaaaaattgtctactaaaaaaatatgcattaggatacaaaaaactttaaaaataagagaagaatagaaaagttagtttaatctcaaaaatgacccattgataaaaacttgtttaagatcaactatgtcataagaaagattaaataggttaattatattgtttattgagaaagatatatttaaaaaattagaatattaaagtttgattaataattttacttctcaaaagctagagaaattgattttaaataaataaaattttaatataattaatacatatattttacctcaaattttttggaaggcctaagtaaaacaatttgcctaaggcctaaaatatgattgaaccgcgcctggacttctatactaggactggacgaattgatctagctaataagatatttgatcgtctcccagtcaaagat

SEQ ID NO: 84698 - DNA, 1029 bp, Citrus clementina
  Intron number 1 from transcript clementine0.9_015880m (loc us clementine0.9_015880m.g) derived from phytozome v7.0 (c hr-ID scaffold_1; pos 11737320 to 11738348 reverse strand)
tttgcgtttgccctacgtttcaggcggacgaaccggtgagttttttctttctcttaatctaaaccaagaaagcctctgccctttcaagaaaattcccacgaaatttgtatgcatgtaaaacattttgttctatcatttttctttttgccttttgtctggttactgggaaactggggaaaccgagctaaaggaaagtgattttgtgactatgatgaatgctgtgggttgttttgctcctctggttatgaaagttctatctattagtaaacatttctgctttgcctcctcattttttgtgggatttgggtatccttcaagcattctgtaatttgcatgcagtgattatttgctttaggttcgttttcctgtgaccttgattagttagttttggtgccctttgctcactttctctgtaaaagtttccttgtaattcaatatcttttgattctcatgcgcctgatagtttatctaggcaattttatcaagtgggttttgttggatctctaaagctgctttatttgtgtcttttatgcatcaaattttacttatttgtcagtttttttcttgcccaaattaccaaaccatggattttcctatcatgtttcccaagtctggtccttgctttgttattatcggagaaataaaaggagtcccatttttcacccttttgttcttgctgtatttatctgagactttttctttagtaattcttttcccttttttgcatattgaattctcctttttcactaggtgtgttcattttgttggcaaattgtcagtttccttatgctttcttgttatacaaagaataattcttcactttgtttcaatggaatgtaaaaactggtgatatttttgtaggcgataacatctcctacttctcatggtctgtttgtgataattggttatcattaacgttcattgttgaggcactgtctcatataagttctatgtggacatttatagaatgagtctaactttgaatatttttgctactttttgtgtattcagtaccttaaggtagattaa

SEQ ID NO: 84699 - DNA, 894 bp, Citrus clementina
  Intron number 2 from transcript clementine0.9_027356m (loc us clementine0.9_027351m.g) derived from phytozome v7.0 (c hr-ID scaffold_90; pos 649543 to 650436 reverse strand)
aagttgaaagtgctgggctaaaccgaggtggcttgaatcagtattagcaagtttcatttctttctttcctatatttatctcaaaaagtattctatgttaaaagaaaactaggatcttttttctgccctgagtttaggatttaataattcatttacatcttgaaggggattttgatggggaggttgtataagtatcaagtttgagtaaccccagacatatgtattaggcagtaactcttatgtttgttaactccatgtgaagatcagtgtgttaaaatatcaatgataatgattaggttagttaaaatcgtgctttttcttgttttgagtttggttttggttaattgagtttactggagttggtatgtttaaattttctgctgctattaggaattaacttccccagagtagccatgaactagtctattttttaccaggatgtttaagctcttcaaatatttgaatttcagcatatgtatatatcttcttatgattgcaagtcattgcagtagctttacgtgttgataattggaattctatacttctatggtctaggctgcagttgcaaagtgcatttttgcatttaactgcagagaaatgagatgttcaatgaatagctaattagtctacatctacccccaagattatgtttagcataggaatactagtagtatggacaaaagtacctctaatgtttttactttagttactcctccatggattctgtagagggtcacaagtccactccttaagcatatgagtttttggattttggattttgaatcattcgcttatatggttttttaatttagattttggatcaactttaataaattttattctagtaattcactctgttaaaagattgaattgattaagacaggtggtggcctcg

SEQ ID NO: 84700 - DNA, 689 bp, Citrus clementina
  Intron number 2 from transcript clementine0.9_014932m (loc us clementine0.9_014932m.g) derived from phytozome v7.0 (c hr-ID scaffold_114; pos 205524 to 206212)
ctctcgctctctttctctgccgccaactccacgaggttttgcttctttctttctttttttttttcaattttcttctaacataaagaaaagaaaagaaaaaaaaatattcaaactccacctcctatttttcaaaatcatatgaaataaaataatgcccagttttggaaaataaacccactgccattttgcgaagtgtcccaaccttgagtttatctagaaaactgcgcctttcctgctaaagtacgcttgcggtgaattacgccacattccgcgcacacagaaatatgtatgagaattttaaaaaaatagaaaaagtaaaaaggaaaaagaaaaagagaaatcaaatttcggctctctttttatttctttccttctagataattacaaaaaagtatttaaatttcgaacatttatcggtcccccataaaagaatttgaatttttacaaccaaagcctatgttaaataattgcatttgctaacatgcgccacgcggctcgtgagctggcttcttcgcttggcttgcattatatttaaatattaacacattggctttgtccactttcttcttctacacatatataaattcacagcagaatcaaaattcctctttgggtttcttttgggctcattttttttttcttttgtttccgtcactttctcaggaaaattttaattatcaaactcaaac

SEQ ID NO: 84701 - DNA, 437 bp, Citrus clementina
  Intron number 1 from transcript clementine0.9_014839m (loc us clementine0.9_014839m.g) derived from phytozome v7.0 (c hr-ID scaffold_51; pos 1014082 to 1014518)
aagccgttggaagtatcttgatttttaaggtaaattttctcagttacccttttgtttttttaataatttttattgtttgttttatattgtatatctctgttcagctataaatgccatattgcttgggattactcattcatttcctaagcgatagcatgcacgtttgtagggcattgtctatatgtccgagtgaaaattgcatcaaatcatttataatcgttcgtttgtcatgtactttcttctgatggatttcggttacataacgtctgttactcggattcgtccacttaatatgagacatcagagtcataaagaaaccatattggttgttcaaatagtaggttggacattcttgtaattctgacatgtgcaagtacttttatgcctatgggtttggagcaggtgttcaagtcctttggttggttccttcccgtcgt

SEQ ID NO: 84702 - DNA, 964 bp, Citrus clementina
  Intron number 1 from transcript clementine0.9_002486m (loc us clementine0.9_002486m.g) derived from phytozome v7.0 (c hr-ID scaffold_5; pos 1990371 to 1991334)
agtagacacccaaagactggtgactggtaccttctctgtttctttttctcttttggttgttgttgtttgatcataacttgaaattttagtttctgggcttgtgctgtttaccatcaatggttttgatctggcaattaatctatttttctttttaaaaaaacaattgtcaattgttttgattaggcataggcaatcaatttattggctaaaggaagccaatagttcttttaaggtgttaccgttcttcttttggcaattaacttgtcttccctactctgcttcacagagctttattaaattgattttagatcattgtctccatttatgtgatgcatatcatttttcctcatgctttgcttggaaagtatacaggcaagacttgacaaacaagtcgatggcagtgtctcactaaggttacaaattcttgtttctgaacttttagtgaataagtagagagcaagcctcttcttgttttttttattctgctgcatttcttttgaaaatccattagaaatgatatttctttcctatttactactcattatatcatcaatgtgcccactaaatgtataattcatcttctgtgtctgtctgtgtgtttcttctttcttctttgctggtttgttaacatttgtactatcattatttgtatgtgttgtgtttttattagtaactatctttagggaccattttaaatgtcattggatcttgaaaatcataagaaagaaactagaaaaaagttgtattgctttagagatgaactgaattctgaagcaactgaccgactatttttgtcttcttctttaacatttctttatttatttaatttgaagatccaaatgaaaagtttaagacccaggagcttccattccttgtgagaaagaaagaaagtaaaccttttttcttttttttttggggggtctctgcaggtatcctgcaattaacaaacctgctggaattgttc

SEQ ID NO: 84703 - DNA, 502 bp, Citrus clementina
  Intron number 2 from transcript clementine0.9_023138m (loc us clementine0.9_022533m.g) derived from phytozome v7.0 (c hr-ID scaffold_20; pos 3693314 to 3693815 reverse strand)
ttcgcggtgaaggggtattttatatatatatatatgtatttatgttaccttcttagtcttcaggattgcttttgatttatattgccgtgtagcaacttattttcgtgtattgaagttttaacgcataaaaaaagtttattcttttatggagttgacttttaaatttgtttaccgggttgaggcttagcttgaggtcaggattggctttgattctcttggttggtttgtaattgtagagcataaacatatttagtattccatgtagatcaaagcttctttatagttgataaatcaattagattcttttgctttttcttttttcttttttgttgatttcttcaatctatgcatgatataaactttaatttaacctctgttgtgtaacaaacaagtgacctgcatttattatcctttcttaacagatgagttaatgatagtctaatgctctgtgtacattttaatttgtgtgcttgtgatttagattttggtttgtagtaatcac

SEQ ID NO: 84704 - DNA, 426 bp, Citrus clementina
  Intron number 1 from transcript clementine0.9_023138m (loc us clementine0.9_022533m.g) derived from phytozome v7.0 (c hr-ID scaffold_20; pos 3693889 to 3694314 reverse strand)
attcaaagaagcctcagaagtaattatttactcccaaatatcttttttctctctatatttcatttaattatcaataaatcttgtaagggttttagagtttcttaatctcattctttgcttttcctctttttattgcaatgatttgaatagtaatccaagtccccgaagatatatgagggtttttcgaacttttttttttcttttaaacatttgagtacttttaaatttttagcagggtttgtagttttaatattttggatttagggttcgcagcatttctcagtgagttaatggatatttttgggttctgtattcttgcctggttgaattagaaatgaaaatcatttgttgattttttttttttttttttgccttttcttcttccgactagatcctacggtgaaattcttgaggcagcatttggag

SEQ ID NO: 84705 - DNA, 560 bp, Citrus clementina
  Intron number 1 from transcript clementine0.9_003798m (loc us clementine0.9_003798m.g) derived from phytozome v7.0 (c hr-ID scaffold_20; pos 2880662 to 2881221)
ttctcgctgtctctctcacgaaacggcatcgtcaggtacgatctataatccaaacttcacttttttaattcttcagatctgaatgcttttttttttcttttgaaattaattagattacgtacttcctttcgtgattgaagggagtatagaaattagggtttatatatctgagcgcgatttacttacatggtttacaactgtttgtttgctcagaaaaaaaaaggtgaggaaattttgtagatttacgttgcatgttgatttctcaatgaaacgattcgcttttttgagaatttgatgctgctttttagggtagcacaggccatattttgatttttttgagctgagtacacacacacgcgcgcgtctgcctgcgtagaatttgtaactaattactattctaagcttgagtgtactcgattattgggtttgttgaaaccggttctcgtgggtttcaggtctttacttccagcgcatatgattaatcattccttaccgttttgcattatcctggaactcacatcttttgatttgagtggttgtaggataatagaacttcctac

SEQ ID NO: 84706 - DNA, 588 bp, Citrus clementina
  Intron number 2 from transcript clementine0.9_003798m (loc us clementine0.9_003798m.g) derived from phytozome v7.0 (c hr-ID scaffold_20; pos 2881520 to 2882107)
gttcaaaacttgaggcagtcacaaggggaaatcaggtagatgctttacttgtttttggaattgttacttcgacattcagttgtatattgtttctaacatacaagagtcttcccatttcacacgataattgcggtgtgttttgcacatgaattctgacgatattggaagtcatagttactaaatatttgattgtaggtagtcattacactcttatctaactaggagatttgagttgtcttttcttgttgattctggcttgcaaaatgtaggtaaacttttttggacactttgcgttaaactttactgtattccaatttaaatttaaaagggacatggacagctaaaatggaaaaagaaagggtagatagacttgttaatgcgacaattgttgtagcctagtgaagcagcacggtcaatgaaacccaagaatagtagtaataataatatctgtgtgtgtgtgtctgtgcttgtgtgtaaagctggagttttcacttaaaactttaatttttctaatttctttaaagtaatgcctctatgtcctttttttccaaagagtgcaagaggtggaccagttcaatctcataacat

SEQ ID NO: 84707 - DNA, 271 bp, Citrus clementina
  Intron number 3 from transcript clementine0.9_005605m (loc us clementine0.9_005605m.g) derived from phytozome v7.0 (c hr-ID scaffold_23; pos 3710245 to 3710515 reverse strand)
tcatatccctgtaagtcaatcattggccgttaaagatatgaattctggaacgtttattttcggtacatttttacatctaagggatatttctttataaacttggcaggaactttcgttttaaatttgagggcaagctttttacaaatttcaaaatagaagattaaagatctcaattccaatatttcttgttattactttaatggtcaaatttgttaatctttgcattatgttgagtttgtgattgcattaatttgcaggaccctccgttcaa

SEQ ID NO: 84708 - DNA, 701 bp, Citrus clementina
  Intron number 2 from transcript clementine0.9_005605m (loc us clementine0.9_005605m.g) derived from phytozome v7.0 (c hr-ID scaffold_23; pos 3710604 to 3711304 reverse strand)
ttgaaggtagaataaattaaaatttatgttctaaccttttgcaaaaacggggttctttaagtgtaattaattggaatgtcgttgcatgcatgctgtattttgagaaatataattagttctaatttattagacttgctatggctggctttatttcggagcctctggattttgtttctgtaccttctctgcaaataattattctagctcttgtctggctaggccctagcttcttctttgctgatatctaatgtatttgctctttcttcacatatgccttttgaattattacgtttcctataatttagcattggatcacaggttggtgagccatcaagagtgattttgttgatgccttaaaagaatggattgattatgttattgaaatctaatttgtacaggaatagaatctatactaatcagaggaatttggctagtaccaatgcttttgagttcaaactaagtacttttgaaaatcttaaataaatttctgagacaaagaattgtttatttaccaagagatactgaaagcctctgcatagaaggtcagattgatatttgtgtgaaagcttgtttggattattgtttccttttgggagtgatttctagccgtcttaaaggttactctgaatgacaaacaacttggttttacactttgataatgatcaggtgaagctttgattgaggttttaaaggctctcaat

SEQ ID NO: 84709 - DNA, 794 bp, Citrus clementina
  Intron number 1 from transcript clementine0.9_028852m (loc us clementine0.9_028852m.g) derived from phytozome v7.0 (c hr-ID scaffold_53; pos 1043886 to 1044679)
cggcccttggtacaaagcactttgccttttaaaatttagtttacataatagaatatgattttatgataatgatggttggcacacgaagtggaattatggaagcctagaagttgttgattttgtgaactgtgattcatctttttaaaattataaaataatataatgtgataatagactagaatattataatatgacaaaaattgatatggaagtgtgaaaggtgctaattcatcttcttggaattataaaataatgatggcatgaaagaatgagtgaataatatagtaaaataattaatttgaatgctgactttttttaattagcttttaacttgtgattttgtcaaattttttataaaataaatattaaatttttaatgtattttattacagattcaatgttaaataaaccaagaaaaactctacgttttttttttttttaaagagagtaggtgaaaatcaatcatccaccaagtctttatctccatgtcaagttaatgctcaagatttcagtgagcaacatacttccaagtttcaaagggttgaagttgaagaaattaaaaatacttatctggagtgtgatcctggattacgccatcaaataaggatatattcagtaaatcaacgtgatgatattcgaagggagtacatcaaaatgagaccttatcagcctaaactacgagattatcaactaactaatgatggcatgcaagaacataggtttcagtatcactagtttaaaaaatttccatggcttgagtacttgaggtaaaagatagtgcattttgttttcca

SEQ ID NO: 84710 - DNA, 791 bp, Citrus clementina
  Intron number 1 from transcript clementine0.9_016627m (loc us clementine0.9_016627m.g) derived from phytozome v7.0 (c hr-ID scaffold_20; pos 2077107 to 2077897 reverse strand)
aatttgacactcttattgtaaatttaccaggttttttccccccctttttccctcatttccttcatttgcattagttcaattattaacatgtatccaaatcatgacaaatttttgccatttaaggtcccaaaaatatatggagacatatataagatgcagacgtttgcacttataaaatgtgggttcagcattttaagctctttttgtaaaatgcttttacaatgttctaaggtccatgtacagcctttttataatgtttttgaaatgccgaatctgcactttatgccgaatctgcactttattacgtacagaagcctacacgaaggactcattatttatatatatatatatatataacacttgctttaacataccttttttttaagaatataacatagttgaggacgtctacattttttatatgatttaaaattttaattttgatgacatcagtttccattaaaattggagatagaattgtttcgtacaaaaatttcatcttcacgttaatcctttttccgctttcagaaagaacgatgagaatatttaaagacaggaagctgatgcctttttctttgcttttcttcatcttttgcgtctaaaaggaaggaatcaactaaagtcaaagaaacattcagactggaaatagaaaaataaaaggaaaatttgcacatcatgaggttaaagggaaaaaaaatagaagcgtccaagattatatttaacaatatgtatatcgttgttatcgtaactttacaggttttagaaaggaacaactgaaggttcaagtaacc

SEQ ID NO: 84711 - DNA, 834 bp, Citrus clementina
  Intron number 1 from transcript clementine0.9_006052m (loc us clementine0.9_006052m.g) derived from phytozome v7.0 (c hr-ID scaffold_29; pos 2347727 to 2348560)
tgaagctaaatcttttgaagtcaaatcacgaaaaggtacttgctttttgaaacctgttttttttaatttggaaattgtggttcatttattttataagcccatacgaatctgtttgtgctgtttttagtaacactatcagtttcagtataatgaatgatctgcattttgattgaatcgaagtttattttttaatctaattttagtcgtaggatctgatgcttaaccattttgaagatcctgaaaagttaatgctttactgtaacgagtcgcctttgaaatcaaaacgttatacttctagttgcttatgcttgtaaagttttatttagcttttagctttaatgagtctgtcacttgtttactatagtgacagtcatagtaggtcttcatcttctttcctctgctctgtcagcttgcgtgacccaatcctatagatcttgcagattagctcaccatacagcttctatttacctctagctaaatcctcaaaaaatggccagttattcaactaaatattctgttgtgtttgtgaacttcagttggctgtataaatttgccacacattgtcttaactcattgatttgcattcagttagaaatctgcaagcaattggaagtaatgagaaatgagaaactgatcttttaatggttcttgggaaacaaattgaccatttctcctgcgttatttaatcttcatatgcagttgatttgttgcatgattcttttgactgcaagaagtcttgcaaagtggatcagcacttgatacattctctcttcttcttcttcttttttccctatcatagtttttagtgcagaagaggattcctttcagtctgct

SEQ ID NO: 84712 - DNA, 690 bp, Citrus clementina
  Intron number 2 from transcript clementine0.9_013576m (loc us clementine0.9_013576m.g) derived from phytozome v7.0 (c hr-ID scaffold_90; pos 296051 to 296740)
ggctcctgtaggtgtgcatccttttgagaatttttaaaatccttgcttctgtttctatttctatatatagctctttttgatttgttattagttagatgtggctcattttttatgtacaacactacgtttagttagcaatgtcttttgaatgacttgattagaagttcaatactaatacactatgtataaaataaacccaaatagggacatcataatcaggccctgtttactctatgaacaaacatgacctttgaagcatcttttgaggagttgctggtgacctttgaatcttggctagtagtacaataaaagttgttaaatttggatcttgttttcagttccttgcaattgcataaatgcatagtcatttttgtttctcttgaatgctactatggatataatagcatggtcattcttgtatctttcattttttttggttctgttttaaagatgcttgaggcttttaacctgcattttatacacaagcagaattgtgcaaatttttgtagatcatatcaatcactcatagatcataacgtttgcatctggggtcattgtgtttgagtggttctggtttatattccgctgatatgcattaacggaggtaggcctgcatgcatagttatttggtttatagtttctgaaatgtgatttcttttctttttattttcctttgttaatgctcgacag

SEQ ID NO: 84713 - DNA, 219 bp, Citrus clementina
  Intron number 1 from transcript clementine0.9_020143m (loc us clementine0.9_020143m.g) derived from phytozome v7.0 (c hr-ID scaffold_5; pos 3744099 to 3744317 reverse strand)
cactcaaatcgcttctcccaaatcagccttccaaggtcttctctctcttggttttgtttttttcttttttgcccggatttttatcacacctatatttactttgagatttttccttgattaagtgtatatgtgtgtgtattcatattcataattatttctttttctttttctttaatttgatgtgggagcaggaagaattgtcactgcctgatcaagtag

SEQ ID NO: 84714 - DNA, 906 bp, Citrus clementina
  Intron number 1 from transcript clementine0.9_024296m (loc us clementine0.9_021260m.g) derived from phytozome v7.0 (c hr-ID scaffold_20; pos 1111947 to 1112852 reverse strand)
tttttcacagcagcgagcacaaacattgtcgtcttgtaagtgtttgagtttgagttgttcctaataatgactatgacaaagagtttaagatgtattgtttggaataatcattattgattttcctgaagtatgctcatataatttcctagataagtatgttatttaaatgtatgtctatgttgatttacaatggggagtctgtcaatatatgtcattgacccaggacttaatatgttattgaaagttatgcatcccctatctcattctccaaacttttttcgcattatctgttttcatgacatctcattttctcaacataatttgctcttcagtatgttgattggggtttcgtgtggcatctaacccttttttttttgggtccggggggggggggggggggcgcatgagcctgttcctttactatatgataggagtaatcatgccaattagttcacctgaagacagcacccagccttccctttaagaaatgaaaagcagcacaccgaagcaaaatgagggagaaacccagaattcatttggtcattttgagagttattagctaccttttagaccactttttctaatttggccatgggaaagaaagttgaatcactgatgatggaaaaaaaaaaaaaggtattgttgttaacctctttatcaaatgagtggtaatgaaaaccagagtgattgtgagcatggccttatttttttatttcttaaactattgaaaagaatcactgtagacaagaaaacagaaatcagcttttgctaaagtgttttctaaaagagcagtaataaaatactctaatgaggaaacaaaatgagcattattggaaacaagagttgttggtatatatctctgaacttatccctgttctattatttgtagggacctgaaccccttgc

SEQ ID NO: 84715 - DNA, 973 bp, Citrus clementina
  Intron number 3 from transcript clementine0.9_021622m (loc us clementine0.9_021622m.g) derived from phytozome v7.0 (c hr-ID scaffold_29; pos 2338057 to 2339029)
ttactccagccatattaggtgcttaccactggcaggtgtgtttatattttatatccttcgaagcttaccactgtctagaagaattatatggttaagagtgactattcatttattcttgtgatgagttgagtgaaaattatttgagttgggcattagtctaagttactctgcactgttatgtctaaaaccacacaggataattgattatgctatggttgctggccgttatgatttagagatttatcctatgcaacctgagtccaaatggagaataagcactaaagcagatgtgtggattctggtgttttttattctctaagtccattgttgtgacttgaaaatagcataagtggagtacagtgcattttaaagatgataaggtctttaaaagcctttgacatttcttgaacaatcacttctctcttgcttctcttgctttattgcgctagcactccatcttttctgtgctcattctgtagaattagaacttccagcataatgtcaaaatcatacttgaatttcttgtgtattgtgaccaagcattcaagatattgttatgaaaaactttctaggttaggatatatattgattaatgaatatatgagctataagttgagtgtatgcctgtcatatgaggttccatgagcatgccatcaacgatctggatctgctatcaagatagtagtttgattggatatttccatatttctgatctttgtttaatattttgtgttagtttttttttttttttaatgttctggaatggtcggagatgcctaacatgcagcatgatataaataataaatattttccctattcaattgtgcatgactatgatgtatttcattccgtttaaatttaaatcttttcaacaattattagtgaaatagttttaaggatagattgaacaataatctggagattcaatttgttaaccaatttgtatcggcattcataggtaagaattgctagt

SEQ ID NO: 84716 - DNA, 826 bp, Citrus clementina
  Intron number 1 from transcript clementine0.9_006084m (loc us clementine0.9_006084m.g) derived from phytozome v7.0 (c hr-ID scaffold_23; pos 2327010 to 2327835 reverse strand)
ttgccaacggaacttcctcaaggtgagcagtatctgaattttgtttacttactacagacttatggttcttttcatattaagcttttgttaaacatcttttttttttttaatttattatattcttaaatagtaggagggtgggaaaaacctaaattggtttatttgtccaacgtcccccaagattcgaacttgggtggcaagccaaaaaatgaaaaagaaaaaaactgtttgaaaccacttggtcaagcttttattggcaaaacatctttttttgttttcttattttggtgacttaatttcctcgtgttcttccatattcaaacttttttatattccacatttatccttgtttctgctatctacagcattgttctaaatttattgcaattttttttttctctcagaactgcaccatccataacccaaattactgccaaatccacaaaaatggtgtgtagagggaaacgtcttttgcagcttcatttttcaatcttcatgcttagagcctttaagaaaaatccatgttatgagggagaaaatccttttgatttttggctgaacggggtaaacttaagatgcctgtatttctgaaggtgaagaccatgataataagctttttgactggatttttatcttcaagcacaactatagttcaattttctaaataataaatacttagatagtaattacaagcagtgaaaaagtgaaaggacacgcttttaattgtgcaaataataagaaaaggagataaattggaacattctctattaagacttttcatatttccatgacctcatacaaagagatttttgtgcaatcagatcac

SEQ ID NO: 84717 - DNA, 507 bp, Citrus clementina
  Intron number 1 from transcript clementine0.9_015357m (loc us clementine0.9_006644m.g) derived from phytozome v7.0 (c hr-ID scaffold_10; pos 5786962 to 5787468)
gcgtctctgattactccaaaaagcttctcaaggtaacaagcacgtataagaatttagtgtttttcgctttttgcagggaattgaattggaagtttaatcttattccctttttgtatggaattggattggaagtttgactttttaaatttgtaaaaaaagtcaacgctattaaggaaagttattgagttcattctttactttattggaattcttttggttgcttttcttttcttttcttttttaatttttctcctctttctatcttttataattctattaattgaatttcttgatagtggcaatcttgtattcttttatccccatttgaaagttttattgggtttctcatggtgttttgttatgagtgacaacattgaatgtttgtgcaaagcttttggccggctaaaagttgaaacatttgttatgagaaacatttcaatttgtttttatactctttgtttcctttttttttttaatttgtttggtggctgagaattgtgcaggcag

SEQ ID NO: 84718 - DNA, 968 bp, Citrus clementina
  Intron number 1 from transcript clementine0.9_008047m (loc us clementine0.9_008047m.g) derived from phytozome v7.0 (c hr-ID scaffold_23; pos 1385471 to 1386438 reverse strand)
actacaccgatcaaatcatcaaaggccttatactggttagtcaaactttaactcgatccattcatctttttttttttcttttaaattaaaacaatcaattaattgattaaattgctggaacagtactctttatatcaaataaaaactgaaaatagaaaatagaagttgatcaagttttgatatctcaaacattaaaatttatgcatccacatcctggagaagtttgtggtttgtgattcatgcatgaattagagcgtctataataatcgcggctattaatttgtcgagcttatccttgaaagcttggacctgaactatgcgcgcatggacgggtaacttcgaacttgagagtatcatgatagtgcaagggtgtcggacgtcgtcgtttttgaaaaaaaaatgaaattggattctagccttttgtttgagccgcgataccgaatagcatataattctccactaattctgaataattaagaaatttgtttaagaagatataaaaccaaaagtagaaacaaaattttgttattcgaaatttaaaaatgagaataattatataatttataaatatttttctaagaacgcaattagtgagaaggtgctttttgtatcataaattaaatttaagaaaaaataatataagaagaatttgtatgttcccagttctgaaagttccaaacatctttagccaatcaaattactacatacccatgtcttctattgactattggcagatatatgtatacatatatattcaagatcttgagttttattaaatttcggaaattttagtctaatagaataatggtatatggtgtaataacttttctagattttaataaaattcaaatttgaatttacaatcttgaattggatgattaataatatgcatcagcttaatttatccgataaataaacgaagggtcgaaagcaaattaataaatgtgtatgcataatgcatgcaggtg

SEQ ID NO: 84719 - DNA, 867 bp, Citrus clementina
  Intron number 2 from transcript clementine0.9_026980m (loc us clementine0.9_026980m.g) derived from phytozome v7.0 (c hr-ID scaffold_23; pos 1583365 to 1584231)
tcgatccaggtaaattttatggttttttagataaagcttatgctttgcattgatttatgttactacttttttttttccatgttggtcacgtttttgataagtgaattgagtttttctgtggctttgcacaactatgggttgttgcaatcaggatggtagtgcttgattgtcactgttttcgtgactttaattttaaggtttgattgttacaaatgcagtatagcggttgatactgatacttttaacttgaagtggagattctctatttaggtaatcacaacaagtggtgataagcggcaggcttgttgcttttgcctcattacatgcaaagtggtgctaaaactcacaatggctctaatggactagttaacaatgtttttcagtgtatgaggtgtttctggaaccttcccactagctactttttcccagtagaagtgttggggtgacgcgaaacgaattctttttttattttggaaggggggggggggggggggggattgagaatattaggactcatttcttcctgattactgaaattggctattattttttgggaagcttcttttcttgcttctataatgtgtagttacgtgctcatgaggattatctgctagcaaaggcttttgctattctcaggctgtatgttttgcgattgttgatgggcatatgaggaggccctctacacaattattatagcatccatttactaatttgtaatattctcggatcttctgtgttgttcaatgttgcatttgcatattattgaattggttttgaatttcatattcacactgaataatcagctaggtatgtttgctggttgtttgttaatgttctgtttaactgtatatgcagtgcaaggtgtgt

SEQ ID NO: 84720 - DNA, 967 bp, Citrus clementina
  Intron number 2 from transcript clementine0.9_022446m (loc us clementine0.9_022446m.g) derived from phytozome v7.0 (c hr-ID scaffold_10; pos 86875 to 87841)
ctcgagtgctcatcaggcagaggcacattaggtataatttatgcactgtgtctccttttagtccgtatctgcttttttcagtgtctgtaaaatcttcaaatgctttttctcatttgtttcttttctattatgctaacatttgaccaacatgaatttaaattgcttgttccatctggatgcctattactgagtttgttggttttaaccattacttactgatctttaattatttgattattttctagttgcctttgggttgttaagctgacatttggtttttggctttaaaatttgttaaattatctcgagtttgtgaattgtgtttttatacacgttcaggttataattataatatttgaaacttgcccactaattgataattgtagtgtcataatatatgtaatgattctagcatgtatggtttaccagtattgtggatgatcttttggatattataatgtttagcaagtttgattgtttacctttgtattcttggggcattaatatgccgtgcatgcactacccaaaatgcttttggctttgttaattggtgtattcaaattctgtcactgctgacatcaggactgcttttggtttttttcataaaatttgttgcgtttttttatctatttgattgctttaatgttgctaggccctgtccctttgagtcgtcttatttgattttgtctttgtcaagatcttattttttcaatttgtgacaaggaagttaaaacttttttttttttctgttggtcaattagccgactgtttctctgtgaatgtatacagtaatgatatgttcttttttctcaaagcttatttgagctgggttgctttgatgttctaaccttaatgttttagtaagattgttttgaggtctttaagtgtggttattttgtatattaatgaatatctatatttctgattatcagggttggaaggcagcttgtcaacattccctcatttg

SEQ ID NO: 84721 - DNA, 559 bp, Citrus clementina
  Intron number 2 from transcript clementine0.9_031234m (loc us clementine0.9_031234m.g) derived from phytozome v7.0 (c hr-ID scaffold_5; pos 3627947 to 3628505)
cggtatggttattaattacttttcactgcctttttagataccaattaccaataataataattgacgatctaattttaattaagttcattgttatcgtataaatatatgatttagttttgtggacacgctatgccctacatatctcatcctttgaagagaaataatcgaacccaggttttatagaaaatttgtctttaaaagcaaatacgtaagttgtatatacaaggctcctattttactggtcatttgaatttgagttctgaaagaagcagggtttaaaaattgatttgaattttgtccacctctttaacttttaaaaaataaactaaaaagaaattgtacaaagaaagaaaaaattgttaccaatatccattgattaattgttatcactagcagaaaatgtaacttgtgttactcagagatgatgcaacatagtcatgtcaaggagaaattcttatatatatggtggtaacagtacatgtcttcttgccactattcagtagcattcactgcacatgcacgatgtatttacattaatttttttgattgcagactatta

SEQ ID NO: 84722 - DNA, 702 bp, Citrus clementina
  Intron number 1 from transcript clementine0.9_006192m (loc us clementine0.9_004729m.g) derived from phytozome v7.0 (c hr-ID scaffold_29; pos 1411005 to 1411706)
accatcctcagtatctttctgattgttatagtcgggtatgatactttctagataaattcgaagttttgcttgattttcaaagaaaagattatttcatttagttgtttcctagttggctatgattttactacatttctcatattgaaaatttgtttgaaaaaacgacactcatgtcagttgtgctccacacttgtatttatggaagattatcggacaatgcttatttttcaaaattatgtacaactttttgagaatgacattcaaatttgttatacaactcttacacacttgcaagcttgataattggttaacgttttgctgttcttttacgagtagtggcatgccattagatcttaaaattcatatttgattaaatgtgtagaaacatacacatgcattaccatgcttttgtttattgatttttgagaattgtcatgtcttcttctctgtgtcattgttgaaacagaaacacttgtgtagtactagagagctcatggcaaacaatgaattagttaatatggcatatcctatttaacaatataactgacttggaacagtcagatgtatttgttccaaagttgctaacaaaaacgtataaatgaattacattggtcctgttctctttgatgagcatctcatgggcatttatttatcttttgggatttttttcctcttcagttcagtttgtaccgcactacgagc

SEQ ID NO: 84723 - DNA, 953 bp, Citrus clementina
  Intron number 1 from transcript clementine0.9_016103m (loc us clementine0.9_016103m.g) derived from phytozome v7.0 (c hr-ID scaffold_23; pos 1350742 to 1351694 reverse strand)
gtccttgcatctacgaagccaaggcatttctttcttttctctatttctgctttgtatttcttaaattaacgttattttggtcacttcttcgtgtatctttcttaaattaacgttatttaactgtctttattttattttattttttaaatttattttggctttatatgaagttatgatttgtgttttacgcccgaaatctgggtcttcgacctagccctttggttctcgataaatctttagctcatagtttataaattaggtatgtgatatgtacttaaatttgttttgctcgtcattcatgttatcaatttccaaaagcttaatttgcgttccattgcaggtttttgtgttgttaattgagtcagtggctatactgagtacatttgagtggttgttttagttctggaattcctaaatttgccaatatcgagtcttttgcctgtgggtgtgtttgtgtgtgtctgtgagtgtctgtgagtgagtgagtgagtgagtaagtgagagagagagagagagagagagagagagagagagagattagatattctgatgtgagtcaaaattaagctatggttctttgttaatggctttagagcttgagttttttgtgacatatatagaaaatgctaccgaaatttgattgaaatgctattatgtggaggctgttgtccttcattattctgttaggaggaattaagggtcaagggagcatctgctgcataagtataattgttttatattgtgcctccaattatatgttgctgaagtggatgtttggttttacaattggtaaaacgttataattttaatcttaaaacctgttcttgttttccaattgattaatctttttctcgatttcttgtgcacatttcaactttagtgtttctactctgattactctgtgctcaattattttaggttcaaaaagctgagcttcggaaaaaagagtggag

SEQ ID NO: 84724 - DNA, 713 bp, Citrus clementina
  Intron number 2 from transcript clementine0.9_031982m (loc us clementine0.9_031982m.g) derived from phytozome v7.0 (c hr-ID scaffold_101; pos 324745 to 325457)
gggttagtgagttactctttcttttgaaaccatataatcttatttgtgttgtggggatcttgttttaaatgatatgcttcgtccaacatttttttttctgttaaagaatcaatttttattttggttttagacctgtaatttaattttcatattaatggtcattcgttgtatttgctgggtgattgtttttctgagtttttgattttttacaactgataaagtgacagtaaagtaaattaggaaggctggtttagttttgttcttgttaccagtctttttacgccttttcttgttctttgtcttaactttttcattttcccctgcataaagtaaatgatttattttactgttttatttggatgagattagatttataacctatataaaggctttatttcttagattttgtgccatttgagttctgtgacgcacagctttcactttatattgttcttgttcacagagaactgcttttctttgtcatttctggcactctgttttttccatgagctaaattttgaagaaacattatcttcttcttcttcttcttctttgtcttatttatcttaatagtaatttcctcgatatgtgagattaacaactatttctataaagcattttcagatgtagttttcgattttctgcttctattttgccatttttttaacggggttacattttaatctgagccatctaaattttatggtgcagat

SEQ ID NO: 84725 - DNA, 1064 bp, Citrus clementina
  Intron number 1 from transcript clementine0.9_013564m (loc us clementine0.9_011818m.g) derived from phytozome v7.0 (c hr-ID scaffold_1; pos 9303662 to 9304725 reverse strand)
ccggctatctgatattgtttgtttctccatcaaaggtctttcatgcatatgctttttttgagtttgtttttgtttgagtgttggataaagggtcaaagggcatgttgtttggtttctgagaaagttgacaagaaaataagggaaatgaaaggaatgtttgatgtgtgatgaatgggaaaaataggtttttttttttttgagtgaaaaaagtttcttttttctttgctttgtttggtttccaacttccaagcaagttttgggagaaaaacaaggagaaaatgaaagtttcacagttgcatttcataataaatttatattttggattctcaaaatctaaatttgcttcaaaggtgggttaaaatttatttgatttttttttttaaatgatttggtaatcaaagattgtgtagctgaaaatatagagcaatgttttgattcttgatgagcttagctaagacttatgttgagcttctccttttcctcctttgttttcttaagaaacaaacaaaagggtcaccttaagtttggttgctggttacatggaagaaaatatgagaagacaaatttttaaaagtcatgctacttttttctcaggaagcaaacaatgcatagggctgctaagtttattttataacttttttcgtttgcttgctaaaaattctagatcatgagatattggaattccatgtcatgatgaatattctctgtgatgtctttcagattcatagctttttgtttttaacttttataaaattatgtttcacattcaccgtttcttgtttttactctattaaattgaaagattcttgcctttctgagtaggatcatgtctttttacttctgttttaattatctgtttgattcttaataaagtatttgatatgctttgattatctgtttggttcttaataaagaatttgttagaaataagaagaatattggaatcttcttttcttaggtatctcaatgcatttccttttaagctagattttgattgtgtgtgattattcttcattttcaaataggcagattttgagtctacataaagggaaagaagaagccaa

SEQ ID NO: 84726 - DNA, 344 bp, Citrus clementina
  Intron number 1 from transcript clementine0.9_031919m (loc us clementine0.9_031919m.g) derived from phytozome v7.0 (c hr-ID scaffold_20; pos 56269 to 56612)
ccaactgctggacttgtcctcgaacgggcttacaggtaacatacgaaattaacttcattaccgcatattatttgagcaatcatatttaaatggattaagtttgagagaatactgacaaaaacaaaggtgaaccagccctattttatcatattaattgaaaaaaaataataataattaacacggtagacacacctgtttacaccattgtttttatttatgctctatcaacgtttaatttcttcaacattttttttcattattttcgtagactaataacataaatgtataaaataggtacaatccctccagaaattgggaacctgaagaatttgatcgagttgaat

SEQ ID NO: 84727 - DNA, 681 bp, Citrus clementina
  Intron number 1 from transcript clementine0.9_002791m (loc us clementine0.9_002791m.g) derived from phytozome v7.0 (c hr-ID scaffold_29; pos 1459265 to 1459945)
cctccgtcggatttcatcctcttctgctgcttcaggtttcgttttccgctctctatcctatatcgagattcgaatactgttctgaattacttagttgagtattatttcgattgcagcttaaaatgaataaattcatccgttctacgtatctgtttatcaaattctgcatatttctactacttgatgcctaatttactggcctgctgattttagtaaggtttttaaatcttccgctctgttgatgaaaaattacttgacgttcaaaactctgcagattttgaagacaataagatgaaattattattagatagtcaattacaaggaagcatcgcaataggattactttttattctcgtcgctaatttgtgtcagttatgagatactaattatttgatacgtttaggcactctagattagttattcacaagttaaattttgcttttattcatatattcgtttacgtggctttatgttgggtggaatgaactcaactttccatacaactgtaactggtgatcccagtcatcctattcaacaccttttttgctgcgttggattttttggtgtattgcttgattgtgtgtaggtgccgcagcagttaatatctatgagagctcacttttggtttgtatggatgcttttgcaggtttgtttccaagaagagggacacaatagtgtgag

SEQ ID NO: 84728 - DNA, 971 bp, Citrus clementina
  Intron number 1 from transcript clementine0.9_012305m (loc us clementine0.9_012305m.g) derived from phytozome v7.0 (c hr-ID scaffold_120; pos 109621 to 110591 reverse strand)
gtctcaactcaacaactctattttcagttttaaaggtaataaaataattattatcattattattctgattttcatttaatccattatgcaaaaacaattcataaattctgctttatttctttctttgatctgatcaatttagttcctttcgtttgctgtttgagctgatgagaaaattaaaaaaaaaaattcgaatgaagttaactaaattttttatattttccatttgaggttgtttggttgccgagaaagctaaagaaaataagttgtaaaataatgtttagcttctggtgaagtcacatgaactttgacaaatatttgcaaacacacgttgacgactaatttcatttttcaagtaggcgaacagatctggtttcttaaaattttaggggaatttttaagatttccaaattaggggttagatgggatatagctttttttttttttaaagattagtagcttttctctagtctataatatttatagtttgatttaggataattttgttgcatgattgctttgaagagttgaaaatcttatatttgttgattcaattgctgtgaacttttgcaatttataatatgatgatgaatttcattttgtcattgaatttagaggagctgggaattttaattctcaagtgaagagtggattttccctaagataagtaaattatgttgtaggatttgtatttgttgtacctattagcagttatggggactagtgtttactcttatttttattttgaaattttctgcttgcttccgaagttatggagtaagaaaagaaaagagaagaaactaagttttgatcttttttgttttaaatatccttctcttttctttcctcttttcagctttaccactaataatgtgatagtatttcttctgattttgatggcatgtatagatttcagttgccagcataacaatttaaaaatttttgtcgtaggattttaaaccgttgcaaag

SEQ ID NO: 84729 - DNA, 882 bp, Citrus clementina
  Intron number 1 from transcript clementine0.9_021844m (loc us clementine0.9_021844m.g) derived from phytozome v7.0 (c hr-ID scaffold_67; pos 1058393 to 1059274 reverse strand)
tcgcccagatacttactttcagtcggggagcgtgagtaagtgtcattaatagtgaatattgagttctcaaatattgatacagtttggattgttggatgtacgtgccagtttctaatgtggtattgtcacattttgatacttagtgccatgtttgaattttacatttgagttgctggtagtgttttgcatttcctgttgcttgatcttgggaatttccaattaatgtttgaaaagattttttgtgttgaataggtagaaatgagctgataatttcttacttgatgtttgaaaatcttatctgatttcctatatccgagttatttcagacacgtgcatctatgggaggtagggagggaagatagaatcaattgttttgagttttagatatactgtcctggcagtgatggttgctcttttacaggaattgtttatgttgaatggagtgtgtgggtgtgggtgtggttgcatgtttgcatgagatagacattgagatagataatagatagataacttgttaaaataaccactctttttaaaatctgaacaagaacaagaactagagtaacttttgctggaattcacatacacggtaacttattaaaaaaaaaaattttagttatctttgctttaacattaacctaatataagagttgcgcactttgctttggtgcgttgaatgggcacctatgtaatgcctggtttcctgcatccataacttgactgtctagtctgtgcttacgtctgaactatattgcgattggcttgcaatgcactttaccaggacagtcaaatggtttgtggtatgttctatccccaagttgagaattgacttgtatactactcattttctggatcagtcttgctgttttgctaaagatacta

SEQ ID NO: 84730 - DNA, 465 bp, Citrus clementina
  Intron number 1 from transcript clementine0.9_011475m (loc us clementine0.9_011475m.g) derived from phytozome v7.0 (c hr-ID scaffold_10; pos 3136049 to 3136513 reverse strand)
ggtgcaattcttgtgctttttcttttttgggccatgtaggattctttgcttattcatgttcttggttcctttaatttacttggtctgtgtttgtcaaattgttatgcaattaatattgttgagtgtagtaagaccatgaaatgctcttaggtccatgatacctaatcactagactttttgaagatatcgcaccgaatgagttaatctttatttgggtttgagttactatacccaaattttgactttcaattcaggggagtgttattttctctttttaatcaaacactgagatatccctttgcattctcaaattatgtttaactagttaaaagagtaaagttttgattgataccttcattaatcaagctgattgctttccgttgagcagtgtcatctttcaattatgaattgattgaaggtttctttctcatatacaatatataattttcaggtttcacttcagaa

SEQ ID NO: 84731 - DNA, 694 bp, Citrus clementina
  Intron number 2 from transcript clementine0.9_019106m (loc us clementine0.9_019146m.g) derived from phytozome v7.0 (c hr-ID scaffold_5; pos 3064726 to 3065419)
agaacccgtcgttgctgccgctgccaccgtcgaaggttttcttctacccagaatactgtccttttaaactcgtacgttatctgggttttgtttggagttgtcgttaaatagaacttctgctttcgtatgttcatttttgtacctatcttatgtgcttgccatgaaatgatatgtgcaagagaattaatgtatgtatatttgtgcatatcaggatgatacatgcagcagtatcttgctgaaacttagtatagctatacttcagagttcttattgctcgtatgacatttaaatagtgaattgtttatttggattggtgtttccttgaaattttttccctttgactggattgtgctgctgtgaaaaatggccgttttttagagtaataatgtcgggtcattttgggaagcatcagaaatgcttcaactgaaaaaatccaaagaaccaaaccaaatcgatctaatgcagttcaggttttttgaagtttggtttgaaactttccaaattgattggtttggtttctgaaaaaaccaaagcaaacttgaagtgcctagtcctaattgaagtttcaaagctttgtgttattaattttttataattttaaattgttgttggtattgctagaaaggtatgattggctgaaatagtgttcttgaatgcagagtgagagaatattgtgtttgaaatttgttaagat

SEQ ID NO: 84732 - DNA, 851 bp, Citrus clementina
  Intron number 1 from transcript clementine0.9_003207m (loc us clementine0.9_003207m.g) derived from phytozome v7.0 (c hr-ID scaffold_38; pos 49998 to 50848 reverse strand)
agttcaggtaattctcgtctttgttcttagtctgatgatgtttgattttgtgagctttttggtgggttgctgttaatttttgttaaaattgcttgtttggtttctgtgttgaattttgtgattgttttgacttattggtataatttgcttgtttgattagtttagcactcgggttcgagaattattatttggatttcttgtgtatgtgctgtgcttaccgcttttgttttggcaatgaggaactggcgaggcactcttgatcttgttgattatattttgttctttattctaattaatgtagttagaatttttggaaataaatctgttcgtggctttcacttggcgaatttgtagtccatagcatctttggcaatttgctaggatttctatgttgagttggaaattactttttgtctgtgttaacaagtgcagtgttgctagcaagatactgaaatcagttcactaagtttgtaatttcatatgggttgtttgttctagatgcttgatggtttgaaggttatgaataataacaataataatgagagtttgaagtctggatttgtcagtttggtttgttatgtttgacatttatgtactgtttggatttttcttgtcttcagagtcgtctggcttgattaatgggagaatattaaatgtttggttttgattgttgaagatcgatttgaaataaatggtatggctttggatttaacagttgtttattcctaataacttttcaggcgtatgtggatagaattgaatcagcttttactttgaccatcattgctaatttatagttcgtttctgagggctgagttggtattggttatctattgtaattgatttctcca

SEQ ID NO: 84733 - DNA, 729 bp, Citrus clementina
  Intron number 1 from transcript clementine0.9_001096m (loc us clementine0.9_001096m.g) derived from phytozome v7.0 (c hr-ID scaffold_10; pos 3989793 to 3990521 reverse strand)
tggaaagagtcgagcgcactcgtgtcctcgctcaggtctctctccttttcttaacattttttccttcttcctctctattttttttttttttttttttgtgttggaggaatgatggatgactcgatatttatgatgcagtgaacggtcttagattttaaaatatttttgagttaatagttacttatattttcatttttccgattataggtgtcgtctgttagttttttcattttaattttttctctgttattgcttttgtgattttgctcgtttgttgaagaacccgatcgggatattcttagaaaaatgaaaatgaaacgtaaaagagttttttatatatttttattattttttttaaataaaaagtgacggtgtccactttgcttatctgttaattttgtcatcagatgaattgattcgatgatttcatattatatttattatattttctcttttttcttccatcgttattatgtaattttctcgttctgtccgtttgattgccgagataatatgaaggatgaaatagttattgtatctcatcattattagttttccttgccaaactaaatatgtacaaccttttttttgtttttcattatttttttattcttggaaaagtctgttgtctgtaacataatatcatttccattttgacattctctttgtaagcaaagagattaccaattgagaatgaaactatttttggtattatagagtgcttgtacc

SEQ ID NO: 84734 - DNA, 879 bp, Citrus clementina
  Intron number 1 from transcript clementine0.9_003361m (loc us clementine0.9_003370m.g) derived from phytozome v7.0 (c hr-ID scaffold_33; pos 465684 to 466562 reverse strand)
ttgctggtcgacacaggtactatttgattttgagtgacaatttataaactgatggctttatttttattagtggcttgtcagttagtctagttttgtagtttcgttttttggtgttgtatgatgattgtttgctaaaatttgtctaaaaggtttttagcctagcagggtcaaaggagagaaagctttccaataaacatccgtggtttatggaatattattaaaaggtacaaagtgtattagataacagagtgatgctgagctaatcatgagctatgatagcattataaaagcagcggtatatgaaatatgcagtgaatgctttcattttcattgtctatttgaaagtgtgtagtgtaaacattttgggctaagtttgagtgatgaagtgcttagtaaggttctgttagacatagttaaatgattaatatgagttatccaagcaggtacagagtaggatatctaggtttgggtttggtattagtttgaagatggccactgattatttgactatttatgtatttgtatttgtgggtttctaaatgctttctgttgaatgtaactggggaatgatacatcttttgtcatttggatgcatgaagggtaaattttttgctttattttgggtacggtaattagtagtaattaataaagattatttgtgttgttgatgaattaaaacttatgcgctaaatagttttgcccctacttaaggtagggcttgtcttcactttcatcttatgctcttgcttccataatttgtatttattgtaattcttatttttactagtctatagaacacaacattgtattggagcatctgatttctaatttttttttttaataggagaacgcacggtgggaggaggttgtgggagtcaa

SEQ ID NO: 84735 - DNA, 881 bp, Citrus clementina
  Intron number 3 from transcript clementine0.9_023821m (loc us clementine0.9_023821m.g) derived from phytozome v7.0 (c hr-ID scaffold_82; pos 633346 to 634226 reverse strand)
ctgagacacgtacgttccgttattttatgcaagggctttttaggaatttcatttggttatttctttttatttttctttttaactgttggttatccacttatccttccttggaagttcgatactttgcatgaaaaaataaaatatcccgtgtatttggactatgctgtagtagaggttaggtatgggaaaaaaaaaaagggaatgaaaagttgaaaatgagagaaaatgagcttatcattaaatgggccaatggggtatatgtggggagcccacccggcggccatcactcttcaagtctcacccattacgttttattgatggatacggtgggatttaggcggtgtttattttcgagactatacgactgtgccatcccgttgtcacccactccatgcgtccattgtcgaatataaataaaactcatgccctcaacagtataaggataaggcgtgaatccgagcctccatgagagcacatttcaaatttcagtctctttcaaaatattttgattgctaaaaaaaagtatgttagttcacaacttacacgattcgtgccacttgatagacagtgggcagttgttgctttctcgatcatatgcttgctttattatcactgatgttttaagcacacgataggcctgcagttgctttatgggcttgccttatcttggggatcatggcatgtgttttatggattcctcttggtattaaagctatagagtttctagggcccaagcaattgtgtgagggtggtcctgtgttttggtactttagcggtaattgcattagctttggtgaattgtgatcaagtttaagttgctaaaatttgtttcattttgatttgcagatactgaagaacaccacggcgagccgaagaggagg

SEQ ID NO: 84736 - DNA, 550 bp, Citrus clementina
  Intron number 1 from transcript clementine0.9_015599m (loc us clementine0.9_015599m.g) derived from phytozome v7.0 (c hr-ID scaffold_53; pos 1422221 to 1422770)
aggtaaattatcagatctattggttgtttagactaatgaattaagcgttttagtttagtttattcttttatgatgttgttaatgtagaatgaggaggttgattttgtgtaattaaattgagataatgcattgccattttgttaatttgtttccatttgtaagagtaaacattgtgttgtgatgccatttttattgagattgtggaattggtgccttattaaatcaatcccttcaatttgattatgatactaagctgttgattattgtgtcatctgaaaataatacatctgaaaataatacatcatacgtgtctgaaatgaaaccaaattctgaagggattattttgtgaagagcggtgctgcttatattatagtctgtgtttgttttgaggattttgtttaaatttgctttttatttgatcaaattttccattaactggaaaccagtgaatctttgagtaaacatcgtaggagcagtctagaattgaatgagaatgatttcatgccacctgacgaccccacgggtttgttgttacaggctttcaactggc

SEQ ID NO: 84737 - DNA, 466 bp, Citrus clementina
  Intron number 1 from transcript clementine0.9_003925m (loc us clementine0.9_003925m.g) derived from phytozome v7.0 (c hr-ID scaffold_111; pos 252959 to 253424 reverse strand)
ttcaaattctgttccaaacaattctttctttcaaggtacccgcttctgctatatttacccttttgttttagtcatcaaattagttcttttgattgacactattatttatttgattctcttgattcatcacaagtaagaatttcattgatttgacatatgattataaattttatgcattagtaagtggttctgctacaatcgtgaacgtgacccagatgggtaatttaaaaactgcttcatgtgaagtttcaagtctctcatgcttcttataatcgctgtcattcctttccattccttgttttagcagaagaagttgaattaaatgaatcagctgtagttttattctattgttgatttcttgggggatgtgttttgatttctgaatgtgatgtttgtcttaaattttatttttttttggattttccgtattttagttcctgctaatgggcttgctttgtttctgcag

SEQ ID NO: 84738 - DNA, 875 bp, Citrus clementina
  Intron number 2 from transcript clementine0.9_003906m (loc us clementine0.9_003906m.g) derived from phytozome v7.0 (c hr-ID scaffold_139; pos 70950 to 71824)
aagttcctgcagcttcaagccaacctttacttaacgtgagtcataattattacattgttgctaataatagtgaggaaatttttcagcaattgacaattgtgtaattagcaggagttgggaatttgagaaacactcttccatataattgttgaatatataaatacatattatacaaacattacatggttgcaccttcagggaatcgtctgatgaaagataatcatcatttcttgaatgataattttctgcaaatttatacttaattgagttagtggccatgataaatcttttaattgcttgaaaagcattttttctattgccaattgtagtttattttgatgggttaatttgctttcgctcaaggatcaaccatgttgtagttgcttaaacaggaggatatctatgtcttatatactgtgcagtataagctgcctgtatctctctctctctctctctcactctttctctttgtttgatgtgatatgtatctatgtctcgtgcatgaatagcacttctgtgcccctaagttggcattatcagatggtcctatctaattttgtggtcacttaagtggccatagaaaattttcaagtagtgtctatagtatctggtgaaacttgctgtccatgggttgacactcaattttcttgtagatagatgaggatgcagcggttggggtatatgtttttttataagttgagaagatatgtgttatctctgtatatttgtttatgatctatttgtgagtaatcatttgagttgatattggcggagggccctttaacttcagaggtctaatttatatggtatcttgaatatgatggtgaaacttgctattgatgtgagtgtattggctttatcttaattgcaggtgg

SEQ ID NO: 84739 - DNA, 749 bp, Citrus clementina
  Intron number 1 from transcript clementine0.9_003138m (loc us clementine0.9_003138m.g) derived from phytozome v7.0 (c hr-ID scaffold_29; pos 2584189 to 2584937)
tgcttggtgaagaccccaaactcacccttgccaaggttccctctttcccttttgcttgttcctttttctttttaattattatgtttacatgaatttatgtttgtatgtatgtggagggctttatacatacgtaataagtatgcatgtattcagtgttgtttttagatgctttatttggtaaattagcaaatggaaagatttctgagcttgaacggagttagtattgatctggattttagagtaacttttcattaggcaaatttggaacatttgttgcctgtttgttttttggaatgcaaattgttttaaaacaaaggaagcatagtaatatagtaacattttgctctgaatttctagtgttcaactagccgtgtgagtctctagttgtaatttcagttttgttaacaaaaatgtataattatatgcatgttagaggtatgcgtatacatttatgcttgtattgatgctgtgttttgatgttttactaccgaagatcaagaaatgggcaaataaatcttgagttggagagttgtactggtttcaccccataacaagctcattaacaagctgtgtttgattttttttttcctttttttttccctttcccgttcaaataatacgaatgacgttctccaaactaagcatacaaaaattttgtcatgaatttctacattctactattagacttgaacttgtgactgattttcatttactgaaactgacaacaatttcatttaagtaagcagatt

SEQ ID NO: 84740 - DNA, 533 bp, Citrus clementina
  Intron number 1 from transcript clementine0.9_028768m (loc us clementine0.9_028768m.g) derived from phytozome v7.0 (c hr-ID scaffold_29; pos 1607219 to 1607751)
agatttctagtctgagttgtggtacgggcttaaaggtgcctcccacagttggggccctccccaagatacctcgtggtcaaaaacaaaaaaaaaataataatgaacaagtccttttgacaagtcatacatgtggttttctgtaaactttattcaatcttctttttgttagtaaccatggcaataattataacgctcaatacaaaaaattcaaaacacaaataatgaaagaaaatattagcacacttaacctataaaatttacttttattttaaaggcaggtttcttaaaactcccaagaaagttattttcttttatcacgaggaacacaaaacaatttaagaaacacctctttttttttttgtttacataagaaacacctcttttattatttatatgatcctatcattcacattcacattcactattcattaccatttataatatattaaagataatacaaccaactaatatattgacacgtataattatgtaagaaagaaatcatattctttacttgggctgcaaattccagc

SEQ ID NO: 84741 - DNA, 771 bp, Citrus clementina
  Intron number 3 from transcript clementine0.9_017925m (loc us clementine0.9_017925m.g) derived from phytozome v7.0 (c hr-ID scaffold_29; pos 2616257 to 2617027 reverse strand)
ctcagatcaagcgtgtcatagaccggctgctggaggttttaacttaatctttgtttgtagtttcttcatgatattaatacttaaacttatagcatgtttgcaatgtttccaatagcataaaactgaaaattcatatattatgatttgaataattggctggtctacacagtctgatacttaattatgtttgcttcaatttgttgctggagattttaacactatttagagggaaaacattttagtacggtcacatggctagaggaggaggaaggggctgatacaattcatatatcttttgtcaggtgaatttgaggcaaatttggatgatgcatgtctttatttgatgtgattgggcctttaaagagcagcataagcaatcaatagacatttggaatcataaaataatttagggtgatggctgatgttgtatgactatagcaacactcgtttatcaagattgcagattattgatctttcacttgagaaattctgcttcttgatgatatagagcattgctttatatcttcaattacttaatttaggttcaaaagtccgctgaaactgtggttgagtacggtattcaatgcaccctcctctattttcttagtatttcgtcttttcatcctgttcttatgggatttttgttttcaaggaaaatgtgcagactttatcatggcagtaaagaagcaacagtcattaataacaaccttatgagttattgtgtgtgtttttgcagacaaggcaagcctttacaccggaagaaataaatag

SEQ ID NO: 84742 - DNA, 238 bp, Citrus clementina
  Intron number 1 from transcript clementine0.9_015577m (loc us clementine0.9_015577m.g) derived from phytozome v7.0 (c hr-ID scaffold_1; pos 10415845 to 10416082 reverse strand)
gtcaatctttgcgggttggttctgcttttctcaaggtttgctgttaggcttttcactttagtcaagatatcttggacttggagtttcttcttaatagtcaataattcaaaattgcgtcaagtttgaatcatttaaccaatcaacgttttatttcttttaaagttgaagttacttaacacatttaccttcttgaacttttgtagtctggagatttctgtagatacacgtcccaggctgc

SEQ ID NO: 84743 - DNA, 785 bp, Citrus clementina
  Intron number 4 from transcript clementine0.9_003760m (loc us clementine0.9_003760m.g) derived from phytozome v7.0 (c hr-ID scaffold_20; pos 1243595 to 1244379)
caattccagaatctgcatcaaggtacttgtgtttgggtgttttctgttacctaaaacttcttggtgttgcattgatacttttaaattcatcagtggattattaggaggtctctgaaacttatccttagttgagacctcataaatatgctctcatatgtgacttgggaataagaaagatagttggaatacacatatgtgtaattttcttattaaaaaatgggagaaaaatgttggagatatggtagttcataggagagagctaggagatgttggattttttcccattcttggggcacttatctgcgagaggctttttttttttgggctaagacaggtgccatcgcattggtgtttcttttggcataactaaccattttaagctttgaatttctgtacatggtttgctgacatggtcaaagtgcagtgataactaacacatgttagcctttcatccttttcttgtatacttaatttttctcagaatactgttaattgttattctttccttttatcactgcattattcatagttattggggtccatgaactttttcagtttgcagattgtttactgttggatcatatggtagattacaatttatggtactagcaaattcttcttggccactggtttgatacattgcaggatggatgtgctgtttgagtcggttttggatcttatcctgcacttgtttatttatcttccttcctgtttttgttcaagtcattgattacttggttgtatgtgcagggccatagaagtactagataattcaattttccaag

SEQ ID NO: 84744 - DNA, 572 bp, Citrus clementina
  Intron number 1 from transcript clementine0.9_023506m (loc us clementine0.9_023113m.g) derived from phytozome v7.0 (c hr-ID scaffold_43; pos 1744335 to 1744906)
acaggataccggtaaattattattaaaatggaactggcgagcggaggaggaaacggcgccaaaaactctatctcagcatatgaacctattgctccctttctctcgacgaaatagaacccaaaaaacgactgaaaatatgatagaaggaggaagctaaagaaagtggaaaaaataaaaagcaaaattaaaaaaataaatagatttaactgttaaattagagaagaaaaagagctaaccaaatgaagcgagagcggcggaatctgagatttgagatgttgagtggagtgggaaaaagaataagggtaatttgcaccgagtacccttgtatttatcaaaactacagttcaaggaacaagtttgttaaaaacgtcactcacctgctaaataagaatttaaataaaattacgtagctgcccttgtattctattgaggccagtgattttagtattaataatgatcagcccatacgtaaccggcccacaggcccatatttgagtgcgaggagcaacagagttatattaggtgcttggcttctagggtttctgaaattttgaagccgcatccagcaacac

SEQ ID NO: 84745 - DNA, 475 bp, Citrus clementina
  Intron number 1 from transcript clementine0.9_025791m (loc us clementine0.9_024235m.g) derived from phytozome v7.0 (c hr-ID scaffold_53; pos 415394 to 415868 reverse strand)
ggggaaaaaaggagtgatccggatcagtttttgaggcaagtaagataacccatcaaggtttttggattcttttgagcgtttgttttggttttttttattggttttgaggtgagaaagttgtttggatgatataaagcgtgtcctctggatgaacgtttgatgttattattgatgattggttgattgattgctgtcacagacattttgctgctttattcgtgcaactttatttatggatttggtctggctttttgttctatttagggattattgaaaatcgaggatattgatgcgaattttgattgctagaaatcctaattgatgcctctataattatctttccttttctttcatttttttttccagtttagattttttattctttttaagatgtatccaaactctcaaagttcttcttttgcttgtttctggattttcagcctaccaaagtgagaatattgatcaatctgcaact

SEQ ID NO: 84746 - DNA, 468 bp, Citrus clementina
  Intron number 1 from transcript clementine0.9_008861m (loc us clementine0.9_008861m.g) derived from phytozome v7.0 (c hr-ID scaffold_67; pos 1327715 to 1328182)
gactaagacgcacgcagagaaggacatcgatccaggttagtagcgttatgatctctgtctcctacttttctctccactacaatctcagtcgttgattcacaaatctccaaaattctaaattctcattcttcggtactgttttggatttgcaattagatctcagatccaagaatataaatttcgtttgtttcttacattttcctgcattttctcgccaactaaacgggacaaataatttaagtttctgttacgtggatcaattagaccctatgtaactagaattggatctgatctcgagtctaagcaattgaaatatactatcactagatttgttgctccttgagtaaaaggatattgtccgctactctactactattggttatttcgttgcttcactatgttgtatttgatttttttcaatcttatttttcaggttctgttggtggtagtttcttcttcttaattcaa

SEQ ID NO: 84747 - DNA, 445 bp, Citrus clementina
  Intron number 2 from transcript clementine0.9_008861m (loc us clementine0.9_008861m.g) derived from phytozome v7.0 (c hr-ID scaffold_67; pos 1328155 to 1328599)
tgttggtggtagtttcttcttcttaattcaaggtaatatttttcttcctttgctgtcaaattactcaatgcttgtgcatttttgtgaattcaattgcattatattaagctatatgcggtttatagatattttgagttgataagatcatgctattaatgcaagtttactgtaggcttgatgcaacctttttttgctaaagtatagtggaatgaaagaaatctttcatgcttaaaaacacatttgatgacttgatgatacttcaattgttgtcgcttagtttttgtttttttagcacttttctttttttatttattttcttgaatgtatgagtagaatgatctgtcggtttattcatttgtttattttgtgtggaaatttgtaacttatttatctttttatttgtgatataggttgttcttgctgcttctattgtgtccaaatctgg

SEQ ID NO: 84748 - DNA, 719 bp, Citrus clementina
  Intron number 2 from transcript clementine0.9_029136m (loc us clementine0.9_029136m.g) derived from phytozome v7.0 (c hr-ID scaffold_1; pos 12680818 to 12681536)
tgcaccatccagtacataccatcgaaaggtggacggtgggagatgagacgctgcggtttttctcagtttctttgtggcaaaagctattgagaaggcaatgcgtggcatttgccggtgatgtcgtactgttacaaagtaaagatatttcatcattgcaatgttcaatcaatccacccttatgaatcacttatttcaaaaggtactgcattctgtttatctcaaaagttaaaaagagtttgaagcgtacattgaacttagttaacgcaattcaaaaatgtttagtcttgtctccgctcatgcaggtgttgatgacttactggccggatctcaagtaggaaatcgataaaagagaagctatcgaaggtcgcagaatgggttcagcggactaagtctgctttacaacttctagtgcacaactcccaggtactttcagacaaagaaggttttcgttttcgcatggacatacgcgttacaccaaattttttaaaaattccctgctgttttcatatgtactagtgcttgtatttgtaccatgtatcaactagtttgttgtctctttcctttttcgccctctccaatgacaaataataatcatatttttcttcatgtgtgtgatctccatgttagactgcaccatccataattttttcagtagtaactaatgtgtgggaatatcttgcgcagtcgaaggaggcaactctctaggaattggaaggtgc

SEQ ID NO: 84749 - DNA, 759 bp, Citrus clementina
  Intron number 1 from transcript clementine0.9_001348m (loc us clementine0.9_001348m.g) derived from phytozome v7.0 (c hr-ID scaffold_53; pos 273814 to 274572 reverse strand)
gtcgccgaaaaccaaagatcgcgttactgaagaaggtccgatttctttttcttttttttttaattttatttgtttctaaaaatcttaaatcttattatgaacaagtttttttttttttaaatgtgattatagggagtgatgatcatattattgctatgtcagcattgagaaaggattgggacccactattgggtgaaatatatcgaaaagaaaaaaaaaaggaaaaagttatactttattttggtgataatagctctgtcttgctcctcaaattgattgagattcatctaattaagctagcttttcttttcttttctttttttctttttttgttatgttgagatgctaagtgcgtccggatccttttttgatactgatatggcaacgtgtgattggtcatttagaatatagaaatgtagcttttttctatcagtagcattgtgacgccaatgctacatgatggaggagttggtttaggatcctcctgagcttataaaaatatcacataataatttataagcttgaattttgcttagtagaagcttgcatttatgattttagcacattcgaagtcaattgcagacttaaaatctgcaaggtgatatcataatgatgaaagtcttgttctctgtatcttctgaatgaggtgacatttttgtttaaaattaccgtggtcaatttgtttgatacttatcctgttgtttgggtggtactttgattttagacacttcaagttctcagaattcatctggtccagat

SEQ ID NO: 84750 - DNA, 381 bp, Citrus clementina
  Intron number 1 from transcript clementine0.9_015865m (loc us clementine0.9_015865m.g) derived from phytozome v7.0 (c hr-ID scaffold_29; pos 679273 to 679653)
actgtgcaggaaaatactggttctccgtatttcaggttagtttttttttttcagaaaatctcaagtgtttccttggatgtttctcattctttctcggagatctagtctggttgtcaaaattttaacctcaaagcaaaagcatgttctaatttataagagaaaccgaagctaaaacatgatctaatttataagaggaaacaatgggataattcatctttgcaaagctcaaagctaaaggttgctcagtgtctgccttttcaaaatagctttttcctttgttctaacttggctgctcatgatcttttatataatcacgaagaaaataaccatattatttggtgatcagagtggcgaaactaataggagacaaaagggctgttg

SEQ ID NO: 84751 - DNA, 426 bp, Citrus clementina
  Intron number 1 from transcript clementine0.9_012066m (loc us clementine0.9_012066m.g) derived from phytozome v7.0 (c hr-ID scaffold_33; pos 177245 to 177670 reverse strand)
caagcaaagcaaaacgcacatcaaagaagccagatgtaagaagttacggagaaaaagcacgtctaatataataagttctgcgttttaacttgcttgtttttttagttttttgagtaaatgacaaacaaaacgttgattgatgagataactttgtggggttgttgaggcgcctaatactctttaatcttgtacctttaaaaggtggctgctttagcattacattaagattctgtttgaagatttagctctatcttcagcaccagaaactttcctcttgtaccttttacattattatttcctgggaagttttgaactttgtagagtttttggtaggtgggtcaagaattgaaggcgattgggttgatttatatctcagttttgtggcttattctttctgggttttggttacttattgtttggaagcag

SEQ ID NO: 84752 - DNA, 683 bp, Citrus clementina
  Intron number 1 from transcript clementine0.9_025941m (loc us clementine0.9_025941m.g) derived from phytozome v7.0 (c hr-ID scaffold_20; pos 962634 to 963316)
cttgttttagtggcacaaaaccaggtaagttgcttatgcagcatattcttcagattatcgaaagttcattattcattttttcctttttactttttttactttctaagtaactctcactgaataagaaaaatttattagaaagaaacgaagaatgaataaataaaaaattccagatgatgtaataaactgatcttgttatctcatagaatagaattaaatccggggaaaaacaaaaattcatgattgtatgtatagtatggtagtatggtataatatgtaatttcttttctgtaagggaggttatgcactgaaatttgttctcctaaattttattttctctgtttgaagcttatagccagctgggattcaaatgcagatataaagtaaacaaaaatgaggaaaaaaaaaaggccataatgccagatagatgcaaaatcgcagcttaccatctaacagtaatcaaaattaagctgaaaaaggactgaaaagctaacttacaaaagcggaccacaaattaattgcacaactcctgttaaattattattatcacaattattaattgttaccgctgcttctctttaatactttttttttgtttgatttttattttcttatttgaaattaatattttcaatttgttttctttaggctgcgggcacaggaattgcagcgtctcagctaca

SEQ ID NO: 84753 - DNA, 516 bp, Citrus clementina
  Intron number 2 from transcript clementine0.9_019875m (loc us clementine0.9_019875m.g) derived from phytozome v7.0 (c hr-ID scaffold_29; pos 2426634 to 2427149)
tacaaagctgggatagtacctgtgtcttacagaaggtgacccgtttgaatcctacaaatattcatattgttttttattcgggcactatttggtcctgtgtttaactagcaagcagttaaaatgattattcaaatcttctgaccttgttttggggattaattcaattttactcccgatggaaaatctattacatttattactttaccctgagccattgttcggtaagttcaagagcacaataacaaaaaagtgtttggtaaacaaaaaaaaaaaaatcaaactaaaagacaggaaaacacatatattctattacatgtttttggactttagctatttagtcgaaacattcaatagaaattagaagacagctgattttatcctacggctgttcgatgcatgcatcggtatactttcactcgatagctagtggttccaatttcacgacaacggagccttaaatagtttatttggttagcttctgatcctgtgttatgtgttggcaatgcccagggttcc

SEQ ID NO: 84754 - DNA, 721 bp, Citrus clementina
  Intron number 1 from transcript clementine0.9_014491m (loc us clementine0.9_014491m.g) derived from phytozome v7.0 (c hr-ID scaffold_82; pos 322890 to 323610 reverse strand)
gcctgtgctggtattaatttcatttcattttttattattcaatttctttctctattactgtttcgattttgaaattatgcatcttggattttatttgctgaacttaggtttaactgaagaaatttttaatttggcagcctgttaatttcccgaacttttggttgaattgaactgtttatgtgactaagggtgcgtttggtattgaggttaaacagctgtagcttaaaagtttcagtactaaagtgtttgttaaacactagttgatgtagcttaaaagctatattgatatgatttttcacttgtataatgaaaaatttattatatctttaataattttgtcaaaatattatttaaaatttatatttactgcatattattaatttttatttatagttacagattttttttcacaccagttataacttaaaaattacaataccttcatcccaaacaggacctaagttgagaacttttgtctctattaatattagtcataatttatattatatatcgcactcgtcaaatgctcggtttccaatttttagttattgtagtaagaagatactagtacaagaacataacttagtttgtattatttgtagctgaatcatgtttcttagtatgcctttttaggagctagacgtttgatgtttctttgtttctccaataatgtgtttaatggattaggtgttttctgtctatttttgcagtgcttctcgta

SEQ ID NO: 84755 - DNA, 783 bp, Citrus clementina
  Intron number 2 from transcript clementine0.9_009399m (loc us clementine0.9_009399m.g) derived from phytozome v7.0 (c hr-ID scaffold_1; pos 11105214 to 11105996 reverse strand)
agttggagcaagagaacaacactcttaaggttcactttttgcattatatattgtaggatctgaatcattaatcatcttgcattttgactagaatattcaatgtctgttttgctgattatagagtttaagtaaagctgatttaaagtgattctaagtgtttttggtatatgtagatacattaaataaatgtgaatcctgaaaatggattttgttaatatagcttagtgggataattgctgttgatgcaatatgtagttcatagattagaaaagtaaagaaattatagaaatagaaatggaaatttctggaattttgatgttttgattaggtagggctcataagactgaagcttattaactattatttattgaacggagtaattggattttgttgttgaagatctgaagaatttctatactgaaaacgagatggatgaagaacattgtgtctatttggttttgtttatgcttaatccaaggtcgcacatttgaagttttgtgtttggaccagagaaagacaacaattgatgaatgttgtccttatgatttttcaaaggagctgatgccagcaaatctatttaaacaccaagttttcgattgagtttcttgtgtagccacttttcgtttatatgcatattctagaaactaacagctgagccttaacgattagaattatatatattttttcccttgattgcatagtaatgaaactaggtacactgttttcttactgttcctgcaactggcagagggaaattgaggaactgaggttcaaagtggccag

SEQ ID NO: 84756 - DNA, 154 bp, Citrus clementina
  Intron number 1 from transcript clementine0.9_009399m (loc us clementine0.9_009399m.g) derived from phytozome v7.0 (c hr-ID scaffold_1; pos 11106112 to 11106265 reverse strand)
caccggatttacaggagctttagtgcgccgaccaggtacattgttttttttctctctttgattatttagtataaagaagattattgatttgattttgtataaagaagattattgatttgattttgtatgattattaagcgaagttgcgggaagg

SEQ ID NO: 84757 - DNA, 629 bp, Citrus clementina
  Intron number 2 from transcript clementine0.9_009091m (loc us clementine0.9_009100m.g) derived from phytozome v7.0 (c hr-ID scaffold_1; pos 933853 to 934481)
catttgggtacaagctttcgagtcgaaaactaattgtaggatttcagatctttaagattgcattttgtttccgtgaacttttaggacggttaatatgtgattaaaaaaaaaaaactcatattgtggacttaatgtaatatatataatagatgctttgttagctttgcttgtttaatttttatttctttttctataagaaaacctgaagaaaagaaataaaaaactgaagaaaaattctgctgtctatgatacctttgcttgatgctaggttccagcatatgcatacttggtctttgataataatagaaatttgaaatctcagtctactgttggactattgttagactttgaaaagggatagagatttaagattcaattgtttggtataccagggattttttttttttttgtttttggctgtacatgtttagagtttcctccttatcatgctgaaccatcaatagcagttacttccctatgtaaaaacgtatttaagaatgcataagtaactttttttttttaaatttgtgtcttgtgaatattcaaaaaaatttcaactcatgtgctttattcgtgtgatttggatccaaacagggactgtgttaggcattttattttaaactgtattt

SEQ ID NO: 84758 - DNA, 509 bp, Citrus clementina
  Intron number 1 from transcript clementine0.9_006063m (loc us clementine0.9_006063m.g) derived from phytozome v7.0 (c hr-ID scaffold_10; pos 365467 to 365975 reverse strand)
tcttcttgttcggcttcgtcatctggtagatcattgtgaggtttctaatttttagttttctatttttactgccaaaagtttattgttttgttgattaaacagttccgacccttgaaaccatacgattaaaatcaaaagtattgctgagaaatcaaccttgattgttaacatgtgatttgaaagcatcttgatgttgaaaggacatgcttttgtcaatatgtttgctgtcactagtgccgcggatagattaactagaaactagttttaaatcctttggctcaaacattttttattcattcattttccttaatttgatataaaaaatgttaagcacctaatgaattcagcagaaaagaaaaagcttatttccatttgaagcgcttgtaattttcaagtttataattcttcaatttttcttaagctaccaaatagattggtaaatttcttggacggtcctttcacatatatattctgcatattctgtttggtcagggaacaggccattgagg

SEQ ID NO: 84759 - DNA, 736 bp, Citrus clementina
  Intron number 2 from transcript clementine0.9_001620m (loc us clementine0.9_001620m.g) derived from phytozome v7.0 (c hr-ID scaffold_1; pos 10041770 to 10042505 reverse strand)
tgtgtccacttctcagccatctgattcggagtccggtatgaattcaccttatttgtataacatatatatttttttaatttttagttgtttctactttgcaattttatctgttttttatgtgaaaaacaaaaaagagagagatagactgagatgtgaaattgaatctctttggagccagaaaactcatgattttgggagcaatagttggcaggaactagcttcttcgataatatgctgaatttttgcttttgcttgtctatgtttgttgatacttttgcaaacgatggtgcacatggattatcattattacagctaaaaaatatgatgctgtaaaagtgaatttaaacaaattgttttaaaatgaagagtgatttctgagcatgctctatctcttcctctccctctcactttctttcatagcaagatttcttttggaagagtttgtcctctaaagcctgatcaatagttctgcatgcatagggttgtaacagaacaattaattctcgaggaatgtgattttgctgccttcatccattcttttgctttttcttgattttacctttgaagttattttattaattttcttgggaagaaaaagtcatgtagtactaatacactgttggctttcttctatctccattccattgcttctatctgccacttatccgttttttgatgtctcctgctgaaaattgcaacagcattggttcaaggaaacgacagcagtaataccttg

SEQ ID NO: 84760 - DNA, 184 bp, Citrus clementina
  Intron number 2 from transcript clementine0.9_010434m (loc us clementine0.9_010434m.g) derived from phytozome v7.0 (c hr-ID scaffold_29; pos 1114183 to 1114366)
ggagcttcctcaatcccgtcctttcggaaccgaaggtaagtaaaaacaaatcaaaattctgttttgtgattttcatttcggataacggaacggaaaacactttgaaaaaaaaatattattattattattcttcttcttttaaccgtgatttagagaagttgttttacaggaagaagaccaacgc

SEQ ID NO: 84761 - DNA, 939 bp, Citrus clementina
  Intron number 1 from transcript clementine0.9_016907m (loc us clementine0.9_016907m.g) derived from phytozome v7.0 (c hr-ID scaffold_10; pos 2993406 to 2994344)
ggcttcgttcgctgccgtcagcgccataaggtgaggttatacgtgcgattccaaattgtgcatgaatggatgtttgaaattcaatcttattttgggctttttaagaggcgttacaggcactgaaactgttcaatcttctttgtataatggctgtttgtacttgttgctgatttagtttcttaatattgtaattgttcttgtcttgagtgttgatggtgatgaaagatcaatctattatatatgtttgtcatttggagttgtaacttcagtagcttgcggccttggtactggattgcgcgttattttttttctttttcgtcagcttttttttttaaaaaaatacttgttgtggttgcttggtagttggtattcatttttgttttcatttttgcatcattgagctgggctggtacttgattcattttgaaattgaattgaattttggaataggttgtaacccgaattgcaaccaaaactgaaatttatatctgaatttgcaattctaaccgatccaaaactcgaacccaaactcaaccgagccgaattaaattcgctttcggtttggtttgcgttttgaatttgattgggttgaattctcccatccgaactgcttgtaacccaaactgaaacccgaacaacccccgaaacctgatatgcccatcccttagtatctatattccattactgttgatctgattagcctgatcttcaaaattcttctattctgtagctgatcttttattttattatcaaaatttattagaatgggatgagagcaagagttctattcaatattgttgttttcaaatctttctgtctttttaatgattttggacttgggattgggaataagtgtgatacacagtgtatgagtgattagaggcaaaaaggatcgttactgatgttctagtctaatctcagggccaactgttttgactg

SEQ ID NO: 84762 - DNA, 881 bp, Citrus clementina
  Intron number 4 from transcript clementine0.9_011834m (loc us clementine0.9_011834m.g) derived from phytozome v7.0 (c hr-ID scaffold_20; pos 273150 to 274030 reverse strand)
ggataagatcttcttcacaggtatttaattgcatcaatgcagccatttatgcatatctcccaccaaactggatggagccagaaaattggcccacaggagtaattgtgtttatgtgagctatttttcattaagtttgtgtcctttggtaattaatgcaacaaattaattagtgtgatctcataaattataattaaaaaataaaaaaaataaaaaaaaaattcattggggattgctagtcttatgctggtggacgactattttaaaatctatggaaggattgaattgaatggtttagtcattagtgtttattttttaatcaacaattgattttcaaagaatatcaacttttttttgaaagaagggttatcttttaacttttttttttgctgtaatttcttagtttttacatcttttatggtaaacccaccatattaatttttattcactaaaaagtaactccaagattgtagattatgatttttcaccttgattaagtcttagttacttgttttttttttcccttaaattaccatgcatttcatccaatcacattgtaaattaaattaattcccttgaaagttttgagaagtcaaactaactgaattatctcttcaagtgcaaatttagccatctaggctgcaatacttgcagactaattttatacaggtagaatgcagctatccataccttcatcatatgtctcagtgatatttgctagctatcaataccttctattttgaagctggctttaattcattagtgatattcatacaaattttgtttattgttcataccatattaaattaatccttttttattttttattttcttgattgcaacttggaaaaaaaaaattgttaggtagtacaagagtggggaga

SEQ ID NO: 84763 - DNA, 587 bp, Citrus clementina
  Intron number 1 from transcript clementine0.9_010055m (loc us clementine0.9_009677m.g) derived from phytozome v7.0 (c hr-ID scaffold_53; pos 116963 to 117549)
gaagtaagtttcttggttaagccttttgtattctattgtttgattgcctgataactgtagtgtcaactaattcgtttgaggattgatgctgtctaagaagttgtttctcgtaatgttatctaacctcatgaagtaatccatgccaagggtaattagacaagtggcagtttacatgtcagattagcagatatgttgtatgtgaaagtttcttctgctgctagtacaagtcatgctgaatcataaatgtctgcacatgtcaaacacaatactatgtttgaaaatgattgacaatacgtgccaaaaacatgagaattcttttgctttatttcattaagtagttcatttctttttgcacctccagacttcatagttcattttgtcatcttctccatcttggctaaatctcctttgtttgaaaaaatggtcaaaatctagttagcagtttccctgaggttccattaaaagtttaaaacccataattggatatttaatttgaatttatgtcaacaattccaaaatgcaaagaaattacagtattgtttcttgaagcagggtatcaatcagaagattctttccttggattacaa

SEQ ID NO: 84764 - DNA, 416 bp, Citrus clementina
  Intron number 1 from transcript clementine0.9_013497m (loc us clementine0.9_011146m.g) derived from phytozome v7.0 (c hr-ID scaffold_33; pos 335735 to 336150)
acttttggtgtaatttgttgtactgtgattgttttaatattgattctagttttggcttctgattttgtgcttttgttgtgtttatggttctgtggtaatttgattgtcaagattttgctttcgttgatcaatttgttatatcccgttttccaattttctttttcttggcttcatttgtgaggaaatttagttcagcatgaatttggcagtgatgttatattttctgtaaaaattctgcttctattttgcctctgtattttacctgtctgtctcatccgaaatgatgatgtagcttatgttaattgctgtgcaatattgtgataaaatttattgataaaatgtcaagtgaggaaattaactctagtcctggtttcttggcagcttgtataaaagcgatacggcagaggttgaatctt

SEQ ID NO: 84765 - DNA, 629 bp, Citrus clementina
  Intron number 1 from transcript clementine0.9_016454m (loc us clementine0.9_016454m.g) derived from phytozome v7.0 (c hr-ID scaffold_10; pos 4628797 to 4629425)
aggaaatccatcgcgaagctttaagtttgtacctttatcatccttattcttattttactcgccactataacaatagtacagagctttatgttatttttttttcctgttttgtttgtctcttgtctttgattttgtttctgagggttttacttgtttttgtgggtttaattgatatggatatgtacgttaatatgcctgttataataaattcttttgttttttgagctgataaaattgatatttgacaggattttgtttgggtacaaaatctaattttgaaactttattatttgtttgcttatggttaaatgtgaatttttttttaatttcactagtttttggttgtacatttgagtgtagattaacagaggaataatttcttcttctttttggtgcgtgtatgtttgtgtgttatttatttttttcatttttttattttttggggtctaaaacgaaaggggggtttcctgtatttttgttgaagatcttgtactgaaagtagcattgggagaaagtttaattaaaggaagtatttgggtggttgttttatgatattgtagtttgtacaacgactgtaacctagatctttgtcagtgtctttgaagccggaactttttgagggattgcgc

SEQ ID NO: 84766 - DNA, 1042 bp, Citrus clementina
  Intron number 1 from transcript clementine0.9_031172m (loc us clementine0.9_031172m.g) derived from phytozome v7.0 (c hr-ID scaffold_38; pos 1336654 to 1337695)
gatctcaacgtaggtgaaaatcgattctctggtatgtttcctcaatcaatttgtaatatctcttccctcgagtggatttatcttgcattcaacagatttagtggaagtttaccatttgacattgttgtcaatcttccggaccttaaagagcttgctattagtggaaacaatttttttggttctattcctaattcattgtccaatgcttcaaatcttgagatccttgactttgcccgcaatcaattcaaagggaaagtgtcaattgattttagcagccttaagaatctatcgtggttaaatttggagcagaataatttggggatggggacatccaatgatcttgattttgtaacctttctaactaattgtactagtttgaaagtgcttagtttatatgataatcaattcaaaggagagctgcctcattctatagccaatctctcgtcgacaatgattcacttccgcataggatcaaaccaaatatatggaaccatacctcctgaaataagaaatcttgtcaatctaattgcactcactatggaaataaaccaattacatggcactattcctgatgtaattggagagcttaaaaacttacaaatattatccctgtctggaaactttttacatggaagcattccctccggccttggtaatcttactaaattggctaaccttgaattgagctccaacagcttgcagggcaatatacccttgtccgttggtaattttcagaatttgataggcttcgatgcctcccataacaagctcaccggtgccttgccccaacaacttctcagcataacaacactttcactttacctagatctgtctcataatcttctaaacggctcccttcttctacaagtgggcaacctaaagaatctcgtattgttggacatatctggcaaccaattttctggtgtgattcctgttactctaagtatttgtgtaagcttagaatatcttaatatttcaaagaatttttttcatgacgtcattcccctttctttgggtttcttgaaaagcattaaattgttag

SEQ ID NO: 84767 - DNA, 996 bp, Citrus clementina
  Intron number 1 from transcript clementine0.9_022276m (loc us clementine0.9_022276m.g) derived from phytozome v7.0 (c hr-ID scaffold_1; pos 1677652 to 1678647 reverse strand)
aagcttctcactctcgtctccacaagcgcttcaaggtaaaaatttctaataattatttatttaataacagttaattattataattattattttattgagaaatggatgtgaaaattaaattaaatttcggttatagttttgcttcaccttttaaaagtatgatttcaattttgtagcacaattactattattcttcactcttcattccattaagatcttacttcaattcagtgaacaaattatagttttgtttctgtgaatgatttgaatcattgtaaagagacagttcaatagtacgaaaaaaaaaattcaaattatagttctgtttctgtgaagaaatttttgttcagctaattacttaggtatgatgttgatttaagtcgcaagtggctaataatatttttaataactttcagtaggtgatggttgttgcacaatatttggatccttttgtagtttcagtgtatttttaaagcacaattttgaagcatacctgctctttatttatttggctaatgaagaaatgacagaattagtattattgataaaattttattatgatttgattttgatagaagctcctgagtatagttgttgtataattgacattttgagtttcaaaggaatgaattgtgcaacatttgaagattcattttgaatgtgattgaatcactccataatattaattaattttccaaactgattcgtcgttgatcttgataaatcaatgataattattatgctaatgatttcttaatttttcatgctaagtactaacctcctacatgtcatgggcgttttggttgaccaatgtgtctgacaatatggttccattttcaaaatatagaaaaaaaatttttggtcattacgaaagcggatcatttggtacaggctgtatgttattaaaaaaatatgttgacatgggcgcttccaaataggtagtaattaatagtctgtgtgttaatataatagattcaaacacaaacaggccagcaa

SEQ ID NO: 84768 - DNA, 839 bp, Citrus clementina
  Intron number 1 from transcript clementine0.9_013541m (loc us clementine0.9_013541m.g) derived from phytozome v7.0 (c hr-ID scaffold_20; pos 3678361 to 3679199)
gggtactctgtttttcctctgcttctggttatctattttctatttgtttatatgtgcaagtgttaacttttttttggagttaaacttttgggttgttttatcatcattggttcaggaattgtgttatttcgtttgtgtgtgttgattaattcgttttggcatctgggtttttgtttcttttagtgaattaagtgtccttagttgggaatttcttggtgactttggctgtttctttgttttaggtttaaaactaatcgagatttagtgatggttagcctggattcatgtgaattagctgaaaatggaaatttagttacttcttttgtggttgtcttatggtctttcttgggttcatgacctaaatggaaagctttttgaatactttggggagttgataaatattcgagctgttgatcatagaaagagtcataaatggtttcttcccattctgaagatggaaactagttatgttgttgaagtgtggtccactaattctcccttattggaggttgcaagtgcaaggtttgttggagcattcacgtgattggacttcattaaaggattttggttagcggtatctttgcctgtatagcatgttaaagtgagtccacaaaattggcgtagctgtgttgcataattggactttcaaggattttcacaaggtttactagtctccaaatattacaatttttagttgttgatgtaaaccgccatcagcatattatgtcttaaaaatgttaatgcatattcagaaattggaacagaaaatttatccatctagtgaccaattaaacataataatggctgttttcttattgcttctttgattacgtgcagat

SEQ ID NO: 84769 - DNA, 808 bp, Citrus clementina
  Intron number 2 from transcript clementine0.9_014854m (loc us clementine0.9_014854m.g) derived from phytozome v7.0 (c hr-ID scaffold_43; pos 173334 to 174141 reverse strand)
tgcctctttcttactatactggaatcctcggtaaactttttgtttgcagcaatttatgtaagccggttatgtttttttgttcatctgaaatgtttttgatatctcaatgtgaagtagaacattgtgtttggagtttttgcatgtcttatggaaacatagaattgtacctgaatttttgggatccttttcttttgaacacttgaatgtactaactctttttttcccccttttttatggatatgttgctaaattggcaaatttattcattacaaaactttgctatgagagtttaatccttgcaaatgttaatactgcaaatagagtgtatctttgttcagtttaatagacgtgtctccttctgcctagtccaaaatttcatcattttcgccatattctgagcaacacactccagctagttagttcttgtcgcgttttctggttctgtgagtaagccaagaattacattttttacctcgaaattggcgatgtcttttgctttgatggcttgtgagttgagagtgttaattggagagtcacaaagagcgcaatgcccacttgagcacctagaatacttggacatctgttgcctcagcaaacaagacctctgttttatggactccaaaaagttatttgttacaaagaacaaaacagagtccatactatatttttctctttgttatagaagtgtgaaacaagattctatatttaatattctaaatgattgagccatttagttatgacattcggctgtactggggtcaatgatcaaagtcggttcaaagtgatataaatttataaattgataggt

SEQ ID NO: 84770 - DNA, 756 bp, Citrus clementina; identical to SEQ ID NO: 83225
  Intron number 1 from transcript clementine0.9_011500m (loc us clementine0.9_011500m.g) derived from phytozome v7.0 (c hr-ID scaffold_65; pos 13958 to 14713 reverse strand)

SEQ ID NO: 84771 - DNA, 976 bp, Citrus clementina
  Intron number 2 from transcript clementine0.9_002143m (loc us clementine0.9_001962m.g) derived from phytozome v7.0 (c hr-ID scaffold_98; pos 44455 to 45430 reverse strand)
gattcagtcaagtgagatcaaggacaagaaggttagtctcagtctttttcatcatgctttcctccatcttccatttgcgtgactgcatagttctgagatcaagagatgtgctattgtctgggaattattaattttaattgttttggcttggttaaattctgctcatgcatgctcaagtaccgtaaccgcattattttaattagtctagtacttttgaactttagctgtgctgccattttttgtttttgtctttgactagtattttaactataaaattgtgtagcttagatgtgtttttggtacatcaaacttgaaacattcctcaaaactaaggaaaacatcatgtgttacttatacagttttgcctcacatgtctttgtacgacagttgatttatgcttctagggaaatagacaacaggattggtcatgaaagtagtttagtaagggaaagctattaaagatatgtcttatgattctaccacagttgttgatgacttaattttacattgttgaaatcaatatatttgctttcatgtattggtctaaggctttaataatttatcattgtgttgtgtgcaactccttgttgcatagctttatgaggttaatagttgagtgaactgggtagtttgacctgtgctttaatattatgtttctataaacaacatatacacactcgaagagtgaatggtgcatccatctacataggctttatgatgccaaggatttttagtgttttcatttttttccctatttattttgtaccttggcatgattcattttaagatcgactaaagagaataaatgtttgtgtcacatctggtatccaaggtctgctatagatttttcaatttctttaatagttgtattgatttagcatattagctattttatggagttggggtcggcagttaatctttttcttttggtatatgttgacataggtcagtgcctcttatgagcaggctctggtgg

SEQ ID NO: 84772 - DNA, 661 bp, Citrus clementina
  Intron number 2 from transcript clementine0.9_013547m (loc us clementine0.9_013547m.g) derived from phytozome v7.0 (c hr-ID scaffold_20; pos 3619479 to 3620139 reverse strand)
tagagaggttaggtttcactttcttggtagtgaattatcttttactgttaccctgttaccatggttaacaatttcttttttggaattgtaccattatttcgggaagttcctaataatatggtcaatgttttggagagttaattatttgattagttgttttctatatatggaatacttttaagctgttaatcagtgttaagtataatttagttgacaagcagatgtcttggagaagtgttatgccattttatgttgtgataacaactatctcgtttatatatttttgtaagatattaaaaactgcaaatgacttgagtcgaaggaagccatagatattgctcagcttctttggtatgcaacttttacaatctcaactctagttgaaaattggttgagattgatgggagtgtactcatgttgttgccacttatcatggatctttagtagggttatgtaggagagctttatggggattttctcttatcatttattttcttctcatatttgcatgctttttacctcttttccatgaaatcaagttgtaaattgattttctttatcggctaaggctagaaacagtcaagcttgtcatagtccaaacagcttctttgcagaagaactctagtgttgttttcatttgtaatgcagggttctgtatcta

SEQ ID NO: 84773 - DNA, 459 bp, Citrus clementina
  Intron number 1 from transcript clementine0.9_013547m (loc us clementine0.9_013547m.g) derived from phytozome v7.0 (c hr-ID scaffold_20; pos 3620310 to 3620768 reverse strand)
aggtatattgagcaactttcctctatgcataaaatgactctatagatggatatggtttttgcttttctgatattagttcatctcatgtatttaataggcaatgctctcggactgtaattgtttatttattacggcccactcaaaacaggaagataactaaacttcagtgtctgttgaagggacactgtcccatgtgttttgatcaaggattatttattacattataaggaatctacttttgctatgatctcttattattttattttaaatagccattgatttggctatactcatcttggaaaagtttggtgttggtattgcttaataaagtctttgaataatggcggggtgagcaagtgattattttatcttgaggttgattgatttacatttggttcctgtcagtttatttctagataattaatagtcaaaagtaatcattttttctgtgtagtgcag

SEQ ID NO: 84774 - DNA, 1032 bp, Citrus clementina
  Intron number 1 from transcript clementine0.9_005000m (loc us clementine0.9_005000m.g) derived from phytozome v7.0 (c hr-ID scaffold_82; pos 312021 to 313052 reverse strand)
ctctcttcgtgtctattgattcactctcaattttagtacgtgttttctttctctctcacgttcttggttatttatttgttatttgtgaaaatagaaacgaaattcgacgatgattgatgatgttgaatttgttcaggaataaactgtaggccggccccacttgagcttgttttaattaatttattgttataatgcgatcgcgaagagaattggaatattcagatccttttttttttcttttcctatatgttatcttcaagaattgaactatttacggggctttgctactgttttttttttttttttttaactaagatttatgattttgaatctttgattatgtgatatgcgttggtgcttcatgtttaattcttgtcgtcgtgcaaatacgaagagatcaaatagtttgattgtggatatattggattcttgaaaattgagttttagacttagagagaatgagaaaccgagcctagttttcctctaaaactgaagaatagaaacgtattggaaactcgggtgctagttggttctaactagtaaaacctcttatgcatttgcggatcaaatttcgcttgtctgtgatcagtggtttacttttatctaataattaaagagtaatgatatagccacaaactcttgtacaagataagtttatacaagagtttgtggttgtatcatcactcataattaaaagaacagtacatggcaagagctctgtgtcaaaacactattctctttttggattctttgatggtatagtttacaagctttgtctaaggttagtattacagttttttaatcaagaagagctatggtctttttggattctttgatggtatagtttacaagctttgtctaagattagtattacagttttttaatcaagaagagctatggtctttgccgctcaatggtgtttgtttgcttttagtaatttatgatgttgggtttgttagaaatgacctctactgctagacttatctattttgttattggtttttttttttttttcacttttctctggaagga

SEQ ID NO: 84775 - DNA, 762 bp, Citrus clementina
  Intron number 1 from transcript clementine0.9_007390m (loc us clementine0.9_007390m.g) derived from phytozome v7.0 (c hr-ID scaffold_1; pos 2986523 to 2987284)
ttgatacaatcaataaagctatttgtctggtaagcctttcctaaccgacttttttttattattttaattatagtctgagctcgactcaatcacctctacattctctgcatccacatgagtggagtattcgaacttagaactactttttcatgttttagtattttatatttttatttttaatgtagacacactagtaaggtgaactaatcctaagccttaacaaagttatttcttaccaatgaaactagaccttaccttagacctcttctttttactcaagaagttttactaatttgtacataacatttaatataatattctatctttttcaaaacagtttacgctcatagtcattaaaactgttgtacacatctttcttcaagataagattaacaaaccagagcaactaataaatttgtaatatgtgaattaataatatttagttattctatttccacattgaaaggaaaaaaaagtgaattaaattgttgatgaaatcatcatccattcattatgtatcgcattagtcaatttggacctacgttttttaacaagtcattggtaatgtattggtagatttgacatggtgcattgaatctaattctactagtaaaattcaaaaggtgccaaaaaaataagtgttgaagtcgaatttcattaagttccattgtgaataactgtaacatatgaaagcaaaacaacaccttacacactatcaattttgcaggctcttatcttgggagcagcagacaccacaacagt

SEQ ID NO: 84776 - DNA, 999 bp, Citrus clementina
  Intron number 2 from transcript clementine0.9_034225m (loc us clementine0.9_034225m.g) derived from phytozome v7.0 (c hr-ID scaffold_53; pos 932406 to 933404)
tccggaacttattacaaagggttagttttgccattttcgcttactcttaatttttgtcctttaattttcagcatagagatacctcattaacaattagaagcttcagcttaactatgaaagcccagaaactgaactaacttttacttagtgatttgattccgcagttgcagttagaagtcattgcatgcatacagctactcaacctatactctattctagaaaagcaaactttctttgtgaaaatattgaggaaaattttctgtctcaagttaagtggttcatttgtctaagagtagtgctaggtgtagagaagcacgagagaaagacgagagaatgttattctctctctctacccactcattctctctctattattttcttctttattttcctctgtctttctctcgtgcttctcttcaccgagcattttgctttgtctaaaagattgttaaccttttaagaagttcataacttctacttttaagtaaaatcatgtggctcacagatagcacacccaagaaattttgttatatttaacttgtgccaattacataatgtcagtctttgtttgtctcaagatttattagctaaattctttttattaatagaaattgtcaggcctgtggacaacttgacttttaatatgtaatatttatatgattattatatctggacattatcggtcttcaaattgtgttttgtcttacatgttgtcttgccaatgcaaagatcactttaactatacagaattgttcctgatttccatgtccagttatatccaaaatacaaaattaaagtttaaagatacgaattttagatacattttaatattaaattatagctagttcccaccacatagtccaaatatacattttaaaatgtgtagacattcacgtgaatgtacaaattattgattcaagacaaaaattgaaattcaatgaagtacaagattttggttttaattatttcgcatttactggctttgcctcagggcttact

SEQ ID NO: 84777 - DNA, 707 bp, Citrus clementina
  Intron number 1 from transcript clementine0.9_031169m (loc us clementine0.9_031169m.g) derived from phytozome v7.0 (c hr-ID scaffold_82; pos 922882 to 923588)
gggtcaccggtacctctctttgttgaagtcaacaccaacaatttgttgaaaaataataataattaaaaattatatttttaattattttattcttagcatagtaattcatgtctcctataaatagctaaggatttcattcagtcgaaatcatcccaaaattgttaagcttataagtttttaagcttttgagagaagtgagagaagtgtgtctggggaatttatctttcctgcagtgtctgagagtactgggtatatttgggtttctgggaagtgagattcgttactcaaatattgtactctattaattgttaaataaacaattattctttcttgcctccgtggatgtaggtttaattaccgaaccacgtaattcttgtgtcctttatttttctataattatttggtgcgcttgattccgcattctgcgcacaacactctttctgtatttctgaagacaaattaactgtcaaagttagagctaaggatcttgatactaatgaaataatcgagatagtaggagatttgctcgtcggagcagatgggatcctctcatcaattcgtcagagcattctacctgacttcaaattgagaattgtgcttgcttgtgaatatcaataaaagtaattaatttttgagtattttgtttcataaatttcaatgtgtttttaataggtacacgggatactgtgcgtggagaggtgttttta

SEQ ID NO: 84778 - DNA, 508 bp, Citrus clementina
  Intron number 1 from transcript clementine0.9_018148m (loc us clementine0.9_018161m.g) derived from phytozome v7.0 (c hr-ID scaffold_1; pos 1743738 to 1744245 reverse strand)
ccaaatcatcactgttcaatcaagattcttgtattgtaagtacactagatcatcatcttccattattattattattattattacctttcattatatttcctctttatatcctcatcatcacttgctttttaaaaagattttattttctttttcttttttttttcgcgttgcagacccttttgtacagttttaatgggttctttctattatcctattagttttaaattttctctctttcccttatccttggtctgttttgatgactttcaagatttgaccatatgggtatgtttgtttcttgagagagagagaaaaaaaaaggaattgtaatttacagtctcttgttgaatagatatagcacagtcaatagttgtggaatctcgtgaattttcttctatttgaatctgccaagaaagtccaaagtttatttaaagaaattacttttcacaaaatctgctttctctttgaaacagaaacaaagggattgattcaggaaacaagcatagtt

SEQ ID NO: 84779 - DNA, 341 bp, Citrus clementina
  Intron number 1 from transcript clementine0.9_003149m (loc us clementine0.9_002163m.g) derived from phytozome v7.0 (c hr-ID scaffold_1; pos 3698717 to 3699057 reverse strand)
aatctttcatctctggcttgtgttcagccttcaaagtaagttcttgtccttctttattcttcttcttattcactgctaatactatgatattttaccttctgttttctttttcgtttttgtcccgtttaaatgctgcatgctgcttttgttcttgcgtgctcagctgatttgctgactgtaaatcattttcttgctatagattctactttttttattactaaatttgatttgctttgcttcgctatagcatgctttgtaattccagcctatcttaactagttgcagttttggattttatttaatcaggttttgcttctgggtacttccaaataatctgctaa

SEQ ID NO: 84780 - DNA, 576 bp, Citrus clementina
  Intron number 1 from transcript clementine0.9_015153m (loc us clementine0.9_015153m.g) derived from phytozome v7.0 (c hr-ID scaffold_1; pos 4943097 to 4943672 reverse strand)
ctcctaataattcttctgccacttctggaatcaacgtatgactcttttcttcttctttttttctttttctctttgctttattttttcttttttaacttctttcttgttcttcctttttaatgaaatggacttgtttgtttgtattttgtgtatctagtgttttagcaagattaggatatggatttttgtctgccaattttggtaaccatgaaaacgttttttcatctgtttctttgttttatgcacccacgcaattatcggcaaacccaccagctatatagctttcattattgattcatgaagttttttttttttttttcaaaaacaagaattattcatattttgttgggaatttatcagctttgtttctccagctagtggtagaattttctgacaaatcttccatacttccccatgaatattctcaaaatccgaaaatattatgttggggtggggtggggtgggttgtctttgatattcctggatggcatttctgtgaaataaattaaacaacgagggtaatttggtcaaaacacatggttttgtacattgtggtaggagagagattccgtgcac

SEQ ID NO: 84781 - DNA, 377 bp, Citrus clementina
  Intron number 2 from transcript clementine0.9_030944m (loc us clementine0.9_030944m.g) derived from phytozome v7.0 (c hr-ID scaffold_29; pos 1275143 to 1275519 reverse strand)
aaaagtacttgccaattgaagaagcctggggtaagtgattttcaatgtagacattggaaaatgctaacagaattaagtttgtagacaagtcaacaattattattattattattatttttcttgaaatgtccttgtctgccattataattcttttcatacaaatcattgcaacaagtcaacaaatggccaaaataattgaatccatatgcagcatcaaccaaaaaattaataaattacgaaactcatttttaagccacatatgtttatcccattgcatgtcaaaattttatacattcaacttttgattttttgatgtgctttattgttgctgtttcccaacaggtgcaagttgagatagcaataacggaagggaaaga

SEQ ID NO: 84782 - DNA, 625 bp, Citrus clementina
  Intron number 1 from transcript clementine0.9_030547m (loc us clementine0.9_030547m.g) derived from phytozome v7.0 (c hr-ID scaffold_1; pos 7844725 to 7845349)
cgagaggtacagggttcgatcccctgcatctccaatttatgcatttatttttaatcttatttttcagcgtaacaagttgtttgattttcgggttcaacatttgctgtcaattacaggttttttctaatcttatttagtttttttttttttctaatttgttgttactttcaaagatttcatatgttcaattaatatgaagacttagattaggtctttctttacatttgaattgactaatcaaacaaagaaagtcgctgttgcttccaaaatttttaattttgcttcattgcttgtgcttttttatttttttggcaagttgaatgagccggcttcatttgtaaaataatttaaattgtaaagttcaataccatatatttcaatgtctggaaataattttttgaacaagcaactcattttgtttgtctttagagtctttccttgccttgctgattcaaactttgcttaccaaaaatctctccgaatctctccctgtgttgccttatactttaatcaagaaaaccttttgttgttttcaatagttgatctcaagaacatagtagtagttggccacttttttgcaattaaaatagttgaaattggcgtttctattgttgcaaaagttgct

SEQ ID NO: 84783 - DNA, 432 bp, Citrus clementina; identical to SEQ ID NO: 80008
  Intron number 2 from transcript clementine0.9_012436m (loc us clementine0.9_012436m.g) derived from phytozome v7.0 (c hr-ID scaffold_1; pos 11584980 to 11585411)

SEQ ID NO: 84784 - DNA, 631 bp, Citrus clementina
  Intron number 1 from transcript clementine0.9_019974m (loc us clementine0.9_019974m.g) derived from phytozome v7.0 (c hr-ID scaffold_53; pos 865156 to 865786 reverse strand)
agcttgaaaaggttctttaatttaatctccccttatttaaaactttgtgtataaatgtacgcatgcatgtgtgcatgtatcatgtacgctatgtattgtgttgtgtaaaaagagatatacgtacattattaaaatttgtgattttgatggtgtgatatgatagaagctattaatttgtctgctctgaggtattaagagatatgaaaggtggggttttatttgtggatgtaaagggtatcactgaaggtattctatattaattgtcagttaatcataattatttatatgtatcatgtattattagtttgtgcatttgtaatattttttacgatgtatgtggtgtaggtcaatttttttttttttttttttctctatgttgtatatcggtcttctgagaaaatgtgcctgacattagctattatgatttaaagatttgagttttttattgtgtgggaaccgatcattactcaattggggcgtacaagattgttttaggcttgagtttttataatctttctgaaattgttgtggccagagtggaataaactttaggttgttctataatatgattcgagttttgctggctgggaatggggctaattaagtgattgctttttctttcaataggtga

SEQ ID NO: 84785 - DNA, 492 bp, Citrus clementina
  Intron number 1 from transcript clementine0.9_003081m (loc us clementine0.9_003076m.g) derived from phytozome v7.0 (c hr-ID scaffold_23; pos 3806533 to 3807024 reverse strand)
tgaaaacagaggaaaaaaaaaaagaaaaaaaaaaggtgcgctttttttttcatttattaataataatattaatgattattattattatttttgtgggttttaatattttgatccgaagcacagaacgcatttcattttacttcacagtttctgtcgtactatgttcaaaacccacataaacaagacagagatttttgcttctacaaaatctcaacgcaactctagtactaaaaaacactaaagaaaaagagaaaaaaaaaaaaaacagatttttttaaattttcttgtatttttctcgtaattagatctattttaagcataaagctctttacttcaggtatcgttttcaaaaagttttaatttgttgccttttaggatttttttttgaaaaatattttttctgggttctgtacagcatgcaatatttgcttttgttttgctgattttgtttactgggtttgtcttctgtgttcacaggcttaaagggtttgt

SEQ ID NO: 84786 - DNA, 552 bp, Citrus clementina
  Intron number 1 from transcript clementine0.9_021950m (loc us clementine0.9_021939m.g) derived from phytozome v7.0 (c hr-ID scaffold_20; pos 1470148 to 1470699 reverse strand)
aaacagcgcacgtaagcaaaatctatcttcatttttaaatttctgccagttttattatgttaaaatttctattacttgaatttctattatattattcggccttgtttggttgctgaggaaaacaaaaaattaaaaaccaaaaacatattaacataaaattattaacgtattatatcaattcgatattttatccttattgtttttctgtttcagcaactcgccgcgaaaggtacgagtttgattgtttccttgttgcttttcgtgttgttgcagctttattattttattcacgcggtttttcatttgatttgattaaattattagttggtggcgaatttatttgttagattttttctaagttttgaaaaatccatgttatttaactgctttctgggttgtgctttgcgttttttgcttttctgtgatgtatctatatttatgttcaatgacagatttaatagacaagtgagtgattccatggaagctaaaactctatcacatggtgatctcttgcttttgtttgaaatgaatttttgggtttcttaggatttg

SEQ ID NO: 84787 - DNA, 569 bp, Citrus clementina
  Intron number 1 from transcript clementine0.9_010345m (loc us clementine0.9_010345m.g) derived from phytozome v7.0 (c hr-ID scaffold_1; pos 10204189 to 10204757 reverse strand)
gaaggtgttgtcaatacctttctgttgcatttgtgtatatacatgatgcgcttgtacatgcttgtagcatttattgcacaatagtttagattagctttgtttgtcgttgtggtgaaatatgatttatggtttgcttacttgaaaatcagaagtgatggctggctaaacaaattatatgtgatatataagcatattaatgtttgattttaacgtaatcatttgtctttgttttgaattgatgaactgctttgaataatgatgaacaactttttgctttgaattggggattgtggtttagcaagctgtgtatttcagtttgctattgtgaactggatactgagtgctggcaaatgcatacacaaagatgtttgttctgtgtacttccatttctccttgactgatttgtgagattagaaattcaaaattcttgagggactgctgcaatgttttaactgcttgttttctttaattgtttgttacttctatagttagttggaagacggtgatgtgcctcaattctacatcacagctcgtttgacctctttcaccggcatcatattgcagggaat

SEQ ID NO: 84788 - DNA, 681 bp, Citrus clementina
  Intron number 2 from transcript clementine0.9_030876m (loc us clementine0.9_030876m.g) derived from phytozome v7.0 (c hr-ID scaffold_63; pos 566470 to 567150)
actgcctccggtgttatcaacatttcttaccaacagtacgtaccacaattaattatacatacagctagccagacctatgatcttttcatttataatacacatgttttgtttttttaatctatgttgaattcaatatttatcaaactgcaggatttgaagggatgggtgccacattttgaagaatattggttgatcaatattatattttcacattgtttttggtcaatgatcagttatttgtatcagcagcaaactatcgtatcacttaagaaatgaatatttaaacttattattatatattatcattgccgtttcttagcatttatgtctatataaaaacaaacctttcaagatcatgtcacgtgtgcgatcagtgtccagtagtgaggaattttagtgcctaacaaaattaatccagtgaacaacccaggactggactgcgaaggatccatgatcttcattagttgtacgtgcaaaatttgatttttgacattggtggagcggccaccaatgatgtaaagacattaagtgctagtattttcacataagcattaagtacaggtgatatttggtcactcgatctattttatcagctctcatttttcattttttattttttattcttaaaattgtccttattaaaagtaaatatttctttcttctcttttaagctctcaataa

SEQ ID NO: 84789 - DNA, 391 bp, Citrus clementina
  Intron number 1 from transcript clementine0.9_015349m (loc us clementine0.9_015349m.g) derived from phytozome v7.0 (c hr-ID scaffold_5; pos 2076563 to 2076953)
tagctaaagccattggtgctgagtgggactatcaggtgtgttcatgaattcattcgtttatttactttgttaatttttaagagtagtgctgtaactcaaatggttaaaattcatttttttttcatcccgatgtatacaaaaaattgatcctttttgtccatgattttgggtttgtgctattcccgattgcatttctttggattaactgtagtttacgtgaaaatggtcttccggttggcattgataattcatttgatttcgggtggtgactgcagggaattttcttcatttagaattgttattttctcatttaaatgggtttttcttcgagtatttatgttttttctttgttggattctttaataaaatctttaaccatcgtagcaaacag

SEQ ID NO: 84790 - DNA, 820 bp, Citrus clementina
  Intron number 2 from transcript clementine0.9_015349m (loc us clementine0.9_015349m.g) derived from phytozome v7.0 (c hr-ID scaffold_5; pos 2077104 to 2077923)
atctgacaagtggtgtgcgtatgttgttcatgcgttcggtgctttattcatagtgatttgttgtttcaatatttaatttttgtcctgagtattaccggcattttctcatctgattttctgtggcgtacttctgcaaattataatcaacaagtcagattctacatttaaaccctataagagtagaagattatatcttttatctgatcaattggcatcataccatttactcttaaccctttctattactaagataaggatttaagatctcacaagcaaaatcactttgtcatgtgcatcaagtcaaatcctatcatttcaagttggaagcattgaatgcatttttctgtacctgccattttggagaatattcaattaggagttttcgttagattttgaccaagtgatttggtttggtaggattcatgagctgtacatgcagatattaattcaaatttaaatgcagtcgctgaaatgcagctaaaagctacaaatagtgcataaccaagtcattgttacgtcgagatcttgtttgtacgcatgcatcttaatacctctatacggcattcagtttcccatctgtaaaaagtttctttttgcactcgaaatttagttgtatcagttttatattttattggaaattcaaatttagattattaataatttggctggctttgagttcagtaggtcttcgattgtgatcatagtagatttgtatttgttgctttttagtctcctttacagaggagacattgaccttacttaactgctcctttgtatgtttgcagagcggcaggtacagaaaattgacccattacttaaa

SEQ ID NO: 84791 - DNA, 506 bp, Citrus clementina
  Intron number 1 from transcript clementine0.9_023146m (loc us clementine0.9_023146m.g) derived from phytozome v7.0 (c hr-ID scaffold_53; pos 1345768 to 1346273)
tacttccaggtacttatgttgggtgtttttgttttttgttttcttgcaaattatgattataattatgtgcccgaaatttttgttaataacatcttatcttcttgttatgggagtttgattactaatactgaaattattccaattttttttttcgttttaatccattttaaagtgaagtatttcccctgctataacaaaatgaaaatctttaaacttatattcgctgtaatgttgcaatatcgtaaggttattgatgcttttgactaaataattgtcatgcttattgaggtttttctttgccctgcggcccaaacttaataattgtgtaagttaaagtttattgattgatatgcctgaacttttcttacatgtttgaattttcttgttgacaaatgtggttttgaaggtgccctgatattgttatgtcggcttgttttccttttggtttgtgtttatcttttgtttaatagatttcttatgcttggttgttttttgtatgaaggctg

SEQ ID NO: 84792 - DNA, 546 bp, Citrus clementina
  Intron number 2 from transcript clementine0.9_010073m (loc us clementine0.9_010073m.g) derived from phytozome v7.0 (c hr-ID scaffold_23; pos 1569787 to 1570332 reverse strand)
atctctgatttgatgtaagttaaacttgtctttatttatcgcttgtatggcacagttatcagttacgcactaagtaatacatgatcaaaaatattgcattgcgtgtttcggtgtcgcactcgatgaattgactgatatgaaattagaatggaagcagaggaaaaagaattatgtggaaggcttttattgttttgtgtttgttcttgaaacttcctatattttattagttatttattgcatagaagacagagtgagttgtgcgtgtgtttaaatggttgggtatttgtgatggaccatattaaagttaaaataccggttgtttagtccttttaatgctgaaatttctgtttaattgctttgtttattggaaatcaaactggaactgtgagataaattgagaggttatttgtcttgcactccgctaacatctttatagcatattgtttcttatgttcaaattccagacttctctgaactctaacaaaattgatatttatgtgcatgtccaaagaggtcaaaagaaagtctgtttgatattcttcatcc

SEQ ID NO: 84793 - DNA, 779 bp, Citrus clementina; identical to SEQ ID NO: 80040
  Intron number 2 from transcript clementine0.9_006102m (loc us clementine0.9_006102m.g) derived from phytozome v7.0 (c hr-ID scaffold_33; pos 2350547 to 2351325)

SEQ ID NO: 84794 - DNA, 953 bp, Citrus clementina
  Intron number 2 from transcript clementine0.9_002515m (loc us clementine0.9_001282m.g) derived from phytozome v7.0 (c hr-ID scaffold_29; pos 2088279 to 2089231 reverse strand)
cttaagcaggaagctattttcagggatcaggtattgttctggttcagccttgagtttttagttgttttgttgattacatctcatttttttaagcctatttttattttcaatagaaataaaaccaattctattatgcgtatcatattcaagcatgcactaatcaacatgtctcggggaaaatttgaatatataggtcttgaagtggtgttatttattgatatccttaaaggtaaacaaatatttttgatgctttaatgcttgcgaatgtattttattaatggtcctttggcacgttaaagaactgtgacttctggttgtctttagggcatcaagtgcatttatttatttttaaaatccttttagtcaagagatcctgaggacttgtaactctacttcttcagatgatggaagtttggaagggaaaatgggggacttgttaattggctataggaatctgaatcattgtggtgaaccataatgtgactattcatatatccctttctttttgtgtttgtgtgtgtgtgtgtgcatgcatgctcatgtgcatgtgttggtattacaaacagcgtctcatatattcatcaattctgatgcaatacttgttactaatgaatacctatcagttgatcttagacgctcaaatgggttttaaatgtttttgactatccagatccgcgaacttcatcgcatttattggagacagagggaattaatggatgaaatgaaaaagaacgagttatttaaacatcatccacagcaggggaccttacagtcaaatcctttttcaccccagcacttgtgtgatgatgcacagaagacatctcatgttttcagcttgcccagggtgaatcctgcattcaatcagtcgtccatttcaactgctaaaaatgacccatcactttcacattttgatgacagaaagtttgtgcagtcaggtccagatcctcctcaaa

SEQ ID NO: 84795 - DNA, 1041 bp, Citrus clementina
  Intron number 1 from transcript clementine0.9_002515m (loc us clementine0.9_001282m.g) derived from phytozome v7.0 (c hr-ID scaffold_29; pos 2089491 to 2090531 reverse strand)
tgattttgaggtaagatgatgttgcgaaattatttctttaatgtgcttgattgttcttcttttactgactgttgttgggttggtttctccagcttgatttatatgttgagctggatttttgtgtttgatgatttcagtgaaacgatttttgccttcttttttttaatgtttttgcgggtgatttactcattgcttgaaattatgttatcaatgtttctattattgtatattcattttggctttgatagattctttcaagacatatttttctctcccagctgcttgttctccttcttcttcttcttcttctttttcggctcccaaataatgggttaataaatagctttacttatctgattagtgtccccgttaagcatatgatgagtgttttctgctggcttaatgacatgtggcaaaatttggatcaaaattaataataatcattgtggttgggtatgtatttttgcactagttgttggttattatcttgaattttcttttctctttttaatatcatgctagaatgtgagaattaccatgtgaaagtcaggaagtacctgcctgccaaaatatatttagatggttctttggaattttgtcatcataatgaatagtacgtttctggaattttttttggggacctgaaatagtggaggccgctatcaatgaaaagtacatttaattaaatggaagaaagaatgtttgaatggtttagcatacaccatatttcttgcaaatattatgtaggagttttagtaatgagaaaaatataaggaattaaagaaataaaaatgattgtctttcacaatatatgctgatattctgacctatatttcacttctgttgcaggtttctctcttaattgttctttagttggatagttagatcgtattttgttcatactgacttacagtaatgagaaaaatataaggaattaaagaaataaaaatgattgtctttcacaatatatgctgatattctgacctatatttcacttctgttgcaggtttctctcttaattgttctttagttggatagtta

SEQ ID NO: 84796 - DNA, 242 bp, Citrus clementina
  Intron number 1 from transcript clementine0.9_015552m (loc us clementine0.9_011781m.g) derived from phytozome v7.0 (c hr-ID scaffold_122; pos 432596 to 432837)
ctcctcttgaacggttcgtctttcaatttttttttcttctttatttctaaacatcaaatccttaatcgggttgttttgaaaaattgtttttgagagatgtgttttggtttgttatggttttgattggttttagttgttgaaaaattcattttttattttttatttttttataaagtcaattgagcttcttctgatacacctgtgttgtttttgtagcaattttggtattgaaggaggagtca

SEQ ID NO: 84797 - DNA, 675 bp, Citrus clementina
  Intron number 2 from transcript clementine0.9_015178m (loc us clementine0.9_015178m.g) derived from phytozome v7.0 (c hr-ID scaffold_23; pos 1004820 to 1005494)
gccccacaagcgaaaagtcaacgttcgtaaaacaggctagttttctcttctaacacgcacttatgcatggtttattttttaatttcatgtctgtgcgtactgttacatattaatatattagggttacacattacataagtttcagccattaggatgacatcctggattacgaatacattatccacagtttcagctattactattagggcgacatgctgagggacactgaaacgatttatttctaagcacttaatttttggcctagaattaaaggttggaggggtccaagggttacccaaagtattgtgccttggttttttgggggggtactgagtgttgtatatttgactttgatttaaaaactaagataggataggtttattgcttatctcgaataatggcttatatgaacttgcaacattgatactttggtgtgtttggcagccattttgtttcagtgttgatattgctgaaaattttttgaggcgttgttattgtatatctcactgatgctcccacccctcctccccccccgcccacgaaaaaaaaacctggtctattgtttatcgtagagtttaagaacgtgtttcgtaaaatctcaactgatgagtttttatgtatatgtgtggtgcgtatgcagtcaaaattggtaggcctgggtatcgtgtgacaaaa

SEQ ID NO: 84798 - DNA, 661 bp, Citrus clementina
  Intron number 1 from transcript clementine0.9_010947m (loc us clementine0.9_010947m.g) derived from phytozome v7.0 (c hr-ID scaffold_1; pos 9364774 to 9365434 reverse strand)
tacacttctcacttcttgatctgttgatgtgagcttagggtttcttgatttctccatttttgtatctcttgtagcacctttttgagtacactatgctcaatcttagttccattttactaaagttttgatttttgtgcgtaaagtttgaatcctcgttaaggaacttttttctggcttgtgtacataatttttttcttaaaggaaatttctaattgatttgttttcgctgggttcattgtgtagtgcgatttgcagtgataattggatatataatgcaattaagctaatgagtgaagatttttttgattttcatgtatgggttggtgaaaaatgtgcaaagaaatgttagttgattggttttgataaaatggtgttttgggttgtgctattgtattgtaaaattttcgctggtcatcagtatattgactctgttcataattgtgtgctacattgtagtaatatgttctggagggagctctatatagttggagagattcatgtgatttgctttctgatatggattagagtaaaactgagaaaatgttttgattgatttatgcggttattgggcatgtaatgtatagcagcatcagcatttgtgaagagaagttctaattgatttgtttggttgattagggtgttctgagaaaacgacttggag

SEQ ID NO: 84799 - DNA, 687 bp, Citrus clementina
  Intron number 2 from transcript clementine0.9_032213m (loc us clementine0.9_032213m.g) derived from phytozome v7.0 (c hr-ID scaffold_122; pos 332559 to 333245 reverse strand)
agtccaaaaggtaagcaaatgtatttattaaagatggatcaatttctctttaagagacattaaagtggattaaatcggtttattaaatggcctaatttaaacactttacatcttaggtgcacatttgcaatctgatctctaatatgaatacattcatttggtgtctaaaacaattgtattgttcaactccgaaaataagtgtgaaaaaaatttagaatttgaattctgctcatgttggagaaaagaatttaaaatttaatcaatttagtaaaagaaaagaaaaatcaaataaaccttttcaaattactattttgattatgttaatggtgtggttttgcaatttgcgacgcatattttaatattgtaagttcacgtttaatttacacaaattgaaatagagaggaacattatacaattgtaaaattaaaaggaaactggaggataaaagagtaaaattactgagaagctccatcaacctacgcactcacgcgcttctttgataagtccacagtaggtttccttaaccgaccaggaatagaacaaatctattaatactcctaagcactgctcttaaaatttcatttcttagtccttactttgtgaagcacgaaagaaaatcaacgtaatggcgacaacattccttcactctcaggattgccttcgcaattcccgatcctctcctcgctt

SEQ ID NO: 84800 - DNA, 431 bp, Citrus clementina
  Intron number 1 from transcript clementine0.9_013871m (loc us clementine0.9_013876m.g) derived from phytozome v7.0 (c hr-ID scaffold_53; pos 93519 to 93949 reverse strand)
tgccggtgttgctaacagtcgctagaagttagccggtaagcatctttctgctcagccatttctttttttgatttatcattcgtcatgttcgtacttctagtttgaatttttgggtttagatttggcgcaataatcaattagaagttttctttggcaaatttttgtgttagaacgatctcattataataatatttgttatctttttttccgggtttcaatcattgatgtgaaatgtgaaatggaagattaaaagtcttggtttttttttcactaattttttattctgtttccttttcgtaggaacctaaaatggcaaagatggtaaaataatgagtagtgagtgaacaatgcgagaatttggagattatttgaaaggaatattgcttttgcaaatattactaggagcaaaaaagtgatatgaggagttgaat

SEQ ID NO: 84801 - DNA, 988 bp, Citrus clementina
  Intron number 1 from transcript clementine0.9_026912m (loc us clementine0.9_026912m.g) derived from phytozome v7.0 (c hr-ID scaffold_20; pos 425709 to 426696)
tttcgctgcttcggtcaactttcatttgttcattggtaactgcttttcattgttttttaaatttaaatttttttgttttttatgttatctttgtttacataacttattgttttctctttgacgattactggatctgtaattgctgttatactcttcagtgttttcgatttctagggtttgattttttttttattgttttagttgatttttgttttgtgtaagttaataagggcttatttggattattttaggggttttatttttatgaaaaaaaggttaaaaatataaatagaacttgggacttttttttttttccaattaagttggaaaataatatgttcaaattttgatttaaggtatatgaattcatgggtctttgctattgtgctggtttggtattataatgttgatttttgagtcaaaatcagtcctggctgcatgtttatcttatagtaaaattgactgaagtttagaattattatatcttccaaagatgatcaaaatattgttccagttaaaataacaaagtagaaataatttttaattggatggaagtagtggagaaagtagattgcttgtttcgaccttgtaaaagaacagttaggaagattggactttctttctgagtcttgttaatcttgaagatgttcttgtgttttgttccgtaatttgtttagtctattaataattaattatggaaaattgataatagcaggaaaggggaaaaatggattggttgttttcattaatttcaacaattatgttttggggagagcagggttgggtggggggaaaatcgggtgaaagagctaggggggccttttctggtagttctatgatttgttgttttttcatatttttctttggtttcaaaatctgcccccgcccctccatcctagacatccaaaaagattgtccgtttttcatcaatattgttcataatatcttgtcaggatttaagggaacttggggttggctttgttctctt

SEQ ID NO: 84802 - DNA, 702 bp, Citrus clementina
  Intron number 3 from transcript clementine0.9_022613m (loc us clementine0.9_022613m.g) derived from phytozome v7.0 (c hr-ID scaffold_90; pos 877182 to 877883 reverse strand)
ggaactggtataacaatctctattgctaaccgaattttattttagtttttagttttttattaatttacgaattttctgaattgctggatgggaagcaataaactcaaatagtcttctgtaaatacttgtaaaaatttaggttacaattcgaagtttcttggatacaacctcacaggaaatagcaaaagcaattgttagattttaaactagattttaagatttttttccaaaaagtgtttccggaaacacccaaaaaaatgtttttagattttggtatgctttgttttcagaaacaaagagttttatccaaattgctaattaatttggccacgatggtttgatcaaaatttgggtgtcctcctaactcataagctgtggacttttacaaaggctaaggtgatagttctcagaatagtatacatgttaagagtaaaatttctaaattgttgttgtgtttactcttcatagtgctatcaagtggtcggcaattcagttactaaattgaattttgtggaaaacattgatttagttttagtagtagtttaatgagaattgatgctaggaggtccacatgatcttgatgatacctcggatttgaggaactatatgcattgcgatttcaatgatttgcattctgttattgctgaatgatattgtcatttctgagcaagtgttttctgtgctcttttaagtagcgttatc

SEQ ID NO: 84803 - DNA, 768 bp, Citrus clementina
  Intron number 1 from transcript clementine0.9_007214m (loc us clementine0.9_007214m.g) derived from phytozome v7.0 (c hr-ID scaffold_53; pos 240547 to 241314 reverse strand)
gaggaggtaagagttaaataaataaagttttgatttttttttttttccaaattatggataggattggctagttttgatttgttgatggtgttggaacggtttgttttttcttagtcagggagtaggcttagcttaatgtatgtctgttttgctcttttggtgtcatgagtattaattgtttaatagtcggtggtgttttgtagtttttgctaatttttactactatttctattgtacattactcattttttatttttcattttagttgcatacaggtagcatctatttcatatttccgaagaggaatactattgttgtccaatattgttaaaatactgtataccttacttgatgttaaaatatgtctttgtattttttctaagttagttgttgattggttgttcttgcttatgctgagtgtttgtctgatttacttaacacgccgtgaattggatgaaattttgggagttttcatttctcttgttaatacttactaatgtgctcggtattagtaagcttaaaactccatatgtgctgcatttggctcttgttgaataaataatgattttttatggttttcaagcctaccaattatggtcatttcgttacataacataatgcaacagtgtgttattttatatggaaagttaaattatttctttcagtgtctcccttaagtttgattaaattgtttagatcataatcatgttcttttctattgttgcaggttgaggggcaaacagaggaagtcatttttgatcatttgca

SEQ ID NO: 84804 - DNA, 989 bp, Citrus clementina
  Intron number 1 from transcript clementine0.9_003346m (loc us clementine0.9_003346m.g) derived from phytozome v7.0 (c hr-ID scaffold_133; pos 371001 to 371989 reverse strand)
tgttcctgttcatcgaggaagtgaaaccattgaaggtaagtgcaaataatgtgatccaaaagatgagttttcagtatgtgtttattgctgatgaatgtattttatctttagttctgataatttttctttttgcatgatattgtagccgtggttgataatgcatcactgtgtctgtggtgtcatttgtagtgagaataattacctttcattcaaaattaagagagaataattgaatataaatgtttgttgtgggctcagaagataatttttctcacataaggaatcatgatgtccttttatgggatcacgggtctctttattagttcttatttgtggtgcacgcttacatggaatttgggtagcatttatgatcgatttgatactaaagaatagaacttttattgttctagagtgaaccacaagctcatcttattttgaagaaactattaacctcctgtggtagagatgagtttgcgctgggcataaataaccttatatgcaaataaaagagtgcaagaagtttttttggcttactatcctgtatctcaatgcgactggactgaatgattcccaaatatctcttgtgatataactcttattggctgaggctttactacatcttctatgtcagagttgaagaatagcatgcttgatatgagccttcaattactttcagaatctcaattttttttttttgggaagtgcaagaggtatgcttagtaaatagatcaacttcggtaaaccttttgataagtgaatggttgcaccctttgaatcaggcagtaatttgtgtttaggaatgtttcactttgaggtggtaacgtttaagtttgacatttttcttcagtcataagcctcgcatggcttcataatggttttgtgcatacattacatgcttgcattttaattgattgtttcttcgtgtgctgatgctgctttgttgtgggtggttatgctgttttcagatagcagaggagcttcgaaagaag

SEQ ID NO: 84805 - DNA, 659 bp, Citrus clementina; identical to SEQ ID NO: 80977
  Intron number 2 from transcript clementine0.9_011861m (loc us clementine0.9_011861m.g) derived from phytozome v7.0 (c hr-ID scaffold_90; pos 445818 to 446476 reverse strand)

SEQ ID NO: 84806 - DNA, 833 bp, Citrus clementina
  Intron number 1 from transcript clementine0.9_013323m (loc us clementine0.9_013310m.g) derived from phytozome v7.0 (c hr-ID scaffold_33; pos 956699 to 957531 reverse strand)
ttgtgattttgaggctttctagtgaagaaaaccaggtgtacttttgttattattttttttaaaaaaaatttccttgtttagtttgatgcatttttttttttttttatagttgtcagctgtcaaaactgggtcgtgattgggaatcagattgatttatttaaattttaactgttggttgatgattttgaggttcatttgatgcacttgatgaacatctaacaagttcttttgcatctgggtctgatcctgctgcaggtcatttgattcataatttatctccattattgttttggatttaaagttttgtttttattttggattaatcatatgagcatgcttctgttttatgcatgatgtcttaaggttggttcttttctgcaatcaatgcactgaggcttttgtggggttatttgggtttttgttgatttttaatcaaaagagatttatctaatttgattgtgtatgtattacaaagaaatttcaattggctcttggatttatgatcagtgtttgattcagttgatcatggaataaggttctggaaaaaattgcagtttccgttggttttcagttttgatataacaatttctgtagattgttttcaggtgaaatttttgagcagattttcttttattcaacaatcttgatcatcagtttctgtaccttttaaagctaaaaccatcattgaaatttttttcatttgggttgcttaataagctatcattgctttcttcattttgcaaacgtagattgcttctctctcccattgttttcactaattaacaatgagttctatcaaactcattgcagtaattcgttgctggttttctttc

SEQ ID NO: 84807 - DNA, 941 bp, Citrus clementina
  Intron number 1 from transcript clementine0.9_013635m (loc us clementine0.9_013635m.g) derived from phytozome v7.0 (c hr-ID scaffold_82; pos 783252 to 784192 reverse strand)
cacttgccaccacatcgccttctccattacagacggtaagcaaaacattttcaatacgtacacatgcatatataatatatattgcacacacacacacacattagtttcgcacgtttcatatatttaccttcttcgtggggagggaaaaaaacccatgacaatagtagcatctatgctcgattttgatgtttttaaacttttggccttgttccttgtctttcggctagtttaatgattttggttcattaggggtcaaacgaaaaacaaacaaactgggaagggttctatcaaaattttataaatctgaggagcaaaacgtaagatttacagaggaatggactaactttcatttgaatcctttatcttttctgtatcttactggggcaaagatttttttttttttttcttccttaagttagtgtatagaaagggaaagtagaggacctaaagggagcgagtattgaaagtttgatgtggttaaaatgaccaaaacgaccttgtggggatagagtttcatttgatgtgtggtttcttagctaagttgagaccagaaagggcacgagatgacttgattgccgtactcggcggtggttagctcagccaccaaagtttttttccaaccaatgggaatcagtaattctctgctgtcaacttgtcatcattcatgaactgtcagagagttttaaaattcaaattctctttcgagggtaaatgtgtcattttaatcctctaccaaacagaaatacagaattacatcatatgtgcaaattactcatcatcttgttggtggatatacatcgcctttcatagtcggataaggattgttatgagtcatgtcatcatgttggcacttgtattaatgaataatgaaagaatgatactaattttgatggctaatttggtcatttgatgatataataatactgcagggctgttgccaa

SEQ ID NO: 84808 - DNA, 534 bp, Citrus clementina
  Intron number 2 from transcript clementine0.9_002292m (loc us clementine0.9_002292m.g) derived from phytozome v7.0 (c hr-ID scaffold_1; pos 8522411 to 8522944)
aaggagatgtaagtgttacttcttgtccttaacttggtgttttgtttgctagcttcgtaaggaagtactgaacctatgtctaatcacttataaaatcccttttagccgttttattgtttataatttcctagcatgtcaatattttttcttgctcaggattagggacaatcattaaagttaatggactttttccattcaatcacgtgtgtaaattggattgttgcttgtgagacgagtatatttcaagattttggatatttgacttctgaactgaaaaccatcagcgtctagaagatacatacatgttataagtatcagtttatcgtttagattatgttcgtttgtgtgattcagttttggttttagccttttgaatgttttgcaatttacgtcttttcttctgttattttcttttccttgctcatatggtcatactcatctgtaattttcaaattaattatgaattgttctttcaatgattgccatttgatcatatcaggtctgtagttcctgcagcttgagaagctcctgtga

SEQ ID NO: 84809 - DNA, 552 bp, Citrus clementina
  Intron number 3 from transcript clementine0.9_021793m (loc us clementine0.9_021793m.g) derived from phytozome v7.0 (c hr-ID scaffold_38; pos 1186639 to 1187190 reverse strand)
ggggaagaaattgaaacttgcaatttgggatacaggtaacaacaaatgcgtgccccatatattatttgatgatgttaaactgcgtcgtatttgtgctatttccttatattgtgcctcatcattgtgttaggttttcaccgtagcggtgaaattgagttgttattaaattacattgaacttaagatttgcattattcatcttatgttttaaaacaaattgcagattctagttatacactgatttattgctgcattttgtgaacttgaagagatatttttgaaaacccaaaaatacatgattgtttgtttgtgacttttaagtgcttatgttcaatcttgttgaggacactggccatttgtaacaacataaaagcacatttccaagataagatgagtctgtttttgatttgtgggtttttatgttgctatatcttagctaaagagtttggctctctacagagaaaaggtttgttcttggccaactctaacttactagtgctgaatgtttgattgtgcagctggtcaggagagatttcggacattgactagttca

SEQ ID NO: 84810 - DNA, 571 bp, Citrus clementina
  Intron number 1 from transcript clementine0.9_012350m (loc us clementine0.9_012350m.g) derived from phytozome v7.0 (c hr-ID scaffold_67; pos 80338 to 80908 reverse strand)
tcacgccgtcggtgccggcgcaatatctatccaaggtttgatgctgattttttttttttttttggctcttccttcagttgcattaatggatttattaagaagaatgaagtaatcgatcgaatttaatttttaattttgtaatcaaaatacattgtttaattttcagtccgttacaactttctttcagtatttttgaatatttctttcatttatagtttgttatgataataaaaagtaagtttctgtttattgggaaattttactttggtcttttggtaaaaataaatctttttaaatgattattttatattgtaatttttttttaatttttcgatttttcatgctgaattgctggttttgaattttgttttagataagaagagaaaatgaagtaatgaattgattgtacttttgtttgttattgaaatatttcttttaacttttactctgttacgttttcctgtaattttatagtttgttatgataaatgatgcagctttcttttaattcgaaaattttactttgttttctaaataaaaaaatacaaatttttgaatttgggcagactaca

SEQ ID NO: 84811 - DNA, 717 bp, Citrus clementina
  Intron number 1 from transcript clementine0.9_012433m (loc us clementine0.9_012433m.g) derived from phytozome v7.0 (c hr-ID scaffold_53; pos 898800 to 899516)
gtttaagaacacatcaaactagctctgatcttcaggtaattgtgatcaaaaataataacttactgtttggaattagagtttagtctatttaatacttgaaattttgtgggtttttttacgctttgatcacttgattttgagaaaatagaagattttggaactggcaaaatgttaaatgtaattaagcttgctttatgcccttgtgtagatgcactattcactcagctattgggtttccatatattatgaaaagacagcagagtcagcaattgtttaaaatcacttatctgcttcataatttttgaactccgtagaggaaaccaacatttgaaagtaaccgcgaagctgaagcctgaagaccaagttaaaatttgaaaccaaaagcaattaagagctttttaatttatttccagctgacaagcttcatgacgtgccaacttgaaaggagaaaaaattaataaatttctggctaaaacagagataataataatcctagggtgcatggagcttaggaccattatcagcattgtttatttttctgttacgttgattctttaataatataacatggatatattgtaaggatgaaatgcacacgtgtctgcttcattttcaataaatggcattatgttatcaagcgtatatttgatgaaaggtataccttgttgacttgtaatcttcttgaatcagatatattcgaagaaaaggcagaaattg

SEQ ID NO: 84812 - DNA, 732 bp, Citrus clementina
  Intron number 2 from transcript clementine0.9_005501m (loc us clementine0.9_005512m.g) derived from phytozome v7.0 (c hr-ID scaffold_23; pos 3588210 to 3588941)
aaccagctgattcctatcggggacctcaggtatcaataatttattttgacactgcgtgctttagttactaattgcacttttttattatttttttaggcctcttttttgtggttttctgagcagggttcatttgtgagtgtttgggataagattttctttctgatgaatgattttgtttgtctattgctcgtaggattgcatagagaaatagcaatttgaatatttgttgaaagttactttagcctaaattatgaacagagtggttcaagcaatttgtttcactatttgcactgaggttttggtggatgtttctttttgtttttgaaattattgtcctagcatctgtgggctgatgagtttgtaggctcttaagattgtggtctattaacttcttcgattcagtaattgagtatttgttatgtgacatgcaaggatttctgggttttaatgtaaatgatgaaagagacttctaaaactcgaagaactgaactgcttcaatagagcttaccaaacacaatgtgaccaaatatactttagggctccctttctgtgctttcattgttagatccacagtgtttgactacactaggttggtaatgagggtaacacggagttagttggatctttatcaatttgcagaattgcacttgcggcttaaacctcatcgtctgaacattatgtttatattaactatgatttaatccaaataggtgactcttgctggactactga

SEQ ID NO: 84813 - DNA, 465 bp, Citrus clementina
  Intron number 1 from transcript clementine0.9_019872m (loc us clementine0.9_019872m.g) derived from phytozome v7.0 (c hr-ID scaffold_51; pos 67264 to 67728)
agtttcaagccagtaagctctctaattttatctgttttatttaatgatagaaaccctaatttaagatgcttctgtatgacacaatgattatccaattttaagatgaaattgtttgaaatttatgcctttttcgtttttttttttctatgtattcttcagcaatcatataatttgcacaaagaaaaagggtatctttatgataattaaaaaggctagtgcatcttgaaacagttttaatttgatcagctatatttattgaagtatatattgctcagtgtacactggtagaagtaaagaacattagccctaattattcacctttgaattagttgttcaagtttttcagactttgtgctagctagcatagacattgagaccatatgacatataaactctccgtttaactcttggcttaatgcttgttttgtagatctggaatcgctgccaaatattcttcaaaaaaag

SEQ ID NO: 84814 - DNA, 705 bp, Citrus clementina
  Intron number 2 from transcript clementine0.9_019872m (loc us clementine0.9_019872m.g) derived from phytozome v7.0 (c hr-ID scaffold_51; pos 67731 to 68435)
tgcgttgctgagagatcttgacaaaagtttacaaggtttgctttctgataacaatctattctagtgcattaagaagcatggacgtattcgatattgctggttttgtgatcaatataatccgacttcgggctttccaacaacctttgcaatcttgtctcttttaattcctgccctctggaaggggaaggaatggagcagaattagggtattggaagttagaggttttcttagtttattatcttatcattcttagatctggtgtcaactttgtcattgccttaggtagtgatgtagctattatagggatcctattgtgaccaagagctagaagaaattgacagtagccactagtttaatgtaagtaaactagaagtgatctccataaaaacatcaccagatgaatcactagtgattttatatccttctgtgtaacagctgcggtctcaatgcccttataaacttgtgtgatgagtttcaaagattctaggacaggcaagcttaattagtaggattggaacagtcaaagttaacactcaccctaccctaccatgccatttatagtctgccatccctgtataaagaagtatgtttaaaaggtttcaagtttttttgcttacgtttatggacatattttttcctcctttggtccgggatgctcaaatgcagtgttttttgtacatgcactggcagaaatccaaagacaaa

SEQ ID NO: 84815 - DNA, 725 bp, Citrus clementina
  Intron number 1 from transcript clementine0.9_010089m (loc us clementine0.9_010089m.g) derived from phytozome v7.0 (c hr-ID scaffold_33; pos 1908133 to 1908857 reverse strand)
tgccggtgatctgttctacattccactgaattcaggttggtagtaatcttatccttccttttctatttatcttttgggttgcttgaggtagttcagtaattttgtatttagagattggtttgaattttgtatccaaatgtggaggattggcatattttgtgttgttattgatgggaattatgtatgtttgctatgcataatacattgttacacattgtcgatttgccacaactttggagaatcctataggcaacaataggaaattcaggcatcgaagatgaaacaaaagctcttggaataagttctgttaacttgagctcgctagcttttgtaagcattccattgtaatataaatgactgaactttcttgagaaaaaaatggaaaaattatcagttgtaatttatgctaagaaaatggagattaagcattaacagctggcacatctcggtctctgcataggctgcaatggggaaagaaaagaaatagaaaaatagcataattggtttcgtggtgttcttttactgatttcctcttcggattaggttgatttttttcttcaattcttgtttatattgttcttgttgtcggctgtactagttcgatttatcattttcccaaacttattttttaaggattttcctcttttctagcagtttcttttttatttatcaagttaacaatatatgctttattatagttcctggtgagccttatcctgtggaga

SEQ ID NO: 84816 - DNA, 694 bp, Citrus clementina
  Intron number 1 from transcript clementine0.9_032405m (loc us clementine0.9_032405m.g) derived from phytozome v7.0 (c hr-ID scaffold_20; pos 1816355 to 1817048)
gtcaagggacaccaaggagagggagtcaggtgaggtccctatgaaaatgatctcactcacccaataaataaccctaattttttactttgatttccccttttttctctatttaaaaagttacttgtgttctcattttatgtcatcaagagttaatcatcaattcatcgtcttttgtgttggaaatcatctcctcttttttttttattaaaaaaaaacaaaattagttgtttcttacacatttgctaataatcagtcaaaagttcaatttcaatcgtgggttttatttctaggaaattgaaatggtgtttttactttttagtcttaaccaagtaaagcaaaatactgatttgataattcaatcatgtgtatactattaaaatttagaagtagcttctgtgatgtgttttgtttgatgctctctgtaacaacagaaggattaatttgtgttgttatgaggagtttgttcaaggagaagtttttaaatgctagcgttagatattctatttgataagtagtgtatatggtttgaaaatttttcatgacgattatcctatccttaattccttaaccactcttaatctgagttttatagggacctaggatagcatcggaagagcgaggaatcttgaaattctttttaatgctattacaactttaaggtcaaagtccaaccagtacccaaacacttcattga

SEQ ID NO: 84817 - DNA, 448 bp, Citrus clementina
  Intron number 1 from transcript clementine0.9_009568m (loc us clementine0.9_006969m.g) derived from phytozome v7.0 (c hr-ID scaffold_67; pos 250204 to 250651 reverse strand)
cgcgctagcggaagaaactgtgataaataaactttgtgagaactgatatttttactttatttggtttatttatttttttctttgtttgcgataaattttaatttcgggataaatgaggtaattgtttaattatggtttggcttggacaaagaattaaatttcaaaatatttattttccgacatcggtttttttttttttttctttcaaaagtctgttataacggacggacttacgttgggggagtccacggccttccccacctccccacctcaaatatgagggtaaaatgggtaatatatgaaataacagggaaaagagtaggcttctaccctagacccggcagcagtagattgtatactctcttctcagcacaagtgtaacgttgagtcttttcggtgcgtttctgcgtaatcaggtttttagggttagtgtctctctaaattcaca

SEQ ID NO: 84818 - DNA, 655 bp, Citrus clementina
  Intron number 1 from transcript clementine0.9_018329m (loc us clementine0.9_018329m.g) derived from phytozome v7.0 (c hr-ID scaffold_10; pos 1858092 to 1858746 reverse strand)
caaacgatctgtcagccaatttcgttccaatttttgtaagtattattgcgcttgttctttattcatttatcatggcttgtgaattttttatgtttcgtttgttggttgcccgtaaagcaaagggaaaaaaaaaaggaatagaaaagaaatcaaatcaaaattaagttgctgttaaaccagtagctgaatcttagttgagtcagttggattttatgtttaaaatctcttgtgaatcctataattgtttggactgatcaatgaaaaatatttggtttggcttccgattttctctttcgattcttattgtttcccggtaaccaaacgaaagtattaattcgctttgttagggttcgtttctgcaaattaggcttttagttttttccatagattgctttagttagaatgtatgtttctatgaatttgaaccggctgattttgttgataaggcttctggtaattcagattagactcatgcttaatcgattgatagacctctgtggaactaattggctagcccttgaatttgacatttgattttattaattatttatgattttaatactttgagctgaactctggttatttgggtgtggtaatgtgggtctttatgaagtcgttttgttgtcttgaattaggctttgtgagatattcagat

SEQ ID NO: 84819 - DNA, 733 bp, Citrus clementina; identical to SEQ ID NO: 80732
  Intron number 3 from transcript clementine0.9_030207m (loc us clementine0.9_030207m.g) derived from phytozome v7.0 (c hr-ID scaffold_1; pos 3746563 to 3747295)

SEQ ID NO: 84820 - DNA, 427 bp, Citrus clementina; identical to SEQ ID NO: 80004
  Intron number 2 from transcript clementine0.9_001856m (loc us clementine0.9_001856m.g) derived from phytozome v7.0 (c hr-ID scaffold_1; pos 8200567 to 8200993)

SEQ ID NO: 84821 - DNA, 463 bp, Citrus clementina
  Intron number 1 from transcript clementine0.9_030735m (loc us clementine0.9_030735m.g) derived from phytozome v7.0 (c hr-ID scaffold_27; pos 219651 to 220113)
gttccttggaatcgatttgctcatcaggtaactcttcttgaatcttcgtatatttcttcgtcatattttgactctgattataattttcgcgccattgcatctccagcagacccaatcgctaacctttgcttttcatttgtatgaattcaattttacttaaaaaagaaaaaaagaaaaaaaattctcgccaagatgagaaaatggaagttggcgttctgtttgtcatttgaggcgcaagttagaagaaataagtagtatgcatagtccacatggaagtaaataaagcattatctttaacattattttattcattttaaattgcttgtgttctttaacaaaacaatctcaatctagttttccaagaaatacttgatgggtaatttttcaatgactaatcatcttgtgtatttctaaaatttatgcaatagggtcgccgggattgcctcctctccgcagcacgact

SEQ ID NO: 84822 - DNA, 559 bp, Citrus clementina; identical to SEQ ID NO: 82993
  Intron number 2 from transcript clementine0.9_030616m (loc us clementine0.9_030616m.g) derived from phytozome v7.0 (c hr-ID scaffold_63; pos 919382 to 919940)

SEQ ID NO: 84823 - DNA, 597 bp, Citrus clementina
  Intron number 2 from transcript clementine0.9_023049m (loc us clementine0.9_023049m.g) derived from phytozome v7.0 (c hr-ID scaffold_131; pos 315502 to 316098 reverse strand)
tcaaaatatcactcttcctttcgcttgcaggcacggtattgattgttctcttactcgctgtcacaattggcttattttatcttaattatcaataaaatgtgtattattttagtttatgttagatatacttaactctctaataaattaagaataatatgagagtcatgcagcacttggcactcatctattggaagattaatttcataccttgtaaaattgtttattctattctaccatctattcaatggatgaatgccatgtagcatttggataatagttatgatacggtttgggaagtggtttgggaagtgtagcagtacttataaatcaaacgtagtacataatttgctgaacaagcagatatcttcatgattcagtctcttgatcgcgtgatgtttgatttgaatacactaaagtgctgagttccttcgctacttatattttttataattgtttgcctttgaagtggaactgttgtaaatattggtgtaagtttcgctgttttgttggttaaaaattgttcttggaaaaagcttaagcttctttctacatggcatggcaggttgctgcactagctgcgctgtgcgtataaaatca

SEQ ID NO: 84824 - DNA, 622 bp, Citrus clementina
  Intron number 1 from transcript clementine0.9_002838m (loc us clementine0.9_002838m.g) derived from phytozome v7.0 (c hr-ID scaffold_33; pos 2371161 to 2371782 reverse strand)
taggttttctgaactagaagcagctgcaaaactaggtacgcttgttttgcttctgatttttaccgctttatcaacaaatgtaagtaaactatcaatctgggttcttcaataaaaaattatttctgtagcaactttccaaagtgttcagttacttaagcctactcgtaatcaacaacaaaaaaaggggggggggagagaaatttatgcttcaagctttgtattagatgaaaatttcatttaggtttgtattaaatatcttttataatcttatttgtatagctcatccagttcttagtgttgaggtggtcttttgtaaggtgattatttatttaaacattcttacttgaagtattttatgcgtatcgttagtttaaggcttttctttttcccctgtttttctgagtttgaattcagcccttaagcaaacaacaacaagaagaaggaattcaggagggtttgttcttataaaaaaaagcgggaaaaaatggaggatttgttatttgtttttattagtatgctcaaattgcttaggttaacttttcatttcaaatatttgttgtgatagtggatggattctcttcttgtaggttaattgagggcaagtgtttttgggagggtgctc

SEQ ID NO: 84825 - DNA, 799 bp, Citrus clementina
  Intron number 1 from transcript clementine0.9_029435m (loc us clementine0.9_029435m.g) derived from phytozome v7.0 (c hr-ID scaffold_51; pos 769647 to 770445 reverse strand)
ccttactcttctaagattttcagaatttctcttaagttcctttgctgccttcttttgctcttcattcattttttggaactaaggtgaggctatttaataattaatcttgattaattaccaaatagtttcagttcagtttcttttctatggaaatttatatatttgacttatgcctcctattattcttataatacccaataactctgttaaaaacataatttcatagtattactttcatttgcaaataatacattttattaatgttcattataacttaagtaaatcatataaattaaaataaaataaaaatttcaaacattaaaataggaaatataagttataaattaactaaatcatataaataaaaataaaaataaaaattcaaatattaaaaataaaaaatatcagttttagtgtgaataaaagaatatatagtagtttttgttatttttaaacaattttttcttataataaatatatattttatattctcaagatcaaatattaaataaatgatctatttatatctcttttcttataaagtagggataagtggtatatattaattttagtagtaggaaaattgacgatctctcaattgtttttaacatgttgagtagagaatttgaatcctttcaaaaatagacggtttcaaagagttttaaaatttaagaagaggaggaaataattattttactgaaacaaccagagattttttatcatttttcacaaaacgaatcatttatggcatatgttatttaaagttgccttgtctgctcaaaagaacaaagccgaaacc

SEQ ID NO: 84826 - DNA, 598 bp, Citrus clementina
  Intron number 2 from transcript clementine0.9_009724m (loc us clementine0.9_009724m.g) derived from phytozome v7.0 (c hr-ID scaffold_1; pos 8140656 to 8141253 reverse strand)
gaggtgagtgtgagattgtgacttcatttactatctatttgtattcatttgctctctctctctctctatctctctctttgtctccttcgtttattcctttcttgcttttccttcctcttaatatatatcgtgcattacaaatctcaataaaaatcaatgttaattctaataaaaatatgcttataattggaggtttctggattaaatgttcactctttccactcttgacaatgtaaacaatctcacaattaatgtaactctttcttcatttcatatttatgatgcaaaatctcaaaaaaaattcgttattattggtcataattattctgtatgtttcttaaaattttcattacagttataagagttgttgtaatgtaaaatttaatgagtctaatgtacaattgaggaagtttaaccaaaaaaaaaatagagttgacttagaaactcttctctctcactcaaattgtttatttatctaatcattaacttttctaaagtatatatggcttctaattcaaacttgctcacgggtgcaaagacaaataacaagttgtcgaatgtaggttgatttgttaagccgcttgcattctcctcaatt

SEQ ID NO: 84827 - DNA, 698 bp, Citrus clementina
  Intron number 1 from transcript clementine0.9_007049m (loc us clementine0.9_007049m.g) derived from phytozome v7.0 (c hr-ID scaffold_33; pos 2045819 to 2046516)
ttccacatttttcggattatatttccgatcttccggtacgtttctgccggtttggctgctgagaaaatgaaagaaagaaaaaccgaagaaatgaaagaaagtgaaatttgaaactttcttttagaaactgttttccttaaaatcagttaatctgattatgttgagttacttattaagtgttttaaagttattatttgaatagccaaattttgatttaattgtataattatatgttgagattaattcctatttggcgaatgttttcatttgccgctgttggactgccatcagtgtttaattattttgtttgagagcaaaaatcttaatgagaataataataataataacaacaacaaaattttaaaaaactaactagttctgttaatttccttagtttattctgttagttttcttcaatttaaccttttcccgctatttatgatttatcattattatatatatatattttgagattctggaaaggaaaaaagaagaagaaaatttgggttagcatatatatatttatttatgtgattgttagtgcgcatgtctttctttacgcaaggctctgtttggacgcaattaattatacagaatcacaaaatattggtgaataactgttgataaattaattgatttgtttatcttcacgttttggtgcagacgcatcctaatccattgcaagacaatccttcata

SEQ ID NO: 84828 - DNA, 708 bp, Citrus clementina
  Intron number 3 from transcript clementine0.9_029674m (loc us clementine0.9_029674m.g) derived from phytozome v7.0 (c hr-ID scaffold_20; pos 502769 to 503476)
ggaattgaagttttgtctaagattactgagcttagaaagtgtagaattttgagtgtttaactttcaatactactccaaatgcccccaagattacaaatcaaacaatcaagacgctaaaagaatctaccagatcaaatcacagcaagaatgattttctgaaagagttatgacacaatcttaatacccaatcagatgaatcgaaaaagaaaagaggaagtaatagcagcaagaatagaagagttaacgtggttcagctagttctcacttgcttacatccacggggaaaccaggatcagttttattgatttgtagaagatgattacagagcgtttacagagattattacaatcaagaagctttctctcgaatcttctctcctctaaatagctcactgtctcctctctccctgttgcatcagaatcagctgtttataacagcttctttaacgaaccaagatgaatacagaaacacgtgatgagcatgtgctataaccaattcttaacgaacttgagcagctgtctaacgcacgtgtttccctcgtgcttcacttacactaaaacgacgcttaatgaagtcgttccagtgacaaaaggaattgctcaccaaaacgcaacatcaattgtcgtattgaaataacattagctgcataacgcatgatcactctgccgtttcatctctcttgatttgcttcacaacacaacagaaaga

SEQ ID NO: 84829 - DNA, 513 bp, Citrus clementina
  Intron number 1 from transcript clementine0.9_017290m (loc us clementine0.9_017290m.g) derived from phytozome v7.0 (c hr-ID scaffold_10; pos 407428 to 407940 reverse strand)
aagatttctcgcgttcttcctgatcattttgggtattgccctgttttctctctctctctctctctctctttttctttctttctttgtatcattattattattcatgcccaaaatctatttcctttttcattttttatgtctttgattattattatttttttggttttttgtataattgtctgcctgtgtggaaatcattgatgatgaataatgttaatatctgtaatgtaggcgctcaactaattattaatattataaatattttgaatttgataggcaaatcttacatttgccccttgattacctgtttcttcatacagttttgctgctccacagggacatttattatcataatatggatgtagatcgctggattttaaatttgtttaaaatggtttttacaaataatcttgtacaaaggcagcatcaatgtgaagtaggtttatgtttcaatgacttcgatttaattgtgttgcagcaagccaatcactgtccaggagatcctgaaaattg

SEQ ID NO: 84830 - DNA, 428 bp, Citrus clementina; identical to SEQ ID NO: 79469
  Intron number 1 from transcript clementine0.9_010845m (loc us clementine0.9_010845m.g) derived from phytozome v7.0 (c hr-ID scaffold_1; pos 8247147 to 8247574)

SEQ ID NO: 84831 - DNA, 702 bp, Citrus clementina
  Intron number 2 from transcript clementine0.9_006595m (loc us clementine0.9_006595m.g) derived from phytozome v7.0 (c hr-ID scaffold_45; pos 1562359 to 1563060)
cattgcgtttaatcgtcgtggcactctccttgctggtgaatctttctctctcctagcttagctcagtgccattttagttcttttgccacttctactttctgggtattttcattttttcatagaagatttttgttttttgtgtagagcgatggaggttcaggtgtttgacgaaataacattttgagattagcttaaaataagaatatgacttcttataacttgtcagatttcaaggatttttatgttggctggattacttattttggaaaatatgcagtgaatgtagtgatctaatgctagctagcagatacattttggcttcgtggtggaatcacagctaatattgtttgcgagatattaattttcttgtattggccaatacttggttcttgttgtaagaaattcactgagtgtgtgtcaatataaaaagccttagtaattgtgaacccttttcattgaaagctagatttacaagaatttcagtaaagggaattatgctttgtaaagtttaaatgagcaataaatgtggatgatagtttaatggttacatctttaaattaatgaattactgtatattattaaggctagtttagttcctatatttctgttcagtaaagataattagtgggaattggtcggatatattccatgttttttactgctcaccgtctacacttgttgtcatttttctttgacagctgg

SEQ ID NO: 84832 - DNA, 501 bp, Citrus clementina
  Intron number 3 from transcript clementine0.9_030240m (loc us clementine0.9_030240m.g) derived from phytozome v7.0 (c hr-ID scaffold_53; pos 1120252 to 1120752 reverse strand)
ataaaatcgtaagcttcattttttttttttggctttaatttgaactttcggattttcctttgatctgttcttagtatcattcttgtttagcttaattactcatatcaattaattttctctcaatacaggtttgtggcaaaaaaccaacggtaagtaacgaaccacgttatagtttcagttttcgtataactgatatttaaattagggtttccaatcattttaatgtatcttctccattttttcaactaaagagaaatggagcatagaaagatgcatcaagaccaatgcaagaataattgaagtttggcattgaaattaatttgaaaactttaaaccctaaataagttaaaccctatacaccatgagctaaccgtacgagaacctacaagtggaaaatagcgagttagggaatagggatcgatttagcgcggctacattttccaattatggagtagtcaatttatgaattaatgcagggtctagtcgtagcaaattccaaca

SEQ ID NO: 84833 - DNA, 429 bp, Citrus clementina
  Intron number 1 from transcript clementine0.9_004593m (loc us clementine0.9_004593m.g) derived from phytozome v7.0 (c hr-ID scaffold_63; pos 81524 to 81952 reverse strand)
cctctggaggctttgattttgtcgttgctaccttggttcgttcttttttctactcttctcctcttttactctttcttgcaattcgtctttccttttttttttttttttttaaatgtttcattagggtgacttaggtaagcattcacataatttggtatcgtatgtctctgtctcatttcaatggcaacatagtcacctacaataacttgttaattgcctacttctcttctcttctcttctgtggtgaagcagaagcacagcatgccctgcttcatttgtatgcagttacagcattattgattttctttgtttttgcatttgcttttatgttgcgactcacaaaccttttgcattcacattcccacctgaggcagttgcatatttgaattattgctagcactattaatgctttaaaacctgatgacacag

SEQ ID NO: 84834 - DNA, 402 bp, Citrus clementina
  Intron number 1 from transcript clementine0.9_028417m (loc us clementine0.9_028417m.g) derived from phytozome v7.0 (c hr-ID scaffold_177; pos 4217 to 4618 reverse strand)
tctcaatacgtcgacaggttgccgaagatggacaaagatttcatagtgatcaattctactgtgcaatcaaattgccagttacaatttgattattttctcttgcatttctttttcttccttttcgcataaatctgtgaaggatttttttttttaatttaggttgcattatcaaacttggaaatagaattattattttttgaacacaaattgagatttcagaatctctaaaataaatgaggaaaaatttcagctcataaataaacaatttgtcactacacatgaacaacctcagaaatttccagaattaaaaatcactcaaatcatctctcaaaaatttcagctcataaacaaaataaataccggcaagtgacaacgaagtagcagtagacgaagatccgagag

SEQ ID NO: 84835 - DNA, 775 bp, Citrus clementina
  Intron number 3 from transcript clementine0.9_026321m (loc us clementine0.9_026321m.g) derived from phytozome v7.0 (c hr-ID scaffold_33; pos 1629981 to 1630755 reverse strand)
gcgaagtgagttttatttaatcttattcagattttgcaaatcagcttgtggttgctaattggattaaagttcaattttagcttgttatgttatagaacatgctgctagtaggagaacaatatagtgcttcgctaaaggttgtactttttttatcgtaattattgttatgaaatcatgtcttgtttgttttcgcaactcacggctgtctttgctaagttctagagctgaaatagattagtttcataagcagtttagagatgatttatagatcttgttggagttaattttatttgccaacggcttgtgtggctgtttaaggagattaattaccttaggatcaaacattgttcatgtatttgttaattgttttgatagcaatttgagaggttgagataaatgcaaggatggcttaaattgtctttttgtgtgcaaaacaaattacgattcaccttagatgatatatttggtagttgacagtatcttctcaaaactttgaatctttcttccagaaattagtgatttctgtggttttccctactactgtgccattcacaacatcgtccaatataaccttaatcccttaaaagttgtttggacgggaatgcccaatcaatgcatagtttggttcactgggaaagaaacaacaaaggcactatttgggcactgctgaattagagaatgtttgatgaattgcttacttatatgcatcaagctcaaaagaatttctatatatcttaatcccaataatctttcattggtcttctgcagaaactta

SEQ ID NO: 84836 - DNA, 973 bp, Citrus clementina
  Intron number 1 from transcript clementine0.9_001537m (loc us clementine0.9_001537m.g) derived from phytozome v7.0 (c hr-ID scaffold_27; pos 2712315 to 2713287 reverse strand)
tcttgcatttcttctggtcgcaactccgttccaaggtccccctaacttgcacttttcttttatttatttacttattcaacttcatattcttgaagtatatgcgtgattcaaagtatactgaggtgaattatttgtgtgtaatcatttgggattttgctggtagggttttgtattgaagcttctttttttttcttttgttacccttcctggacgacttatcttttaatggagaataagtaaagaaaagagaaatgaaaagatttgggacatttgggacatttaagataagtgaaaattgagtcttgcttaatatttagatatgtagttggctctgggcgagttacgtggttagcttatattgaaatatcgggatatgtatattattgataatagatttcattggtgttgttaccacatggcaatgttggaagtcgcatgtagttgaaatatgatatcatgaggatgattcttgatttaataactattcagaatttgttaacttgtctgcacctatagaaacagtagtgtgctacttttttcttttaagtttgattgagacaaactgagttggtccttgttgcgttgtggaaaatgttacggttgtgattgtcatctaagagtgtaaagtgctcgtgataactaagacccagaagtagactttgggtaattatgttacgagattatgatatagtacggtatctaagtcctttgaagatagtatcacctggtgttgtaaatacatcaattaacatgtggatattattatcatggtattgtagcttattatctctttgcttctgtttttctcctggttttatgattggttaattgaatttattgtcttgactatcgtaaccacttgtattcggagtggatgcaatttgtttgtcattggggatttgattgctaaattacttgatgcttatgatgaaatgcagatctttctcacttgggtcctgtaatagtcgggcag

SEQ ID NO: 84837 - DNA, 473 bp, Citrus clementina; identical to SEQ ID NO: 81310
  Intron number 1 from transcript clementine0.9_032373m (loc us clementine0.9_032373m.g) derived from phytozome v7.0 (c hr-ID scaffold_1; pos 4639619 to 4640091)

SEQ ID NO: 84838 - DNA, 348 bp, Citrus clementina
  Intron number 1 from transcript clementine0.9_005490m (loc us clementine0.9_005497m.g) derived from phytozome v7.0 (c hr-ID scaffold_1; pos 1340414 to 1340761)
gaggacagggcttgtacctcttctactgacagaaggtacaacacacaaccaacacactccgcacctatttcttcctcctacttctcttctttcgctcgttttcagtaaattcagatctgattccgttgcctctatttttagattattcagtcgttttttctttttgtttttactaattattttccattttgaatccattcacttaccttacaatttcaatcttcagtttgattttcttttctttttttgttttactgaaaataagaaaaacaaaaacactaattattaatttttgttttttcttcttctgtagctgcagccatcatttcattcatagaccataattgc

SEQ ID NO: 84839 - DNA, 640 bp, Citrus clementina
  Intron number 1 from transcript clementine0.9_018763m (loc us clementine0.9_018763m.g) derived from phytozome v7.0 (c hr-ID scaffold_1; pos 3525206 to 3525845)
agggtttcctagtgactgcgtagtcatcttgacaggtataaattgctctctactaagttaataagctagcattattgcatttttttgtctaataccttccgtttaaagctcgatcttatttttcagttaccaatatatggcattcgattacttttatgggtacatgttctgttcgttcctacagtttgagtcaattatttttcagttaacctttgtattttttcaaattgtttgaaacatcccgttgtttctttgcagctgtaatcttaattttcctttttctttgatttatttttttttataaggcagaggagttgacaaaactggaacttgattaaaaaattttcaaggttgaaatagtattgatgtcggatattttgagttcaaacaaatttgacatgcaacccgtttaaaataaatgaaaattaaatatattttaacaaaaacaaatatataatataattcttttagataactttgaaaatacaggaattaactaagtagttgactcaaaactataatgatttaagaaaacatttaccatcactcttacattcttatataatatccgccaatatgaacaaaatattcgtataatttgacagaagaagagaaaaatccatataggattccaacaaag

SEQ ID NO: 84840 - DNA, 1034 bp, Citrus clementina
  Intron number 1 from transcript clementine0.9_016973m (loc us clementine0.9_016572m.g) derived from phytozome v7.0 (c hr-ID scaffold_29; pos 983681 to 984714 reverse strand)
tgtatttgaggtatcatttattttatttgtgtttctggattttcttttttaaatttcataatttatgaacttgaatgttaatttttttttaaaaaaaaaagctaattgtattattgttaaactggtcctggcattttgatcctttaagcactatttttttcttggaggcaagatctagaatagattttcatttattatatatagaatcgtagaaatcagattaaatttgaaaacatatatattcttaatccatacacacaagtatatttattctattatccgtacaaataaattttcacatccttgcgacaagtgtaatattgtgtggatgaatgtttgaaatttcaaaaccattttactttggatataaatttataagactgtgaagataaatttgaaatgtgcatgtgtaatgtatttggcacagatttaagattaaaagcaggagaggaatgggtgtagaagttaatgtacaagcttttatttaaaacttgctataattgaaaatggagcatgttctgatgaaagtattagtgcacatagtagaacaatataattaactgaaggatcgagctaaacactcatgctcacggactcgtgctcatgcacattgctaccatgaccaagttgcaatgtcagacagccaagggtctggaaaatctttcagcaggaatatcacctcactgtcttaattggactggataataacttctaagtttgtttctgtttcaaccttagggatctatactcatgagtgcactgaaacttttacataagactctatttttctgaatttgaacattgcttgtatttgatcttttttatggcttcaaaatatgttagtttgcttctgtttaatgttctagtttccatgtctttttcttctagttgcaatttgttctgtgtccattgttcgacatgttatcttcttttttgcaacttctctttttctcaaaatcctcttgtttgataggaagtatctgttcatgtttgttgcagaatttagcaagaagactgattattgggaaggggca

SEQ ID NO: 84841 - DNA, 775 bp, Citrus clementina
  Intron number 1 from transcript clementine0.9_014698m (loc us clementine0.9_014703m.g) derived from phytozome v7.0 (c hr-ID scaffold_1; pos 12152484 to 12153258 reverse strand)
gcctcggtttcttcgctcggttcccgtctatataagtaggtgcaatctcgcctctccattttctccaaattaatttactttcttattgcattttgcttttaatcaatttcttgtttctgggttgttgcgtttttctcttctttgatcatgtatgttttgttccatgtatttgatttgtttatatcttgtgtcttatgatattgattgatttttttcatatttatgagtacttgctctttaattattgcatctttgaatttcgttaattgaataaaacatatggggcatttctggactttgagcttctgatggttgtcttcaatttggatctgtatatctttgattctctgtttataaccggttttttgcatttttttttctttttttgggtggcggggaaatctgtttatttgttaaagcatgatgtttttaaatggtaatcatgttttggaatttgtagcataccacatgcatgtttaaattttataggagctttttgtgcttaatgcaaacgttgttgaatgtagatgcaaagataccgtttataatgtgattgtgaccttgtttgctcggcatttatttaattttaccttttccttttcttaattcaccttcttttcttttgttagaccatgaaaaagatatttctgatgctcatatgctgcttgagttaacactgattgctctataatgtttttccattttactgcttgaaatttactttattatttgctgcaatgtaaattgtaatctgtctgtatatttggttttcaga

SEQ ID NO: 84842 - DNA, 821 bp, Citrus clementina
  Intron number 3 from transcript clementine0.9_025149m (loc us clementine0.9_024338m.g) derived from phytozome v7.0 (c hr-ID scaffold_63; pos 876855 to 877675)
cttcatttgctaacttcaagcaggtattatgttaatattcctattgctagtgagtctgaagatgctcatttgctaacttcaagcagttattatgttaatattgtgaatttctcttggggaactcctggttgttgcttatgtattatctggatctattgctttctacttttactttatgtcttattatttgagactataagttaaacataagaggaactgtactgtttaagagttgtgaatgtatcactgggacaaacacccatggataaagtcagcatttcatgattactgtagcaaacttaatatgtatgattacttgagaagataatggggtgatttggattgctctattctttcttaattgaagagacgactacatatcctcagttattttggcacactttaacgtctttgcttcatatggagtccaagaagataaaatgttgtctatttgtttcatatgtatgaaaaccaaacaatgcatcatcgtgtttaaattttcaaaacgaacattttccaggtggtgtttatggtgctaatttacaaggttgcctattttccaagtggtgtctaaagtgtttgcaccatttgccagcaagcaaccaagattaagctatccagggcctttgcttgcaagaaaatagccatgcagagatttcttttttttcttcccctttttctttctgggtagctcttgtttggctaacagctagcaaagcctacagatatttatcgtttacttttgtgctcacttcttaactcttacattttcttgcatgcatatagggtttagaagacaactttgtcactcttttcatttt

SEQ ID NO: 84843 - DNA, 494 bp, Citrus clementina
  Intron number 1 from transcript clementine0.9_001385m (loc us clementine0.9_001385m.g) derived from phytozome v7.0 (c hr-ID scaffold_1; pos 9558130 to 9558623 reverse strand)
tgtcgacaaaccctaggctggaggattatttatcggttagattgaaaaatttttggtttaatgattgaattgtttgtttggttggtgataaagtgcaaggaaagttcgagaagtgaaggataatgtagaatgtcataaatgctacttgcaaagccttgaggaaaagctcatatgaaaaaaagttcaaaattaaaaaaaaaaagaacatttttgtttatagcaactggatctttgaaaaaaggggcttttggcactgtaagtattattaatatagaccgggattttagtggagtatcttagtattttgatgattgcaatgactaatttgggtaatcttctgtgattgggttgacaactatagaattagtaaatgtcattttttattattttgctggttgcttgagtacttaatattgtttttctaagcattttcttattaactgattttgtatattgcaggttttggcattaccattgccacatagacctctttt

SEQ ID NO: 84844 - DNA, 520 bp, Citrus clementina; identical to SEQ ID NO: 79802
  Intron number 1 from transcript clementine0.9_001502m (loc us clementine0.9_001502m.g) derived from phytozome v7.0 (c hr-ID scaffold_63; pos 930143 to 930662 reverse strand)

SEQ ID NO: 84845 - DNA, 858 bp, Citrus clementina
  Intron number 2 from transcript clementine0.9_000063m (loc us clementine0.9_000063m.g) derived from phytozome v7.0 (c hr-ID scaffold_53; pos 1507821 to 1508678 reverse strand)
ttgcacgacgccgtattgaaacggcgcaggctcaggttacattttgtttatttaggccatgcatgttcgcttttctaaaataactcattgctgctttattagtttaaagctgaatgtagcttatttaaatgcagattatataaggttaattagggaatgtaaattatatgatttgttggttctcaggtggtgggttttttagtttctgcaggagaacctttgagatactgatatttttttttttaattttttcctatctgaatggggttagtgctgctagaataaattctacgtaggtctgggagttgggagtttcttcactcaataaaaaaaaaaaagtaatctttcatcatggcaatttgaggctttaatcaataaagggtagaagtttcaaaggatgattcttggttttcctttctggctcttcttgtaagagagtgaaaattgagcattttaaagggatttgggtcacattggtggttgagaagttagattatgtggtgagttacgattatttcttatgttaggtaattgagaagtttcttatcatgtgctcttgttggttgataggacttttctggacttcttatgactaaccatactcactcgagcctttgatagtttcatgaaattttgattcttgtctttatgatttgttgattacatggtcaagaaaatcctgttcttcatagctacagattcatgtgtaaatcgttccagcttactatcaccagcacatctcttggaacattttacatgcacaattggttgtttgctaactattatgtggtcatagtttaatttaggttgatgctcatcccatgttttttaatcttctttatatggttaatttgcagg

SEQ ID NO: 84846 - DNA, 411 bp, Citrus clementina
  Intron number 1 from transcript clementine0.9_026561m (loc us clementine0.9_026561m.g) derived from phytozome v7.0 (c hr-ID scaffold_10; pos 131661 to 132071)
ttattcctgagcttcgcagcaggcgttccgacaaggtaattacctagccagcttcctgcttttagtttggtctttttctttttcttttcctcttgaatcttagttaatttcctctttttctctctgcatatctgtgcatgatgaattcaaattttgtgtggtttttatttggtttttgatttggagacaatattctcatagcctcatttatttaatatctggtggtgcaacaagttgatggggtgtggcactaatatatgttctcctatatattagaatttcattattttttacgtatctctgcacattttggttttcaaatttgaaattatccataatctttttcatatatgaaatctaaatggacatgctgcaggtatctgcttcgaagatattacaggaaacttgcga

SEQ ID NO: 84847 - DNA, 902 bp, Citrus clementina
  Intron number 1 from transcript clementine0.9_019718m (loc us clementine0.9_019718m.g) derived from phytozome v7.0 (c hr-ID scaffold_27; pos 503206 to 504107)
tactcccttaacaggcaaaatcctcttttgccaaggtaaccattaatacccacatcattaaacaattttttttttcttgcttgcgttgtttcttggtctttcgtttttgggttgttgaatgatgatccgatctggatcacttttatctttttgatacatgttgatgtcccatttttaaggactattctttggtggtctgatgatacataattgaatttcttctatggatcttggtgagattttgtgaatttaaaaagaaaaagaaaaagaaaaggaaagaaaaattggtactttttgttactgttggatggtgcctgaaattaattgtttcggttgaaatgcattaaaagtttgatttgtttttaattatgaggtgatgtggtgttacggtggcatatagtccaaatccagagatcctgcttgtttgtttgtctgtttgtagttctatttgctcgtctatttaatttattttcactaatattattaagaaagacaaagatgatggtgtccattagttgtattaatttatgtgatttcaactgttttgtgtattatttgtttggatgttccatataacagaaatattcaatcaatcatttcgttggggaagatttcaattttggaagcagcgctctagggtttcattttaattggacaacgaaactgactcctttgttgcttttgagtttcttgttttttagtggccgtgtctaagcatttaatggattttgggtttgattaatctttcaaaaagacatctgtttgctgttttcctttctaccactcaatggggatttgcaaagctttttttctttatatcctagtatctcatttttgccgcacgcaatgatttgtattcatatgtgttttgttgaatcttgtcagattatttgcggttgtgg

SEQ ID NO: 84848 - DNA, 775 bp, Citrus clementina
  Intron number 1 from transcript clementine0.9_026486m (loc us clementine0.9_026486m.g) derived from phytozome v7.0 (c hr-ID scaffold_51; pos 429424 to 430198)
ggctgcctcaccaggtctttatttgtgattcttgattcattactcttcttcttcttctgccaggttagatgacttggttaaatttatccttcttttgagtactttacgctaacgggggagctcgtctttgaaatgcttttctctcttacttcccttttgtattcgtatcttatcttgtacttgattgtataaatgaactcaacggaagcttccaatggccaattttaaatatttgttctttaattcttattttttttatttaatttatttaatctttatcttattttggcgagtgtttgagatttatggtttggatttgtaattatggtgagtgttttattggtctggatccgttttgagtatatcctaagcaagtttttggcactttaatagtttaggatattcttttatctatgttctttttgttagccgaaagtagcttttatcactcattttctttttttggttgataccacgtaaaagtaatttggtattttctctaattaaatactgcagattctaatcacattagtgaaagaaaatattaagatggtttattaatctcttctaaaaataatattagcattaacaataacgattattttgcaaatttttgttgcaatgatgttggaatgttcgtagtttatgtagagtatccggactctgctatttggggtctctgtaatgtgtttcttttttcccctaccactctttagtttatctcttctattatgaatgctttagagaaatatttttttgttgcagggtaagagaa

SEQ ID NO: 84849 - DNA, 829 bp, Citrus clementina
  Intron number 2 from transcript clementine0.9_014104m (loc us clementine0.9_014104m.g) derived from phytozome v7.0 (c hr-ID scaffold_1; pos 1412883 to 1413711 reverse strand)
cgcaaaagaaaaaaagtgtttcaagtttgttcctggtaagtcattttcgaataataatgatggtattgctatcactgccgctgctgctttttcattcaacttctcttctttaatattgtagtaaattacaatattctaagagccgcaccaattaaattgaaaggggtttgattaacaaagatttttaaatcattagatgcagctctgaatcattgtaaattttaataaagtgtattggagataatacagtgtaagtaagttaatgaggtccttgttggtattactctcttgtctctttgtcttttcatcaattgttttcatttctcgacacccatttcattgctccatcatcaatcataatcatcccgttcattattttttttttttgagataaataaataaataaatatttttgtcagaaacttcggcttacgaaatgcgaatcttgattctttgagaccactttcaaagtgggaatttgtgtccccatatcgtttttctaaaacatttctttggtcttctctgatcccgagctctttttgctttttttttttgacaccttctaccttttgtctttctccaacaccaatatccattttttttttattgagcaaattttatccgggttaaaaatcaggggccccattttgaatccgagaatgttttctgaacgaaatacagcagcatcttcggaaccaaagcttcccgtattttgcatttactcggtattaattgtgttcatcacatgtcggttgcatccgcattgatgccatttaattttgccttaaaagattaaatttaaattaattgtgcagaaaaaaacggagat

SEQ ID NO: 84850 - DNA, 605 bp, Citrus clementina; identical to SEQ ID NO: 79434
  Intron number 3 from transcript clementine0.9_022228m (loc us clementine0.9_017761m.g) derived from phytozome v7.0 (c hr-ID scaffold_63; pos 694247 to 694851 reverse strand)

SEQ ID NO: 84851 - DNA, 882 bp, Citrus clementina
  Intron number 1 from transcript clementine0.9_017741m (loc us clementine0.9_017737m.g) derived from phytozome v7.0 (c hr-ID scaffold_53; pos 1110013 to 1110894 reverse strand)
tttgtttcttgtttcaaaagcaactcttttgcagggtatgtttgtacacctctaaattttccgtttggctcccgagaaaaaaaattcagaaatttaagagaatcacccctgcactttgatccttaaatcacccctgcatttttttcctttgtttttctgtatttattgtgttgttagagaccagttttgcttttcatttttttagttttgttgttaaatatgtcgttttgagtgtctttctgaactccctttagtctgtatgtgattgtttacagttaacatagaaaagaatcgaaagttgaatgagaaagtttggaactttgtgtttttttcccctccttttctctattgaacttgaataatcaataaactttacttttttcttgttaaaaaaaaaaaacaaaggaaaaaattttccagctgggttatttttttaagttcattttctgaattatttaccatttctttttataaattttacaaatatgtaattcttcgttataaatcttgttttgaagctttgttacagccaatttttttttttttttggaaaaactgttgcagctaatttgtgatcctactcatcgtaagtcatctaataattgtcaaagccaggcaccctttaaaatgttggaggagaaagtttgaaactttgcgtttattttctttttgaactaaaataatgaataaagttcattttttggtttaaacaagtggaataaaaaaatgtcttttgcccatctcggttattttttaaatccattttcttaatatcacttgtagcaattcatacgggtagacaccattttgcacaaatttcgtgcttatttgttaatttactgatccattgctggagtttgatttcagttgcagttttgaaag

SEQ ID NO: 84852 - DNA, 609 bp, Citrus clementina
  Intron number 2 from transcript clementine0.9_024360m (loc us clementine0.9_022864m.g) derived from phytozome v7.0 (c hr-ID scaffold_63; pos 904655 to 905263)
ccgaagccaattggaaatctcaggtactttcttttatcaaatctcaatcttttattctttcttttcttacgtatttaatttttttttcttttaattgggtggatcagatcttatgtgtcagctgataaaagtttcgaatggtgaaggaaaagatttgtttttaagttgaaaattttagttgttttagtttagattcggtacgagatgggattttgacttgtaatgatgattttgagttgtttgtttggtagttgaaggtgaaattggtgagaatgttacaattttgtttgtaaaaagtactgaatttgttgaaattgagtggtgttagggtttcagaaagcttggtgatgctacaggggaattgtaaggatattatgttttggcattatgattttggtttctgctgtaagcattttatttttattttaaaaatttttcggattggaatgtcggagtgctgattatgcactatactaactcatgtcgataatgagtttaagtagcactagttactattttggaagtggttaaaagtaatgttaattgatcatctagttttattctatatgagcagaaagcttgggaagtggcacaagcccctttcaagaa

SEQ ID NO: 84853 - DNA, 521 bp, Citrus clementina
  Intron number 3 from transcript clementine0.9_024360m (loc us clementine0.9_022864m.g) derived from phytozome v7.0 (c hr-ID scaffold_63; pos 905348 to 905868)
gcagcctataagtgctctacaaggggttggaaagggtaagcaccaaggaatttttaattttggatgttaccaatttgtgtgatcaaacttctttctgtttccccttctttgtatatattcattaagagagagagatagaagaaagaaaaagggggaatcaagatggaaaccccactttggcctacaagaaattcttctctcttaccactactcgaagatgtcaaatgatattaatgattgaagtaccattaaatcatgtcattctttggcatcttttgtttcttgtcttccagaagagtatacatttagaatatctgcttttattaacaaattccctagtgttttggtagatctatgtcgttagactatttatcttgccaatttgttatatggatttagagtgtttcaaatctgtatgtgatattcttcaacttatgcatctactgaagatctaaaatatttaccaagttcactttgattttgcagtttttgagccttacaaggacagtaaagtagatctt

SEQ ID NO: 84854 - DNA, 896 bp, Citrus clementina
  Intron number 1 from transcript clementine0.9_006690m (loc us clementine0.9_006701m.g) derived from phytozome v7.0 (c hr-ID scaffold_1; pos 9622597 to 9623492 reverse strand)
aggactttggggattttttgccacaacccagaaaggtaaaaaattcatttttttgtgtctttggtaatttggtaagattttatgatgtgggtatttcgatttttgatggttatttggtgcttgtataaaactttgcttaaaagaaaaattctcaattagggatttttgtgttgaaacaatcgaaggtaaagttccttcttttggactccgtgtatttcttgggtgatttggtgggatattaattcgattattgctggtttatttgatgctactatatgtgtttgcttcaattttaaccattaaccttagtagctatggctgatgatctttcgttttgacttttgagatttttctgttgtttctaatttacatggatattctgttctgtgtttccttatagcttgtattcaaggtattttgcatctgctatgttttgattctctattatattggtgaatgattcaatgaagaattatattcaatctttataactttaataaaaataatcccatgttcttctatggttattgttattgttcaattttgtttacttaatttgattttgttcatatcacagggctcatacattgatttagctatcttaagtttctatatctcttatttttatgaaaaggctaatcttaactgtaccaatttgctgctaaaatactgccagaagcaagtatggagataatgtttttgccaatgcacaagtttttctttgtatatccaaacattgtatatacttgtgcacctttatttgagaaatatttggattagggaagaggtatattggcaataagcatgctgtttttgtgcatctattgactcacatggccttcttgtttggataatgaacagcagcacttggcttgtgctttgacaagtttgataat

SEQ ID NO: 84855 - DNA, 963 bp, Citrus clementina; identical to SEQ ID NO: 84521
  Intron number 1 from transcript clementine0.9_008094m (loc us clementine0.9_008094m.g) derived from phytozome v7.0 (c hr-ID scaffold_53; pos 440413 to 441375)

SEQ ID NO: 84856 - DNA, 940 bp, Citrus clementina
  Intron number 3 from transcript clementine0.9_001672m (loc us clementine0.9_001672m.g) derived from phytozome v7.0 (c hr-ID scaffold_108; pos 633489 to 634428 reverse strand)
gtggaataactacacttcaaggtacacggcaacaagtcactacccaaattccttgtgatattattatggctttaatttttacatatgtataatgtcaaattaaaagcaatttttgactggaaaacttgacaaacttgactataattggtacacgacaaaaatttactttctaatttcttagtaaaattaaaaaataaaataaaataaaatcatttttgagtatatgatcaatttaattatatcttaatcatcataagctttattactacaattatttaatctaactttgaaatttgtttcttaatcttaattctttttttttttccaaagatgattaataaaagttttcttctttcttggtgcaggattagctaaattaaaaagcttggaaacgttggatttgagttataattattatatacacagttctttagaaggcaatttttttaattaaacaatttgcacaattaattttcatttaatatttatcatattattttaattaaacaatttagacgagagtgatgtaactattattgacaaaatttatgtttttttttaataggattagcaaatttgacaaacctgcaagtgttggatttaagcttaaatcaaaatttgacaacgctaggtaagccattgaatctgagataagaagcaaattaagaattaatattcttcaaacgtgcagatcacatacaatacctttaaatgtaatattttcattttttattagcgcatgtaggattggcagatttgccaaatttgaaagcattggatcttcattcttgtgggataactacaattcaaggtatataacaactcacttcctccaatgacaaaaattgttttagatgttaatcaagatgataatatatttgcattttttaattgctttaaactagatcaaatttaaattagaagcactgctttctataca

SEQ ID NO: 84857 - DNA, 764 bp, Citrus clementina
  Intron number 3 from transcript clementine0.9_003493m (loc us clementine0.9_003493m.g) derived from phytozome v7.0 (c hr-ID scaffold_5; pos 1852410 to 1853173)
agggtttcatcacttgctacttgttgtggaccgaggtttgttgctttttatactctgcttttaatcttctctttggtgcagtgtttgggttaattggattgaattcctgtttggttgctgagaaaacttggaaaattaacatctaattaaaaaatgagcattgtgattaattttctttcttgaagttatgcctactaaggtaatggacatggtgttagttttataattcaaaagcttgaattactctctttccattttagcattgggaaatataaaattgagcattgagagtgcttttatttgttgataattcacaactgtactacggtagagagggattgaaaatttctgttgaggagttaaaaagtagtatgatgaaatactttaagcatcatttattactacgatgttgtggaagttaccttttgttaagatgctgcaatgtgacatgtcgtggtactgcatgtcaactaccattgtcttatgtttctttgaaggagctttcacatgttgggtaagctaaagaaacaatgacagtggaatagccttgaaaattgttcttttcatatggtgatggggagtttacatagagaggttcttaagttcaataacttgcctccacgtggttcctatgtagcattaatgacatgccttttttcacttatttaaagaaagtttcatattttgactgcacgtttgttcaaattttgtggtttcatattttgactgcaggtttgttgaacttttgtggcaactttctttgc

SEQ ID NO: 84858 - DNA, 883 bp, Citrus clementina
  Intron number 1 from transcript clementine0.9_000854m (loc us clementine0.9_000858m.g) derived from phytozome v7.0 (c hr-ID scaffold_27; pos 1290017 to 1290899 reverse strand)
gaacagcctctggtcttcggtttcaggttcgatctgtacgacgtcgttgccaactttcgattcccttaattttaatctatccctattccttccttgttttgttttagggtttgatgttaattggggttttggggatttatttctacgatctttagtttttcgccgatgatcgttttggtctttatgggtttttttcttttatgcaattgggtttatctagataattttctttgtttgagtttttgtttgtgctacgtgtttctttatctttttaatctgaacgattgttgttgagctgggtgtttgattttataatctcatgatgttaaaaataattttctgattgattatgaggagattgggttttggtatttggattacaaatgttgaattaaatttgattgttagaaaacatattgggtgtggaagttgaagataatggtattttaaaaaaaatttgtgtgttttgtcataatttggttttggaggaattgaatatacaataataagagcattcaggtaaaactgccatattataattaattcattggaggcttttattcagataggtcctaattgatgaagaattcattgtgctaactgtaatttcctttcctgtcaccacttttttcaacggcctaatggattattgccattttgattctattctttagcttttgagacttttttgtcgtatttcatgttttggttttatacattgttaattaatgttcttttgtcgtattcggggttttggttttatacattgttaatatatgttaggttttttgttatgtgacgtgaggtttaattgctaactttgattctttttgtttggtgcgtcatagcaagtggaattgaacgagtgtggggtagggagttc

SEQ ID NO: 84859 - DNA, 498 bp, Citrus clementina
  Intron number 2 from transcript clementine0.9_021493m (loc us clementine0.9_021493m.g) derived from phytozome v7.0 (c hr-ID scaffold_10; pos 1285246 to 1285743 reverse strand)
gtgttgctaatttgaagaaggtactctatctaactgggtaaataatgccaccatctctttgagggatcattgtcaaattcactcccctctgtttgaatagaatctctgttagctgctctttcttcctcttgcatgtcaattgtcatggaattcttcccttattattatttttatttttttttggttttttttgtgtgtgtgcgcacgcctgcacttggggtgagggtttacagggtcactgcattgtgcaaaaaaaacaaaaaattttatgagactgtttcttttaatcatccttctaagctagggactagtttttagttttgttctttatctgagggttagttctcaaagttttgtattcagcagtcttgacaaacttgtacctggagaatggctgcttctgtgtgttgtacaggaaacatagtaatagttctttcttgctttattttgttgttttcagaaggttggggttcagtgcattgcatagggaagatctac

SEQ ID NO: 84860 - DNA, 671 bp, Citrus clementina
  Intron number 1 from transcript clementine0.9_021493m (loc us clementine0.9_021493m.g) derived from phytozome v7.0 (c hr-ID scaffold_10; pos 1285700 to 1286370 reverse strand)
acttgctgccgcaccatagccggcggaattcccaggtacttatccaatccaatcctaattgctttcaattccaagtaaagactaaacaattaaaatagtcagaatctatttaaaagatgcaaaattctttctttttctttttctttttgattttgatgaagattcagctttttttttttctgctaaaagaatcaaacttattgaataacttggttttatggttcatgtaatgattgattgaggaatattaaaattgaaacaaatggagtttctatttcatgcttacgttttcctttaaattcttgatgatagcctctgtttgacttctagatagaataaaaggtgcccttaggaagggtagtgagggagaaaaaagatcttttgacttcaaaatgtggtgattactggtgaggcagggaattttgcttcttcttcttcccttttttttaaaagaaagtaaacctttcattgaattagcaagagaacagatacaacacatcagctggaaattcatccaaccatacgacagattctatttttcttaaggctagttcagctaaagaatagctatggtgttacataatctagtagtgtgttgagctttgacctttagaaaagatttttatggtgttgctaatttgaagaaggtactctatctaactgggtaaata

SEQ ID NO: 84861 - DNA, 925 bp, Citrus clementina
  Intron number 2 from transcript clementine0.9_025353m (loc us clementine0.9_025353m.g) derived from phytozome v7.0 (c hr-ID scaffold_1; pos 4980473 to 4981397 reverse strand)
ggcgtcgttcgccgtcgtcagccacacaaggtaaggtatatttatgcgattccagatggtgaatgaatggctgtttgtaattcaatcttcttttgggcttgggtaagtagcgtgacgggcactgaaactgttcaatcttcttttatataatggctgttattgttgctgatttggtttcttaacattgtaattgttgttgtcttgagtgttgatggtgatggatttttacatctattatatttgtttgtcatttagagatgggtttatggagatgggttgttaatcatgtttgtcatttggagatgtaacttcagtagcttggtgccttggtagttgactgcactttatttatttatttatattcttttgttctttgttaccttatgtcgtttaaaaagactttttgaggatgcttgatagtttgtattcatttttgcatcattcagctgggctggtatttgagatttttggaattgtaggtggctgcctggctgggatttgattcattttgaaatagaattgaattttgggataggttgtaacctgaattgcaaccaaaatcgaaatttagacccgaattttcaatctaaactgatccaaaactcgaacctaaactgaaccaaaatgaacagatcagggattatccggatatccccgatccaaccccaattaccacaatttgggtggtagggatgggttcaaggattactaaaaacttaggatcgagtctagggatcgtgatccctggcccaatgccatctctaatttgtttgtgtaaatctctagctattttttttttttaattatttgagagtgaggtggggattggaatattttgatcatattggttttcagctactcataagattgtatgtttgttcctgattttgctttttctttggcagttcaatcaatttaaatttaa

SEQ ID NO: 84862 - DNA, 536 bp, Citrus clementina
  Intron number 1 from transcript clementine0.9_012818m (loc us clementine0.9_012818m.g) derived from phytozome v7.0 (c hr-ID scaffold_1; pos 8428264 to 8428799 reverse strand)
cttctcagagaaactgtaaagaaggtacaataatgctgttatataaaaaaattgctggggtctttgattttgattttccctttttaaggtgtttaaattgctggggttgcattaggcttatctgagtcacaagttcaaacgcgtttctttttttttttgttctcttagttcttttggtttttttcatattatcagcagatggggttgtaataatttctacttgtggtaacaatttcaagatctttgaattattttgtttccattgtcttctcagtaaccaagcagagaatgttcttctcaaagggattttaattgttttctttgtttctctaaacttaagaatgatcataaacagtttctgctctaggcctagctaagtataattcatatcagagtttttattcttttttggtttccttagttttctcagcagccacgtagacaattttctgccaatggggatttgaatttcttctttaattttctttaacctgtgggtttgtgttatttgttggttggcttatgaaggtggacaa

SEQ ID NO: 84863 - DNA, 977 bp, Citrus clementina
  Intron number 1 from transcript clementine0.9_005115m (loc us clementine0.9_005123m.g) derived from phytozome v7.0 (c hr-ID scaffold_1; pos 5351121 to 5352097)
ctctcttcttgatttgatctcttcggatcaagacggtgcgtcgtttctttgtttttttcttttttcatcaggtacattaattattaatttgcattctctctctcttttttatttttaataaaattttaagttccgaatcttaacattttacttatgattaactttccgaagctgcatttgttgatttattttttattttttggttctcggtatatttttaattttatttcataatgtagtatttatttatgctgcatttttttattttttatttaggtgtttgattttgaagctcaataatttgtgacctgaagctgctttttaagttagatattttctcctctctttttgttagtatttgtttgctttttttttttttttccttgatttccattaattagaaagttttaattaacttgaatgcaggcttaatgctttagttgatcagatgaaatgtaagaggtagaatgacaagttccacagtatcgtcgaatgcagtttaaaaaaagtaataataataataataataaaagatttgcagagactataagtttcttaaatactgtaaagttatttttgttttctttctattttttgcaatcagagaatgatatgtgaattgaattcaaagatcacatacattattttgttttagctgttttttccgtggcttttaaggctctttttagtattttttttttctcatttgagaagtgatatttgatatagttactttctttgtttgtgaagaggattttgtttgcttataaaggatatgcacttcttgagtgactttacagatagtgtaacttaccttccttttgttgtttacttcttgaaattttatttgcttctgcatttatggtgtacaatttgggaaatgtagaggatttctttttgcatttttgtgatatctcatggcactgaaactctcttgcatatgcggtttggtaaaggttttggaacggacctcacac

SEQ ID NO: 84864 - DNA, 693 bp, Citrus clementina
  Intron number 2 from transcript clementine0.9_000882m (loc us clementine0.9_000882m.g) derived from phytozome v7.0 (c hr-ID scaffold_5; pos 3051402 to 3052094)
aagtctgggttgttaagcagggcatcaaaaaacttgtacgtaaaccttttttttttccaagtcatcttacattttctggcaattggtcaaggatatcttgcttttgctctgtttgcacacctctacaaattttgttattttggcatttaattgttatcaatttagataattattgattagaagacatatgactattaaaacttgaaacactgcattgctatcaaactatttttatttttggaaaatggaaatagacatcaaagtatttgtacaaatcggtattgaattttttaattcaaaacaaacaaaatcacatgcatgcacaaatattcagctgcatgcttttggttattgaaatgctgcagttatcttctagaggaaatgtttttgttaccaagctccctatatccccaagggagcgacccaaaaggacagaattgtgagaacattcgtcattgttaaattctttgtggtttggatttcattgaaaaggagatcaagtgggtggcaggggcaggagttaggtgtaactgcaattgtcaatactagaaagcattagctgaaactaatgtacaatgataaattgttgcttctttatctttaattgttgtatactaattatctctttatgtctgtttcattggcgatttatttgcagatacaatctcaggacattcgggttggtaacatagt

SEQ ID NO: 84865 - DNA, 428 bp, Citrus clementina
  Intron number 4 from transcript clementine0.9_034626m (loc us clementine0.9_034626m.g) derived from phytozome v7.0 (c hr-ID scaffold_20; pos 1982904 to 1983331)
attgaatcactgtgtggtaatcttcattttgaagggtaggcctctttcctcccaatgcccttttatattgcattatgttgtttgtttttatagtcctgagttttatgtttcttgctgctacaatttttttttcttttgattttctgatgttagtgtgaatgttacatgctagaatggttgataaaatctcaagctcacgtatttgtcaaacttcaagtagtcaatgagagcaggccagaagaatgcaaataatactttctatttgatcttgtgaatttctaaatgttttctcatacctaataatatacaatttctcattctatgaaagtcttcattatctgtctttggaatcatttttgcttcataaataatactttctatttgatcttgtaggtttaggaaaagatactattttctttttgaaacta

SEQ ID NO: 84866 - DNA, 557 bp, Citrus clementina
  Intron number 1 from transcript clementine0.9_031443m (loc us clementine0.9_031443m.g) derived from phytozome v7.0 (c hr-ID scaffold_43; pos 250003 to 250559)
cttgaagtaccaaagtacaaaaggtgagtacatgtatctgagggtaattaacctttgcgtgtgtttttgtgtgcctgtgtgtataaccactgcttcatgccttcccgaaagctatgtttagtaagttgggtgtggtaccagactaccaggtattgttaactttttgtattattactaatacgacaatctattatcaccaactaattagtgatacatgagacggcattcgaaagtaattttttctatcgccaattaattttctgatgtagctaatttacatttttccaacctctttgatccatttacatcattatcatttttgcttaaaatacagtggttgtgtcattctcctaatttatcgtcattattcataatcttgaatattaaaagtaaaactctttgctttgggaagtagtcatgacgttagttttttttgcttcggaaaataaggaaaagaaatagaaaaaataaaggtactgatcatttacttggtattacagaaactatgtcaacctctgctctgctttcctctgttttttgctaagcaaaacgaaaac

SEQ ID NO: 84867 - DNA, 503 bp, Citrus clementina
  Intron number 1 from transcript clementine0.9_011642m (loc us clementine0.9_011642m.g) derived from phytozome v7.0 (c hr-ID scaffold_23; pos 1822509 to 1823011 reverse strand)
gtttctgctcccagctgctgattcttcaatttcaggtacttttatttcactctgtctcttttgttttcttggatcattgctttttatgtttctgttgatcatatatttgtttgtcggtgaactgaaggaaaatacaagaaaaacaaaagggtatttttgtattgattattgaactagaaagaaagaaatatgcttcgtatgttttcttacatcatcttgtgtttgattgttggtaaagtgaagcaaaaaccaaggaaacgggtatgtttttttcatattaaattgcaaaacactaccatcatgagcttagatataaccggcaatcttcttaactcaactgaaatataatagcgtatcccttttcttttctttttttaataagaaagataatagcgtatcttgcttggcttaatgaggctgtttgaattttaatatgacaagctttgattgaaaaaatatcaagatgacaattttttttgttttgatattggttttagcagagg

SEQ ID NO: 84868 - DNA, 526 bp, Citrus clementina
  Intron number 2 from transcript clementine0.9_023952m (loc us clementine0.9_023952m.g) derived from phytozome v7.0 (c hr-ID scaffold_27; pos 2727071 to 2727596 reverse strand)
gcatgtaagttcttaacttccacatggttttggttttgttcatttatttatttatttttgtgtgggaacttgaaatttatcagctcttgcttttatacaattgttatgtgaaatataattttgcccttaggattatcaaagtttgccacaatgagctcattttctgtttggattatgagtttcacaggctcataattaggaattagtcaaaagaaaaaggggagctttacagttttaaactttgttccaatccattagagatctggaaaactactttgtggacttgtacatccagcagaaaataacgtaaaacaaggagttttatgtttacgagataaagcgtccagtgatctgagtactgtattaagtcaatatgcctcagcgttgatgggttgatgttttgaaaagtcttagtcaactaagttaaatcatgaatataatgtaattgcattgaaacattatcttcaagaaatatgatcattcatacactcattattgttttgtgtttgttctttgttgggttagc

SEQ ID NO: 84869 - DNA, 397 bp, Citrus clementina
  Intron number 1 from transcript clementine0.9_018057m (loc us clementine0.9_018057m.g) derived from phytozome v7.0 (c hr-ID scaffold_63; pos 365797 to 366193 reverse strand)
ctcagtccgccgattatccttcttctacggcaagagtaagtcatttccctcaaattttgcgtctataatttctgtttgtttcgactaaattagttatctctgttcgcttagcgttttgaaccttggaaaattttaataatgagaaaggtagctagttagttagctttttcgtatcttactatttattttagggtttctttttctttgtttgattgttactctgatgggctctgttgatgaaatctcattaattttacttatttctggcggttaatagttatttatctttaaacttgccaaagcataatcattgtttcttttggtatgttttctgatgtcaataactgtttctttgcgcacagagtcgtgattctcaagggttagtaccagtgacagt

SEQ ID NO: 84870 - DNA, 921 bp, Citrus clementina
  Intron number 5 from transcript clementine0.9_033137m (loc us clementine0.9_033137m.g) derived from phytozome v7.0 (c hr-ID scaffold_1; pos 13061282 to 13062202)
ggggcagacctaacaactctccacaacagcagcaggtgataatgttgtttgcccattgcatttgactatatatttctgtgaaatagcttcaagataaaagagtcttatacgttatatgtatattactttcatatcgtgtaagttattctccctacactgtttactagatcataaaaaagccaatggctggattaaacttacaatcagttttaacaaccattttgttaaagttctttttttcactttttcaaaatttcactgtttatatagtcttatttttctcagaatcagggaaatcttttatgtatcctcattaaaagattagcagtatatccgctatagatatcttactcatttatgtctcacaacagtaaattttaaaaaacttctctctctttggcagggcttcccagcccttgacttcatacttaccactggcatatctacatgtacctgacacccctattttgttgtttgatagcaatgcattagtctgcaattgtacaagtgggcgagaatatcatccttaccggtgtttatgtttcttttagaaaactgttacttgtggatgtctgcctcctattcttatagtctattaaactcatagtgaatttgttttctctgtataggtaagggcgagaatatcacccttacctgtgtttatgtttcttttagaaggctgttacgtgtggatatatgccttctattcttagagagtcaatcaaactcacgtgagttagttttctttgatacattcttagagaaatgccagttaatttgcacagacttctgcttcatctggacttattgcagaagatactaataatgctttgcgagtgctccagtgtctcttttgaaggaatttcttaatttgatatttatacttctcttcatcctgtaatttgttgcagaaagatcata

SEQ ID NO: 84871 - DNA, 658 bp, Citrus clementina
  Intron number 1 from transcript clementine0.9_024384m (loc us clementine0.9_024384m.g) derived from phytozome v7.0 (c hr-ID scaffold_10; pos 2378043 to 2378700 reverse strand)
ctgaaacgacaaacttccgttggtaacaactcgtcccagtttcaaactactgtccgtatgtttaatttttaaattagcttagttttaacaaagaattgtaatgtgcatgcgttctctagtaaagaagggcttttttccctcctctttatgcttttcttcttgaaattgataacaaatctattctttgcttgcttttcctgttttctttttacttttggtagtattcaagttatctcgttgttgtcgggatggggtgatttttaaattattcttacctctttgtaaagaccaccctggtagttaattatggataatgccgaaggtttgctcatctttcgcctgtctttgtattttcttttatattgccatgtgtggaagcctttgaattcttggcaatggtttgtttgcatttattttttttttcaaagatacaaaaccggaacatgagtgttggaaaattatagttttgaaattgcgttaacatcgttggagaaaatattaatccattgataaattttttatgagtacgtagttaaaatatatatgtgcatgtctatatggttgggtggatgtatatgttgaatagctaaaagcttaattgtcgtcttgatcgcttaatgaatggatttttgttagcttgattcaggcatagctggtg

SEQ ID NO: 84872 - DNA, 283 bp, Citrus clementina
  Intron number 1 from transcript clementine0.9_025099m (loc us clementine0.9_025125m.g) derived from phytozome v7.0 (c hr-ID scaffold_23; pos 3177914 to 3178196)
gagaaattgagtggaagagttgaagaaactcagaggtacgtccttttgttttttgttaattaggtttttttttttgtttatttagaaaaaaacaaatcttgtgattttgccgtgtcatcattcttatcgtgttggctttctcctcttaccggcgaatttgtcaatttagggtttttgattttgacttattcttgaaatcgcttgtgtaatccgtagggttgtcgtttatttaagatctgatcaagaattggtttaaattaagcggtgattgtaatctgtacag

SEQ ID NO: 84873 - DNA, 855 bp, Citrus clementina
  Intron number 1 from transcript clementine0.9_004602m (loc us clementine0.9_003860m.g) derived from phytozome v7.0 (c hr-ID scaffold_23; pos 3599866 to 3600720 reverse strand)
atttcgcttaacacactttgttcttcttcttcactgtaagatttctctttaatatgacctttactttgactgcttattatttcaatgcggttacaggaaaaatatacatatgttaatcgtggcgggaaccaatttttggacactaatgtcggtaactttgatttaatttgttgaatgcaattgaaggatcctatagcgttcaatgttcatttctttgttgtacgtatgtagcattgctggtggactgactcgtcattgattgcttgttcatgtgacgatttcaatttcgtgggtcctgcgatccccaaaaacagaacactgttgggtttcttttattttatttcgaagtattctgtttggttaatctgaaagaaagaaatgaaatagctaaagagctttgattcttcttcttttttttaatattttttgtattttgaatgaacaagaaaaaaagagaggtcttttggtcgagtcaaagagaaggcaggcatctagggtttctgttttctgctacttttactaaatctgtttaaattctgattgcatttgcatggtttaaattgcacttggtaaaaagttagctacattttcggaaacatctttattttgtagctattgatttttgttaactgaaattggttttgttgttcattcttgttttggggtttttgtattgacatatgcattgcttgtaattcttgaagttgacttaagcatttgttataattgctgaattattcatgtgcatttcttgaacatgctgttgctgtatttgttacaggaatgtaattgttgatattgggtttgcatctatttgtaggtttttttctacaggtgatttcttgggtgggtttc

SEQ ID NO: 84874 - DNA, 475 bp, Citrus clementina
  Intron number 2 from transcript clementine0.9_019492m (loc us clementine0.9_019492m.g) derived from phytozome v7.0 (c hr-ID scaffold_1; pos 4635671 to 4636145)
ggtctttgattggctcattactctgtttcattaaggtacttattttttaagtttaaatatatctttttgttaaatgttaattccactgtttaattgatgctatgtaatttttagacctcaattcttggtattgtccaagatattgttatatgataaaaattgaaaagaacaatctttttcatctgaatttgtaattagctgacagacttattgaattatagactatttttacaaataatgtattcttaacccggcaaatgcaattctatcagtcatcttagagtaatgtattttgtttgttttatgctgaatgaaattcagattaggagatactaatgatgtggggagcattagcagatcatcttggctgtcatgtgtagccatccatatgtattgattattttgtttttgtgactattctctttagtgttttgatttacactgttgactcttctcgatatgcagggttgcacct

SEQ ID NO: 84875 - DNA, 974 bp, Citrus clementina
  Intron number 1 from transcript clementine0.9_009583m (loc us clementine0.9_009583m.g) derived from phytozome v7.0 (c hr-ID scaffold_5; pos 1928611 to 1929584)
cagatccctcaaggtcacattttgctttgatttgattgttaacatttctttggaatcttttattttgcagtgtagggaagggttaatgatatttttagtttatagggagaaatgataactaatttatcttgttcaagtttgatgatccttggtaattgataacatgtagttatatttcttcatggaaacttaagagtcagcctttgttggtttaatgggtctccgaatgtcttaaagagtaatcattaatcctaaagacccttttattgctgtagttaattacatacatctattaaaaccatcaagaattttagtttggccataaaggcttttaggtttatctaaccacttgaactgattcttttgaagggaaaatttctgagatttaagtaatagaagagacagctcgaaagtgttgtgtcaatttaagatttattttctctcccaaggctaatttgtttatcccacatgcattcaaatggcctaggatcttcatgctggccttttgtacttccctgtaatgtgccgtctttggcggcaaaaaccagctcacggcacctttagttggtcactattgttgctgttctatgttggggtgctagtagttaagttgatatcatttgtaattcacttttgtcagcttcttgtcttattcacttttgagattaaggtaaagctggtgaaatgcaataagtacctgtttgtcctgaaatggagctgatcaccaataatggttgtgtatgacttaatgattagcatggtggatttggttgtgtaattgaggcaatacaaacttgacctgttgatattatctattgattaatatttttgccagtatattaagctgtaaatgctcattttgggagttctgaaatttgtgattaaataagcattttcttcactgctatcaaaatcacttagacatattgcaattatttcttccaaatcgctaacttgtcatatttttataacag

SEQ ID NO: 84876 - DNA, 904 bp, Citrus clementina
  Intron number 1 from transcript clementine0.9_004404m (loc us clementine0.9_003910m.g) derived from phytozome v7.0 (c hr-ID scaffold_67; pos 539171 to 540074 reverse strand)
gttatcgccaactctgttgtcgcccgttgttccaagtaccctcttcactcttcttcataattagtaatgtttgatttgtcatcaaagttgattcatttggaagagaatgccgccttgtgaaatgggtcttttttttcgtttaattccttttttgtttgggtgggatcatcaagatcttcccttttgatgtatttgcgtaaagtttctttttttttcccctcacttggtggatgttagaaatgagtggggttagaattcaattagtgttttagctaattttatgttacaatgcatatgtttatggatagaaagattcattttttatttgatggattttcgaaactgatagaatcagaatttttttcttttttccttttttttttgggaatagatgtgtatttataagcttctcataagtaagccttcttcagtatagaaagttgtcttacaatgacattaaatgcttggaatttcggctcaatctggatttagtcttttaattgtgttgtggtatgcaatgttgtatcatagtagatttattaggttttgcatacattgttactgtcacttgatgcataataaattgatgccatacgcatactgaaatttgagttgtatttttactgaaactgcttggatgtgtgcttgattttgcgatggtgcctctatttgattggatgtgaaaatgattgatgagaaacgaatgtgaaatgcactatgaaattgtgtgtttagtatacttttaaacaactttgaggtactcagaacaattatatcctttcctatgatgctacgatgctcaacaactaagctgaaaagtgttatttcttgtcattgtaatgcctctaacacatttctgaatgttgcaggatccttaaagtctctactgcagaattacagcacc

SEQ ID NO: 84877 - DNA, 408 bp, Citrus clementina
  Intron number 2 from transcript clementine0.9_024510m (loc us clementine0.9_024510m.g) derived from phytozome v7.0 (c hr-ID scaffold_27; pos 36022 to 36429)
aacaaaaggttcctattaatattttttatatttatttatttttttgcttcttttgtactcttcgggtttagttggttaatagatttgttctgtttagctggtaatggctgggtactttaataaggatgtctctattggaatctcaatcttttgttttgattgcaatttagtagaataagaattggatcttaattatgtatgtagtaacacgctctattgtacttattgctagtttattcatttgttattttgaacctctcaattgcattttagatgagcttttcattgtttctttttcttggattgttgtgttgagcttgtgttttctgtttgtttgactttgctgaattttggtttatgttgtcttctctagagctggtgagctctctgccgctgagcttgaccaac

SEQ ID NO: 84878 - DNA, 451 bp, Citrus clementina
  Intron number 1 from transcript clementine0.9_017983m (loc us clementine0.9_017983m.g) derived from phytozome v7.0 (c hr-ID scaffold_20; pos 3605726 to 3606176)
ctgttagtgtgcagtatcttcaacagcctgagaaggtaacaattttggtgtttattttgtcattatcaccctcatccttttaagagcataacattttatttggtcaatagaacagttgagacttgtctatgtgtatgtgtattgttgttgccttttttcacttattagcgtaagcttttggtctaacatttctctaagttgacattataactaaggcctcctgtttgattctccttattcacttgtccactttttgagcttacgtcttgatctctgtggatccactaaactttaaaaaatcacactacttacattttactcaaagggtctattgaaacttatcttcaatactatcaagtacagggcatgaagattgaagtaaaagtccagcaaaaataattaatatctttttacaggtatttgctgaagtgtttcgagtgctaaagccagg

SEQ ID NO: 84879 - DNA, 562 bp, Citrus clementina
  Intron number 1 from transcript clementine0.9_034999m (loc us clementine0.9_034999m.g) derived from phytozome v7.0 (c hr-ID scaffold_82; pos 1070420 to 1070981)
tggcctcaaggcaaccccagcttctggtgattttttttttttttcttctttttaatgagccttcataatttcttttctcataatcttttacatgttttttgttgtcgatttatttgatccgtagctaacgttaacatgcactcatatacacacacccaaaaaaaaaatgttcgtataatacagaaagctgcaaagttgatggagtcggacaaaatttcaaatatcaaattaaaacctttattttttttatggatttttatttttcccagcttggaggattggttagaacccaggcctcaatatagtttcgcctccccctggctgctactgagtgccttcagtagctatcaatgccttatttattagtcttatccttaaaaccaaaatgtagttaatgcatgtgccagtatagaatgattgttctacctcaaactgcacatgttcttgcaggaaaactgcaaacagacatagaatcagttccttgaaatgacaatgtgtttgatttaattttttcccctttcgttgtcgtgatagtgaaactctcaagtcagtgacctcaaag

SEQ ID NO: 84880 - DNA, 544 bp, Citrus clementina; identical to SEQ ID NO: 81334
  Intron number 1 from transcript clementine0.9_014572m (loc us clementine0.9_009175m.g) derived from phytozome v7.0 (c hr-ID scaffold_90; pos 381791 to 382334)

SEQ ID NO: 84881 - DNA, 895 bp, Citrus clementina
  Intron number 1 from transcript clementine0.9_008973m (loc us clementine0.9_008973m.g) derived from phytozome v7.0 (c hr-ID scaffold_10; pos 5915528 to 5916422)
tcttaggcctgggccaggctgtaattttgcttcttttttttttttttatgaagtttgaatcttgtttcttgtcaaatgaaaagcttggattttcgtttgaattcgtgtaggagaaattgtactacataacagataaaaattttgaacttttgtgctggattgttagttctgtataataatcaaattgtttgtgaaaaatattatatgctctagctatttagaatatttataaagtttacaaattacaaatcttggttcttcttatattcgcgcctttggtaagctttctattttttttttttcccccatgtggtatgggcgaagggttgctgatttcgcattacaattggtctttggagtcatcatttgaattgagttgctacattgagcattttggatattaagtggtatagtttgggtatgattcatttgtgagtaactttgtgtagagtacggatatcaaaccggggtgttctaagtttaagataatgatggggttcacgagaaggttttattattagaatcttatgcatggaatgtgcttgtttacattaaaatggttgaattttgtagtagtacctccattcatgtgaaggaattgtcatttttttctttggggttgtaactgtttgattctcaggtgtttaattggtccagaaattcatgttatttttatttgatgctgatgtaaatgccgcatgagataaaaatgttgcagttcaccagaaggctctgtgccaatatttcttatacccgttgaatagttcccacatttattggagaattatctccaactttgatacatatacatgtgatgttatagtattatacataataatcattttatcttggcattccgtgtctgtactggtatttttaggtagatttttctggc

SEQ ID NO: 84882 - DNA, 687 bp, Citrus clementina
  Intron number 1 from transcript clementine0.9_020510m (loc us clementine0.9_020510m.g) derived from phytozome v7.0 (c hr-ID scaffold_10; pos 1384306 to 1384992)
cgagactccttgaggcttatatagattgccagaaggtaaaataaataatttcctttttcttaaaacaaagagtactctttttattttgttacatagtctggtgcaaaactggctggtaattgcttaatggattaaagtcatttattttatgtgtcagtgagtactgcaggaggtagctggctagctagaagaggaaaattgaagtactcttttcttttgctttgtgcttttaattcccaacctaatgaatgaatgaataagcgtttaattttttttctgagggttaaacagaaacttttctgttcacacaacagtttcagtttgctcggactttgagctttttacctgcgtgctttgtggaggattttttcttcttttttcttttcttttctctctctctttttttctgttcttttttttttttctggtttccatgtctttgatctccaggatccaagatttttctttttttctttgcttttgccttgtgtaaaatgtccaacattcttttttctcttttctttcttccggaaaacagattttggtggtgaagcaagttaattttgagttaaattttgctgtgaaatgaagctccattttgcttattacttggatgcttaatttttttttttctccatttttgggtttttaggtaggagctcctccggaaatagcttatctgttaga

SEQ ID NO: 84883 - DNA, 497 bp, Citrus clementina
  Intron number 1 from transcript clementine0.9_035286m (loc us clementine0.9_035286m.g) derived from phytozome v7.0 (c hr-ID scaffold_49; pos 859917 to 860413)
tattcctccttgtgtcggaaacaattgtcaccaacgtaaacgttaaaaatgtctttgaaattaacgtcgtccttaattgatattttctacaattgactgactccaacatacggcttcttaatttgaatgttgacaatttcaagttcgaaagaggcaatatatatatatatatataagcatccacatagaactaacacttatattgtcagttgattcttcttcaacaaccaaaatactcatatttgtttcttcttagttatcatcccaaaactgccatataagtaggactgaaggaccaaattaaccaacatcaagcatttcacaaaaatttactttgcaaacaaaacttcaactgttcaacacagagtcaatggattcttcttcattaacccaaatgctcacattgccatcatcattgcctgtcattttaacttctcttctctttttcttggtacttgttagacattggaaggtctccaaaggccaaggcaattttc

SEQ ID NO: 84884 - DNA, 720 bp, Citrus clementina
  Intron number 1 from transcript clementine0.9_013253m (loc us clementine0.9_013190m.g) derived from phytozome v7.0 (c hr-ID scaffold_1; pos 4983815 to 4984534)
cttcattaaactctcaaagttcaggtgtttttcaggtaacaaagaaaaaggaaaatccccatcttgggcattggctctgcttactctgtttcagtgctctgtttttttaaggctttttatttgctttccacatgttttccttttgattttgctgcctgaatttttctgggtatgttttaaattgtctgtttagaggaagtatggccctgcatttgtagagatcctctgttttcttctttgtagtttttgttctttgcctgctttgcttaattcttgtgtggttgttttgtttctaggttgttacttacagtgatgcaggagtagaacagttgcaaatctgggagatttttatttgttcatagtttcccaaatatttgttacttaactgattgtttcgtatttgtatttgttcatagatttgcatttattctatccatgttagcatattaacatatgcatgaatattaggtattaactttctttaagtagtctatttcatgaataatggtaattctctttgcaaaaattgcctttggccttcttgttggttttgcgttattccattaattttggccattgcatgaaactttaattccttttggttcttgtgcatgcatcattcttgttggatttgttctttgattgaaacaccaaataatcttgatccacttgtgcttataaactctttgtattttgtctgactaattcgaatcctgcaga

SEQ ID NO: 84885 - DNA, 645 bp, Citrus clementina
  Intron number 4 from transcript clementine0.9_013253m (loc us clementine0.9_013190m.g) derived from phytozome v7.0 (c hr-ID scaffold_1; pos 4985472 to 4986116)
tgttgaaggtgtgctcaggttagcaattgctggttttgttgctaatctgtccgaagctcacattttctttgttgaggtttctcggtgtcatgcagtaggggatcgtattgattgtagtgtttccctgtctgaaaaattcctctagatttgtcgagttttagagatcaacacaatgttgaactgcatgagttgactcagatttatgtatgatgcaaacgtggtaaaatattcgctaaatgtgttaaaaaggcaagtgtcttctagattgctttcttggtggttagagaccggagtgtggaggatggccatgtttcttaaattatctcatgaaccacaactgggaagtcgtgggaaataaataattctttctcaatgagaaaggaaagaggctttaatgtgttgtcttttttgtgtaaaatgttgtagctaggaattgtgattagtacgttacactgtactagcctaacatggagaccataataaagtatatctattttgtgttttaacatgagattcaaattgaaatcagattgtttgactactttctcattttggagtttctgtttcagctcctgtaattgatgtactattttgaatttaatatctgtagattgacgaagtcagacttccgtgagccagtgaaca

SEQ ID NO: 84886 - DNA, 564 bp, Citrus clementina
  Intron number 1 from transcript clementine0.9_005575m (loc us clementine0.9_005109m.g) derived from phytozome v7.0 (c hr-ID scaffold_20; pos 1901995 to 1902558)
tgagttgctgcccaagacccgtctcttccgttctggtaccacttttttttttaaaaaaaattaaattcagctttatctgattttattatgcttttctaaagaatttctgtttctgggttgttttgatctgtttggattgaagttcttgatgttgattgtgtttactactaaagctgtgatacctgttttcgagatcaatcttctcttctttctgtgcttactttcttctcgggaaagttgaacttaactttactaattttcccgggaaatttgtgaggattccacctgttatatatggtatgatctgtcatttgattgctgatgattgcttgagtattgtttgttaattttttgcaaatcaatctatttatgaatctgtttaattgttttcactcgcgatgtttaagcaagttgcgtctgtgttgtcaaataattgttgtctgatctttgtggtaatttaatgtttagatggacatttctgctagaatattatgatgatgtttgttggttattatcatgatttttacaggtaaaaagggttgcgatacttgggcaactttgaag

SEQ ID NO: 84887 - DNA, 177 bp, Citrus clementina; identical to SEQ ID NO: 83995
  Intron number 1 from transcript clementine0.9_024312m (loc us clementine0.9_024286m.g) derived from phytozome v7.0 (c hr-ID scaffold_29; pos 725172 to 725348 reverse strand)

SEQ ID NO: 84888 - DNA, 925 bp, Citrus clementina
  Intron number 1 from transcript clementine0.9_000989m (loc us clementine0.9_000989m.g) derived from phytozome v7.0 (c hr-ID scaffold_82; pos 119116 to 120040)
catagttagctcgctctctttgtttactttttcaggtgagccttttctccgttacttttaatgtttttttaagaaaaagaaagaaataaatttattgataatttttggtttcatctatgctaacttaagctgtaagtacaggtttctcccttggccaaaatcaagtattatgattttttttaatcttttaagctcgaatttctgtactttttcaattctttattttatttgtgaaatgtctaatcttggtgtagctgctttctcatgattctttcttgatctgtgcgattatctttgacggtggcttgtttctgtttgcgttgttgaagacggctgtctaattttgttgttttgaggcgttttcttgtttgtttgtttaggattccttttgatggatcaaagccctaaccctttattttgtttagttgccgagaatatggaggaaacaaggaagtgaaattttttcctcaggtttcaaattcatgaattattgttttaattagaggaatggatttacaactgtcagagctgcttgattgtggttattttgtgtctgtgtgtgtttgtggttgtgtttggttgctgagaaaatgtacggaaagaaaagatttttgtctatagtttcttgtcaatatcccagagttgcttctatattttaagtattttgaagaaaacagcagaaactaagtgcagtttttacgaaaaaattgagaggagaaatgcaaatttagattttgctgtgttatgttactcttttgagaaagaaaaaagtaatgatttgcctgaccaattgagcctcagagttatattgggcttcatttttttttttgttttttttgttttaggtataagttattttgtttatcggtttcccaaatttggtttcatttataggtgttggagactagaaaggactaccgtggag

SEQ ID NO: 84889 - DNA, 459 bp, Citrus clementina
  Intron number 2 from transcript clementine0.9_006307m (loc us clementine0.9_006307m.g) derived from phytozome v7.0 (c hr-ID scaffold_1; pos 12199917 to 12200375 reverse strand)
aggtatcaaatgtttgaggttgcggttgttttttcaaccttgtgaactggtgcatttgaatatattacgcaatgaattttatgagatgggttttcgtttctattttttaagtttaacttaataagttatataatacatattgaatttgtgaattttcttttctaaatcttatggtagaattgctgctaatgagtatgcttagttgtaactgtatttctagattattcacctatgaaacagtttactgtcttattaggtcagttatgatcctggatgttagatgtatgatgagttcttagccacttatttgcagatgggatgggtaatgtgcttttggagatatgagttgcttgagttttgaactccgtactgttcctgtgcttcctgctggggtgaaaacaaatttgcttagtgggtaacatactttgttcttgactgaattaggttttagctgttccc

SEQ ID NO: 84890 - DNA, 731 bp, Citrus clementina
  Intron number 1 from transcript clementine0.9_032609m (loc us clementine0.9_032609m.g) derived from phytozome v7.0 (c hr-ID scaffold_1; pos 6166497 to 6167227)
tagtaatatgaaaatttttgcggataattttaaaaaggtttgattattaaatggtgtaacactgcaaattttcagatatttacttaataaataatgttatctcatccctgaaagttttgtaatgtgaagaaaaagttccattaccagtttagtacaattgtctagtcaaatcttcttatcctcgttcttgtgctgggtaaattaatcttatttgttagctgttactttgtagtttttgttgaagcatattgcttttgtattattggactatttttcctaactgggattgtaattttgtgaatttgttccttcttgtgggtgatttagggtgtctggactttggttagctcctttgagcgttgtgtcttacttcggacgtaacaaattgccttgaattttttgttaactaaccaaagcccaaaggcaaaagaaactgcctttcagagtttggtactaagtgctgtcccagtatattttttaactcctgatcttgaggaagtgctataactgttcaataatctctgctgtcgcggcacatgctaggttggctccatgatatttgatggtgtttgaagaagtagctcatggaggtcaagtgtgcaataaagaaagatgtcactgaaataagtttcttcgcaataacttaggctttctatcctgcattttctcttgaacaactatagacttgctaacaaaagtgggtgtgtgtgaacttgttcagttaataggca

SEQ ID NO: 84891 - DNA, 1043 bp, Citrus clementina
  Intron number 2 from transcript clementine0.9_018223m (loc us clementine0.9_016777m.g) derived from phytozome v7.0 (c hr-ID scaffold_1; pos 11990944 to 11991986 reverse strand)
aggaagttgagagcttaaacagaaggtgagatctgctattcattccaaatttagttttatttatttacttttaatttttttaatggataataaatgcgtgtagatggtcctaaaatttgttttgttttgtgttgttttgttttgctgaaatatacacgcatttgttttgtttgttctgtcctttgtctgtagtcgtcatggattttggtttccattaatgttttacttgtctttttctgcaacggtctttcgatttttacttggatttgactttgaatattgcttgtgaacttatgattatatatgtactccttattaaatttgcatgaaacttataatcttttagatgtttcaatttatgatgaaaaagcattactaattagatttagcttgattaatcctgttgattttagatctatcaaaggagatctggctgtggtatcctcgttaatattagtaggtttgatgaaaatcagtattagacagaatgttcacttgggaagattcacttgtggactagaaatgtatgttttctaagctatattttgctgccttggcatatctttgtagtccaaaatggcatttatcaatcaggaaacaagaaaccaatacaactacatatcaattttttaccaatttgtcagatagttccaatttagtgtttgcaattgtatggctggccatttaaaagcttaaaacatcaaggcacggagaagtgatagtgggttgtttagcaaaaatgagatggaatgctcataaacttgtttctgttttccataaatgctttttttttggggggggagggggggagggggggggggtgtcagtgtgtccttaatatcagtttcagctcgatccagcaactttggtgcaaataactgaattagatggctccgttaatataaagttctgtattttattatttaagtgaaataaactttttatctctctatatttggttctgtttttatgagagtattaaactacctaagactaaaaccattgatgttctactttgcaggaaaccttgttcagggtataaa

SEQ ID NO: 84892 - DNA, 528 bp, Citrus clementina
  Intron number 1 from transcript clementine0.9_006621m (loc us clementine0.9_006621m.g) derived from phytozome v7.0 (c hr-ID scaffold_53; pos 1465521 to 1466048 reverse strand)
caacgtcagtgattccaccattggcctaaaaagtgcgttttgctctctccttccgttctctatctattacgttcgtatgtgaagactataattacttcaaatgtgtatgatcgatttgactagggtttgataactcttgtcgtgcgttttgtgatttttaagctgcgcagtttttatattttaatttttagtgaataaaatgacaggttgttgatagatatgaagcctttgccctaggttagtgatgttatgtatgctaatgtttaaagtgcttttgagtaaaattgctttatgcagaagcacttataagtgctttttggaaaagcactactcaatttttcgcctgtaagaacttcaattaagttattgaaattcttagaaaccacctttcatttgcttgtgcaaaagcattgtaatgatttggtagaagatgatttctcgggaggtctgacggacatccttttgatcttttatctttcgaatgttgttgcagtaaagtcttttggaacagagggacgaaagaaagat

SEQ ID NO: 84893 - DNA, 953 bp, Citrus clementina
  Intron number 1 from transcript clementine0.9_011658m (loc us clementine0.9_011658m.g) derived from phytozome v7.0 (c hr-ID scaffold_33; pos 1897073 to 1898025 reverse strand)
tcgttcagtccgatctgtcgtcccttcttcaacaggtatatttatattaatcatattctacaaatttttttgccgttgcttgtgtttattatgtctatttacgctaaggccgcgtttggttgctaggaatgaaattccctttaacttttatttgccatgcctgatagcatgttattttgttttaggtatttggaagtggaattgaagttcattaggctgcaaatttgagcttaatcctgcggtgactgtgttaggttctagaattttttaagttgttcttaattgtcatgtgttggtcttaattctcatgtgatttcattagatgagctcatatgtgcataaactgaaatggtgaatggttaaaagatctaagggggatcattggcagagaagcattctttttcttcctccccattaagaaaaaaaatttcaaattcctatctctccttatgtgtttgttctataacaaaggcggtaactagtaagatcttgttggcttttatcgatgcatttatctcacactcaatctggttgttatgattttgactggagcaattaagaatttgcttccaagcacgggtgtgctcagacaccatagattgttgtgtttgacgttggacatggtttagatagacctcgttttatcacaataatttcattttcactctcatgatctatattataaacatggtttactgttagctgtggctgattgtgcagaattgatgcattgagttgcagattgatgagcttgttgtgcaagcgcttaaagtgaaaacaatgagcaagcaggggagaaaagaagttgaagctttcacaagtgtcttatcagaaatgctttctactttgaaggttaattttctaattttcctgtttcttcggcctatatgttttttggttccatagatcttatagcagaatgacctgtaatatcatgttctacaatcacagcc

SEQ ID NO: 84894 - DNA, 787 bp, Citrus clementina
  Intron number 2 from transcript clementine0.9_032326m (loc us clementine0.9_032326m.g) derived from phytozome v7.0 (c hr-ID scaffold_38; pos 1819212 to 1819998)
ctccaggtggcctcgcggtaatatatcagcctcaagtttccaaggttttggcttagacaaggtgcatctatggcacttctatttctgtggtgttaatttagctaatccaattttaaataattaaaaaagtctttttggttttagctttgctttatttttttcatttttttttggaagtcttgccttttaatcaaatagaataaatcgttaaaagcagaataagaaaaaaaaagataatactaatttttttttcaaaatcacgtgaagcgtggttctattacctagtatcaaataaatggtaaacatgaaaacactaacatccaagagtccacaacaatctcattatcaatattgtaaaaacttatacagtattatagagaaatcctaaaaaacaaagtttagagaataggtatgttaaataggcattaaaaataatatatcattcatgatcaattatataatagtccttaatattatataaaataatgggtattttaatctaagatattaaattttattaaaacattcgtgattaaatattttttatgttacaagcaatctcatcaatgagtttatcgatgtacctatgacatttacttaagtatatgtacttagttgtgttatttattagtgttatattatatataattaattttacaattacaacttatttatttgatttgtgttaaataacttacttgatattacattttatacttatggtaatagattttggaagatttatttaaaaaaaattatcacattacaaattttaaagaagggttga

SEQ ID NO: 84895 - DNA, 626 bp, Citrus clementina
  Intron number 1 from transcript clementine0.9_022670m (loc us clementine0.9_022670m.g) derived from phytozome v7.0 (c hr-ID scaffold_1; pos 10490505 to 10491130)
tgaaaacttttaactccaaaaaacaaaacttaaaggtaatgcttaattattttgttattttattgctagtattatcttgttcttaggggaagaaaaaaattagtgtgaattgttgcactgttgtaattgttcttggtaagtttcagatcaaaatttgaagtttcaacggatttgttggcttctttaagtcggaatacttgaatattgaaatgggtgttgtgatttttgtagttgtgacttaaatttccaaattttaaaggtttattgttctcgtttatgtgatttgatggccgtttcagtgcttacatggttacacctgtaatgaaaccttacttcatttctaggaatagtggagatttgttgtcttttttactacaatttaaaattgaattcgtaaggctaatttccgaaatcgtccatataccttgccaggcacgcagctttcctgcaaattctttatagttaagaatttgcatgtacattacctgttgttgtttatttcgcctctttgcaatgatgctaggtttggacttgcagttgtgtgtggcttaagctgattactattttactctcccggtcaaacttatgcagattggtgattgtttcagcgctttccattgagaatt

SEQ ID NO: 84896 - DNA, 502 bp, Citrus clementina
  Intron number 2 from transcript clementine0.9_008011m (loc us clementine0.9_008011m.g) derived from phytozome v7.0 (c hr-ID scaffold_10; pos 3289698 to 3290199 reverse strand)
agcaaaggttttgtcagcagtgtagcaggttagtttttcttattatctccctccggccttcgcttttgattgtagttatactgtcatagatatcaaagcagttttttacataagatcttagtattattttcacattatgtgtattattggctcaatgtaactagtttagcgtcatttgatgattcttttttttcaacttatataaaactttgaaggtcttctgttttgtgttctttttagtaggtttacttgttaaaaattgtgttcaagttttcaagttaccaataggtctaggttttctttaatttgtagtattatcagtttgttgtaacatgaacctaaagtctgtgaattttcctttacttttttgatattttccttgtatgtacgttctagccaaatcatcatcctttgttaagtacatttgtttatttcttgtagttgctatgaactggggtaaattttttttggttaatcaggtttcatctgctggctgaatttg

SEQ ID NO: 84897 - DNA, 971 bp, Citrus clementina
  Intron number 1 from transcript clementine0.9_008011m (loc us clementine0.9_008011m.g) derived from phytozome v7.0 (c hr-ID scaffold_10; pos 3290860 to 3291830 reverse strand)
gctttcactgttcttgtttgcttgtctttgctctggtaagaaaacaaataatgaaggaacgctcctccacttttattattattctgaggcttttcgttttttgctgcaagtggtttctggggaagtgaaggaaacgagttaaaaaaaaaattaggatactgcaactgctgataaattactcctgtatagttttttatttatcgtacgtggatggtattattgttttaatctttcaaagattcctgcttttttcattttctttaataaagtttttttcggcacagttatgagtttcaagcttctttgctctgtttcttgggcttctgaaagtggaagtcgttgttgaaattttttattttgtaaagtcggttgcttttattttcaccattgaatgtgtttatggttatgtgttttgaatattttaatttggtcctgtttggttagtgggaaaacttaatttaatgagtggaaagaagtttgaatctgttaatattccagtttctattcaatttagatgaaagaaaagggaaaaacaaatctcagcttgactcagacaaagtttgtgacaaaacattttttgagttgattctttgctttctcccaatattgaaagtaaatccattcgtttgtcattttttctcatcattttctcagcaaccaaacagagcccttttccttcttgttttttcacatattggttacaaacactgtttttgatgttaggtattaagctattgtatttcaattgcaacaggactcgatctattgtatcagctacctcgtattcatatttatcaatattacttgttatttcttatatgttgctgctatcgctatttaatgtatactaggcgtgaacttgtgagacttcattattgtttcacagttactttttttgaattgaaatgatgattgctgttttgcgaattttgataggcattttcatattgcatactttgagcaacttcgat

SEQ ID NO: 84898 - DNA, 773 bp, Citrus clementina
  Intron number 1 from transcript clementine0.9_004482m (loc us clementine0.9_004486m.g) derived from phytozome v7.0 (c hr-ID scaffold_23; pos 3443330 to 3444102)
tgtatggattttttattattttgttgcattttaagtggaaacaatgcttaaatttatttgatggtgattttgttgaatttattgtgcgcaaggttttttttaatagaaatatctgttttcaacttgtgtaatcatgaagctggggagtgtttttctggtcttttgtatatgttttggagaagtgcttcctcttaaagctttttaaatggctggtctcttttggtagactgcgtatctccttatgttgtctagttgggggagagtctttctgttctcttgtatatgttttggagaagtgcttcctctgaaagctttttaaattgctgatctcttttggtagactctgtatctccttatattggttttttatcttaactaatttttttgcctgagcaaaggaatgataaaaaaatttcatattattgcttggatattgctttggtttgatgctttgtttataaagcttttgcgtttttactccctttctttcttcaaattggtgataataaaggaggaaatggaagattccacaacaatatcttcagacagaatgatcagctgaaattctcacagctgatagtgaaatttctttgttgttaaattttccttcttttgcttgcttttatttctcttatctatatatttttctgtgatgtttttgttggatttttaggttactgtctttcttgtttatgttttgtcactgttaaatattaagatttgactcacaagttttatgaaacaattatcttatagaggatttttgcactaag

SEQ ID NO: 84899 - DNA, 898 bp, Citrus clementina; identical to SEQ ID NO: 84020
  Intron number 1 from transcript clementine0.9_020338m (loc us clementine0.9_020354m.g) derived from phytozome v7.0 (c hr-ID scaffold_90; pos 596239 to 597136)

SEQ ID NO: 84900 - DNA, 457 bp, Citrus clementina
  Intron number 1 from transcript clementine0.9_028614m (loc us clementine0.9_028614m.g) derived from phytozome v7.0 (c hr-ID scaffold_65; pos 1192891 to 1193347 reverse strand)
caactcctccctcctccctaccaccactaccgttcgttcctcctcctcctctgatggttgcgctaatattcttggccgaagtaactccccttccttctcttatttcaaagattggaagtttgattgcgagccgatctaaaacccaaggtgagcccttttcttgtcatttgcgtttggtttgattcatactgtttatggattttgaagattatatctttgatgggtttcttttttgcttgtgtatttatttatatagtagacacattattgtgtttttgtttttttttttctttttgtttttctttgcctagtatcagtcctgaattagtgggtttgaatatttaaagttgtgttttttttctctcttttgttttggttgaagaaatttgatatgtttcactttttgtgattaacttaagtttcttctattagctttatttactccataatttctgtg

SEQ ID NO: 84901 - DNA, 478 bp, Citrus clementina
  Intron number 1 from transcript clementine0.9_002941m (loc us clementine0.9_002941m.g) derived from phytozome v7.0 (c hr-ID scaffold_122; pos 72002 to 72479)
gttcgggtcgggtttcccggtctgtagtttggtcggtttggcagcctctctctcactctctgttacacgtgcatatgtttcctctgtgtccagcttattcttttgcttttactaacttcttaaccgcctcatacttattcatttttaattcacatatgttacatctttctactcattttatccatatccctctgattttctgcttgtagtttgctccagcttaatgtcatcaaccctttttggggaagcctattaaccttggttgggcatgcttgtattatatcaactagtgatacaattgctaaagttttcagcatggtagatcttgaaataaaattttcttgaaatatctagatttatcttccttttctttttctcttttttttattttagtttcaaagattttgtgataaagagaactgaaacaatatagtttttggcaggatacctcctcattgggtaccgtcattgtaagaca

SEQ ID NO: 84902 - DNA, 740 bp, Citrus clementina
  Intron number 1 from transcript clementine0.9_011213m (loc us clementine0.9_010462m.g) derived from phytozome v7.0 (c hr-ID scaffold_38; pos 741035 to 741774)
ttaaaacctccgacttttcctggtaattttctccccctctttcataatattgcaaattaattatttagaggactatgttttaatattttgtgtgtttttacactaagaccgataaaaatttggcgggtgtctatatcgttagattatatacaaaccagtacaaattctatctgttctttgttggtgatgttggatatatcatttagctatgcattgttttgggaagatgaattttacgtcacttttttttttttttttcggttgttcaaacaaactgtttctgtcttttcagttgaggtttctggaaaagagattgtggattcatatgcttatttagttatttttattgagtgcaacatgatactcttttgggttcactgttggtgatatgaccagtcaactccatatgagcacagcacaaagttgatatcatgtcgtcaccttgttgcctggttaatgatcgtatccagtttgggttcataattctcaatacgtgaaaatgtgtgtgacatgagtatcaaatatttgagtaaccatgttgtgtttgacttgtatatgacttaagagaataacaacgttatacttactatatctttagaaattatttcagatacaaattaagaatatggcaaacaagcgacatgattacaacatgcttaacttttctaataatgtgtcggggctagtatttgcattcttgccatgcttatctgaattgcctcctcagttctgtgggtaag

SEQ ID NO: 84903 - DNA, 578 bp, Citrus clementina
  Intron number 1 from transcript clementine0.9_019725m (loc us clementine0.9_019256m.g) derived from phytozome v7.0 (c hr-ID scaffold_23; pos 3809729 to 3810306)
atttattcctaatcaaagttctcttcttgagttaattttcgggcattccagctctagttcgaatgtatttatttattttaaaacatattgattaccctgagcacttttagtgatgaaactttgatgcttatagcgataattaattagaagtatcagcaagatttaatttttatgattaattttataattcggttctcttaaagctttcatcagcttgttttagttttttctttttctttttcctgctcgagtctattattgttagcgctaatggtgctttggtgctagcatgtagagactaataattgattattcacatttgtgtgtatgagagtgtagaaagatctttctttggaaaaaatgaaagaagttaattttcatgtaaaacagtttggagttgtactcaatgttgcaagatattgtctgtaagtggttcaaagtaagaccattatcaattagaagttgatggcatagtcgtattatatgtttagacattgaacatttttgtaagatttcttatctttgtttatatgttctttctgttagtttcctttgtcttaaactatgttttacagacc

SEQ ID NO: 84904 - DNA, 357 bp, Citrus clementina
  Intron number 1 from transcript clementine0.9_003269m (loc us clementine0.9_003269m.g) derived from phytozome v7.0 (c hr-ID scaffold_10; pos 1506745 to 1507101 reverse strand)
tttttgctgctttttctgccttaattatcgcagcggtgcgtatagtttcttcttttgtttcttaattttcaatatcaaataagttctatgcaaatgtagaatacgagatgataagcatagaagtttgaaaatggatatagcattgtcaaaagtcgaaacaatttccgttcgaaactagatgtttggagagtgaatattacttacggttgcttcactttagaacttattctctggctactggttttgtggaactttagataagatggtggcaatgcattaaagttctattgcatttactaactgctttgatttcttgatacagctttcagagatattcataccccattttctgacagc

SEQ ID NO: 84905 - DNA, 1048 bp, Citrus clementina
  Intron number 1 from transcript clementine0.9_012715m (loc us clementine0.9_012715m.g) derived from phytozome v7.0 (c hr-ID scaffold_82; pos 215948 to 216995 reverse strand)
ttattatttgggtcacctctgctgaagttactcaggtttgtctttaatcttatttttttcattcttttggtggaatttaaataatttgaattatttgcaactgaattgaatttataatacccaattgttgaatttagcattgccttatacatatatatacacacacacacaaacacatacaaagaaatggaaaacctgtatgtgggttgctataaggaatgaggctgtattcaacattgacttaggaaaaagctatatcatcccagaagattagcttttcaattacaagaagaaactagttttaatggccaatgaaatcaggttttaacttttggcgatgtatcttgactggatatgtttgggattgaggtgtccatgactgctgtgtatggaatcattgacttccaagtataagtgggcaggtgagtggtccgtaaatattagctactgagtgaaagtgggtgtttgctttcagaagtgcaacaattaaaagcataccctaagtcggatgcacactcttctttctgtgctaacatctttttgtggttgacatgcttctgccctgaacttacactggacagtgctcgagtgagtagggttatgatgaaaaatgattaaatttaagtaaaactagatgtttcctgattgcaaagttgagtcatgtggcatacagttttggcaatccaatcttcctagccattgattactgccaggcatgtcatatgctgctgcagaagcagtgtgtctgaaaggcttttactagactgcatcaaaagtgtcatgtgatttgggtttcttgttgtgattctatggaaggtctgttgtaagattgtgttccttctaccatccatttacccatatggatatacctagatatttatttgcagattattaaaaagtaaatctttttcttgttttctttattctcactcaaacagctgcctgttgcatgataatgcagtgcatacctgtattcttaaccttaggtaaactaactgatatatgttcaacaggatattttttcagactataagcagccatttgcagt

SEQ ID NO: 84906 - DNA, 835 bp, Citrus clementina
  Intron number 2 from transcript clementine0.9_035446m (loc us clementine0.9_035446m.g) derived from phytozome v7.0 (c hr-ID scaffold_89; pos 528792 to 529626 reverse strand)
tggtaggattttattatgactttgctgtcaaattaattatttattaattcaataagggtttagcatgttcccatcttaaaaattaaaaataaaaagtttaagtgatgctggaagaagttgctgatggtggaatgaaacatctttccagatttgtctgataaagagaattgagaaaacagttaatttttgataatgtgctcatctgattgaactggtaaaaattctcaatctttcttatccctaaaagaaaacttgttaaaaggaatatcaaaagcaattcaaaagagaatatgtttaatgatatgacaatataagcttccttgaagttccattgtgttaatttagcttcaccaatggtgtttattactttatgtcatgccaaaagctttttggaaaatgtgtaacggctttatttaaacactaacatgccccgttatgtgcaagccaaatactaactcatgggtttttcatgttgatccaaagatgtgcacaaacaagtgcacaaacaataacgcggattcaaacacaagtgccttttattatggtttataattggtttatataatgtgatgatctaaacataagacttctttaactggggtttgattcaaggttttgagtaatcattaatcctcaaaagtatttaaacttaaacactatcataaagtcttcttttataatttatgagtggtaactgcaaacaacccattgtgtctcttcattctcactcctagattgcaggagaaaagaagtaaatctttaaacccctcatacatttatgcaaagacctcttgagctgccattgactagtactatttgttttaccggttcttag

SEQ ID NO: 84907 - DNA, 987 bp, Citrus clementina
  Intron number 2 from transcript clementine0.9_010743m (loc us clementine0.9_006141m.g) derived from phytozome v7.0 (c hr-ID scaffold_1; pos 6500793 to 6501779 reverse strand)
gaggcccttccaaagcattagctgcacgagttctggtaatcatactgagtttaaccccttttatatttctgttttgcaaaacttcattatcttttggaacactttactagttcatgagtttcgagttttatgtagaaaccagttttgatcatttgttaagataggatcagagaaatgatattggatgtattgagacaacatgatgatattgagagtagcctagacaattgatggggtactgaagcttgatttcgtcttgggtgggattgaagagtcgctgcttggaaccttctatttatctcagaatattctaaatttgaacttttgcatttgactcctccataaaagtgattcagcatttaaatttaaggccttacagtagtctttttccaaccaaatgtggccctttctcattatcatttctgctctccaatcctaaaaaataatcctatttgggctaaagagacagcttaaaaatttgtaatattgatttactgtggaaaaaaagaatatagattgtgaactctgaataccatataaacctatccaataggttttctatttgtcatatcattctctgatatactgtgctcttaattctttttgcaatttgcttgaataacatactgaatggcatgtttctgtaaatttctgctgcacaggatgaaactggagtctataagaatttgcttcaggagactgcccacaaagctggcttaaatcttccagtatatgccatatatcgatctggaccaggccatgttcctgttttctcatgcacagtccagcttgcaggactgagctttacaggggaaccagctaggacaaagaaacaggctcagaagaatgcagctatggctgcttggtgtaccttgaaaaattgtatttatgtcgtcttctttactttagtttgctttcattaaacaagaactcaaaaaagaacaaaaatggatcattgttgaatcctgatttttatttggctttaag

SEQ ID NO: 84908 - DNA, 987 bp, Citrus clementina
  Intron number 1 from transcript clementine0.9_010743m (loc us clementine0.9_006141m.g) derived from phytozome v7.0 (c hr-ID scaffold_1; pos 6501991 to 6502977 reverse strand)
ttccagtaaagtaacgaagcccccgtcctttgtaggtcagttaacggtttttgcttttctgggtttacttcatttttgttcattttcttaattttctgatggaatttaactaaatttatttccatactagttcagaagctagatttttttcttttttgggtgtattgggtttgtgattggcgtgatcgaggtgggttttggatattctttgtgatctttgtcgaattttggctgtctagttgctgagaagactgtggaatagagaagtagctagcattgatcttttatcgaggttgcttgaatttttactagcaaaccatgtttcaaaattcaaagcaaaaggttggatcaaatttttattggtggtgaaatggttgactgtgagactcaaaatctcgtgctgtagaggttcaagtcctattcaaggcataatatctagaatgttcaatgaatgagcaattcaattagagatcttggatcaaatggatattgatatgactatgttcctttacaagtttagttagttattgatttgaataatcttgtccaccttcaagtacgggtttttgatcctatattatatcttaactgggccaaaagactgaaagaaatatgctagttcatatttttttggaatttttatataagataatcagatatgtagtgtaatggttttcttaaaaggatacattgatttacaaagcagtactagaagcgtacatctttttgacatttttcatccttcttttttataaaactgttgcttcatttctttccattacttgtataaattttaacaatgtaattatcttatttcgtaatgttagaaaattttacatttggtttcagaggtcatttatgaagcattaagaaacgtaaaggatgtatctctttctttgcgtagatttttctctctccccactgaaaagtgggtaaaatttatatgcttttcttgttaatatatgttcatgttttgcacgtctaggt

SEQ ID NO: 84909 - DNA, 612 bp, Citrus clementina
  Intron number 1 from transcript clementine0.9_002949m (loc us clementine0.9_002949m.g) derived from phytozome v7.0 (c hr-ID scaffold_29; pos 710399 to 711010)
aggtttattccagaacgtgagtctgtgaaaaccttgagctttgattgattctctatacttgatttaatgctatgaaactggaacagttctctgtttgaatatttttattattagatcgtttccgggaaatttaaccttacatgtgtttgtttgaatttttatgtgttaatgctattcccgctgtgtgtttcaaatatgtattgagtttccatttttgtacttgttaaatgctttgtaaagtatttacccattgtgtaagctaagataatatggaaaagaaaacattttaaactttattctatattttgaacttgccacataaaacatgctgctaatgttgtgtgaaacttgttactgcttatgtgatgagtttcttttttttcttatgttcattatctatatatttgttaccaattggaggataacaagagggaaataaaggcctgatgtcacctgaaagaggctactaatactgcctaaaactttaatttaactagtacattcaagtattattaccacttgaagtttgactttgggagattatttaacagaacagaatttctttctgacttttcagaaccgcagacctggtggaagcagttctgcagggaa

SEQ ID NO: 84910 - DNA, 475 bp, Citrus clementina
  Intron number 3 from transcript clementine0.9_024939m (loc us clementine0.9_024939m.g) derived from phytozome v7.0 (c hr-ID scaffold_40; pos 45034 to 45508 reverse strand)
tgattgccgctgctattaacgagcaactctacaaggtcgattccaattcgaactcttgtttctttagtcgtttactttcagtcttgcatattcatactaaccctttctaacatagacttggaattgatggtgttttgattgtttaagatgaaacaccagacaaatgattacttttctttttatttctagttaatggtggtttgcttatctatcatcttggaactatatctagagcatctctagcgcacatctgtatcttattgagctaatacaagttttcttctcatctgcttgttaggattttgtttgtcttaatctctgttcttacatgactatactttattgttgaagttagttaagtgtcgtgtcgtaatacatttgaattggatgcctgacttatgcatcaatgatctgagaattgtgcttatttcattctccaggagaagtattgggaagatcaccctggtgaagctgt

SEQ ID NO: 84911 - DNA, 620 bp, Citrus clementina
  Intron number 1 from transcript clementine0.9_025964m (loc us clementine0.9_025862m.g) derived from phytozome v7.0 (c hr-ID scaffold_101; pos 421358 to 421977)
ccatttttttcgctctctgagatattttgaacgtaagtttctctctctctccctccctccctccctccctctgcgaagctacagttaatgtgcacggggtcttaccctctagcccttggtgctctcgcatcttcacggagatttcaatgtcaccggcttcatgtcggagacagtggggcagtcattacaccattcgcgcaccttaaattattcatgaaatccttgattttgatgcaaaatatgccgatttttttccattaaagttttattttagggttcgataattgcatgcttaagagttttagagtttttatttttagtttttgatgtccagatcggaacataattttctaaatcctcctattaggatggctaattgcgtattgattacaatcatgccttgtgtgcaaaggagagatagctagagatttctggcttcttaaggggaaaaaaaaaggaaaaaaaaaggaatttacatgtaaaactttcaacgtagtttgatatgaatttgattgaagaagactttaatttcttgtctgtgttagtattaacgacctgcttattacttactgagagttagaatgtaaaagtcgaatcaggttgcaccattgatagcggga

SEQ ID NO: 84912 - DNA, 501 bp, Citrus clementina
  Intron number 1 from transcript clementine0.9_025837m (loc us clementine0.9_025837m.g) derived from phytozome v7.0 (c hr-ID scaffold_49; pos 540371 to 540871 reverse strand)
ggagatcacgttgcaaaagattcacttgcaagactgtaagtaattcttctgtctcctttgctatatatatccttacacttctctttgtttgatttagtgtgtgtctgttgctgtgtgttatttgtgaatcagttattgactccatgcatataaatagagcataatgatgaggaaaattatgatattattaattgtgtttatattcatgctgtagcttcattatctttgttgaaccacgcgaagtcttgctgtctataatgttaatgataatgggagattaaatattatataatcgttttcagtgcgtgctccctcatttttaaaatgtagattcggatcttataatgttgtcaaatttcaattctgcactttaaaaatatgaacgttcgcatcaaagaaggaatatgtacatatttcttgaattgaatctttattgtcttatttgatacatatatgtaacattaattaatttcttctgacctttccttttggcagcgttga

SEQ ID NO: 84913 - DNA, 918 bp, Citrus clementina
  Intron number 2 from transcript clementine0.9_016270m (loc us clementine0.9_014856m.g) derived from phytozome v7.0 (c hr-ID scaffold_43; pos 77672 to 78589 reverse strand)
tgcctctttcttactatactggaatcctcggtaaactttttgtttgcgcaatttatgtgagcaaattgtgtcttgtttttcattagtaaatgtttttgatatctcgatgtgaaggtagaaaattgcatgttttgagtttttgcatatttgatggaaacacagaactatacctgaatctttcagaccccccttttctttgaagtttgaacacttttcttgaatgtatcaactttatttatggggtatgttgccaaattggcaaatctattcgttataaaactttcctttgacagttaatctaagcagatgttaattctgcaaatagagtgtgccttagtttagattgatagatttgtctccttctgtacagtaaaaactttgagcattttcgccatattctgatcaatacactccaactagttagttcttgaggcgttttctggtttcgtggagtgagccaagatgtatacgtttgcaaattggcaatgtcttttgcttgatgggttgtgagttgagagtgtcaataggaaagtctcaaagtgcacagtgctcacttgagcacccatattacttggtgacctgttacctcagcaaacaagacctctgttttatgaactccaaaaagttattctgttaaaaagatcgagacagaggccatactatatttattattgccataaaagtgtgaaacaatattctttatttaatattctaaacgattgagccatttagttatgatactttgctgtactggggctaataatctaagtcggttcaaagtggtaaatttataaattgataggtatgcctggtatgaccgcttacgttggtttttatgaggtctgctctcctaagcatggagagtgtgtcttcatatcagcagcatctggtgcagttggtcagcttgtggggcagttt

SEQ ID NO: 84914 - DNA, 847 bp, Citrus clementina
  Intron number 1 from transcript clementine0.9_033960m (loc us clementine0.9_033960m.g) derived from phytozome v7.0 (c hr-ID scaffold_10; pos 3471456 to 3472302)
tttcagctggtaatcatccatctattaactgtgaattataaaaagaacacttgcatttagaaagttttaagtccacgtttggttggaagaaatgagaggagtggaaaggtgaggaggggagcgaaaataagaagaaaagaagataaatttcaattctattgttggtttgtctcggaattcaccttcttctcttatttctttcccctcctttctttttcatttccttccaactaaaaattgaaataaattaaggcatgctcccttactcctaattattcacgtacgtccatgttccatacagatatgcatgcaaatgaactgattatcaattctaattaagcggacagtctacgatatatctataagataaacaaagtgtctaaggccatgcatgcacataatattaaattgaacctttaatacataagaggttttcttgataatttaaggatttacaaggtattttgatatttatgattttaaaattataattactacgaaatggaaacttcaatcttgaaataaataggttcggagtcatttctatacataacacacgtacattaaaaaagtccatcataacttcaatgctttctttctttgaacctccgagctgacccctttacacttctttcgaatattaagcctttttttttctccctttaaagagatgttttccatgctacaaaaataaataaatgatctcgcaaaatctgatagcgcatatataaaaaaacaagcttcctacgtgtatgtatataaaattatgaatgattatgtgattaaaatatttgaaatgtgaaatgggttaggtaatacaaacaggcttaacaacaagtacaagaac

SEQ ID NO: 84915 - DNA, 504 bp, Citrus clementina
  Intron number 3 from transcript clementine0.9_012604m (loc us clementine0.9_012604m.g) derived from phytozome v7.0 (c hr-ID scaffold_1; pos 3210639 to 3211142 reverse strand)
gagaaagtggctcgtgaacttgctgttggccttgggtattcatcgttcttccttttgtgtttttaatgaaagtttgacctataagtatgtaaattcttgcttccgtttgcattagtttatgaattcataatacatgtgaggaaagtgtgtaattgtattttagaggtgcacagagttagtcgtcctccctaagctactgccattcccatatttagtcaatattcattttctgtttcattctcattagctaattaagtaacctctctgttagtcgtttatacgaaatttatttctgtgtgtgtcgtgattatatgaatggccaagtaattgatctcaaaatctaattttgtggcttactgctgataggcgatgctgcctgtatctatgatacatacttttctgtttggttttctttatactttctttcacctaatgtcttcttttccccttgattgatacggtctttcaggtatacgcctcttagtacaaaagagttgctggaaa

SEQ ID NO: 84916 - DNA, 497 bp, Citrus clementina
  Intron number 1 from transcript clementine0.9_007107m (loc us clementine0.9_007107m.g) derived from phytozome v7.0 (c hr-ID scaffold_20; pos 1452724 to 1453220 reverse strand)
aagacccttgtttccgaatttgctgtctttgataggtcagttaaaaagtttcaacttgcactcgtttaacttgtttggggtaaaatagtaatttactttttcaaagtcttaaatgtaatttgatccgagtagtgtcaaaattttaacagaaaaaacttgtccaagcaagctatttagtgctttccagttaccaacttttgaaagttttggtgaaattctttagaattccttaataaacaacaaatcatttacataaaagtagtcaatcataaggagactcgattcagttttcttcttaatagtgtatgttatttattaaacaatcaatgatataaagtcaaatgcataaatttcaattgatatggtactagcacgtaagaaattttgtaaattcacagtgtgtatatatatatatattttttttatgctcataatagtattcatgaattatttatttattaggtggtttgcctccgtgccatcatcgacccaaccaa

SEQ ID NO: 84917 - DNA, 752 bp, Citrus clementina
  Intron number 1 from transcript clementine0.9_017125m (loc us clementine0.9_017125m.g) derived from phytozome v7.0 (c hr-ID scaffold_29; pos 2046404 to 2047155)
ggatcagttgagtttccaagatttggccaaccacggtgggagaaaagataaaatgaaagcaaaactgattattaatttaatcataagtcaagtttgaaactcatgctaatggaattaatgtgcatgtgccattataccctttccattcagagggaataaggaataaatacttgcattagcttcaaaatctcttgagttttttacgttaattatgtagcaaaagatgtgcactaacagagaaagaaagcaaaacaaagtaaaaaagttgttaaattttggggggggaaggaacaactcgttaaaatagtgtagagattctttgcttccatgaaaagctgtgtgcaaagaatatccgaggttgcttgttgcccttcttgttcatgggttaaaagcaagacttcctttgcaggcttctcgttccatttaacatttgcagaacctgcagacagaacagaagatcgacaagaggtaccaacaccactctccagctaatagtttcttttctttctttctttctttttaatctcaaattctattaatttttgtcagttttgattttcgcaataatttttttagtgtaatctgatatcaagaatccacatctctgataacaaaagaaaagtcacaagaatcctgcatattgttcttgacaaaacattttcaggggtctcgactacgcttgttctgaatcattttgcaatgttattgtcactgatgactttctgctagagtgagattttctgatccgcaac

SEQ ID NO: 84918 - DNA, 496 bp, Citrus clementina
  Intron number 1 from transcript clementine0.9_015566m (loc us clementine0.9_015566m.g) derived from phytozome v7.0 (c hr-ID scaffold_43; pos 1811797 to 1812292 reverse strand)
aagtctggttcaatccccatctcatccttaaggtatttgttttctttctttttcttttcttttattttaattatcagcatggaattacatgattggggttgcattttttttttgccagattcttccattattggttctcttgattttatcatattaaaaacaaataataatctagtttatcgttttaattaaattaaaatgttttgatatggcacatagattctaatgcctgcaaattgcttttagatttgcaatttggttcatgtgctgagttttttttttttaataatgtcatggttggtagttgtttgttaagaaattatatgtgattaaatcttaacgatacactgttataaatgcgcgtcgcaaaagagttcagtttaacaccgattccaaaatcatatttttattatttgctcatgttggatgattaatgtttgatgttttcatttgatgaacagtacaaggacctcaaacgattcttgttgtcgccatt

SEQ ID NO: 84919 - DNA, 688 bp, Citrus clementina
  Intron number 3 from transcript clementine0.9_015402m (loc us clementine0.9_015402m.g) derived from phytozome v7.0 (c hr-ID scaffold_63; pos 382824 to 383511)
agtggcccctctagaggtagctccagtcatcgcaggttagtagtgtttatttccatgtaatttacgtcagttctgttgaatgataacttattagaagtattagttggaaattcatttttctaattatatagtgatccactgaaaggggaatctaactttcataggtttatacattttaacttgccttctacaatctttgaatcaacttctgattggattagtttccatggcctaggcgattttctcagagttcaatgtgtatcaaactaaggatttatacgaagctagtttcttttgattgatgtttctagattccccaaaatattattttcagcttattagttccattgactcatgatctgtataatttgatgcatggtcttcctgtgtatttcacagttcccggagacgccgttcccgcttctatgataattaggtaagacatgcactactcccctgcatttgtgtagagttttgttatttgtaaaagaactcatgttaaataagcttatcaagagtcttaatgaattgttacatttgaagtaccctttcattggtttatttatgtagcttacgttttcaaatatatttttcttctagacattttttttgcttcgttttattatgttatgtaatcaatggtcctagttaattctgctggctgtggttgaatagaaagtggaagcaa

SEQ ID NO: 84920 - DNA, 777 bp, Citrus clementina
  Intron number 1 from transcript clementine0.9_005572m (loc us clementine0.9_005109m.g) derived from phytozome v7.0 (c hr-ID scaffold_20; pos 1901995 to 1902771)
tgagttgctgcccaagacccgtctcttccgttctggtaccacttttttttttaaaaaaaattaaattcagctttatctgattttattatgcttttctaaagaatttctgtttctgggttgttttgatctgtttggattgaagttcttgatgttgattgtgtttactactaaagctgtgatacctgttttcgagatcaatcttctcttctttctgtgcttactttcttctcgggaaagttgaacttaactttactaattttcccgggaaatttgtgaggattccacctgttatatatggtatgatctgtcatttgattgctgatgattgcttgagtattgtttgttaattttttgcaaatcaatctatttatgaatctgtttaattgttttcactcgcgatgtttaagcaagttgcgtctgtgttgtcaaataattgttgtctgatctttgtggtaatttaatgtttagatggacatttctgctagaatattatgatgatgtttgttggttattatcatgatttttacaggtaaaaagggttgcgatacttgggcaactttgaagttttgatacagttgttgctcatagatagtcaagagaaggaggtggttttattgcttgaagttttttttggttggagtcctattagattagcgagagacttgcaaatttggggtttctgtgggtgttaacgctgtgggaatgatgatgagttttgatgagatggggttttgtggtgacatgaacttcttctctgctcctctgggagatgcagat

SEQ ID NO: 84921 - DNA, 658 bp, Citrus clementina
  Intron number 1 from transcript clementine0.9_010512m (loc us clementine0.9_010508m.g) derived from phytozome v7.0 (c hr-ID scaffold_45; pos 20894 to 21551)
ctccggcttcgtttgttgtcgtcagcccgcacagggtaaggttatttgtaattcaatcttcttttgggcatgggtaagagcgtcacaggcactgatactgttcaatcttcttttgtataatggccatttgtaattgttgctgattcggtttcttaacattgtaatttttgttgtcttgagtattgatggtgatgggttattaatgtattatatatgtttgtcatttggtatcattattgcatcattgagccgggctggtattttattttggaattttaggtggctgcctggcagggatttgattcattttgaaattttgagtctctggaaatttatgctttttagtgtttccctttcaatattccttcgttaagctttaattttctctttgtatcccaatatatattcaaagtttacttccttagctgcttctgtttggttgaaaaaaaagctataaattattattattattattattattttcttgacctaatttgaatttcttatttgctattttcgttgattttggtattcctgtattgagaaataattcggtagtggctttgctactgttctctctgtttcttaaattgtataactcacaagtttcatattgcttataggaataagattgcgttgatactaaatacattatata

SEQ ID NO: 84922 - DNA, 748 bp, Citrus clementina
  Intron number 2 from transcript clementine0.9_002441m (loc us clementine0.9_002444m.g) derived from phytozome v7.0 (c hr-ID scaffold_23; pos 1470820 to 1471567)
acctggagcacattcatctggaaaaggaagacttggtataataaatgcttaaatgttggcaatacttaattctacctcaataacaaattcgactggtccaattatgtgaattcagggtcccattagctgttaatctactgaactactacagctcttgttcatctgggcttaggacttgctgtgcaagggtgtgatattgaatgcaacacatgcagagattattgctgacaataaatagctgaaagatttaggtgtctgtctaatttataaatttggtttattatatgctaatgaagaactcaaatgttaaaaaataagtgaatgcatttgctcatcaattttctaggtgcttgtatttgaatgtagatgcaaactttggaaattgatggagttcttttagatggcataattcaattgagctagataagcgtaaaatcatggtttttgtgaaattatgtgtatatgcattggaaaggatctcgcagctgaatttaggtgaaggatctgacatgccaaactctgctggcagtagtatagtactaaggaaaattggatcataaatttacatccttccatattttctttttttatcacacattatatttttaagttattggaatatatataatgaattttgaacgaagtttttgtttaagagatctgctgccaaaagtttcattctctacattaatgtttgatttcctttttcccagttctttgaagtttagagattgtgataccagttctt

SEQ ID NO: 84923 - DNA, 759 bp, Citrus clementina
  Intron number 1 from transcript clementine0.9_018788m (loc us clementine0.9_012344m.g) derived from phytozome v7.0 (c hr-ID scaffold_10; pos 307197 to 307955)
cctgagcaaaggtaaaactaaaatccttccaagtcgatcatgaatcatgatcaacaattaagaaatatttggggtccactgattcttgtgggagcaacaaaaccaaattggtacagaaatcggggtcatgaattttccttaattattttttcctcattcatttaattttttttttttttttttttttgtgactgcgaagttgtgtgcttgccttgcttcgaagaaagtctctatcatcacagggttagaaacttcttctcaggttcattgaaaaacgattgatgggtatcgctcctccatcattgttcattcgatttcaaaactcttacgagatattttaaagttctcatccttaagaaaagataacgaagaagaaacaaaatgtgtcggcgttcttcttcactctaagctcactctctcaccagatgcagctgttttgttcatttatttatcctgtttttcattttatcaaaaagaggatttgtgttgatgcgtgctctgtttacagtttcctctgtttttgaatttggtttctttgttaattgaagctggttagcacaaagtgccacatgggattgggactaatattatcaaaggggaagagaaatggactcacagttgggtctaattgagcaatcttttaataatcgttacaccttgtgggtgcatgaagcacttgatgaattgccagacagttttacaataaccgatccttcaatttcaggccacccaatcgtgtttgcaagtcgaggattcctg

SEQ ID NO: 84924 - DNA, 655 bp, Citrus clementina
  Intron number 2 from transcript clementine0.9_028529m (loc us clementine0.9_028529m.g) derived from phytozome v7.0 (c hr-ID scaffold_5; pos 3270811 to 3271465 reverse strand)
gctatagaatttcctctggtatgtatttttctcattgttcctcttcttaaatgtctagtaaaaaccctttcatcttcactcatgtccaagtcataggagcaagagaaactcaacttgtagctcttgtacatgtgttatgtcagtttcacttgcttttcctttaatttcgtgaagtaacagaagttatgtatggaaatcaattcataacgaataaaaactcttggagaagttatagaacatgcattgctatatcttctagttagaaatacatccaagctatcgtctcatttgagctgccgctcggtgaagcttagtgcttctgactatcttttctacttttataatttacgtaaagagctgtctacattccccaacacctccccccccccccccccaaaaaaaaaactaaaaatatgtttctactacgatggatacaagcagttttgtccaaccaataaaactcaagcatttgcttatcttgatttggacataatcagaaaccaatagagaaaactgaaagaaagacatggaaaagcaattcaaaaaattcttattaattgtcattgctataaaaagaatgtttgtataaaatggtaaaaatgaaattcaaaaacagaaatcatttgatgcactaatctttcaaatggggtagcag

SEQ ID NO: 84925 - DNA, 718 bp, Citrus clementina
  Intron number 1 from transcript clementine0.9_015636m (loc us clementine0.9_013715m.g) derived from phytozome v7.0 (c hr-ID scaffold_1; pos 3494920 to 3495637)
agggtttcctagtgactgcgtagtcatcttgacaggtataaattgctctctactaagttaataagctagcattattgcatttttttgtctaataccttccgtttaaagctcgatcttatttttcagttaccaatatatggcattcgattacttttatgggtacatgttctgttcgttcctacagtttgagtcaattatttttcagttaacctttgtattttttcaaattgtttgaaacatcccgttgtttctttgcagctgtaatcttaattttcctttttctttgatttattttttttataaggcagaggagttgacaaaactggaacttgattaaaaaattttcaaggttgaaatagtattgatgtcggatattttgagttcaaacaaatttgacatgcaacccgtttaaaataaatgaaaattaaatatattttaacaaaaacaaatatataatataattcttttagataactttgaaaatacaggaattaactaagtagttgactcaaaactataatgatttaagaaaacatttaccatcactcttacattcttatataatatccgccaatatgaacaaaatattcgtataatttgacagaagaagagaaaaatccatataggattccaacaaagcaaaacattcgaacggccatgcgatggctagcgcaagattgccagccaggagattcattggtatttcattactcaggcc

SEQ ID NO: 84926 - DNA, 922 bp, Citrus clementina
  Intron number 2 from transcript clementine0.9_026969m (loc us clementine0.9_026969m.g) derived from phytozome v7.0 (c hr-ID scaffold_109; pos 15895 to 16816 reverse strand)
cactctaaacactcacttgacaaggtagtgtgtatagaagctatatgaattttataataccaagttaaaaaataaataaataaagttaaagcatattatacatatccaacgaacgtaatataatgtgaagaataatgttaatattcatagccgtcgagctagcttcgttgactgtgaatgcacttcatgagttcgcagtcactcgagttttagtatgattaaggattaggtttgttgtttagtggatgagaattttatagtattccccacccgaaccttaaaaaattattttttatttaagggtaaatgctctttttaactctacgatttattcaattatatttttaaaaattatcttaaacgtttcctgtcgcatatctattttcatcaaaaaaatttaattattctctatatttcccccgttgcatgttatatttatttgaagtaatctttggttatatcagataaatatattattatacttttgaaaattagatccaatgctaatggaagtactaacatggacttttggattttttttagcttaacgatagagagttaattctaactccatctcaactccacacaagaacaaataaaagtcgaaattttttgagatatccttaaaatttgaatcaatgacaaagttaccttaaaaatttgtctgagggaggttgaagtggaaatcatttctagggtagacatcatttttttatttctaaaatacaaagaataaccaagagtaattggtgcaaacctagaaaataaaggattcagcagaccaatgggcagttcgtatacgtttttactttttgatatcgtgcaatattatacaaagcctttaattaattttattttttgaaaagagcctttaattaatttgtagtaatttatttatttatttattttgtgtataaaggac

SEQ ID NO: 84927 - DNA, 738 bp, Citrus clementina
  Intron number 1 from transcript clementine0.9_018418m (loc us clementine0.9_018418m.g) derived from phytozome v7.0 (c hr-ID scaffold_5; pos 1249286 to 1250023)
aagagcttagccctcgatctgctctctataaacaggtttattttcttctgtattattacctccaaaacaaagtaaagggccttcgctttatgttttatttacgtcaatttgttattaattattttagggaaattttatttataatttgattctcctaaacatgtaaaatgatgggaagagatgaaggttggggagtaagcttcctgtaaaagaaaaattagaaatgagttgaagtgaatgttagttacattcaattgttgctgatcattttattttatttttatatgatttatttacgctgaatttccttggtcaatgataatcgaaattcgtttctttgtagacagacagacggtttggtgaccctgttgtcagtgaaatgaaattatatcaatagggtcagttcaatgagtgacattgaagttttatcaatggtgttagttcaatgcaaaactaaagcatattccatgatttttcgctttcctttttctacctaatggaagttgttatgattgcttgtttgtctctagtaatttttgtctcccctagtatgtcttgttagtacgacatgcctttttttccactaattagagtgcgaaatattttatttttccaattatcatgattatatatatatatatatattttttttttttttcctattatcgagatgggatattttattttttgttccttgtttttctcttttttgcggttgtttgccactttagatcgcga

SEQ ID NO: 84928 - DNA, 459 bp, Citrus clementina
  Intron number 1 from transcript clementine0.9_035520m (loc us clementine0.9_035520m.g) derived from phytozome v7.0 (c hr-ID scaffold_40; pos 1082170 to 1082628)
gctccttcaaataaggatgtatgtgtcacggtagggaactagagttccattactggtatgaataaccagcttctcaactaggccaagataggcctgtactcaccaagaagcagtgcattaaaatgggttgtcactctacctgcaagggtttcactttgacatttattactatttggttttcctaattttctttcaacttgaatcaaaacctttgtcgttcttagcagccaagtattaatgtatgtaatttttcttctccgactatcttaaatttgagattccatgttttatcttctctaaaaaacaattctccgtgatatatataccttggttttctcactgaggcatgtaactgtaagatacatttcaacttcaagcaattcaaatgaacactcatttacttatatctcataaactcatgtgggatatctttagagtttgttttttcagcctctaaat

SEQ ID NO: 84929 - DNA, 706 bp, Citrus clementina
  Intron number 1 from transcript clementine0.9_005978m (loc us clementine0.9_005978m.g) derived from phytozome v7.0 (c hr-ID scaffold_29; pos 1431563 to 1432268)
ctgccaaactaaccaagttcacgtttttgatactggtaccttctttttattttcccagattcttgttcttcccccccccccccccccttcttttaatatttataataagtgcctgttcttaaagtttgcattttggtttatattttgtttagtgcagttgcaaaaattgcatttttttttctaaatgggtgtagtgtttgattgattcttgttttaaaaaagttggtaattttagggtttatgctgggtttattttgatggatagttataagtttttgttgttgggagttaatgttgtgattgcttcttggtttgcagagattattggcattagtgcttttgtgggtctgatatagaaatgattttttaggttttctttttaactatgtatgtagggttttctattgtagcatgaatactgttcttttttgttatgtcttttaattcttgtggcttgtgagtttagcgtcagtgccacatttggaatccatttccatttgggttgttgcaaatttttgagtcgtgccaacatatgaatgttagtgcatagcattttctgctattctcttgctgggacttcatcttatttttcctttctaaagctgcacttcttgtatttgacagcttttttgttgttgcatgttcttacattctaaatagctgctttgcagttaatcagacgtggagccagccggtgataaagggc

SEQ ID NO: 84930 - DNA, 773 bp, Citrus clementina
  Intron number 1 from transcript clementine0.9_030403m (loc us clementine0.9_030403m.g) derived from phytozome v7.0 (c hr-ID scaffold_33; pos 552565 to 553337 reverse strand)
accggtgccctctattaattattaaatttttcttttccgtgtcgccacaatttattcacaaatgagttgattagcgtcaaagttacttgagagtctgagactatgttaataggagaaatttgaaaagaaattattttactaaattaatttattttatcttgttgtaactgaaatactactttttttttttttgattggctatcacaggggcttgatttactttaatagttgcagccaacaatttaggcttttttacttttcaccacacaatttgatcttttgattcgttttaaccacataatctatctatctctcacctattgcttatttaaattgcatatatgttttacctacaaatttttacaaatattaatcaaatatattttgttacatttctctcgtaactgctctaaatgtgcactattaatacttaaccctcccttttaatttaccgtgcaatttatctacacttaaatcacatatatattttacccatagtttacccaaaataaatataaaaataaaagaaaaagaatatgtgcagcaatttgtatataactaacaaagcattgacggtatgtagcttttcaatacttcatgagtggcttttcttgtgtgttagtacttgtaataattgtgtagtgtataaatgataccctttattattaaatcgcgtccgtttttagatataatttattatttgaaaaataatctaaatataattcttttaaaatacagggaagataccacctgaaatcagtaatctccgaaat

SEQ ID NO: 84931 - DNA, 974 bp, Citrus clementina
  Intron number 1 from transcript clementine0.9_005408m (loc us clementine0.9_005408m.g) derived from phytozome v7.0 (c hr-ID scaffold_23; pos 2213009 to 2213982)
tatcattgccgaatccggaggctgaatttttctcggtaagtctcactcatgccactgactcactttttgttacggaaatgtgaatttaaaacactgtttgatcacataattgatgttgcgcgtaactcttaagtgtagatctaattaaacttcttactttatttgactgtgcccgcttctaccttttatcatcctgtgattttgtacctatttctttagttaatctgaggaaaattagtaccggggttttggtgacggagttatacaatcattgaatctgatcattctttggaataagtggaaatgcatattggcttttagtcttcagtatctttttgtttaccattttctgaatatgatcgtgttggattattggcggaaatggtttttttgttcctgattaggggaggatctctaatcatctcaaatgttagctcttttggtactggcttttaagggttttttattggttttggtaaatgttattttctcagatgtttcttgtttctatggatcagcttaagtgaggacatggtgtttgcatacactaaacatctgaggcaatttaggaaattgtgctgatttttttggtttgattcattttctttgcagtgcattttttttatttattatttctcttttgctgccatcggcagagaagctaccctttgtgagtaattcatggattctaatatcaatttgtaatttacgaatttcttgaagcctagatttgtgggtaatcctgtgttatttgaggtggcttcaattatatgggtttggggttcttttgggtggctttagttttgctgcttcttaacactcgtcagcagttttgtgttgaaattaccttggagtgatacgctgtagtattgaatttggcttagaacgtttcaacctttaccatattatgtaataggagttggaggactgatataagtttgaagttttgacaggtgggttgaaggaaattcata

SEQ ID NO: 84932 - DNA, 1024 bp, Citrus clementina
  Intron number 1 from transcript clementine0.9_018940m (loc us clementine0.9_018940m.g) derived from phytozome v7.0 (c hr-ID scaffold_120; pos 151919 to 152942 reverse strand)
attgattgaacatctgaacgaaagactccgttagtactcgtaactgtttatttcctttttttttttttatttaaatttaactgtattcgttgtgattttttcttcttcttgtttttttgttgattttgtgctattaagttaagaataaactaagatgtgatttttaaacctatccactgataccgtcggtagctgaaggaagatgattggaaatgagtttttgattgtgttgatctgtttggttgctgagaaaaagtgtaggaaaccggtggaagatttggaatgtttaaatattttaatgaaatgtctgctagggaggctaatttaatttgttaaatagtttctatgaaatctttttacttggagttacccaaaaaaaaaaggtgctctgcaagttttaacatttattacctgttgcttaacaaattttaatttgattatataggaccttttttttgttggggggggtggatttagttagtttcactgtataattgttcaaggtgcttctgatggatctctacttgtgcgtcttattttgcttcaatctgttctccggttccaagttcatgaataaaagatgatgcttttattaaaagaagtcttataaaagccttccttgtttgcttgcctaattatgatgtgttgtatcggtagcaagtaaagattactactatgaattatcacctgtggcataatctgcctcaccgaggcttgtcagtagttttatctgaacgatctttcttattttgcttctctcatatcatgattgtggaattagtagatgtttttgataatttcattttcttttagtcttaactgtttagttgaattcaagattctaatggtaattaattgcaatactgcattcaaacagatatatgcataagttttgtaattcaagtttccatggtaatttttctgttctagttataatggaaatgcttcttatatgagttttgactgatggtgttctccttgatgtgttatttattgttacagataagaacagtgaaaataagca

SEQ ID NO: 84933 - DNA, 770 bp, Citrus clementina
  Intron number 3 from transcript clementine0.9_023657m (loc us clementine0.9_023657m.g) derived from phytozome v7.0 (c hr-ID scaffold_1; pos 1802847 to 1803616 reverse strand)
cttggtacaaggagaaggtttatcctgttaacaaggtgatgctgatgctgatgtgtgatcaataataatatttgattttatttgattgatcatttaagtaatttgatagatcaacaatatgtgcattcttttggttaacatggagcttagaatctgctgggaagattttgaatagtattagaaagtttctgaataataattaggaatttttctaatcaaggtgttgatagaccaattcagatatagaaaaggaagaggttagttgtgtttggtattgaggtagggcggctgtaaattaaaaggtacagagttaaagtgttttgtaaaactctaatatttctactatttttgtcaaaatcttaatttaaaattcatatttattacgcatttttaacttttattttatagttacagtttttttttttttttttgggtccgtggcagctgtagctaaaaaaaccacagcacctcaataccaaatagcctaattatgtgactctgtgtccttatgccccatctttgaaattgaaatgcttgtaatctgtgcggaggagttcctgaataaaattggaatggtgtctttgtgctttgtgtgcctagtaaaatcttaacatattctgatttgagcaagttgcttgcttgcaagaaaacacaacgaaagaattaaactgattgttacactttcgtgcaagattagggatcattgctggagttatgaagtatatttacctattagagttcttctttacaggttccagcactggagcaca

SEQ ID NO: 84934 - DNA, 447 bp, Citrus clementina
  Intron number 1 from transcript clementine0.9_023397m (loc us clementine0.9_023397m.g) derived from phytozome v7.0 (c hr-ID scaffold_1; pos 5203617 to 5204063 reverse strand)
ctgctgaatcaaccacggcaattaacagaagcatagtgagtaccatcccaagtttcaatttctatgccctctgttttgttccgattttcaatttttatgtttgattcttgaccttgagaaagttaatgggggaatctgggaatttcgtaactgggtttctagagttcgttcttttttttacccctttcttttctttttttatcggttgaattcctatcacgcagtttctgggtgatattgattattggcgagatattatttttgtttggttgctaagaaaatcaatgtgcaaaaactgggttcgtttattttcgagctatatagtttagaagatttacaacttttttccttcagtatttgagttgttcataacgcgttcattaagattgttatactggtttttaatgattaggttgatctattggacttcatagactggtctggagt

SEQ ID NO: 84935 - DNA, 719 bp, Citrus clementina
  Intron number 1 from transcript clementine0.9_017279m (loc us clementine0.9_017279m.g) derived from phytozome v7.0 (c hr-ID scaffold_90; pos 386274 to 386992)
gcctcctcaattacaaaggcttcttggcttgccaggtacaattaaataatcttagcttcaacttctaatttaattcaatgattaaagtattagttttttttttttgggcccttttgccacatctcatctgtgttgattgattttatggcggctaactgcaatagatggatgacagaagcacttcgggtgctttatttctttgtgcttttcttaaaaaatgccttttctaggttaataaaagatcttccagtgcttttcaaagaagcatttgattagcttcttctaaaaaatgcattttctttctctacaagaactctcatgaccgtaccctaaactctgcgcaaataaactgagtttagactttacgtaaacacatgctctgcagtcgctgtatactggttggtctattttccatctttaaggaaaatgaagattgctaagtgctgcagatatttttcccgtttatgggtatgtgtaaatgacaattccattatactagtgtgattgttcatgaaatggattgttaatgttttctaagtttttttcttataatgctagaatggtgcatgtaacgaatttttctttggagtgacaaaaaatggagaggaaattggatctgtgtcatttcttggtttatagcttaattcaatgttaactgccttttcttttggatttttgtattaggctcaccgagtagcacacaagctctggactcagtc

SEQ ID NO: 84936 - DNA, 851 bp, Citrus clementina
  Intron number 1 from transcript clementine0.9_009677m (loc us clementine0.9_009677m.g) derived from phytozome v7.0 (c hr-ID scaffold_53; pos 115938 to 116788)
atctctctctcaaagctttaatatttccatcaaaggtactccctttggcttattctttcacagatcaagcttacttttgttttatttttacatttggttcatattttctaatcatttcttctcttttatgtaccaataagatggtagcctgtgatatattttatttctgggtttttgttaattgtttatgattatgatttccttgatcagacattgtattgggtagtgtttaaatcaagagtttgtgtttagtttcgcaacgggtattcattttttctaacgttactgtagctgacaatgttgctcatttatcagcactctaatgattatctgagatgggtatttttagttttgagttttaagggtttagttttgagcgttccattgtttgaatcatggaagcgaccagttctgcttgaaaatcttaagtttatatgtttgttgtgctgaatgttatggctttatttatttcttgtttgttcgtagagtcaccaactgtataaacgttcagtgtggtatatttttatacttaaatatctttagggtccctgtcagaatgtgactatggtatttccagcaagctgacaagctctattcttgttgcgaagtactaatcttctgaagtctttatgtcaaagcaaattgtgggttgtcacttgtgattgtattacatttttttgggtgcaagaggtgctagactctgtttcctgcctttcggcattgagctgtgttatatcttataatgcttgaaattaaatgaattgtatggttggtgctaggcctttcctttttgtaacagttacaaaaaactagattgttgtgttgatattgttgtgttgatatctggcaga

SEQ ID NO: 84937 - DNA, 507 bp, Citrus clementina
  Intron number 1 from transcript clementine0.9_021218m (loc us clementine0.9_021218m.g) derived from phytozome v7.0 (c hr-ID scaffold_10; pos 5048577 to 5049083)
gaaatcgtattgttcctcttaacaccccccccccccccttttttttccaattaatttctcactttttgtctataaaatttgaaccacaagaataattcatgcccaaatagctgattattaccgctaatttactcacttaggtcgtgtcactgagtgtgacacatcagatgatacgtcagttgaaattcaaactatgtaatcccagctttgtaggtggagtggtactttatttgcttctgtgataaaatatttaactcaagattcaacgctgtatatttgcttttgtgataaaatatgcaactcaagattcaacgctttaccatcattgtgtgatggtatagagtcgctgtgccgatatagatacctattatttgctactctgtctaatttagttggatgcaaggaggaactttgatgattttgttagttcctcctttaactgtggcttcttctataaactattcttcgtttcgtgtggcccgcaggtggagcttgctgcacttctcc

SEQ ID NO: 84938 - DNA, 571 bp, Citrus clementina
  Intron number 3 from transcript clementine0.9_027408m (loc us clementine0.9_027408m.g) derived from phytozome v7.0 (c hr-ID scaffold_51; pos 802560 to 803130 reverse strand)
gtggctcccttgaattggcaattggatttgctctggtaagtatctttttactttctatctcttattctgtttccatatttcttcatattattagttctagagcttttttccttttaatatttttaatttttaattttctatttctgaaatacttgctggattgtagtttctactgtttttttttttttttgtgaaatattttagctatttgttgataggtttagtttaggagttatattgaagagtttggtgtttaatattaagaactaagtaataggtaatgttgaaacagaacacatgcttaggtgatacatcagtacaaattgtaccttgaaatcagttgaaattgtctacttgcttctaaagttttttttttccccgtaactagctgcacttttttgtttggcaaagcccaaaagaaaatgaaaaggaaatcacggacacatgtaatgtttatttcgtataattttttctttctttgttgtttgattgtaataatgattaatgatttttgaaatcgggtggcttgtttgcaggaaaccgagttaagctgctgaaatattttgagaaa

SEQ ID NO: 84939 - DNA, 570 bp, Citrus clementina
  Intron number 2 from transcript clementine0.9_027408m (loc us clementine0.9_027408m.g) derived from phytozome v7.0 (c hr-ID scaffold_51; pos 803319 to 803888 reverse strand)
atctggatacaggaaccgtttcaaataaattcaaggtaacattcaagtttatttcatcttcttctcccatttgtagttgaaaattatctcaaaatcttttattttctgtgggattatgtttaattttgagagttgggttttggtaatgagattgtttatgattagggttgtccctcttcctattttaggcttttcaatttcgttgaaagctttgctttaatttgttttcattgatagttaatatcaaaaattcaaaaaagaaattgataataaggcttatctattttgtttttgcatattttgataacgttgcttgtccccatttgtggttccgcttttggggttgatttgataatttttcatggttgaagatgatccattgaccatgttcacaaattagatatattatttttcatcaaactaaaacaacaatggacaattctagggtctgttgtgctgtagttctgctatcaaaatagctcctggaagttttcaagagcagttttgctggtgttccactatgaaaacaaccctggaaatttggatgggctgttttgctgctgttctgtg

SEQ ID NO: 84940 - DNA, 790 bp, Citrus clementina
  Intron number 1 from transcript clementine0.9_024940m (loc us clementine0.9_024940m.g) derived from phytozome v7.0 (c hr-ID scaffold_10; pos 3995523 to 3996312)
ctcttcccggcggccacctcgagtttggtcagtttctcactcattacttttccatcaagttcgagatcttttttttttttttttaactcatcacataaatcaaactccgttttgtttcatctcattttttatgcgtaacatttcagttaatttctggttcgggctgcgtcaggttttatcactaattacaaagagagaagagaaaatattttggattagaaaataaggacaaaattgcattagatctaatttattgtatctacatttgtatttgtaatagctttgtggcccaagtttgcggtgagctaattgcagtaaaacatcagataaagagaatattttgtgatatattttaccactagtgcaattttgttactctgttggaactcactaatgtagatttggctgacaatatatgtattaagatttaattagagttcacatatgtgcatctaaatttaatcaagagatgaactaattacaaattcatacatgtttctaaaggattgaataatgatatagtcagtattcacgagttcctaaaggattagcataaagaagaatttattccctttcttgatagaattcccatcaaataaggctatcaagacggaataaactagaagatccattgtatatttgagtgttttcggtacttgaacaacaacaaattaaggtacggtaaatttactgatgtttatgtattcgatagatatttctgtatcataaagtttttctttcatactcagatttctgtttcttcttcatcttcaggggagagctttgagga

SEQ ID NO: 84941 - DNA, 777 bp, Citrus clementina
  Intron number 1 from transcript clementine0.9_009499m (loc us clementine0.9_009501m.g) derived from phytozome v7.0 (c hr-ID scaffold_23; pos 1898105 to 1898881)
tttcgcgtgctgtcaggtaagtttttttttcactttgctctgtcttttgtcttatttatttattccttttgaacgttttaagtatgggtgttttgattttttattttttttctgctttgagggtttaagctgtgtaagtggatctgctatgcgagattgagcaattggtactattgttaattgaagttggtattgagacggatatgattgtttgatgattgattatcgatagctggtttttctcatgttgaagtgataaaaataataataataaataataaaatgccccgcttttctttatttatagataaacgtgtaaaactaacttcattgtccaatatttaggaagtttttgtggtaacagacactggatttattgtttttatattgatctttttttttttccccactggctttaatgtttatgagtaagcatgaagctgggattgaatttaattctcttcccattttgaatttttggcaattttttaactaaatcatgaagttaataacccggtatatttcattttatccaccaatgatcctgtatggcaatcatgaaagagcgcaatttgagaaatttaggggattttttacaatcaaatcagttatatgaaattctttatcatgatattgctcaaagtttctgaaaatgatagctttttgaccaaatagagattagcatggttgtgacttatgtttggtcgggtttattatctccgtaggttgcattttcttaattgcagcattatcttggggataaaaaggaagagaaaa

SEQ ID NO: 84942 - DNA, 678 bp, Citrus clementina
  Intron number 1 from transcript clementine0.9_024848m (loc us clementine0.9_024848m.g) derived from phytozome v7.0 (c hr-ID scaffold_53; pos 243214 to 243891)
aggcttactctgctcatctcaagcgatctggcaaggtaaatttacacaaagcttctcacaaacgtatacgtatgtgtatctgggtcatgtttttcttttctctctgtagtatatattatgggtcatttgggcctaattagtcgctgtcctgctctgttgtgatctggtttctagttgtattatgttatttacttctaggtttatggttttaacttgtttttgattgtttgatttttgaatttaagtggaaaaggagttggattttcattccagttcatttgttattgaggtggttgtggatagaaatttaactgtttggttcatacaatgttattcgaccttgactttaatggagattgtactagtgtttaaacaatttaatgtagttgttggtgggtgtgtaaagcaaactgatggtcggcatgtttgtataatgctgtacgagtgtcttgttattaagatataaaactgccggaattggtggacttattactgttcatgcttacttttatttaggagtgtgtaagaatcatgtataactagtttgtacattccttggtagattttcaattgaagagaaattttagatttgttcagctttgcttttaatgtgatatttgtgcttcaatagtcttgatttgtttttattcttttcctctttatcttgtctgtaaatag

SEQ ID NO: 84943 - DNA, 874 bp, Citrus clementina
  Intron number 1 from transcript clementine0.9_008751m (loc us clementine0.9_008751m.g) derived from phytozome v7.0 (c hr-ID scaffold_10; pos 297185 to 298058 reverse strand)
tgatagctccgtgagtggcaccagtacccattgtaatatctctccgcttacttggaacttcctttttgttttcagtttttttttcccatgttgacttgtaatttactaggaattttctttgaggatattaacatcactgttattgttaattttaattttttcggatactgttttgcacaagtagcttgtcaatttttgctgtgtgttatgatctcaattggtgcgtcgtcattgtttttgagttgttaccaaatagtaattggattaacaccatcaaatttcagtacaaatttctgatttttgtgaaaatatgggctttaatctcaaaactggttctgtatgagtgtcaattatctctagaaattaagataaatattttctttcgtttgaaaaatccttgagaggtttgagtgataatcaggttgagtttacattgttgaatacgatttgggttaaggtatgcgttaatgcttggaattcatgtctctattccttcttctttgtcgttgtttttgaattttttatgacctttgaattccttaagtctgatttagggatttggtgctcctgactaaccctacaatctgggaacctaggaaattggtggctatttgccatgtaggttcctgtaaggaattaaacctcggaccaagcaggaggaaacaattattgaaatcagttttgttgatagttgtttgtaaacctatttggcaaatggtgtaatgtatggcaaattgatttgcaaggatgcttttggatacttctttctttctcaacttgaagattgtaattaatcaatggataatgaattcgcatgacttgcattctaaattgtaatacctattttgtggatcagcagaaagtaaatctacaa

SEQ ID NO: 84944 - DNA, 814 bp, Citrus clementina
  Intron number 1 from transcript clementine0.9_011523m (loc us clementine0.9_011523m.g) derived from phytozome v7.0 (c hr-ID scaffold_27; pos 1948098 to 1948911)
ctgatcttgttatcagtgaaatcactcttgggactgtaagcaacttcgctttcttctaaatgggtgttatttattttttgtatataaactgtttttagtaatggggttttacattttttttttaattttttatgttttgggtgatgaattgtttgttattttgtgtaatgtggccagaaaatgaaatgcactctgtatttatttaatactaaaaaagctgttcctaattatgttgactgctcatagaaagtgatgttatatgaatggacagtatcctacttcaacagcttttttcttttgatatgttatgttgcttagattttggtaaacaaatcttaggtcattaacaaaggcgaatgcgtttaattacctagttattttgactgccattttagaattgaaaactcaaggcacttgaattatccatccttctaaaaagtatttaccatatcaaactgatgttgttcttttgaaccgctttgaaaaaattgtaaatattttaagcccttgtgtctggcatcatgctggatcctgaattgtggaacattaagttgtttgcaagtctcgagagtcgtttgaaatttttttgaactactcggaagggcatgtgattcaggaattcgctgttgaaagttttattaagttcatgggatattataatatggaaggtcagtattcttcagtttggtcttatatcattattttgtacgtggggcatgatgcctctttctatattttgaagaatggagcattactagtataccgtctgctgtcaagttttattgtgtgtgattaagtctttcgtatttttcag

SEQ ID NO: 84945 - DNA, 538 bp, Citrus clementina
  Intron number 2 from transcript clementine0.9_032276m (loc us clementine0.9_032276m.g) derived from phytozome v7.0 (c hr-ID scaffold_1; pos 8193021 to 8193558)
gaaacgacgaggtaattttttttttttaatgcttagtttatgaaattaatcaggggccgtgtgatattttcaatttgatgggaaagttgtgtgcttcaatttttttattgttgcattattgattgcaattacgaaattatgtgagtaattagtgtaattgttgatagttctgaggtcagttgagttttatgtagaggggctcacaatccaatagtttgcctcttttgatcagtggtggattagcagctttgattttatttttgtaggatgtagtggtaggctggtaactttgagtttattacttttctgtacaaagaagcaaaaattgataaataagactattaatgattttgacttatgaatattagttgttattgatctatataatatcatcctgatgtattcatgatttcttcctctatgcgtgcttttgtggtacaagtttgctggattctacaatattcttgacttcattataagggagtgcttttcattgtatgtaggtcagcctgacattgaatataacagctgatttgca

SEQ ID NO: 84946 - DNA, 440 bp, Citrus clementina
  Intron number 2 from transcript clementine0.9_013803m (loc us clementine0.9_013803m.g) derived from phytozome v7.0 (c hr-ID scaffold_1; pos 11547992 to 11548431)
aggctactgctgctctcaataatctcgaatcgtatgtaagcatataaaagtttaattctttaatgagtttttcatgttttcgtaaaaattttgatgattatattggaaatgcattgaagtggagtaatgattagatggctttagtaatttgggacaactccctgttaatgtagtttaaaataactatgtagcttatttatttgtttgttttatggttttcaattaaattttgttggcatatttacagtgaggaagttagtaaagggaatgaatatgatcgatggaaaataaatttgatcttctttattttcttaccgactatgcctaggcttaatttttctgtgtttcatgccattttttcaacttggaaatgttcttcctatgattagttttatttttattttttaaggaatttgagggtcgtactttaaaggtcaatt

SEQ ID NO: 84947 - DNA, 794 bp, Citrus clementina
  Intron number 1 from transcript clementine0.9_010401m (loc us clementine0.9_010401m.g) derived from phytozome v7.0 (c hr-ID scaffold_10; pos 4724344 to 4725137 reverse strand)
tacccatcttcttctttcttcatttatcccctcaggtgagtcttctttttttttttttaatatttagtaatttgttgttatttacatgaccttttcaatcctgatatccagatttcagtgcgcagaaaaaggaaaagaaaaaaaaaaggaaattggaagtcttcgaatctttttttttttttatttgcatttccgtttactgagtttcggtacgagataattcggccggtcgttgaaggggtagattggtcatttgatttcacgttcttacattttaaatttaattcaacctacccatttaagcggttcacgttacagattaactcattccacatttgcacctcaagtttcgtcgtactgggttaaccgcaccgcgcccgttaatttacttttccgtttgtcctgtgggaaaattccgaattccccgttctctcctcgattccatatttgcatctgtgcaatacaaagtttttacatgggctataatgtcttttcatgtgtcgttccttcctaaattgtcggagtactaagatacagccatcaaccactgttacgcatcttcacctcactcgtggcgccctcttattggtcaaccgcagctcctttgcgtagctgtacacagacaatacacgcgctgtcctttctattaatccttaaattagctttctttcaataaacaacacttattaatttaattaattatatataattacttaacgtgaaattcgttttaattgattttattttttgtcgttgcagttgcaggagctttcctcaaacgtgaaaagagcatt

SEQ ID NO: 84948 - DNA, 855 bp, Citrus clementina
  Intron number 2 from transcript clementine0.9_033798m (loc us clementine0.9_033798m.g) derived from phytozome v7.0 (c hr-ID scaffold_63; pos 1081945 to 1082799 reverse strand)
tcaactttcttctgcatctcttaaactgcgagttggtgaaatattccattctgtttataaaattaaatctctagcatcagtgttcttcttgtaatgtgtatttgttgtagcagttactttatgaaatgagttcttcttgttgccttttcttctttcttttatgggtatgaatatctgccttatgagatttcgatcggttgattggtagtaattacatcttgtttatgggattagagctctacatgttattatatttcagaatcttgttagagttgcatgaactggattgactgaaaacttcattcttagaatacttggaatcaaaagtttttgttgaaggcttagaatgattatattttcatttatttggaggttgttaaaatttgatcatttgtaattttatttttaaatatgtatattcaaaattattaattttttttgaaaaaaaaggacctgaatctacacaaattattaatttttttggaatcgggttcccgttttcggaattatccccaatttaatttttttcttgtatggggcgggttggggtcctaatcgggtttgggtcccaaacccgccccattgggtgtaattcaaccctattgggtttaattctccaacccgatcgggttgtaacccaaactgaaacccgaacaaccgaaaccgaaaaccgctttgtccactcctactacatgctatttacttttttttctctcttaaataaatgaagaaaattattgaattatctaatatttaattctaattatattcatttatgttaaatgatttcattattcgatatcttttggtaagtttaatggtcagacacatattgttgtagattacttggggacc

SEQ ID NO: 84949 - DNA, 451 bp, Citrus clementina
  Intron number 1 from transcript clementine0.9_033798m (loc us clementine0.9_033798m.g) derived from phytozome v7.0 (c hr-ID scaffold_63; pos 1082822 to 1083272 reverse strand)
cactctcgtcttcgttgggttatatttaaaggcatgtcctttttatttctttcgttcttgcttctcttggctttctttcttctcggtttgtttctttttcttttgattcctgattcttagtttgctgtagaatattttgggtgtgtaaagtttgtatatttgttagttgagaatcctgttattgtagcattttgggcttaagatatatggttgagttgatctctcctttattctgtaatgggtatgctctgcaccattattctgtccatgagccattgacatgatgaaagaaacttcttatgaggccaaaggagaacttgttttgacgttggctttaaactgttaagttgatgggatggattgaatttagatggtttatctgcagaatttcgcatatgagttcttgaattggtaagcttgctaaaagagcacgagcatttgtcggttttgg

SEQ ID NO: 84950 - DNA, 579 bp, Citrus clementina
  Intron number 1 from transcript clementine0.9_009860m (loc us clementine0.9_009860m.g) derived from phytozome v7.0 (c hr-ID scaffold_20; pos 1295670 to 1296248)
aaggcattcttggttgccctttgttcttaattcaagtgagtctctctttactttaattagtatgtaagtttattttgtgattttagaatttgaaaaaaaaaatagtagtaatatatgatgaagattgatttagtgctaagacgagtggtttttaaataatattatttgactaattattcaagtttgaatcatctttagggaagaaagggactaaaaatatcaatttgaactttgtttaaataaatagatgtatcaattcccacacgtacatggtttttttggaaaactttaaattcaaactcaatatgattattgaacggggtgatccaaattcatttatttaataaccatgtgacatgcagctagttctattattttgtgttgtgtttgtgttgagtttgcagttattataaaaaattactaataatgataataatgatacatgaaaaaagatcattaaagagatctttagtaacttttaaattatataatgattttttaaggtatatatatatcatgttctgttatcatcataatcaaactttgaataattctatatctataggtgacacgtttgac

SEQ ID NO: 84951 - DNA, 783 bp, Citrus clementina; identical to SEQ ID NO: 83540
  Intron number 1 from transcript clementine0.9_031335m (loc us clementine0.9_031335m.g) derived from phytozome v7.0 (c hr-ID scaffold_20; pos 305466 to 306248)

SEQ ID NO: 84952 - DNA, 950 bp, Citrus clementina
  Intron number 1 from transcript clementine0.9_031435m (loc us clementine0.9_031435m.g) derived from phytozome v7.0 (c hr-ID scaffold_1; pos 6159358 to 6160307)
ggccttcttgatcacccatcgaccccgtccaggtatgtaattttgcaccagatgcctttcattgtatttatattctagtgcccacatcgcttgtctatactttctcaatgtgggataaaattaccagcactgctgcttgtactagcagaagctattttcacttctcaaactagagtacagtgcaagattatcattatctatattttagtttttataacgatttattcaggatgaatttggaagtgtttcttctgaaatgcgcgagcttaattgcgggtgaaggaaatttctggtaatgcatcgtagggtattttataattgctttcaaaaagtgtaatcgaaagtgcttcgtggagaacaatctatagatactttttctatagctcatcgtacttccaaaatgttctgtttatatgaaaagatgaattttctattcactcaaatattagttggaaagtgtttttgatgatgaaaaaagcacttcctacatgtattcttaagtcttaaccaataaataaaggtatatcttcttgaagaaagtcaacacaaattcacaaatcagcattttgtttaaagttcaggctgaggacagaaagataagcctgaggttttacgcctttagcaacacagattcaaactaaaaatatctcttgtacaagtgcttttggacatggctttcaataatttaattggatactgaatggggtggtgattatgagactacgggactagatattttaagtacattgactttcaattgcgaggccaactaagtaagcccctcgacaattacaagaaaactatagtcagtgtatgcacaatgtaatcttgtctgctcggagtatgtataggttgcaaagtacaacaatgtgatacacaagtcatcacagaaattttaatctgggaattttactcattatgtttttcattttttgacactctaggattgc

SEQ ID NO: 84953 - DNA, 878 bp, Citrus clementina
  Intron number 2 from transcript clementine0.9_009367m (loc us clementine0.9_009367m.g) derived from phytozome v7.0 (c hr-ID scaffold_1; pos 11426803 to 11427680 reverse strand)
agaatttcaagtaaatgattcaatacctgcttaccagaattcacttttctgttgtagttactatcattacatgttcgcttcattctatggtatattcttttaaagtttgaggaattggagttaaagttcatgtggtccaaacaaatattcaggaaaggaagacatccagattagcaatacagtgataaagaatgcttgtatatatttaagtggagatgatacggttgtccatatgcaagattatgttgacaaacctgcttcaaaagatatttttttgtctctattaaggagtattagaggcttcagtacgtgaaattttgttatatgaattatgatatcaatttctttgtttagttgggactaggcaggtattaccttacataacaaatacttcagcctgtatgtgcatccggctttgataatgttgatatgacaaggaaaagatgaatactttcgaacttataaaaatgtgcatgttttgatcttttatgaatgagttccaaattctacctcacacttacgaatatgaatatttttacaataaagtttggaacttttaatgctttcatggattgcttaaatctgcctgggtatataacaaacaatgtcctaaccacagattttttatgatatgtctgaaatataaaagttcagagtgcttttcttcatgttgcttaactgttgattagaacttggcagaacatatgaataaacatgtgaattaatggcttattgtgttggaatttttagttgaaagtcattttctctctccctaggtcagtagcctataagctgaaaattttggcccatggttatgaattgacacatttactatttctgcaggtcagactttgtctggtttggctggaagtcctgct

SEQ ID NO: 84954 - DNA, 922 bp, Citrus clementina
  Intron number 1 from transcript clementine0.9_011866m (loc us clementine0.9_008094m.g) derived from phytozome v7.0 (c hr-ID scaffold_53; pos 440413 to 441334)
gtgtcgttggctcagattctgcttcttctttctctgtaagcctctcttttatctctctgtatgtatatgtgaatgtgaatggtggtggttgtgtcgttttatttgtagaatttggtgtcattttggattgattttgagatctgttgttgtgattgatagggttttgttgaacatgtattcaattgagaatcgacttttttggtttctagttttttaagaaaatctgggtttttgggtttgtgatcgatgttgaccttgacaagatttgccgtttttgcagctaaaattttgttgtttatttttttattaattacaaataattgttggatttcattttactgctagcatgtactaaagagcattaaatgattgaaaattcttcctctgctgaataaatattttttaaatttttttttaaaggttatatgtgtgctaagaacacaattagtttgtttatttttagattcaattatattaagaaaagagctgaaattggatgatgcctatggctgtcaatcttattttgcttttgtgtctgtagagtacaagatattagcttgctgctgtctttgtatgcatattatgatagattctttctttcgagaattaaacagagtgaaaatttgtttaaagtagtgagtagatttagagcttatagaggccaagaatgctagaattttgcactggagtatggtattagagtttgaaattttataattacgaggactccatgtaattttaaatacccaccgtcttgatgtagtagatgtgtttgcctgaagaatctgctccttagtttagctgtcttgatttagttgaaattcttggagtggctcctaaaatatttttcatccttccatgtatttgtgttttactaacatcctccttgtaggtattcttagttttcaaaatagtcgtgcac

SEQ ID NO: 84955 - DNA, 479 bp, Citrus clementina
  Intron number 1 from transcript clementine0.9_015831m (loc us clementine0.9_015831m.g) derived from phytozome v7.0 (c hr-ID scaffold_29; pos 1593521 to 1593999 reverse strand)
ccaatcgccgcaatcagatcccctttcctttccgagtatgaattatttcctttgaatcaaaactcaccttctgatctcgtcttatttatcgattggtttacttttttacttacttctcttatgtgcttacaaatattagtgagaaaaaaaacttttttttttctttgctgtgaagataattttgtggtacattgtcaaatgtttgtattattagacaccgcttaatttttaattttattcctttggtttttgcttgtgcttgttttttatgaacatgttccaatgatgctgagaagcctagttgtttatatatctggcttgaaccaaactttttgttctgtcattgaattttttggacaagattacgtgttgtgattgaagaaatgagttctcattcttcgataggttttattctgaagtcttattgctgctgttttgctacggattactgagtaaatttgcttgaatgcgcagggagg

SEQ ID NO: 84956 - DNA, 891 bp, Citrus clementina
  Intron number 1 from transcript clementine0.9_010266m (loc us clementine0.9_008739m.g) derived from phytozome v7.0 (c hr-ID scaffold_43; pos 1659188 to 1660078 reverse strand)
aaggagaagttgaaaccaatcattgattcgtttcggtaatccatctatctacagcctgcatatttgtataaatatatctgctcttgctttggctaattctgtggtgcaaatttatttattttattcgtttaattcattcgagatgaattgttttgatttgatcgaatcatcaaaccacgagtaatttattaaattattgtaatatttttagatcttagattttatattatcttagttttatatgtaatttattatttggttaattcaatatttatgtgtttatgtgatttgtgtaattcatccaattctttagcttctacagaaatcttaaggaacacagaactagctgaagtctgtagagataaccatttagagctgtgagcttttagagttttggatattaacttagaggtgaatagcattagggaaggaagagaggtgaactaattctttagtcttgaaacaatcaggctaaaaaagctgcttaattgtaagccagtaatttgatgaggtttttcttttcgtcattttgaagtttatattttattgctttggccccagacctatggtatgctagggattgaggcttcttggattcggcaacttctctgggatggaatcactagttgccaagtaaaagttctgggtggttaatgaatattagctgcgacgtagtagtgggcatataccaaacactttagttgttaagctttcaaattgaaattgaagcatggcagttacgacttacccttaatgagtttggtcttttgtttcctttatttcttctttgatatgcatatttcttgtgttatggtttttgtgagaattcctttcatctttcaactttgttttgcagataaatttttgtaaattgggttgctttcgtgagcc

SEQ ID NO: 84957 - DNA, 757 bp, Citrus clementina
  Intron number 1 from transcript clementine0.9_009739m (loc us clementine0.9_009739m.g) derived from phytozome v7.0 (c hr-ID scaffold_98; pos 641045 to 641801 reverse strand)
gtcaggttagtgcttcaatttactttattgtttattttagcatctgggtgtctctgtaattgcatagatgggatgaatttagttcttgttcgtttatgtgtgcaatacttgtgagttttgggttaatatttctattttggttcttggagtttactgtcttttgatgtttgggatatagcaaagttgtttccttggagtgttgtcagcctgagcccttaggtgtctcaattttgaagcattaagaaagttgtttggttgattgaatttaagccactattttattggtacttagccaaacttggatatgaaatttggttgtttggtaggacttctaacacttggttcatggtttgtgtgtggcttttcaaatggtggtagaaaagacgtattaaaaatattatgacaagccgggccagtttaatctttcttgcaagaaatttataatggatggtctgttctatggaaataaaactttgctcttatgtatgaaagatatataaagaatcttgtttcagacgtatcttctagaggcataaataaatatgtagcctgcaaaagagaaatcttccggtgttattgatgctaatataatatctgtgaaatcaggcgtggtacttattgaggaatttttattttcttgtatctggtgaatctttcttgtctaatctcttgatgatcagtaaattgacagcattactcatatgagttcttaatttgtgctggatttgcagacttttgatcgcccttgcatccagag

SEQ ID NO: 84958 - DNA, 713 bp, Citrus clementina
  Intron number 2 from transcript clementine0.9_032355m (loc us clementine0.9_032355m.g) derived from phytozome v7.0 (c hr-ID scaffold_23; pos 1359458 to 1360170)
agtaaacgaacttccttcatctctccttccttcaggtcccattcactttgtagaaactaaagggtattttagttgctcaaacacctttagcttctgcccaagatccaaaatcagattcctagatgcttgtctatagatgacttgaaaaagatttaatcaagaacctcaactggacagaacaatcaatggtttaagaatcaaagaatctaatcaaactaaagaataaagaacagaagagttttaacgtggttcagctaaatcacttagcttacatccacagaggaacaagacttcaggcttttattgaatgaactcaagattacagagaatttacagattgtatctcatgaaaattaaattccctcatatgagagattaacccccttttatactcatgattcgtagccagctatctgcaccagaatcggctccttttagttgctgataacctcctggaaaactaattccagatgctcacgtgcaagccatgcttcatcaacgacttttaacggcttctcattagaaccattcacgtgcgcatcatgtgtttcactaacttaaacgacagtcactgataccgttttagttagctttgtatttaaacaccaaaacacactcttctcaagtcattttgaatgccactgaattgctttcactggttactttacacacttcaagcaattggtttagatttcgtgcaaaaattggataag

SEQ ID NO: 84959 - DNA, 723 bp, Citrus clementina; identical to SEQ ID NO: 80306
  Intron number 2 from transcript clementine0.9_025931m (loc us clementine0.9_024723m.g) derived from phytozome v7.0 (c hr-ID scaffold_63; pos 689971 to 690693 reverse strand)

SEQ ID NO: 84960 - DNA, 584 bp, Citrus clementina
  Intron number 2 from transcript clementine0.9_020252m (loc us clementine0.9_020252m.g) derived from phytozome v7.0 (c hr-ID scaffold_10; pos 4911793 to 4912376 reverse strand)
ggaaaattgtgccagtactgcactgagcctttcaggttaatttgtttacagcaaccccatttcaccacttttatctttttcaatatatcttgtttgtgtctagggcttttgcttacagaagtgttaagcctatgtttttttattttctttttttatttgttcatatgacatgcatgatctctccttattctgtctctctctttccctttcactctgatttctctgcaattcttgttgactaaattgagagttttgaccagttcttttcattcctctgacaattttagggtttctttcatgttgtatattcacgtatcttgcctgaagcagacagtaaaaaatcttaattcatgtttaattattactatctgtagcactcacatgatttgagttttacttctgagttctaagggtccatactaatgattagagaaaattcatgagatggagaaatgaaagatattaatattagccgggtttctttacatgaaagacattttatgactctattttcttttcttctcttaaattaagttgtttaattagcatcataataatcatataactgtttcaattaccacaga

SEQ ID NO: 84961 - DNA, 925 bp, Citrus clementina
  Intron number 1 from transcript clementine0.9_001334m (loc us clementine0.9_001334m.g) derived from phytozome v7.0 (c hr-ID scaffold_133; pos 474573 to 475497 reverse strand)
ttctggccggagatctcgactagcgtccccatcatgtaattaaattttctttctttgtcgcttcgctatttgtctgtaatttgtgttcaatatttatttttgttgagtttttctctgtggaaaacgagaatgtgagtggtaaggagtgtagatttgaattaaagcgagtaattgtacttgttatttgggtaaaattcaggaatttattattttagcttggcagtttaactagtgggctttgttttttttttttccttttaggtttgggtcgagggttttatttagttaattgggaaattgatttagattttggaagctcaggaaaagctttctatgattatgatgatgatgatcttgtaatgccaatttcgatactaatgtgtgtagacgaatcttagtttggagaaaagaaaaaaaaaacatatcgtttctgagtttctagatggtccaaaaatttacctatcataggtttaagaccttcagctagagggtctggggtcttaagtgggtggtggaagtagctttacttaatggaaatgatttttattagttggttgctgttagggttctagttctgtctgagtaactttataatcaatggattaaaatatgctagtgcttatccctagtcaaagcttcagctgaatcaggagccccaactaggagtttagtgaaattgccgctgatcatgttgttattgcctgtacctgttttttgaattcttaaacgtttatttatagtgagtactcagaagataacttttctgagctactctgtcttgattccgaggatattgaattttaaactatctccgaatctaatattcctttactgatcttgtttatctttataaatcatgactatggattattcatttttttttaatcttctttcttttttctgccttgattcagagaaagtttgt

SEQ ID NO: 84962 - DNA, 730 bp, Citrus clementina
  Intron number 3 from transcript clementine0.9_001477m (loc us clementine0.9_001477m.g) derived from phytozome v7.0 (c hr-ID scaffold_10; pos 5593377 to 5594106 reverse strand)
gttactctcctaaccagcagttccaacctaatgtgcgagttgattcctcttaaaaccttttttgtttctctagtaaatgtttacacgaggagatgacaattacaatctgaaattatactggtactgtacgatctttaaaggacattttgttggaaagactttattatcacgactaacaaaaccacaattttaattcatcttgatgtctggatgtcctagatggcacccactaacagataagttatattcctcagtttattttgacgatccttgtatatataactaaattattacatggcaccttatgctgtgttttcaaactctgtcttcatattaaatctattctggtgcttttttcttccgtttcaccatcttttaaagaacttaagttatttgtctgggactcatttttaagaagggtcagaagcttttgttatttatggttgtgtagtgtgtggacaactggacctcaggaaattatttaattatgcatgattttgtctttttcatgacgcaaattgcttgtatgagttttgagattcagtttatgaaggagtggttgctctagattatatattgtgatatctagttaccgcttacaaacatgttgactgtatttgacattggataatgagcaattaaagcttatgaataaatggagtaaaattgagatcattttttatttttgatttgctttgcttattttagaataaacttgaagctgttgaag

SEQ ID NO: 84963 - DNA, 576 bp, Citrus clementina; identical to SEQ ID NO: 79674
  Intron number 1 from transcript clementine0.9_001477m (loc us clementine0.9_001477m.g) derived from phytozome v7.0 (c hr-ID scaffold_10; pos 5594538 to 5595113 reverse strand)

SEQ ID NO: 84964 - DNA, 904 bp, Citrus clementina
  Intron number 1 from transcript clementine0.9_015963m (loc us clementine0.9_015963m.g) derived from phytozome v7.0 (c hr-ID scaffold_53; pos 621980 to 622883)
tcttgatatcttcgagatttaccgacggttttgcggtaaattacaaaatttcacctactttttatttttgaattgggattttacagattatcttattcttgtttcttgattcgaatcacgcttctaattttttacttggaaaattttgattatttgatgtaaagttttcatttttatgcatttttgatgtgggtgtctgtgtctgggagtttgatgggtgaaggatttgatcttgtgttttctttagataactttaggggttttatctattgggttgctcagtggctgtgcaaatttagttttgatgagctgttgaggaacttgagctttttattccaatcccgcttgtagtttttttttttctctttggggggggggggggggggcattgaggtatatggaggactagggttttgggtttgaaattattgctgatttattttggttttgtagggaaatgtatgagggatagtgggttgttgtgtatagtttcctaaatcccgtgcttttgattgtttatgactttttctgaaaagaaataaatagaatttgagatggtttatttaatgtagagattttagaaattatgatgtggtattatgtgttacattttgtagcagttgtcaatcgttgatttaaattagttttgtattggaatgtacgagggagtggatggttatgtatctttgcaaaagcccgcgcttttgattgtcaaagacttttttggaaaaagagaatagaaggcacttttttatatgctgttaaattaaagattgttgaattaattgttactgtgtgttaaactgtttagcagctgccattcattgttttgtacttgttgatgagaaagaagttgtcatttagctgattctttgaacttatattgcagaaattaaatctcaaa

SEQ ID NO: 84965 - DNA, 490 bp, Citrus clementina
  Intron number 1 from transcript clementine0.9_015579m (loc us clementine0.9_015579m.g) derived from phytozome v7.0 (c hr-ID scaffold_23; pos 1618794 to 1619283 reverse strand)
aagctgaattcaattcgctggtggcatttattcaggttggtctctcctttctttgccaagttacttgcgttgtttgtttcactgtttcagtgtctgaattgcttcattggattctgctttctcgttgaattatccaaagcgtctcattttagagcttcaatttatacttcaaagcttggaaagtttaaatttttggagaattatggtttttgttggtgaattcaaagttaataaatgacaatttgtgttcttgtatgagagtgttttgttttgattttaacgagtaattgatagtttattaatgaatgtgtaagatgaagttaaagaatcgagtgttgagatcaagtaatatctggggtcggttcataagttttagcagccactaatgcctgatgttaaattatcagcagaagttttttttttggttgggtgattgtgtaattacgtggaattttttgttttgatgatagtggggaatctggaaactgaa

SEQ ID NO: 84966 - DNA, 889 bp, Citrus clementina
  Intron number 3 from transcript clementine0.9_001187m (loc us clementine0.9_001187m.g) derived from phytozome v7.0 (c hr-ID scaffold_53; pos 1157357 to 1158245 reverse strand)
ggagataaagttattcttgaagatccgatagagaagtgcgtgcgttttctcgtaatcaattgattttttttttcagtgttagttttttttataattattataattattgttgttgaattaatcaaagcaactgttagttttctattttcaatatatatatttttaaataattgcagaaagagtaagtggtaaaagaagttgaaatccgagaagtttgtgcagacattcttttcaatatattgattgaaaggaagagtattgtgaattggagatcaaggtgtttttaaaaatggggccggtttgggcgaaaaaaaaattttttccctggaaaataaaaaattgggggcttttaatctttttggtgaaaaacggaaaatatatttttttgggaaagagaaaatttttgggtttttttttcccccccccccccccccccccctcttttttcttttggccttcctttatcctattgctggacttctctattgattctaaaaacagagttactctgcaatttctctttgttagacatttaactactaaagaaagcagaaccatgtgacttaagagcaattttaatttattttaaagatatattttgaaaacgtaaatgcatcttgatgcgtggcccaatacagaaaattggagtagaaaggtcaaaattaattgattcaaaaaaattcgatagtggtgaaggggctaaatagggaaggtgagggcatggcaagtgcgtgtgcatgtgcattgcatggttcatcaacttggggaccaggcttattcattgtacacctatttttttaggtcgatattgtccttagaatttattcttgttgattgtctcaagaaattattagttgttacaataatttgcttatttcaggtggccaat

SEQ ID NO: 84967 - DNA, 395 bp, Citrus clementina; identical to SEQ ID NO: 81670
  Intron number 2 from transcript clementine0.9_018023m (loc us clementine0.9_018023m.g) derived from phytozome v7.0 (c hr-ID scaffold_29; pos 2343659 to 2344053 reverse strand)

SEQ ID NO: 84968 - DNA, 715 bp, Citrus clementina
  Intron number 2 from transcript clementine0.9_013704m (loc us clementine0.9_013704m.g) derived from phytozome v7.0 (c hr-ID scaffold_10; pos 3765944 to 3766658 reverse strand)
cggctaatacagtcatcgagattttttttatttttgtaagtatgcaatgatttgaaagagcgagttaggtttttttttgtttaacggatttgttttaattattatcatcaagatttgttttgtttgtcatgtgatttattttttggatttgtatttcatggatctgttctgaaatcttgtttattttggcttgtttcagataacatgattttttttttcccagattgatgtttgcgtctgttagataacatgaattttgtttgttttaataaaattagaaccttagtaatttaagctcatttatgagctttgttttgagtatttgggggaattgttggattatatttgacagactaagtttcagtgttcaaaattttcttttccttttttttttttggtgagttggtgagaaaataccgtgatagtcttgaagtttttgaagcccaaaaaaaaaaagtctgtttaacattgtgactgtacaatctataaatctggcattttgagtcctccgattctgtttcttcatattacttgaatcctcaattgtggttgtagtgccaaaagttatggttcattttaatctgcatggagattattgggcatgcttggttttaattagtcttttctttttctggttgatcgtttcattgtggtctattgacatgtcctaacaattaatatttgttggcttttgatcaggaacaggcaggactga

SEQ ID NO: 84969 - DNA, 858 bp, Citrus clementina
  Intron number 1 from transcript clementine0.9_006505m (loc us clementine0.9_006505m.g) derived from phytozome v7.0 (c hr-ID scaffold_53; pos 294604 to 295461 reverse strand)
atttagaaaagtcggaatataaacaacgatttgaagtgaagaaaaaaatataattcaaggtctctttaaagaatttgtgttagttgattggtatggtaggtctcaacggggtgacatatatttccagttacgttaaaaagtacggtagctttgtgattgtgattaaagctcagcctctgcgtttgattatttgaagaagttttttgtaactcataacttgaaatatactatgttgtgtcacgactcatcatgctaatggctaaacaaacaaaagaaattaaaaagaaaaatcactttttgggagggggggtttgaaggtcgttctcgtactttatggctttgccggtctggacgggcatataagtgaggggggggggagagagagtggataaagacatacacaccgtgtttggctccactttatccacttggcatgttactggggtctgtttcatgcattattttataaatttgtttaattacactggttgatatataaaattcacacttttatcattgactctgagctaaagaaataaatgaaagccactgtcataacttcaatgttacccaaaaacgaaagataagtattaccacaaattttattattaacttgcttaattaagagccgtacaagaaaatagaaataaaaaataaaatactttgtatttttaatttacttttgaataaataaaaaaataaataaaatgatgtcattttcagttattgctccactccatgaactttttttttttttttttgattggccactccatggacttggtttcaagatgagtatgaaactaccatcaactaaccgcagataaacattaaccaaaggaggaaagaaagaagcct

SEQ ID NO: 84970 - DNA, 872 bp, Citrus clementina
  Intron number 1 from transcript clementine0.9_003664m (loc us clementine0.9_003664m.g) derived from phytozome v7.0 (c hr-ID scaffold_33; pos 1250690 to 1251561)
agtcttccgctaccggcactatccctcctcttcaggttccgatcttcgaagttttatcattgttttgaaagttgtttattttctgtttggttcttgagaaaatgcaggagaatggaaggaaaaaaaagttgaatctttgtgattgcgttagttggtagatcataattttctgcttccgatctttgcggtccttatttatttattattttaaaaaatgttttagtctgtttggttgccgagaaaatacgggaaaatgaatggaaaaaaattattgaacctttgtttactcctgtaagttaacaaattaagtggtactgatgatgtgtattgaggtacattagactatgttattttacaaaataaattgtgtgatttaatggaaatgtgtggattgcatagatctgttgctatgattattgattgtttttccctcatgttggttgcttcaaaagtgcaggaataaaaaataaaaaaatatgaatcatttattatgttgattatttgttatatgaccttggtgcataactgttctttatatatattgtagatatcttcactttgttagagaagaattgagtttctcttgatggtgcatttggtagatctgatgttacaacataggttttacatcccatttggatgctgaaactaaagaaaataaaagattttatttatttatttatatgtacttggtttagagtaatccgatccactggaatagtacggttcttcaatgaaggttgaatttgagttttgaagtatatagttagatacgcacacaggcactcacatttatatattcattacaaggttaatttaggattattctaagttgtttgacaatactgcttgatagcaggactacaatttct

SEQ ID NO: 84971 - DNA, 985 bp, Citrus clementina; identical to SEQ ID NO: 82643
  Intron number 3 from transcript clementine0.9_011521m (loc us clementine0.9_011521m.g) derived from phytozome v7.0 (c hr-ID scaffold_107; pos 420472 to 421456 reverse strand)

SEQ ID NO: 84972 - DNA, 780 bp, Citrus clementina
  Intron number 1 from transcript clementine0.9_011521m (loc us clementine0.9_011521m.g) derived from phytozome v7.0 (c hr-ID scaffold_107; pos 421990 to 422769 reverse strand)
gaagttaagaaccaaaggaagccacccaaatttaggttcgttttctttttcatttatttagaaaaatatgaacgatttgtgacccttttagatctctgaagctccaccttcattgtcatgtttacaacttcacaatgtatgatttaaatatccattcttttattcattttctctttctttgaaggcatttttctcaactgggttttgaaaatttcttaaatttaatcattttttaaccgtgctagcttgccctggaaactgaaaatgtacgtttctttttcagtagtttaagttggttttaatatgctatgaatatgatgctatgtccatttactcgtaatcatgcttgtttgtattatgtattcttcgtttaggtataaatgtgtaatgtttgcacttcttttgtatctgcgaaagggaccagcttcgaattaaatattagttgcctcacatcactgatgtataggtttgctaacgaaggttacgtggtcttagagatgatttatgttgattagatatcccattgtaggtgcctggtacgtgtattgggttctgttatccataatggaatgtcttatcagttgtatgaacaaattggacgcaaaactttagttctgtggtgtccatgctgcactttatgtacctttttcttgtatttaactagaacaatctgtattaattgttgcccttagtgtcaattgacgtttttttttcccttctttttatttgttttgatgcttctgatctcattttgtctgcattcagctggaggcctcctga

SEQ ID NO: 84973 - DNA, 873 bp, Citrus clementina
  Intron number 1 from transcript clementine0.9_000902m (loc us clementine0.9_000902m.g) derived from phytozome v7.0 (c hr-ID scaffold_33; pos 1276010 to 1276882 reverse strand)
tcgcgtaagttttttttttttttttaatttgttgtgatttgattgaggttttagggaaaatttgggttatttttctatgaattttgtattttaagttaaattttcttaattttgtgttaatttttttttcacggaatgttgaaagctgtgaaatttttaatttttaataccaaaacttagaagagtctggatcatttgatttgaaaatgctgtgtgagcattggcttagtgaaatggatgttcagtgagccaatgttgaactatcgtttgagttcatttctggttgcggactcacattttctcactgacgttcaaacgggcactatgattcatttacttcttgttagtggtaagagttgagccatagactgtggttttaatttctatccttggttgcttagagatgaaaaggaaatttcgttagcaaatataatgactgagttagatgcattacgtcctttttatcactactgttaggaacaaaagagtagatcatgtacccttttagattcttattcaatgataagcaagtgccattttaccttgtaattttcttttctttttaaatgccccctgtaagagaaatctgaagccataaataaattgtctacgccctggctcagggcaagatttgattagaggtttgcaatgatttagatggaaattgtggattcaaaacagaatgcgtacctttattttttaaccccgtcaactgttgggacctgagtatcttaaggattgcatggaatcagtgttaaatattgtggttgttgtgattgttctgccttgttctttgtttgtttcacttgtcctcaattggaacttgttattcaaactcttatttcagtgacaagctcttcggtgttggttaac

SEQ ID NO: 84974 - DNA, 688 bp, Citrus clementina
  Intron number 1 from transcript clementine0.9_016980m (loc us clementine0.9_016980m.g) derived from phytozome v7.0 (c hr-ID scaffold_33; pos 1739355 to 1740042 reverse strand)
gtcgtttcgtcccttccgatcttcatcctcacaaggtctgatctttattctcaatctattcataaaatgttatcttttagggttcgtaaaatttgattccgtattgcttgatcgatccatccgttgattttttatttcgtgtaattgaaatcgctactcgattttatttggcttgattggttcttatgtaattgggttgaaagcagaattgttctaattatacgatttaattgattttctctccccttttttaattcaatattatatttgtgtgtgtgcgtgtttttttttaaattttgttgttgctgagaaaacgaaccgaaaattaatttgtagaattttaaaataaataatgttggtgcctaaagagttacacgaatatctattggaaacattttgttgttttttttgggggggaggggtgtgtgcgggttgttattttttgcttttaacttgttgcattttcttagcaaccaaacagaacgctatagatatggaggaggaaaacggtgttttctgaattttaagttatgtattatttggttccggaaattttatctgtgttgctttgcaattacctagtggccatgtttgtgaagaaggaaaatgaaaaaactggtttttgtactctgatgtttgaggtatttttgctcttttttagggacccttggtgtaagcactagagaaa

SEQ ID NO: 84975 - DNA, 891 bp, Citrus clementina
  Intron number 2 from transcript clementine0.9_024642m (loc us clementine0.9_024642m.g) derived from phytozome v7.0 (c hr-ID scaffold_53; pos 1400075 to 1400965 reverse strand)
gtgttgacaaaagtgtcacttctgttgttattaaggtagctttttttttttttttccctctcttaatcctgtttttgaaatttatgcaatgggtttgttgttttttgagattgtgaatatgggttatcttttttgttcggaatgattttagtaataagaaatttagattatgcatatggggattgtttctagtattttgcgtttagttcgagaattcggtttaaggccacgtttggattgaagtaaggaggcttagagagttttggtttcttgcaaagttctatagtttttttactagttttataattgagttaggaggttttaactgcttgctgcttttagttgcatttgtttttcttatgtcttgttattaactttgcgtgttctatatctgcatctgagcaaaatatctctaaatatttgttaaagtatggggtttgtaactatctaaatcgaagaacattttgcattagctggtttggatgctttacattggtataaatgttatatgcttcctattgatgtatgcttctgcgttatttgttatgaatcatctatgctttagcttaattgatcaccttgagttgtgtatattaatacattggtttccattatatttctaaatggtgaaaaatcttgatggaggttttgatttctgttggacgagaatgctaagagactcattacagaatatgatattaccatatgagatcattctttggaatttaatttgtttatctatatttatatttccaaaacctgaatttaccatgatttttattcattgaattgaataaagaggattttttatatttggtgaaaaagaatagaactgatgttaggaaattttgaacagggattggcagatcataaagattcattgggtgcacc

SEQ ID NO: 84976 - DNA, 664 bp, Citrus clementina
  Intron number 1 from transcript clementine0.9_035604m (loc us clementine0.9_035604m.g) derived from phytozome v7.0 (c hr-ID scaffold_82; pos 1059424 to 1060087)
tctcaaaccaactgggaagctgataaaatgtaagtgctattcatttctctttttattttattttattttctatttgggtttcaatattttgtgcattttttagcttacaaaatacttttagctgtggtttttttgctggatttgggttctgggcatgtgggttgttgtaggttttgcttctgcttataagtcctgtattcaagttatgttctttgaagctgttttataacatgtactacttgtaagacatgttagggttcagaacttgttctgttctttttttgggcttgaatttctgttttctttctgagttgcagcatttagttttcttacatgtccagtgatctcagggaataaagcggaaaagctttttctttgttcgtttctctgtagcatctgttgtatcaaaatcttctattttcattaccgtgctgtttttttggtttctaactgtcttcattgctggcttgctgcttttcagctatagcatttgattttcttgtatttatgtgatgagtcttatctatatgcactgtctgtagtgtttttcttcttttttggcactcttactggtttctgctagctcttatttcatgtaaagatttttttctttcccttcacaatgatgccaaatgttggtgtattttgaaatacaacaggttag

SEQ ID NO: 84977 - DNA, 610 bp, Citrus clementina
  Intron number 1 from transcript clementine0.9_026736m (loc us clementine0.9_026736m.g) derived from phytozome v7.0 (c hr-ID scaffold_27; pos 2015688 to 2016297)
ggcttcgttcgccgtcgtcagccgcacagggtaaggttagacatgcgattccaaatggtgcatgaatggctgtttgtaattcaatcttcttttgtgctcgggtgagaggcgttacaggcactgaaactgaccaatcttcttttgtacaatggctgtttgtaattgttgccgatttgttttcttaacatagtaattgttgttttcttgagtgctcatggatggtcatgggttattaatctgttatatatgtttgtcatttggtattcatttttgtttttcattttttgcatcattgagctgggctggtgtttgagatttttggaattttaggtggctgcccggctgggatttgattcattttgaaattgaattgaattttggaataggttctaacccggattgcaacccaaaccgaaatttagaccctaattttatttcggtttggtttgggtttgcgtttcaaacccgattgagttgactgttcaatctgaatgggttctaacccaaaccaaagccccatttgggcgcccctagtactactcattactcactagtatttctttttcgctcttcagcttcaaaaccctgccatcgcattcgctcttgctgc

SEQ ID NO: 84978 - DNA, 563 bp, Citrus clementina
  Intron number 1 from transcript clementine0.9_001686m (loc us clementine0.9_001686m.g) derived from phytozome v7.0 (c hr-ID scaffold_45; pos 1328458 to 1329020)
agagacggcttgaagccagtgcaccgtcggattctgtgagcttcattcttttttagagctttggaatttatttatttatttatattattggcgaactagagtgcctttagaagtgttttggtatggctttattcccttctcatctatcaagcgtttctccataaagcatttctgtctatttgagctagaaaactaataagaaatatttatttatttatctattcataatcgctttttaaaatgcataaagaaacttctgattttatgaacaaagataaatttgttcacgtaacctgttgggttggcaataatcataaatatcaggagaaaaagaaagaaaaactacaatggtctctgctcaatgaagtgtacctgattagttgttttagacaaagttagcaaacacatgccttgctgaaatattttcttttgctcactcttcttactgtgccggagaaaggccatatgatgttactataaatttctcttacttaattctctctttttttttttctgattaacatgctatttcttttgattggatattttgcatcagatttgca

SEQ ID NO: 84979 - DNA, 432 bp, Citrus clementina
  Intron number 1 from transcript clementine0.9_029802m (loc us clementine0.9_029802m.g) derived from phytozome v7.0 (c hr-ID scaffold_10; pos 79683 to 80114)
gtgcacgtttcattctaccgcaactgtatgtgcttctgtttctacaaatgcttcatctttgtttgatcattattgttctcttttttaaataataatgaaatactttgtatatgatacttttttcactttgatgccgtctcgatctcgtttgttggtgttgtataatattattgtttgaatccaaagaaagtgtaggaaacttgcgacctttttatatgtgttatctgatccaaatatcggtaactgagcatctgttttttttaggtttagccagtagaatgtttggtagccggtattatatttgtgtgcagatggagtcgggaattgtttaaagctcattatagtactcttctatgacgtattaattgttgatggttaccggttcttgtgatatttgagcttatgattgagtatgaatcgatgtgtgaacag

SEQ ID NO: 84980 - DNA, 887 bp, Citrus clementina
  Intron number 3 from transcript clementine0.9_029802m (loc us clementine0.9_029802m.g) derived from phytozome v7.0 (c hr-ID scaffold_10; pos 80468 to 81354)
ctcgagtgctcatcaggcagaggcacattaggtataatttatgcactgtgtttccttttagttcatatctgcttttttcagtgtctgtaaaatcttcaaatgctttttcacatttgtttcttttctattattctaacatttgaccaacatgaatttaaattgcttgttccatctcgatgtctattactgagtttgttggttttaaccattacttactgatctttaattatttgattattttctacttgcctttgggttgtttagctgacatttgcttttggctttaaattttgtaaaattatcttgagtttgtgaattgtgtttttatacacgttcaggttataattataatatttgaaacttgcccactaattgataattgtagtgtcataatatatgtaatgattctagcatgtatggtttaccagtattgtggacgatcttttggatattataatgtttagcaagtttgattgtacttgagtttacctttgtattcttggggcattaatatgccctgcatgcactacccagcaaatgcttttggctctgttaatcggtgtattcaaattctgtcacagctaacatcaggactgcttttggttttttttcataaaatgtgttgtgcttttttatctatttgattactttaacgttgctatgccctgtccctttgagtcgactgtttctctttgaatgtatgaagtaatgatacgttgttcttgttttagaaggtttattcgagctgggttgctttgatgttctaaccttaatgttttagtaagattgttttgaggtctttaagcgtggttattttgtatattaaggaatatctatatttctgattatcagggttggaaggcagcttgtcaacattccctcatttg

SEQ ID NO: 84981 - DNA, 840 bp, Citrus clementina
  Intron number 2 from transcript clementine0.9_020575m (loc us clementine0.9_020575m.g) derived from phytozome v7.0 (c hr-ID scaffold_63; pos 1232439 to 1233278)
ggttaatcgtctcgctcgcttgggtaagaattattttcatttgttatgtacgtatatgtatccaaatattatgttataagtttttgttttttggtcaaattttgcaactatgtctgtatttttattataaattttattttaacgccggtgtgagcgggatttgaattttagaccacttacaggatttaccaatcaaagtaaccagcgtgtaggttgacattcgttttacttatactttagatgggtgaatgtgtaaactaggaagcataaggtagcaaaggcgagcctgggaggtttttatactctatgggttcttattctcctaaataggtagatacattttgagcgaaggatgaagtccaaaagcaatctatggcagtgaagggtatgtgaaactcgatgcggacaatatctaattggttgctatgcctagttattaaatggattgttttactgatgagctaaacttcaatagtgcctaatatatatatgtcaggcactaatcaatcagaagtttctaagtttatctgatgttagtttcattggtgaagtttttaatacagctgtctaaatatagaaatgattgaaggtgtagttgatttcatagaaatgggttttagttgttaaaatgttgttgcattgttgcgattctattgttagtcaactttatttatttgtttattgtatttctgattttttccataacaagagaggagtatagctggtcttcccagcttgcatctttggaatgtttgtctctgtgcaatgtgccacttatacaatattcttctttcataatctgtaggttttctctgcaactgtgttcttccagcgggtttg

SEQ ID NO: 84982 - DNA, 607 bp, Citrus clementina
  Intron number 1 from transcript clementine0.9_027434m (loc us clementine0.9_027434m.g) derived from phytozome v7.0 (c hr-ID scaffold_111; pos 85757 to 86363 reverse strand)
ctccttgaggatttgtcaattgaaggagacattgagtatgaagagaatattaatgataggctgacttttaatatctttgtgccaactcttttaaggttaaccattaggctgtattcagataactgtgggtatgtttccgggtgcaagtttgtcattactgcacctaatctacaataccttaaaatcaaagatcgttccttgggatgctttgtggtgaatgaagctcccttttaaggaacacatatttggatgttggccattgttcattgcatcgtgtagtgtcaaaggattaggctaattgtgctatggaacttgtgaaaggaaccagctgtgggagtttcctgtcaatgtctgctgaaatgatggcggtaattcaacaaccttaacatccttttcagatattgttcttcgtgctaccttatttcttgcatgccatatagttcttgtatctatgtttatgaggattagttacgcgttccttgatagaaatatttcattttacatcggctttgtataattcttttttaactgatatcataactttctttgaaggctctaagctttgcttgtagtggtgatttccctacatttcctaatttgatccatc

SEQ ID NO: 84983 - DNA, 629 bp, Citrus clementina
  Intron number 1 from transcript clementine0.9_017087m (loc us clementine0.9_017087m.g) derived from phytozome v7.0 (c hr-ID scaffold_120; pos 287590 to 288218 reverse strand)
agtcttggattttgaaggtatggttaccgaattatttggaattaataacatcttcattttttaataaaaattttctgtttaaataagttttttttttttattatatatttaagaattgggtattttagctacttccggttgcttagacttattaggtagcctaaaaattgaattgcaatgaagaagaactaacgttcaaattatttttgtggacatggtacaaaaaatttgtattagtttgcttagaaattcttggggatattgtatttaagggcgtctatgttgctgtatctataactaacatcagtcccatttcctgttatcggtaacattgttcaattgtgtgtatactttgtgtatctgcgtattcgagcaatgtatgcttcgaatcttttgaaattggtaatgacaatattgttagtggtgatggaaatattagttttcccatttgttaaataacgaagtagcttgattaattaataaaatatatgtcttctttgtttgcttagtcactattatttctttactatatataattcaacttaaaaatggaccatatgtaatgttcttaccttacaaatgtcgtgatgttatgctactgactgcagatttttaaagcctttggttgg

SEQ ID NO: 84984 - DNA, 919 bp, Citrus clementina
  Intron number 1 from transcript clementine0.9_007252m (loc us clementine0.9_007252m.g) derived from phytozome v7.0 (c hr-ID scaffold_43; pos 1756634 to 1757552 reverse strand)
ttcagcacttcggcttgcagcaaattacttgagaggtatttaaagttttctaataatctttaattgcttttcgcgagaaattttctttacatttatgtaggttgttctctgttcacgcagatttatgtgatattatttattttgattttttcttgcatgttgatttggtgtattgaggaatttgaatttagatttttttatccagggcgtgtttgtttgtttgtttgtttttatttgattacgtgtcaaagtgaagccttgtggattgggtttggcttaccaatttcaccccttgcatattgcgtgtggttcaatgagactactcttttaaaccgtgtagaaacttaaccatgttgtttacttctgtttatgtttaccatgtggatttctgagatacagcaggggaaaaaattaaataaataaataaatatatatatatatatatatagcttctagacagttctgctcagacttaggtttgcttttctgatatcatgctttacgtacttgctaatttaatatgtttgaagctgatgcttcaagagtttgtgacagcattgatgttgtttgttttatgatgggttgatgaactctatcacttctatttaatttaagttagtgaattgtaacttttttagtttggttgtggatttttttgtgcttatctttgggtagattaagcgtctcttgattttctctattgctattgatacttcttttcagttgcaacttgcagaacataaggagaaacacattataattagcaatttcttttttctttttacggtgcaatgttatgtgcatattgcttgctgtatactgagtttgatattcggacttaattcttatatatatatatatatatatatatatattggaatgtgtaggaaatttttgagatactccagtgaaaaccaag

SEQ ID NO: 84985 - DNA, 605 bp, Citrus clementina
  Intron number 1 from transcript clementine0.9_028325m (loc us clementine0.9_028325m.g) derived from phytozome v7.0 (c hr-ID scaffold_5; pos 7261067 to 7261671)
ttgctttccaagattcttgttatcggcactgttaggtagtttaatttgatttttttaaaaaaataattatcgtcttctagctctacttttgctttattttacttcgttttcattcttgaatttttataattttgcttttgttgatagcatttttcatttttctttactagaatttcaaaatcatattaaataaagtttagataaatctataagatatcgataactctgatgaattcaatgttcctagttgtgttcattgttcgaattaaaagttttcaaattcattagctttagctgtgtttgtgatttttgtcttgcgttggttactgcttaagcatctactattacttagcccaaacaagcatacttaagttacaaaccctcaatctcaaacaaagttctgtatgttgtaaattgtaggttttgtaattgtaagttgttaaacttgccataagctttactttctcttttgtttttgatctttttaggtcttgttaaacggtacctgtatgtcttatcatattactaaatttactcacgtccttcaatttgttctactatttttggcagtggtgggagtgcagtggcattttctgatagcagac

SEQ ID NO: 84986 - DNA, 787 bp, Citrus clementina
  Intron number 1 from transcript clementine0.9_009817m (loc us clementine0.9_009817m.g) derived from phytozome v7.0 (c hr-ID scaffold_29; pos 1360898 to 1361684 reverse strand)
gtttttgctttcttgctccacttttacttccacaggtcagtctctctccggcctgtgtacaagttcctaaagatcattttttgtgctttctttaagtgtttctcttgttttctgaacctgggtatcggttatcttctttagaagtgtaacattttgcatgaatttggacgtttaatgggaaatttagtactttactgaattttttgttgccaactttgatttgttaatttctttatatcgtgtatgtcttgagatttaagaatgggataggtggctagtgatatgcaggagaatagaaagatttaatctttcactgagttagtgagtcagaactcagaatttttttgatctggttaagtcacaagttaaaaaagagcgtgtttctcattcagtgcaataatttggtttatttgtttccaagtcaagtgattcaacctgaaatgatttatattttcgcaataaattatgttgtggtcttgtaatgatttctacctacgatttggggtttaaacttttcagttagcatatgctcggagagttgaagagaaacaggattgatcctataatcatattctatatagtgaaaatttctggttgtctttgtcaatgtaggccgaaaaccaaaatatgcaaatcattttacgtactgtgtattgctgtttgccggtgtattttctttacttcttttcaagttcttttcaagtttttcatcttgaaccttaattatgtttttgcaatattgagaactaacgtttatttttctctatgaatgtctatgcagaagcct

SEQ ID NO: 84987 - DNA, 574 bp, Citrus clementina
  Intron number 2 from transcript clementine0.9_035696m (loc us clementine0.9_035696m.g) derived from phytozome v7.0 (c hr-ID scaffold_29; pos 1904531 to 1905104 reverse strand)
gcgaaaaaaatccccaggttagaagaatataacacacattaaccttcttaattaagctatatatatgtatatatattgctaagctccatcgacttcttcttctcctgatcatttgaggttgaatgtaagatcactattatttgattgatcattttcaaaattcttttaccctttttttcctttcttctccttaatttcatccagctattgtgtaggtactaaaatatatattttgattatatattaagttatgtcaacattctctatttaagaggcgatttcttattatttagactttcagacttcccgacaggatagctcctctagtcagggatttgtccatattttgccttaggggtgctcctgttgtcgacattctctattgaagaggcttgttattatttagactttcagataggatagctcctgttgtcaggaatttgtctcttgatagtatccatccatatttgtagtaggtttcctgagctgaagtcaagatgataataggctgttgggttaaaaatcaaattaggtttcttgagctaaaaggaaacagaaagaaactctaccgtag

SEQ ID NO: 84988 - DNA, 814 bp, Citrus clementina
  Intron number 1 from transcript clementine0.9_010865m (loc us clementine0.9_010865m.g) derived from phytozome v7.0 (c hr-ID scaffold_20; pos 816613 to 817426)
cccgaccttcagattgtagttggctctcgaaacaggttaaataattaatacccttttctttcttctgtttggtcaccgaaaaaaagcaagaaataaaggagggaaaattttcaagctttgttcttttctgtttttttttttttacgtttactatgtttctttggttattttaaaatttaaaattcatggtgatggctactggtaaactgcaatgcttttacatggttctgaaagcacatttctaaacagtcactcaactacaagtgattatcatgtcccacagttgtagattagggctccaattggtagtgatgttgtgcggtcgtggcttgttaagacatctactcttaaatgagagctctagttatgaaataaaagttcatagtgtctggtaaatgctacctttaaataatcatttcgacaaaaatagtaaagctaatataggtcgggcaattgtgggtaaaatcgtcataattttcaaactgtaattgtgagtgtttaccaaatactttaaagttgtgattagatggtaataaaaaagagaacctaaacagtccataataatattgccaatgatgcaaaatttgtaattctgtctctttttggttttcctaaacattcgaaaggctgtttttgttgattgatatgctttgactgtgatatgttaatatttagaatgctgtcaacatgctagttcttggatggaactatggggacatggagttgtaaattcaaatagttatggctggaatatttcctaatttacagcgtcgctgagaaaattttgcataccggcagggaaaaaggtgctgca

SEQ ID NO: 84989 - DNA, 575 bp, Citrus clementina
  Intron number 1 from transcript clementine0.9_014610m (loc us clementine0.9_014072m.g) derived from phytozome v7.0 (c hr-ID scaffold_98; pos 215434 to 216008 reverse strand)
tcagctaaccctgatcgccctttcttcattttaaggtactatttttgcttttgcttttttatttttccaactttttagcttgtggtgataagttgttctaatggatgatttttacccttctacttcttgtttgattgactgtagttttactgggttctgttattattagtattattattattttttcttatgtttaagttagatgaatattttatgtttcgaagaaactgattatctgggtaattttattgttttacacgggagtaataatttactacctagcacctagtaggctagtacctactagcataggcatgtcagagagtgaataatttccaaatggtatttaaatcatgaatttctttcaaattttttggttttaatttatgttcctattagcagctcatgataactttcatggtccctatcagaatttcttcctatgcatttgttatctactagaattatttgcataatattaaacttcagttacatcttgctgcaaaatcattcatttatcacttttggtcatttttttaggtgtgttaattgctgaattggtacagtggataaag

SEQ ID NO: 84990 - DNA, 769 bp, Citrus clementina
  Intron number 1 from transcript clementine0.9_009101m (loc us clementine0.9_009101m.g) derived from phytozome v7.0 (c hr-ID scaffold_23; pos 1951460 to 1952228 reverse strand)
accattcgtgcaaattaaactcgattaattcaaaggtatttgttttatgtgtatttaaatcatacttctgatatttacttttcgttttagaatatttattgttcaacgtcggctatcaataatggagttttcaagaacttaaacgatcaaaggtgctttaatttgccttatcaattattcatcctatgtctaaattcgtataatcaattcgaatgggattttgttgatatatatatattatttcacttgattccttttgtttattaaaaaccactcttcttctttctgaagaaacatgaatatgaatcggcgtaccaaataatcaaattaatttgtacggaattctgcagctgtttcctcgcttattttctctatcataacaatgcatagaaaataaaaaaaaacattttgaaggaaatttcctgccttgttaaactagttttctaatccaaaaacatcagaattcaagttggactcaaaaacttcttgatatataatttcttgtattcttgatattgaagaaatagtaagctatatagaacttgagaaatttctacacagttgcctttggaagatcatatcatattaattacttaaattacgaaacaagcagacgccgctcgcttatcttctctgcctcatgcaagtccaacattaatatctgtcttgtgttttgaatattatactcaatatgcaattaataagttatcaattaagttcgtgcatatatgcagccttctgtggtgtttacaaaagctccacgcccttc

SEQ ID NO: 84991 - DNA, 634 bp, Citrus clementina
  Intron number 1 from transcript clementine0.9_029569m (loc us clementine0.9_029569m.g) derived from phytozome v7.0 (c hr-ID scaffold_111; pos 541125 to 541758 reverse strand)
ctctatcgatataacttgtaaggtttctcttttctttggaaacgttgtacattttctttttggattctattgcataaagcaaaatgcttgcttttggtgtttaagattaatttgtaaaggttggtttatattattgtctacaagctgattgttttacatctcagacagcaaattttgtagttgtttatcacgcctacacttctgctgatgattatcctttgtttttgtttcattggaacctcagttctgctttttattgtaattgtgctaattgtattcttaaatttgttattcattacaatctttgcttctcttatgtaaatgatttatggaaaaagaggcgtaatctagtttatattagatttattcaagaaccactagagttttgcttagttacttccgaagtaactgggaagatgcatggatgaacttaagctttttgaaactgtgaaatttgatacaagaaagactgagaaagcattctatgatgaaaatgggtggattatttgaataaactatattgagaactttcaaagatgattgagcatctgttcaacgctctacttcatgcgtatgtatttatgtaattcctgtacttgcggttcaattatgttctgttatgatttcaggccaa

SEQ ID NO: 84992 - DNA, 850 bp, Citrus clementina; identical to SEQ ID NO: 83403
  Intron number 1 from transcript clementine0.9_000156m (loc us clementine0.9_000156m.g) derived from phytozome v7.0 (c hr-ID scaffold_1; pos 4925214 to 4926063)

SEQ ID NO: 84993 - DNA, 546 bp, Citrus clementina
  Intron number 1 from transcript clementine0.9_027707m (loc us clementine0.9_027707m.g) derived from phytozome v7.0 (c hr-ID scaffold_49; pos 811822 to 812367)
ccgacaggtatgcttttattactagtcatagacactaaaaactgtacttggtatatatgaactcttgtttatttaattcactttctgttatttgaattttttagtttaaacttccatgtttgaccgatgattttgagaggtttcttcatagtatcattctcttcatttgtgttttcttcaagtctcctaactcggttttcttagaagcaatgaataatgaaaagatgttctcacaatgcaagatttaaagaaagctcttctgttggttttttggtctattgttcgagtttaaaacgcaaaaatgtatgattagtatgtggcgtaatgaccatgttccaagcatggcaagaaaataattagattcaacaagaagcctttggtgatgtagcattgcaaacttatgtacaagggatgatgatccaaactatgatcaaattttcattatttaatgtatttactgctgatgttagaaatcttctggttatttatggttttgtaatttcttatataggcatcattatagaaggtctagatcaagggaggctg

SEQ ID NO: 84994 - DNA, 696 bp, Citrus clementina
  Intron number 2 from transcript clementine0.9_005244m (loc us clementine0.9_005244m.g) derived from phytozome v7.0 (c hr-ID scaffold_53; pos 1266786 to 1267481)
atcgattcaacggtaatgtatttatgctaaaaaatacaaaaatcaaatcaaatgtgtgttaattttgtttattgttgtttaatttagtgttagataatttgttgtactatgatttcacttctattttgtgttgtctttgtagttgcaaattctatttcgtgagtgaaagattacttctaaatgtagaaacatgtggtttatttggagtgcacgatttggtgttgatagaatttaaaccaattctaagaattatgctatagtttctgttagtgactgtttggggctcaagtgttgccagtgttatagttcttaattagctataatcttttgtgaaatttgagtttcatagttatttattgatttttgaatgtttatcaccagtattgtttgtcagatttatttagttttgttatggatctgtttggccttgttttttctttttctcaaatcactttgaaaattgggttgttagcttgttggaatcaaggcatgaggtgaatgctggtcgtattgctgtttagtttgtacttattttcatgtatttcaacattgaaataaaagttcacaattaatgcaaaacaatttgggtgtaagtggggtaacattaaagaacataatgttggtcattgtactgcattaaccaatcttctcttctttacagacaaaggaagctgagataacatccttgacaaagca

SEQ ID NO: 84995 - DNA, 405 bp, Citrus clementina
  Intron number 1 from transcript clementine0.9_007245m (loc us clementine0.9_007245m.g) derived from phytozome v7.0 (c hr-ID scaffold_27; pos 2813380 to 2813784)
ttgatctagaccttggtttcacgctcttcaatcatgtaagtgttactctaacttattccttttgcctcttcattttacattgatttaatttgttggcaaaaagaaaagtttgaatctgaaaactattaattcaataacgtgatgcattttttcattcttgtaaataaaacttgcaagtaaataaagctaagtttttgagtatcaccagggtttggctgggcgagttttcgacaattttatttttcagttttagctgtccatgtttgaatcctgagtaggccgtaaaaaacttcaaaatcattttgtactatacgccaaaccaactattttttttattattatttttaaatgctgagttattgagcaaagattccggtgatttgacaggcgacatctccgaatacg

SEQ ID NO: 84996 - DNA, 598 bp, Citrus clementina
  Intron number 1 from transcript clementine0.9_006234m (loc us clementine0.9_006234m.g) derived from phytozome v7.0 (c hr-ID scaffold_90; pos 882270 to 882867 reverse strand)
cacaaacttgccattgctcacgatatatctctcaggtttatttactgatttactctttattctttagtataaataataaaattgtgttcttatttggttatttgatttagaggtggtgggttgtgtccttttttgtttttggcggggtggggggtgttggggggctttagtgaagctgagactttggtcttcaaatcgcttattgtctttagtttttattaagtcgatcaatggaatgattatggttttctgtgctctcacatgtgttattctttaatgtcagagttccattgaaatttattttagtttaatatgaagaaatagcagggtggattcctttttttgatcgttttgtgccagttatactaccaatcaagttttggccattactggtatcaatcatgtcatagtctgttagctgtgtggattcctttttatgtgctttaattctctgatgttttcttcatttggacagactttattgtcttatacctgtaaatcttgattaataatttgttaggttcagcttttcattgtgtttttctgaagtttcatgcatcctaatttgaataattataggtgcactgtctccccacca

SEQ ID NO: 84997 - DNA, 531 bp, Citrus clementina
  Intron number 1 from transcript clementine0.9_034708m (loc us clementine0.9_034708m.g) derived from phytozome v7.0 (c hr-ID scaffold_122; pos 440852 to 441382)
atcttagggcaaagatcatcaaacaggttagccccttttgatattaaattttatgtttttgtcgatggtagttagcttaaccggtaaggtctcttggtctggtacaaatggtctatgtttcaaaccctgctcacggtagcgagagaactgaattgccattagattttatacatcaagatatgtatataaacgttgataatgttagaattggccgcgttcatgctctagctctatctgatcatattagattcatagaaagctatggattaattcttattcttttgatactcgagagtggtattaatgtgtgaaaatttgaatcttgttagatatatgtacttttgtacatatgttgttccaacaactagttgggcatatttgatgaaattctaaattctaacaatcgaggcaatctcttcatctcagtgtgtataatttttttcagagcatattaggaaaatttagtacattcgtatggttctgatctgttacattgtgtacaaaaaacaggtggaatatcagttcagtgac

SEQ ID NO: 84998 - DNA, 612 bp, Citrus clementina
  Intron number 1 from transcript clementine0.9_027557m (loc us clementine0.9_027557m.g) derived from phytozome v7.0 (c hr-ID scaffold_139; pos 155823 to 156434 reverse strand)
tgaaccttgggatctcccaggtagtttaattaagagctatttagtataatttaatttcttaatttgttgttaatttccaatttatgtatgtatgcaccacccttgtttttcagaatttataatatctatatattgtgttgtcctagctgtgtctaagatttattaattttcaggtttttaatttatcaaaaaataatatcattgcttcgattttagatttttttttcttttttgtttgaagaatctaaaaacataacttaaaataaaaataataataattgtcgtatgccttcttttttttcttttttttttcctgggtgatcattgctaaaactcacacatccctctgtgaagatattagtcgagattacaatgaatgaaagctcttcacctttcatcaaattggtaaacaaatgaataagtaaacataaattaaattttgataattggtatgttcgtattcaattaccaaaatcaagaaccagaggtagtttcttttcttttttttttttttgtattttcttaataattttgtggtacctgctacactattgggcggccatggtctctaaagactgagtcaaatgcatatatgttgcaggcaaggcttcg

SEQ ID NO: 84999 - DNA, 430 bp, Citrus clementina; identical to SEQ ID NO: 84560
  Intron number 1 from transcript clementine0.9_010741m (loc us clementine0.9_010741m.g) derived from phytozome v7.0 (c hr-ID scaffold_1; pos 8265139 to 8265568)

SEQ ID NO: 85000 - DNA, 781 bp, Citrus clementina
  Intron number 2 from transcript clementine0.9_031766m (loc us clementine0.9_031766m.g) derived from phytozome v7.0 (c hr-ID scaffold_29; pos 2372948 to 2373728 reverse strand)
accatcattcagcttcacgctcttttgggcaacaggtgaagattttttatttttgtataatactcaggctctacagctatctagcagctgggattttagacaaaactgttaaagtagcatttagtataccactttcagttttgcatagaaagttaagttgattttatcgaacttgttgatgaaacacttgtattacacttagtcatctctgtaagctattactactaaacaatttttcgctttcatttaacactagcactttctaattttacagaagcactccacaatcccaaacaaagcctccatcaactgcttcaaagaaaaatcaaaatgggtttttgaaacggttcacaatttgcaatattgatcaacttcctcttattgtcttcttaagttcacaagttgcccgaaattaagaactctattaggaagtaatgatatcctcaatttcttgattatctcaccagatgattattaggttatcatgtagtctaaatgattcaaatatggatcctatatagtgttgcataaaatttggatttaaatatgtgatacatagttgtttctctatataatagcgctgtatatatatatatatttgtctttgtcccaagattttgaatatctaaaaattttgttccttagcatagcatgactaaatgaagagacgtttgtcttttcactcgtattattgggtgcattgttttatgtgattttaataataaaaaagtaaaaaaaattgtcaggtggtctgctatagctgctcatttaccaaagagaa

SEQ ID NO: 85001 - DNA, 748 bp, Citrus clementina
  Intron number 1 from transcript clementine0.9_015007m (loc us clementine0.9_015007m.g) derived from phytozome v7.0 (c hr-ID scaffold_33; pos 2141747 to 2142494)
tcttgtagctctggttcacgctcagaatcaatcaggtctgagtttttaattaatattttaattcttcaggatttaattaactaactctcatatcttggccgtgttaagaaaagttggcttttgcgtccagggttcattagcatagattgtggggctgaaaacacaacgtacacagatacaaaaacaggcataaagtacatttcggatacaactttcgtggataccggcataagcaagagtgtagcactcgcataccaactagagagtcttcatcaacctctatggaatctcagaagctttcctgaaggaaaaagaaactgttacaatgtaaaacttgcgaaagacgttagatatttgatcagagcaagcttcacgcatggagattatgatggcaaaggtacggtaccagagtttgatttgcatcttggaccaaataaatgggagtctgtgatcttgggaaatgtctcaactatcattgttaaggaaattattcatgtcatctcctccaatagtacacaagtttgtcttgtgaatactggttcggggacgcctttcatatcaacattagaatttaggcccctgcctaataacacttacattacccaatccggatcactcaacacctttataaggatggatgttctttcaattaccaatcaagtagtcaggtgggtcgatttcatacctacgctccttcaacttttttgtgtaagttcaaactagaagagaatcttagtgaaaaagaaaa

SEQ ID NO: 85002 - DNA, 553 bp, Citrus clementina
  Intron number 1 from transcript clementine0.9_013249m (loc us clementine0.9_013249m.g) derived from phytozome v7.0 (c hr-ID scaffold_33; pos 1902310 to 1902862)
gctcaggtctgcgggtttatttatttgtttattttggtggtaaactctgtcttttgagcatttatttgactttgagtgtgatttaatttgatcagagcggagttgtatgtttggagtactgttgaattgatccgttaaaagcacttttgaattgtcaaaagttttcttcttttaaattttttttggaagggacaaaattcgcttagcaaagcaattgatgaatgattagcgtttctctttttagaactcagaaagtgcttttgtaagatgctgtttatttaacacagtagctagagtgcaatctacccacttgacagcaagagcacctcaattctgaacataaatattctgagttgcctaaagctgtttaagcttgactttcatttaatctatttagcttcacatgtttgttagtagtttgatcaactaaagtgttatctgatgcaaagttcatagccttatctattgcttttagttggtttcatctatgttttggactcacagtgcttattcgacaggttcctgagttcccatcaaaattattcttcttttg

SEQ ID NO: 85003 - DNA, 546 bp, Citrus clementina
  Intron number 1 from transcript clementine0.9_019672m (loc us clementine0.9_019672m.g) derived from phytozome v7.0 (c hr-ID scaffold_109; pos 324249 to 324794)
gataccgcttatcactggccacaggtaactaaagaagccgttacttttacaaaatcaaaatcatgttattttttcttttctgagtgaggattttcaagactttttagttttttttttttttttgggaattttcatgtttgtttgcttctaataattaagtttacttttcccatatgagttgatgttcagctagttcccacttttaattacttgaatttaattatatagctgtcctttacgatctttcatttctttttatagtacttcactttcttttcttctttttctctttttcaacaatctaatatcaatatcacagaagagccagaaaagttactataatttgctttactgcttttgcaatccctcaccaatctgtaaagttgatatagcttactttgtttttctgtcttgtttgtttcctttcactttttgagcatgaaacttagggactttttttttttttttttttttttccatttctcattttattttaatttatttaatgaatatgatgatgatcagggaattgggtttgttacaccc

SEQ ID NO: 85004 - DNA, 854 bp, Citrus clementina
  Intron number 1 from transcript clementine0.9_024343m (loc us clementine0.9_024343m.g) derived from phytozome v7.0 (c hr-ID scaffold_1; pos 6620956 to 6621809)
ctcttcattttcctccctccaaggggtgttctgaggtactaccgttcgtctcctttctcttatgttacttttgatccgaacaaagatcagtatggcttcttgatgatgtatttgtgttgacttgttattgatcaccgagtgtcttttttttttttttttccctctctaatgttttttgctagaagatcagaacttgactgttagatttgattgtcttgttgtttctgttcctgggtttacctctttattcacagatctcattgatttttagctcaagatgagtggttaacaactgatgatgactttaaacgtttttcttacttttataagagagagaaaaaaaaaagaaaccccttttaaccgtgtagtgttttataataaaaatgggaagattaatttctcactgaattaatgggcttgtggtgaaaaattactctctgacttatagcttaattttttggtgggagttaactgctactcaagatttggtggaaattttttcatgtgcttgtagctttttattactattattatggtttcacccttgtttggtgtctttcgttatgttttttcaaggacacttttcggtgaaaataatttgtcttttttaaaaaaaaaaaatgtttaaagtttgtgccttagccttatgcttctgattaggctgaaattatatgttataatttaactgattccttttttcctttttcttgttaattcttctgtttttggcaacagttattattgtgtttttcgttctgctggccttgtttctatgtttgttggaagtttgcaatttttatcctctgatggttcactcaatgtgatattttgtgctgctcagatcacacagcaca

SEQ ID NO: 85005 - DNA, 772 bp, Citrus clementina
  Intron number 1 from transcript clementine0.9_001833m (loc us clementine0.9_001835m.g) derived from phytozome v7.0 (c hr-ID scaffold_29; pos 1791033 to 1791804 reverse strand)
atttcttcaacctcccatcgaggaaagtttcgtaagtaagacacgaactctcctctttctcatttccattctgtttttgcgccgtagcgtcaatgagtgtccatgtgtgctgataactttgctcttaatttgcaaactcgacgtatgtgtttgagcgtccatgtgtgctgataactttgctcttaatttgcaaactcgacgtgagtgtttgagccttttgattatgtctttgttttttctttttctttttttttcttatatatggtttccgtcagccgtcgaatccttctgttgaaatgctcttcatttcttttgtgcttcttctggaaaagtctctgtttggttgtggagggggaaaaaaaatggcgaaagaaacagaacaggaaatgtgtggatgtttatcttatttttcgttctttataaaatgtcattcctcccttgtgcactgcttaccggtacaatgtttctggcgtgatcgaaccttgtgcgccatttaagtgtcaacttctatggttgcttgctcttttttagttattatcattattattaaagttgaaaaggctggtggtttaactgcccctctttgttttgccgtgctttgccattgtttttgttctgtaaattacccgttggttgtctgtcggttcttggatgaaataaaaaatgccgtttcattttcaagtattagtagtactcagttggtgtgtatatctctgatcgaatttatcttttcggctttgacttcagggattgtatacgctaaagagtacag

SEQ ID NO: 85006 - DNA, 514 bp, Citrus clementina
  Intron number 1 from transcript clementine0.9_023227m (loc us clementine0.9_023227m.g) derived from phytozome v7.0 (c hr-ID scaffold_67; pos 424860 to 425373)
agttcagagctcgcgagctgtacagttaagctaaggtaacggatctgtttctctcttgctctttagttgcttttggaatttcatcgaaacttttcatttttcattttctttgcctcaaagctttggattttatgaaatgattagatcatagctttgtagatctgtaaagaattctagtaaactaattttcttagcgatgaaatcattaaacttttttgtgtttttggcttcaaaagcttgaattttcatgtgggcttgtgttaaaagccttaatttttatgtgggtctggcttaaaagtcctactattttttttttagttatttttttgtgttctctaagcgttatatagaaattctcacctgggatttagtttttacctgtggatttcaccagatctcttgtttaagctgttagcttgcatgatttgttagattttgacttcagaattaactgaaactttgttcttttttatgtgcagacccccaaaaaaaaaaaaaaactttgtttgtagag

SEQ ID NO: 85007 - DNA, 905 bp, Citrus clementina
  Intron number 1 from transcript clementine0.9_021812m (loc us clementine0.9_021812m.g) derived from phytozome v7.0 (c hr-ID scaffold_10; pos 800686 to 801590 reverse strand)
acggcgtttgccatctttgccacggaggtatgtgttgtttttgttcttatgatcgaaatgcttatctgggtgttgttttgttacttgtaaacatggccttaactaatcattctttgttgtcatttggccttttggttcttaattttatttcatttcatttcataagacaagaataactgaccccacttcttgttttgttgcttactttgttgtttggtttctttctttgagttctttgtctttttgggttgggattttgttttaatgtgaagatggacattcaattctattttctgtatctccatgtgtttgcttgcattgtcatttgtctgaggatttacattggaatatcagcaagtggattctcagcctctctaagattccgaggtattattgttatatttccttatattcaaccggtctgtactctcttcagctattttagaaatgtagcagattattgcctggtatagacatttgaatacattctggacattggtattttccaaaatgtaaatctgccattttttcttttagacaaatgaaatggttatcagtgagcttctttcaaagaatttatgatgggatcaaaattctaatggcaaatagcaaccattgatctggctttcaacagatttcaaatgggtctcgagtgcttgttcttcttggcatttcgtcgggcttcttttccattagaacagtctggaaatcatcacaaacaacattctaaccttgttgaaactgtctttttatttccttattttcttgacatatctgtttgatttcagtcagttatgttggctttcccggtaaccattattttttcattaaagtctactttcttaaaatgcagtgggaaaagttagtttcttatatcctcaccatattaactttacaggggtcaa

SEQ ID NO: 85008 - DNA, 490 bp, Citrus clementina
  Intron number 1 from transcript clementine0.9_003535m (loc us clementine0.9_003535m.g) derived from phytozome v7.0 (c hr-ID scaffold_27; pos 470859 to 471348)
gtctcaccgagtccaccaagcttgcgaggctttcggtcagtcacttagcttttttttttttacttttttaatgcattgagtttatttcatttgcttatttgatgaatttagtgcttgatcgaagaattttctaggccattgagcagcggcgtctttgtgtggttttattgattattgttgtgtttgatgaactgaaatgctcattctttgaatttttcgttatttttgaattgatcttggtaactaaagtacttagaataattcaacgttaataagaaaatagagaacagaaagaaatgagaagaaattaaggtttaatacctacaacgttaaaaaattgcaaaaataacaataaaaaattggttttctttatagattactaatgtgcattccttcttgtatgtttctttatacattattgatagatttggtctctttgtattactgttgcgcagcacaaaacaactgttatactaggcatcttgcgaag

SEQ ID NO: 85009 - DNA, 421 bp, Citrus clementina
  Intron number 1 from transcript clementine0.9_006768m (loc us clementine0.9_006768m.g) derived from phytozome v7.0 (c hr-ID scaffold_53; pos 250105 to 250525 reverse strand)
aggccgataaaatatatagtgaggtaaatgccaacagaagcccaaaagaagtgagggccttgaacttgattgtatttttgattaatgatgaggggtaaatttaaaatttgcattgcggttagattaattctggcaactaagcactagccacactaccattttccgtaacggttctttagtttgttaatccaatcaatctgagccctaccctcagcaaatccagcggtcaaaacaccgacaaaaatttcaatttaaataatccaacgatttataaacaaacaacccatcagggaaagaaaagaaaaaaaaaaactagccgttacacagagcgtccaaaatctcaacgttcctttttcttctccatcctctatcaattattccctcagattcattcgttctttcgtcaaatcaaaaccctgac

SEQ ID NO: 85010 - DNA, 773 bp, Citrus clementina
  Intron number 1 from transcript clementine0.9_007469m (loc us clementine0.9_007494m.g) derived from phytozome v7.0 (c hr-ID scaffold_1; pos 11297936 to 11298708 reverse strand)
agctgagccagtatcatttgcgcgcagagtactaggtgattctttcttctccaacttatttttccttcagcagtgggggttaaattttggcttattctgattggtaagcttcccatttcttgattcaaacgtgaacttagctcaaaatattctgtcaaatttcaattttgatatcttttcttatagatggaagtatcttttattgctggtaccaccaattaatcacgttggctaagaatttattgagccgggatttagtggtagatggcacaaacttggagagagcattataagaaaataaataacaacggtgactatagttgttgagtcggtaagagcagttagatattgcttgtcttgggtttgtctttctgtgcaatgctaggagttgatgatgactattcttcgaaattcgaattttgaatatctaatggggtcaaggaataagaaatgaaaataggaaatgagattgcttgtgggtttatataatataagcactgatgttttagttactgcatcatgatgcttagagtttttttgagggattttagcagatatgttgtgcagtctttacatttcatgattaactcattatccacaatttttatttcttccaatttaatggtttggcttcttttttttaaatgtttcattttctgaagaatcccctcgataaaaacaatgaatgatttagcataagcttgcatctaacagattcttactactactgttatttgttaggtaatgaagttctaaaaacggcaggagtttaa

SEQ ID NO: 85011 - DNA, 545 bp, Citrus clementina
  Intron number 1 from transcript clementine0.9_014412m (loc us clementine0.9_014412m.g) derived from phytozome v7.0 (c hr-ID scaffold_1; pos 5032141 to 5032685 reverse strand)
tggtccagttcagcattctcagccctgacgaaattgtaattttcctttggccttagcgtttctctcttgtaatttattggtagtctggttggttgctgatgaaggaggaaaaaaaaatgaaaagaaattttgaaagagtactaacctgatacggctataagttgtaaattgtattctttactagcatcagggaatcattggttattcgtgcatgtattgttaatgtcatgtattttataaagtatagatgtagtcaattttgtttatctccattttcccattgagaaataggatttggatacgaattctgctttcatgatagatgccttgtaggttttttatatgcattttgaagtaggctttccatggtacttggttatctgaactgttttttttttatcctccctttcttgttctatttggttcccaatagtgtagatgagatgaagttgtttctttcatagtttgattgttcgtccatccttaaaatttctagtagattattgtctgcttcatgcgtgattgcttatttttcaagcaggaag

SEQ ID NO: 85012 - DNA, 759 bp, Citrus clementina
  Intron number 4 from transcript clementine0.9_031996m (loc us clementine0.9_031996m.g) derived from phytozome v7.0 (c hr-ID scaffold_49; pos 1316020 to 1316778 reverse strand)
gattgaagaatcaaaattggagtcatttaggctcggtatttgttttctaaatattgtttttatgaaacaaaaatgagaatgaaaatgttatttaaatttatttataaaaattaaaaatgtgtttcgtatcattttcaaaaataattttaaaaatgaaaaaaataaaatacgttcggtaggaatattttaaagaattattattggaataatttccattaatttaaaattaagtaatgaataattatttttattatttaattagtttgattatttttattttaataataaattaggtgatcttgttaatttttttgtttaaagaaaaataataagctctacatatttgatttaattaatatttaaaacataaatattataatgtacataagaaagaaaagatttttgagagggaaattgattttttgggcatagtaatagtagtagtagtagtagtagtagtaataataataataataatgttgttgatattattattattttgtgagaaggtggaagaaaattgttcattttaaaacttaaaactgtattggaaaacaagaaaaagttgttttcttattttctttgttaaaagtatagaatgaattttatattttcaaaaatactttcaaaaacaatctaccgaacacgtatttagtattttctgaattcaaaaaataaaaatcagaatttgaaaacaatgccgaacccacccttaattatccagtctatacaccttgtgttgaagaagtaagacaagtt

SEQ ID NO: 85013 - DNA, 846 bp, Citrus clementina
  Intron number 3 from transcript clementine0.9_015655m (loc us clementine0.9_015655m.g) derived from phytozome v7.0 (c hr-ID scaffold_23; pos 1292080 to 1292925 reverse strand)
tactgcgattcggttaacggaggtcttatacacaggtatattttttcctatttatattttggacttgtatccttctcaggcgttatctcttaaaactaaagaaagcattagtttggctaattttattcccatccaatacatatgtatatggattattattctaatactattttcaatttggtacattccacgtcatttattaaaatatcacgattttaaaatatctgccacctgaacttcctatcttcataattatatattggtttttaatgattattgattgattagaactgctctggttcctttttgatacttggaacttggaagtctaatggatactgttgtttggcaaagcaaactaaggttgaatttagaccaatgggtcaattttaaattgattattgtctgatccgcaaaacttctagattaattgaaactttcatttatttatgtacctttttgtttatttctaaagatagaaatgaaaccacccctctcccagcaatgtaaggagattcaaagtccaaacgccttgtactgcccctcagaggtcttacaagttaaaccaagtagcacccacaataactaattgtgttgatacttgtttaccccttgaaatttatattaacaagaaaaatttaatggtaaatatctgaaagactgtatgtattatcctgatgtcttctcttccaggccttcaagctttcatacgagacgaaagtttccaggctccctttctgtctaggttttttggatgatgacttatgaattatgtcatatatagtaaactgcttattaccattgttgatagttacaatccattggaaagaagggagtcttgcaagg

SEQ ID NO: 85014 - DNA, 440 bp, Citrus clementina
  Intron number 1 from transcript clementine0.9_008843m (loc us clementine0.9_008870m.g) derived from phytozome v7.0 (c hr-ID scaffold_23; pos 3357651 to 3358090)
tcgtttaagcatctccgatttgcaattcttatcaagcaagttcgtctctccctcatatcaaattttacatgcgtttctagctcgatttattgattaatcttcaattttatatttaggtgtattaaaatgacgcttttcgtcatctgaattcggttcaaatgtcgatcaagtttgaaatcagctgcttgaattgattaaatttgattttttttctttatgctggatcgaactagcaagtgttgaaatttgcacgtaattctctcaatttatatatttttctcaatggatccgagtcgacgtgtaccttgttacattgacttaatcttagttatgttactttctgtttaattatgcttttggatgctaattgtggatattaagaagcaagatgcttgcagggagcaggtgtctgcgccgaatattgattgtacattagctga

SEQ ID NO: 85015 - DNA, 299 bp, Citrus clementina
  Intron number 1 from transcript clementine0.9_019578m (loc us clementine0.9_019577m.g) derived from phytozome v7.0 (c hr-ID scaffold_63; pos 290589 to 290887)
caggtgactgtcttggtagagcaatggatttgatgttggttactaaaatttctgttgtcaaaattagtcttattttgaatgcttgctttttgaagtatttgattttctgtgaatttaatattgctatcatgaaaacaacggattagagttataccttacattaatcgatctcggttttttgtattcagtgtagggtggaaattcttcatgcatacattgaaagtttcttattttaaatcataagagttatatttggaaattgactggatgaatttttccaggaggggcagttgcattga

SEQ ID NO: 85016 - DNA, 759 bp, Citrus clementina
  Intron number 1 from transcript clementine0.9_030435m (loc us clementine0.9_030435m.g) derived from phytozome v7.0 (c hr-ID scaffold_111; pos 256967 to 257725 reverse strand)
tgttgcgcctattcttccacgactgcttcatcgtatatcattttaatcttttggtcacaattcttgggtttctgtagctttctctccaatggcttctgttcttttgcactaagttgctttgccgcttctttttccgtattcttgtaaggattttcttctctttgatcctttctaatgatcttccttttctaatcttttgcctttagtagttctttatgagtattaatttcatcccacttgatcttttctgggttttttcgtttccatgactgctccatcatggtgtattcttatctttttcgattcttggattgatgtcaatttatttccaatgggttctgttctattgatcatatttttgcttttctccctttttttttttttttttaattcttgttggcttttgttctgggttcttgaaagggttctgttccctttggtctgctgtaatgtgcttctttttcctttttcaatttctataaatgagcattaagttttcgattcgaaatattttcctaatttcaggtgggtttgttcttttcttattgctgaaatggttgattaccataatattctttatagtttttatttggttgggtttcatcttttctcaatttcatgatgttaggcctgaacagacgtattcattggtaaattttgccttccattttgatttttttagtcctgaacttttgttagctcatgattttgctgttaattgtttgtgtcgttctggtgtttctttgaaccagggctgtg

SEQ ID NO: 85017 - DNA, 346 bp, Citrus clementina
  Intron number 1 from transcript clementine0.9_014653m (loc us clementine0.9_014653m.g) derived from phytozome v7.0 (c hr-ID scaffold_82; pos 207496 to 207841 reverse strand)
ttctcttgcctcgcttggctttacgttgccggaaggtttgttattcgatctccatttagccatttttattcttctgttcgtttcccgagaaaatgtcggaaaataattctaattctggaaaaaaaaaaaactcatttacactatattttaaagctttaaaccaatagtccgcagtatcactagactttgtgaattatttcattttcatctgcacaccgtttggctaattgagttggacctgaattcataatttggattattccagcggtggaattggattcagattctcgatttgattgatcaatctttttttttttttttttgggcacaatcaggctgtggcaag

SEQ ID NO: 85018 - DNA, 304 bp, Citrus clementina
  Intron number 4 from transcript clementine0.9_025810m (loc us clementine0.9_025567m.g) derived from phytozome v7.0 (c hr-ID scaffold_29; pos 2402801 to 2403104)
ttctttagtgccacaaaagtaagcatacaccccttccttggcatttaattattcacaagaataataattctcatgtacggatgtccgcgttttgtaaaataagatactattggtaactagcaagcgttcgaactctcgatttttttttttaacatttgtacctagttaccagtaactatctgaaattttaatcatacaaatgtgaacacctgccctagagaaagactcttcacgaaaaaaaacttaattttgtttgttttgagtttgatttctgattcaacagaaaaaatttttaggatcatat

SEQ ID NO: 85019 - DNA, 774 bp, Citrus clementina
  Intron number 2 from transcript clementine0.9_012240m (loc us clementine0.9_012240m.g) derived from phytozome v7.0 (c hr-ID scaffold_109; pos 546390 to 547163 reverse strand)
ctcagaaactcggtgggtacacaagagatgctttgttatttcaatttatccatttgattatatgtaatgaaattcagtttggcaacactgataaaaagcaagctatctttccatgttgatgatgactaaaaaattttatgattggatgggacttgcaagtttatttgcttaaacaacattgatactgtacaagaatatgatttttttggatactgtggatattatttgtagtttgatctctatgatactgtcaatgtgacatgcaaacaacgcattttaagaaatcattactgtattacatagttagttgaatattcacgtggttttgtttgtaatctttaggattattaaatttagggaatgaaaaattacattaagtttctgctagtctaactattatatttatcaaatatctgtggttagagtgaatatgaatttatgtctttggttataaggtgaaataggactcggtacacaaagatggaaaagatttcttatcaaagtggttcgttttaagtggtttacttcctgattcttaattcattgtttgtttcatcatctgggtcgtatgattaatgattttgtacttatttaatttcttataaattattgagcaattgttgactacacgtacgcaaagaagtgagttttgaagctgcctttgcaatgtttgtattccttttgcaaagcttggtgcttaattgtgggtttttattgatattttattgcacttttgcagtggctgctgtatttagcttggcctataaactccag

SEQ ID NO: 85020 - DNA, 497 bp, Citrus clementina
  Intron number 1 from transcript clementine0.9_015394m (loc us clementine0.9_015394m.g) derived from phytozome v7.0 (c hr-ID scaffold_20; pos 1446249 to 1446745)
agatctgggtatctttgttttaatgcaggtaacgtgaaattttgattcatatttagcctttggctcctgtattttcttaaacttatcagaaattttgttagagtttatgctttatgttaagtttatatattgactgacactgttggtttttgtaattgtattgcaggtttatatatccttgtatggttaaaaaggtgtggtgcttgcttgctgtaattggggtttttagtttatgggattgtattttgtagtgattgtgtttaatgttctttgttgtaagtttgctgaattgggtttagttgagtgaggagttaagaatgattgggagaaaaaatttgggtgtgtcatcatttcttttggtgcttttggcactaggtttcttctttgctacttacaatttgctaacaatggtaatacaaaataaggctgccgatgaaattggtaaattgaatcccttaactcagatgcctgagaagacaggaggagggaactccggt

SEQ ID NO: 85021 - DNA, 921 bp, Citrus clementina
  Intron number 2 from transcript clementine0.9_028458m (loc us clementine0.9_028458m.g) derived from phytozome v7.0 (c hr-ID scaffold_1; pos 7265841 to 7266761)
tggataccaagtaccacaatattccagtgaaggtatataaaaatttcttaattatttttttttctctcaattcagatgtaaatgatacgcacatacttcagttccaaagtttagagttagccaaggcatttgactgatccatttgttgtctaagcatacgtctaaactaaattgcatcagcaatagtttctatcaatttcgggaaatttgggaatacttgattgattattaactaacatttagcatggcaagaaacttaaaaagttggctgtcatataccataaacaaatcttaaggccaggatagttattatggaactttctgctattgcatcttgcaaggtttgacatatttgtcctgctaccataactgggaaagaacaatttttctgatggtccttacggctaaattttctttttccaaaatggaattttatctatgttgttaaaaacaatacagttaaatagttgctgccatgacctaaagaagtttctgtaaaaaatgaccatattgtcagtattggaatggataagtaaatctttagagcctatgatgtattcgtctgtggaatttgagtcaaaatgaaaaaattttgatggttataatcctagaaactgtaatcatttggaagcatttgctgaaaacagttagataatctaaaaatgtgatgattatttatgtcaattgtaaatggtattaacattactgggaaaaatgataaatatgtaaatttatgccagtggaaagagaaaatgaacaaatccagatggattctaagacattaagtaggaaatctagtgttcttttgattctttgctgcagtgatccctaattactttcaagtcattattatctcatgacaaaatatttgttgaagcgtgaagtttaaagttcaagcttcttatttacgttgccctacag

SEQ ID NO: 85022 - DNA, 682 bp, Citrus clementina
  Intron number 1 from transcript clementine0.9_011448m (loc us clementine0.9_011448m.g) derived from phytozome v7.0 (c hr-ID scaffold_5; pos 3897917 to 3898598)
agcgagtcttcaaagtaatgtaacttttacattctttactcatactgtattttttggcaatattttaatttatcactgcctgaatgatctgggatttgggtgtgtagtgtgaacttaactttagcattgctcgcttttgtttctgttagatatctgatttttagcacttattgccggaattactttgaaattgagagtttaggggaccctatgtagactggtggggatgaatttattgttggtggatttgtaatttgtcacaagcattaaattaacagatgagagcaatataactagtctttgtggctctataaatggatcttttaatagaaacttaaacacaacatggatttacacagtgttggtgctaattagtctttcctagctaatcaagagcacctatctctgcaaacttgtaactcagaatagtagcataaaacaaatagaataaaaacaaaaaagtattcatacttcttcaatacctctaaaaactttatattgccctgattgaagactagaggataaatcatgcttgtctttttgtcttcctttttgtcacaatcgaacaaattagatattctgcatagcaagattttcttctcatggccatttatgttaaaggccatccatctctttgatatgtgttttattttgacaactaattgtgttcaggccttggatc

SEQ ID NO: 85023 - DNA, 576 bp, Citrus clementina
  Intron number 1 from transcript clementine0.9_009836m (loc us clementine0.9_009834m.g) derived from phytozome v7.0 (c hr-ID scaffold_20; pos 4016389 to 4016964)
caaaattagttaatttttaagcacatcaaatccaggtatcaaccctaatctctctctctctctcttttgcttctgcatattcgtttgcagttcgatatatttttacttttattaacataatttatcgtttcaggaaattagtaaattaagtgccatgtgagatttagaatttatattcgcattttgctattaaagcaagcaaacggatagcaaattcttaaatcataattttacccgcttatttggggttgattatatgcattttgtttacttaaatgttacgtgtttctcttaagagcgtttcactcttaacaaaatttccaaattgctgatgttgtttgttctgctaagttatttaactaaatcaagatcatattttgattatcaaatgataaaaaagttgagtggaagttgtaaactaatttgtgcttaacttggagaatttggtagataaatatttgttatttgaaattaagttattcttcagtgttagtgtgccctattctgcactgggtgtaattcttaattttctatgttgtagaggtggtgaatttgaaccctagttaattgtgcaag

SEQ ID NO: 85024 - DNA, 875 bp, Citrus clementina
  Intron number 1 from transcript clementine0.9_014038m (loc us clementine0.9_014038m.g) derived from phytozome v7.0 (c hr-ID scaffold_114; pos 12763 to 13637 reverse strand)
ctttcgcacaaaatttttataattgaaattgacaggtaattttatatttatttgcaattaattattggtagtatttagttgttgcgtaaagtttaaaacctttcgactggtatttgttgttgggttatgaattttcatttcggcaattagggttttggggtttcttgtttcagggtagcgctgtttcattttggtgcacaaagtaagttttttttttttttttataataatgattaggaaagattaatttaatggtgatatgttgttgaatatgtttcttttttatttgttacaaaagttctgaaatttactttattgagttagaaaaaaaaatgcttaccgttcatagaattatgaaactttcattggtttgactgaattttttctctttcgttatggttatgttataggttgaatgtgcctatgattaatcttttggatgttctgttcagtggacagattatagttttataacttcaggcatattttatagcccattacctcttgttatgcttgaagttttgggttctcaacttaaggatagagtttgagtctgaaagtatcaattttatgtgaatatcaaagggtagcactccaacttcatttatgtttcctcttctgggacctgcttaggagggacgtgtactgtgaaattatcctttttttaggtttactttgggacctctggggacacttcttggcttctctgtcattaatttctgagattttgttactataaattccttcacgtggtgaatatctgtatatacgaagacgtgaatgtttatttatatgtttggtattttaatgcatcgattaagacaagtttttgtgttgcagattttggaattttattggaagaactatctaaggaa

SEQ ID NO: 85025 - DNA, 357 bp, Citrus clementina; identical to SEQ ID NO: 80630
  Intron number 1 from transcript clementine0.9_026318m (loc us clementine0.9_026318m.g) derived from phytozome v7.0 (c hr-ID scaffold_23; pos 2221121 to 2221477 reverse strand)

SEQ ID NO: 85026 - DNA, 985 bp, Citrus clementina
  Intron number 3 from transcript clementine0.9_007260m (loc us clementine0.9_007260m.g) derived from phytozome v7.0 (c hr-ID scaffold_5; pos 321073 to 322057)
agttcggaagaaacgctgctctaagactggtatattcaccttagcattgcatacttgtttctatatctacttaatttttcaaattggactgtatattctactatgaatcttataacatgttatcatctaacattatatccgaaactatgtaacttgaagctttaaaatatggattctttgtgtgtaaaggaaactcttgagccaaaaagacaattgttagagtggatgccttgaatgatagttagttattgcatcattacgaatgttctcaattttctattggacagaactatttggcatgttttaggggcttctaataatgttttacattgggcggataaagtaaaaaacatataatgcagtacgtagaagaacgctgtacgtgttttgatggcttttatgttcctgtcgataagactcccaagtacctcaatgtgttgcaagagaggggaataaagaaaatggggaatgaaaatggatcctcaaatataaaattcaaaataacaggaaatgccaataaggagcacataaaattagcctcatctccatgaaataaattcctcagattatatttccaggtaattgctcactttacaatcctttcacaccaaatgttgcacaccaaacgttagctgtattttctcaagtccgtccttcctcattgaggtgtcaggatcaatcattgatgaatgtgaaaatatataatcactgatgtctcattgagttgtcacaatgaatcaggatgtttaaactggcccgtggtaggtatagttgacattaattgaagagtaaactgtttatcattcaatcttattctatctagtttgcttcaagaactgctatgcaaattgcaatcctctattacatgtttgaccttttcaggatgccacatacttgttacatcttattcgtatactcacttttgtataaagtcaatactgattgctgaaggttacattttcgctgtgtacctgtagattggtat

SEQ ID NO: 85027 - DNA, 585 bp, Citrus clementina
  Intron number 2 from transcript clementine0.9_021613m (loc us clementine0.9_021613m.g) derived from phytozome v7.0 (c hr-ID scaffold_1; pos 9355742 to 9356326)
ctagaaggggttggggatttcgtggtgtgcataaggtatttgacgttgaaattttacttagaaacagttagcttctttttggatattccccggattgtgtcttgtatagcactggataggaccaatgttttgatatcacacatggccattgtcggaaactcgttagaactaatgattgtgtgggttgattattgggtagtgtgatttagtgatgaatttttatatttcccgtgataatctgcattacaaaataaggaacttgtagattcttagcattttcttgccctgctgcactgttttagaatttatttctgcagtatttgtttctgaatttaggaaacaaaagattctgttgaatttatttcaaccttttagctgttagttttgttgaatctgaggctctcctgatttggaaactagtagagggaaaaaaaaaaaaacttatctttagttttcattgcaattttaaagtgttgattattatattacattgtcaaggtgttttttttttcctccaaatgaaaatttaacctgtcataatttttttcaggcaattatttgtggaaaagttaaagacacccccgt

SEQ ID NO: 85028 - DNA, 690 bp, Citrus clementina
  Intron number 3 from transcript clementine0.9_025669m (loc us clementine0.9_025669m.g) derived from phytozome v7.0 (c hr-ID scaffold_20; pos 1608884 to 1609573 reverse strand)
gtgaatcaaggaactgattttcgtatatgttactgcaaagctactttgttcttatgatagatagattttcatatgttttagctagcatcagtaatgagttagagatattctgtctatttggttgctgtcggtgagaaagattgatctgggttttaaaattgtcgaaatctttcagtgcagtggtcaaattattctgtcaatctgatttggacactttcagtgaacttttcattatctcttttggttttggggcatgctttagcagaatttcgctttttttttttcttctgaatttcttaagatgcaggatggaaagagaggagtgagaggaaacaagcagaaattagggataattgatgcgaaaggattaaaagtttatggggagacaaggagaaagttaattattttcttattaattataaatcaatctctgcctgaaaacgaaataaaccttattattttcttattaatcatataccaatggctacctaacaacaaaatatattctttaattaaggagcttctaaataaatattgcatccagttctgcatcatttggtcgcatcataaaactaagatggagatgatgagaaaaaaaaaaattgcatgtactaagatgccttagttttatgtttataatttggtgactgagcaatttgattgtgttcatatgtattttgttttcaacag

SEQ ID NO: 85029 - DNA, 670 bp, Citrus clementina
  Intron number 2 from transcript clementine0.9_027037m (loc us clementine0.9_026516m.g) derived from phytozome v7.0 (c hr-ID scaffold_1; pos 8720195 to 8720864)
aggtgcactagcaaagacagcaatcagcgtatcaggttttgctcttcaattttcttgaattgctccctttttacaattagctgttatattattttaaaaaaaattgaattatttctttgaattatagtttggttcgtgtccctaattcatggtaattagaactctactttcgtgttatgaaacacttgctatataatgctatgtggcatgcccattttgaaaaaatgagtgtgcaaacaaatcatgccaattatgattttcatattgaaaatatacacggctgaattgcaatcaagaaattcagaaggaatcagctgaatccgtttgaattcagaggtaagggaacttccatgcgagctttactagtttgtttatttacttagagaaagggtttttgtttgaagtgcaatgaaagattgaaagatccaactttttggtacaccaatactaacttttatttgaagggctataatttatcatttgcacacatgcatagaaacggaaaaagataaagtgatccaaattcgggtgctatgaatagaaaattgtgtgtggaaataattgaaatgtagttgtacacgtaagcaatccattttttgtgcttgctttcataatgttaggaactttatttgcaggaaccaatcatctttttccctgcagctcaaataga

SEQ ID NO: 85030 - DNA, 863 bp, Citrus clementina
  Intron number 2 from transcript clementine0.9_027129m (loc us clementine0.9_027056m.g) derived from phytozome v7.0 (c hr-ID scaffold_1; pos 12866662 to 12867524)
tgggttgttttgtggaagaacagttcttttgactggtaataatcggtgtatttatttacccttgaattctctaaattgattgaattttttttatagccttaaaacagcacatgttattagctattcattatgtttttgttcgcatattttgtaattacccttattttagtgcagtcagatgtcacaaccttgtttagccgcaatttgagtttgttctacacttagatgccatgaaagttaattttaaacagcttctgtttttctgttttctttaaatcttttcttttcttttggtagtgttaacataaaagtaatgtgacaatttgcggtggtcatactaatgggtagcaccgggatttgaaaaattgaacattagctcaagcatttcacaaactgttcattaaatgtttaggctgtaacttattgagtgatggcacattctcttagtactttattggttggctgacatattcctaagaacctccattagaggcagaccaggttggcgtggagtgtggatactagattttaaatttcagatccattatatgagctatttagttttcacattcctcttttaatattacggactccttactctggatgaagggtttgcatgcctaactactagaactgtttgcctgattctttgaagtgtctccctgctgggtcaaagcatgattcactacgtgcaacttacatcctctattattgttattctttctagaagttgtgttatataattttctacaagtcaggagtgtcttaattctttggttaagtttatcgctattttgttgctgttaattggctaatatgtaggatcagcaaaggggaaacgggggaggaaagtttgggaagac

SEQ ID NO: 85031 - DNA, 691 bp, Citrus clementina
  Intron number 1 from transcript clementine0.9_000164m (loc us clementine0.9_000163m.g) derived from phytozome v7.0 (c hr-ID scaffold_20; pos 1122289 to 1122979)
cctcgaccggtgatcagttcccggcggtatagaaggtgtgcacgattattaacctgcgcactttccaatttagatatagaataccttggcctgattagtcaaaaactcgtttcgctttgtttatagttttagaggttagtcacgtgcttgaatcattttttccactccgttcacgtcgatttcttcactgtgatgatggaaattagtaatttaggtttctgattgtgaatttagggtttcctttgggtaattcggttctcaaattggagtttttttagaggttttagaaatggattttgttcgatttggagtttgacgttatggatctattcttttcgtgtgcttgatctggtaatacaatttagggtttcctttgtgttagaatgctctcaaatcaatatgttttgacgtatttgtgtcaaattcaaatttttttgagagtccaactcatgctaaatgatcagaatcactacacgcttacatttctctcaatgctaagctaaaatagaagtgaatataagcttaaaacttgattagacattggttttaatattggattatactgttttgttagctgaggctaaaatgggttttgttttatttgtattttgagggttaatttacaatgttcattttgcctattctttgttgttcaggtgtttgaaccggtttgagaggtgtgaagtaaacc

SEQ ID NO: 85032 - DNA, 1003 bp, Citrus clementina
  Intron number 2 from transcript clementine0.9_032149m (loc us clementine0.9_032149m.g) derived from phytozome v7.0 (c hr-ID scaffold_29; pos 1571172 to 1572174)
ggctagtttgggagtgtggttgaaattcaataaacaacttattttataatttttgataaaaatagtatttgacaaattttgtaaaagcaacttatttcataattttcttcattttgtcagtagcttttaaaaatatgtaggaggttgcttttcataagcagcttattcaataagctaccacaccttattaaatttcctattataaccctataattcaataagttatcacaccttatcaaattagtggttttttaggtccatacaaaggttttcgtcaaggtagtaaacccacatgttatcaagaaatatttaatcatgctcacacattgcttagaagcattattgaacgcacatttggcgtatggaagaaaagatggaagaatttaagagatatgcctagctatccatttgccaaacaagtgaaaatagtcattgcaaccatattttttcacaattatataaggagaaatgcgcaatatgatcttcattttgacaacattgaaaattatcctacttcaatctttgatgaaggaatagaaagagacaataacactcaaaaatagtatcacaatactaatagctctaaatcccaagaaatggaaaatttgagaaactttattgcaaaaaatttattgtgaatctaaaacttattactttttattttatttgaattatatataagtatgaatttttatcatattttatgtaacatattaagaagttctttagatttttttaattgagttttttaatgtaattttacatatttaaacaaaaaaatatgtctaaacaatttattaaacatactctaaaaataaaaaaaaacgattaaaacttataattattatggtcattatataataaaacaacgcttcggtgaagccaacgtcaggaatgtgtttgacaatgcttgtctgtctgctccatgtgtgctcttcttcgatgggctggtccattgtcattcaaagaggaagcggtgctggtggtgccgctgacagaatac

SEQ ID NO: 85033 - DNA, 562 bp, Citrus clementina
  Intron number 1 from transcript clementine0.9_033777m (loc us clementine0.9_033777m.g) derived from phytozome v7.0 (c hr-ID scaffold_1; pos 7589519 to 7590080)
ctgtagcattaagataggaggaagagtgatgtatctgttgtgcgcggaatgcggaatcaagcgcaccaaataattactgaaaaataaaggacacaagaatttacgtggttcggtaattaaacctacatccacggaggcaagaaagaataattgtttatttaacaattaatagagtacaatatttgagtaatgaatctcacttcccagaaacccaaatatactaagtactctcacactctgtaggaaagatgaattccccagacacacttctctcacttctctcaaaagcttagaaacttataagcttaacaattttgggatgatttcaaatgaatgaaatacttagctacttataggagaaatgaattactatgcaaagaataaaataattgaaaatataataaattattattattattttcaatccatcccctttttccattctttcttttcggcttacaaattcaatttgattttgcttctccaaagtttgcatgctagctgttgcaaagttggcattggcttctgacttttcaacagtatcccagttgcaacttccgat

SEQ ID NO: 85034 - DNA, 971 bp, Citrus clementina
  Intron number 3 from transcript clementine0.9_018959m (loc us clementine0.9_018959m.g) derived from phytozome v7.0 (c hr-ID scaffold_1; pos 10331372 to 10332342)
ggctgctggggttccagtaagtttaacaccactaaccaacccacctctacacacacccccccccctcccccccaacccaaaacttttggtcttctctctatgtcatggtgtgtacatacaagtatctgcatttgtgctagtaagttatgctgcttttgattctttgtcactacaattgttgatgtcaattatgtacctttaatgattcatttatagtaaattgaattgatagttctctttctgcttgctataagatacacgttaacgctcaaactcactaagcagacttttcgattgcttgatcccagtctctgggtatggatgtagtcacattgatgcaaccattttggatcattttttgcagatcaataagggaatgaagtatcaggaacattttgaatgttcaaatttgtgctttatgtgttactaaaatgactattctctcttgcttccgtggacaaaggctatatttcctaacgatgttgaaacctcacattctttatcttgtgtgtttcctgtttgattaaatattaatataatataaactataaccatttggtggttattgtcattgattctgcattcacccacaacaagtttgccctgtcactctttgaactcccctccccccccccccccccccccccccccccccaaccaaaaaaaacaattcaaacgctttattattctctattgggtttgcatttttgttgtctcacagttgtttcacttttctaatttgtgggctgcattttctgaaagacagttattatcaaagctcatttcactttgctttcagcgtaaatgctgtttggttggtcagcatgtttcaattactggatactttgtagctacattttctctggttgcattttcatatactgtagcagaaagatgcttgctcaaattccatttgtttccttttctttttggcagctagggttaattataagggcagtaacatctggcca

SEQ ID NO: 85035 - DNA, 768 bp, Citrus clementina
  Intron number 1 from transcript clementine0.9_034619m (loc us clementine0.9_034619m.g) derived from phytozome v7.0 (c hr-ID scaffold_20; pos 509305 to 510072 reverse strand)
gtgttgatctcatcattgaaaagggaattcaccaggtagtcattctttcacatgcttattgttaagtttgtaatatatggtatttactatttccactttcggagggaaaaacatcatctctcaaatctaatgagagaaaagtagtgattcataatttttcatttctttttttctgtatttaaattttttttttaaaaaaaatgattttaaaatgcattctttgaagggggggaacttatttaaataaaaaacttataattaaaaacaacaatttatttttttattattaatacattttcaaaataaattttatgttatttattttcaaggaaaatgttgaatatgagacgggtgtaacaagtcatttagagcttatccaataaatattttgatgtccattttaaaatataccaaccatgaaaaggattgataatttagaacttatgatcttgttcaatattttctagattgaaaataatacaaaaagtattcttctttttctcattattagaagactactgaagaaatgctaccaaaggcatatttcattcttaaaaacactattttgataacattattttcatttcaaatgatatcacctcgctcaaaagtttcacttacaatcttctctcacactataacgagtaatatcgcataagttccagcactaaaccctacccgaaccctcttcaggctacacactgatgataaatggtgatcaatatacatgcagattgatcttcgtggggacatatcaggcctcctctc

SEQ ID NO: 85036 - DNA, 358 bp, Citrus clementina
  Intron number 1 from transcript clementine0.9_023586m (loc us clementine0.9_023586m.g) derived from phytozome v7.0 (c hr-ID scaffold_29; pos 2120384 to 2120741)
aagaagaactctcccacattacccaagatctctcggtatgtgccatttataaaatacaatacattatgttttatttaaaaaaattgcattatttatatcacatttcaaatctcgttttcttggctgtttttcctgttgattagttgctcaaagttcagttgtttgatcagtgaatgcatcattgttttgagactttcgtcaataaattcatttcttcttaatttgcttgaattattggtttgcatataaacttaataagcattatatattcttcatgcctattgttttttttttttaatcctaattgttgcttgcaaatccagtctttatcaaacactgttgaggaaaaggcaaaact

SEQ ID NO: 85037 - DNA, 349 bp, Citrus clementina
  Intron number 2 from transcript clementine0.9_028201m (loc us clementine0.9_028201m.g) derived from phytozome v7.0 (c hr-ID scaffold_33; pos 1338315 to 1338663)
ccaaatcatcagtagcactagcaagatgtgagtgaaataaacccttgtgtgagaatgattttagctctcacttgtaaattcattttgatttaatttcggatcaccccctcatgaattaattatcttcaaatcaccccttataaaaatttcagtttatccccatttttgttaagaagacaaaaaaaaatttcatcaatcagccctcatgtttcccttattttctgaataaaaatgaggataacttagggttttcaaaagtaatgggagtaatttgaaaatagtcaatttaagaggggtgatctaaaattacccattctttttttttttttttttctgtatctgagcaggt

SEQ ID NO: 85038 - DNA, 999 bp, Citrus clementina; identical to SEQ ID NO: 84455
  Intron number 1 from transcript clementine0.9_017794m (loc us clementine0.9_017794m.g) derived from phytozome v7.0 (c hr-ID scaffold_29; pos 900218 to 901216 reverse strand)

SEQ ID NO: 85039 - DNA, 663 bp, Citrus clementina
  Intron number 2 from transcript clementine0.9_006141m (loc us clementine0.9_006141m.g) derived from phytozome v7.0 (c hr-ID scaffold_1; pos 6501117 to 6501779 reverse strand)
gaggcccttccaaagcattagctgcacgagttctggtaatcatactgagtttaaccccttttatatttctgttttgcaaaacttcattatcttttggaacactttactagttcatgagtttcgagttttatgtagaaaccagttttgatcatttgttaagataggatcagagaaatgatattggatgtattgagacaacatgatgatattgagagtagcctagacaattgatggggtactgaagcttgatttcgtcttgggtgggattgaagagtcgctgcttggaaccttctatttatctcagaatattctaaatttgaacttttgcatttgactcctccataaaagtgattcagcatttaaatttaaggccttacagtagtctttttccaaccaaatgtggccctttctcattatcatttctgctctccaatcctaaaaaataatcctatttgggctaaagagacagcttaaaaatttgtaatattgatttactgtggaaaaaaagaatatagattgtgaactctgaataccatataaacctatccaataggttttctatttgtcatatcattctctgatatactgtgctcttaattctttttgcaatttgcttgaataacatactgaatggcatgtttctgtaaatttctgctgcacagg

SEQ ID NO: 85040 - DNA, 736 bp, Citrus clementina
  Intron number 1 from transcript clementine0.9_026175m (loc us clementine0.9_026158m.g) derived from phytozome v7.0 (c hr-ID scaffold_10; pos 3194510 to 3195245)
cacactccagatctgatccaaatcaatcccaactagtaaggtaatcctttcttcttcttcttctccaatttttttttttttttgcctctttttcattttcccgcttctttattattactgttatgtaccttcaagatctgttagttcatctccaactgttactcccccacccccccgggggctttggcacagtttgattggttttaacatttgatataagaatttatgtataagatatatatatatatatatatatatatatatatattttcaattatgtgggcgtcgataaactttcaatgtgaaggttttacttgggcttgtttgctttaacctgaagtgtgtcaatgtgtaatttgatgtttaggtttaatgaaaagaactggaaggcaagaaaagaataaggaaataattaattctgttgatcaatagtatggaagaaaaagatggttgtaaagcattcaaagattttgataattttgggcccttaattatgtgatgattttaggggcaatttctctctcttgaacttgaggcggaaacctacactcttatgataacatatctaatctgattcgatgggaatgttttttaggagttaaaaatttattatgttttgctgatcgtgtttgatctggctttctggattgagctctattttgattctactgtctgtcttcttgaattttcttggaagacagggtgtggggcttttggtcttagaagttggtgagaa

SEQ ID NO: 85041 - DNA, 965 bp, Citrus clementina
  Intron number 3 from transcript clementine0.9_019348m (loc us clementine0.9_019348m.g) derived from phytozome v7.0 (c hr-ID scaffold_27; pos 1229140 to 1230104)
caaacattaggctcagtgtaagattcttttgcctttttgttggctgaaattttgaagattgttagttgaaacaattttactttattagatgtgtttgtaatgttcgttagatttcaatgacttggtgcatgttgtaagtaatgtttgaagggcagtaaaagaaaagacttgggatctgtccatactgggttcgtttatattcaatggaagggatttatttctcttgatgtttgattcaaaactatcaatggttgtacattgacttggttctttgtattttgtttcatgaggacaatgctaaatataatttccatgatagacatttatatctttagaagttcactttctctgtaggtggtccagactttaggttggaagagcgagtagtggttggttacatggaatgtaaatcaaacatgctgattcacttcgacctttctttcttatcagtgatgagttgctgattcatggggtgtcatctgtcctactggttgttgatatcatctataatgcttttgattcattatggattaagctgagacatttttcacatacacaatatgtgagtttgaattggattttgggtacttgaggaatcttattttatacttctagcaaagtgattgtagcaatatgtcttattctggaaaagtttgtatcagctgcggtattgatggccaagtttgaagaagctctaaagctccttgggcttcactctttataactccaaaatggaatggtcctgccaggatacttcattttctttataaaattttctgtaccaacgagctatatacatgtggtatgaattttgactgtaaatgacattgaacgttttgttctattattcttgctgtttctttggatagatagatggagatgaaatgcctatgtcaattagtttggtaatgaaatttgtctgtcagcttataacaccttcatgttttatctctttcgcttatagg

SEQ ID NO: 85042 - DNA, 453 bp, Citrus clementina
  Intron number 2 from transcript clementine0.9_020083m (loc us clementine0.9_020083m.g) derived from phytozome v7.0 (c hr-ID scaffold_82; pos 646811 to 647263)
cggttattgacacattggtttccttttacattgaggtagttaataatgagtgaatttgattatggggaactgaagcactgattcatttatcttaccttatcttgaagtcctttcagttaatgtacctttattttctcacatctaaaatcatcacttttgttttctacctttgaaaagtcctatagttgaagtaaatgcttgggattccgtgctttgatttaaatctgtgaactgtctttagttttccaatttttgggcttctcttaaatactaaattaataatctgccattttgtacaaaccatcttaattgagaaagagatcttgttgttcacacaaacatatctcttatcatccattgctgtgtggatggggaatacataaacaagtgaggaagacatagaagtgtgtgctttagctatggcttactttcattttttttttgcaggattcc

SEQ ID NO: 85043 - DNA, 721 bp, Citrus clementina
  Intron number 2 from transcript clementine0.9_032397m (loc us clementine0.9_032397m.g) derived from phytozome v7.0 (c hr-ID scaffold_122; pos 513213 to 513933)
tgctaggtaagttcacatcactatgaaattttaaatatacacaacaatttaagtacttgatacaaactttgtgtggatatatatattctcttctgaatacgtaagcaactacacaagtagtgtaattctataatgcctcgtgaatagatagtatgtatagctagctatgaattaagtcaattaactagacatggaccgacctgtgttatggagcatgtccccccttcccccaagataagaaaaaaagaaacaataaactcaaaaagaagataattaagctctgaacgaaaattagccaatattcactttgaaaattttatgatttggatcccttagtttgtgatgcttttaatattctaacttccttaaggttgtagtttctgcatttttggacctccttgaataatatcatcatgtgacaatatggcttattagacacacatgagcatgtgcatgaaagtaaaagcccatctgcatttttgggaccgctaacttgttattcattttacaaaatacgaatttgtatgcaattcataactttctagcgcgaaatttccaaaaaatgtcaagagttcttatatatatcttccgtgattaaataacaaaataatttaaaaggaaggaaatgaaccttatttatttttatgtgcatgtaatctgatcgatgatggactggctgcatgcagtattcaagtacgatccaccaaacgacaccgtattt

SEQ ID NO: 85044 - DNA, 533 bp, Citrus clementina
  Intron number 3 from transcript clementine0.9_035572m (loc us clementine0.9_035572m.g) derived from phytozome v7.0 (c hr-ID scaffold_20; pos 2611253 to 2611785)
gtgattcaggtaaaataataatcttatttcttgtgttttctttgcttggcttcattcattaatattttacatgaattacttgtgtttttcattttgttggtggcgctcacttggtgggttaatggttttcataatcttgatgcactttgattcacttgcatttaatttttatgcatgttttactcttggattttctttatcatggggcatgatcttgtaactcaagttcttaaaacaattatttaatttgatggcccaatgtattgcattaaaaactatagcttatatcaattaattaatttgtatgttcgacaatttttggggtttcaatacccaagtgaattgatgaaacatgcctagaatagcaaagcagctgtcttgctgactcttggaatagaattactttgtagtattaattcaataatactcaagtgattgaataaattaaaccggtatatatccttttacctccaaattataacgtgaaccattaacttgttaattacattttgtattggtgcagctagctaagc

SEQ ID NO: 85045 - DNA, 542 bp, Citrus clementina
  Intron number 1 from transcript clementine0.9_009253m (loc us clementine0.9_009253m.g) derived from phytozome v7.0 (c hr-ID scaffold_33; pos 1257075 to 1257616)
attgcttcattgaggtccagttttcttcaatcaattcttgttgtgttttttattggttttagtgctaagcgtttcatttcttgttggatatcaacctaatcggatgttgattttgatgtgaatttattatatcttgatacttgatctttactataatgttggtgaatatctcatcggacgtcgagtttgatcagtgtttggttatttgattttgatgtgaatttgttgaaccttggatatttaatctgggttttgttgaattttgtagttcgtttgcttcttgttattttccatataatttactagctctttgctagttggatctgggtcattgattacttagtttcatccactgttatacaatctccaaacaatctagtttattctgataatctttcagtagggttatctgatttattcacagtttgatctgggtttagcaattatctaatgcgtatttttgttgattgggttgttcttacgtcagtctgattgattttgagttgaatttctctgtaatttggaaattgattagggttgtg

SEQ ID NO: 85046 - DNA, 855 bp, Citrus clementina
  Intron number 1 from transcript clementine0.9_010698m (loc us clementine0.9_010698m.g) derived from phytozome v7.0 (c hr-ID scaffold_89; pos 790715 to 791569)
tgatcagtcagagagtaatacttcatctttaaccagtaagtttcactacttctttttgttaaacattgctcttatacttcatctctgatttgaaatttgggtaaacttatatctgaattctcgtaaatctttattatgtctttattgatcctatggatgccatgttccttcaaaaataaactaaaataaaaagatagagattcagctttgcgccccttttgttgattgcacgacttttaagttcaagatggccatctcattgcctttccagctaatatggagcatagttagagcttctcattttatgctgttgtcacttgtaaatagtattaaaaacaaaattaaggtcgaatattttaggatgatttatttcagttcaatatgtagatttcttcttttctcttttttgtttccccagctaatagtaacttaattaattaacaagcaattaatagtcaggttggtttaccgattgcaatgcgagtaacaggtcaagtaattgattctcgttgccccaatctcagagtggaaagatgcttgatcgggctgggataggctatggtctctaattccaagagtagtaaaatttttagaatcacattagttttttttttttttatcagtatttattttttattcttaaaaaatagagggtggacaaaatttaaataaatttttaatcccttacctcttgtagagtgatgagcaatcaaacaaaattactcaaaaactacttggagcttgaggatcacattagtttattagaacaaaagctagtttaattcttcataacgcggactttcattctttttaaatgattttagccttgttaatttcagcattaattatttgata

SEQ ID NO: 85047 - DNA, 865 bp, Citrus clementina
  Intron number 3 from transcript clementine0.9_030201m (loc us clementine0.9_030201m.g) derived from phytozome v7.0 (c hr-ID scaffold_33; pos 1413042 to 1413906 reverse strand)
tggtatgtaaatggatctttgttccaagacctgttgagtcagttgctggattcatatgcgtctatatatatggcatatttataagaatgagatcatacaggtagtttattcactttcaggacttgctgaatactgatttaggttcctattgaaaggacttccatgttttcgtagctgatagtatcgttgcttaatgctgacaattatgcttagtgacacacttgcctacaactatcaatgttgtactgtttgcaaacataagtggggcaattagtggttcatacttacttgttcttgtattctatctgcttcgagcatcattgatagttcaacaagctttcatggccatatgtaatgtgtgtaatatgcttcttgacgtagtgatatttgcatcatatgtccgtcttgtggaagaacattgtgcttttgcatccttttactgctgttagtcgatgggaaactttgggatggtgagttaaaaaggttttgtaggctaagtcttgcagtcttccagtaatttcatggcatgttacattatgcagttaccctttgtcaatacttttaggaggaatgccaagatagaaggggtgtggatgaatagctcgtgagatgcacatgtattttaggttttcattttctcctcctctggagcatttttcttttctgaatcaaatgttgggatgtttgctgtattcatttagttctaaaatcgcatttgctctatattaaaaaataaaagttccatttagtaggaaaaccttaactgatctttctccactgcatctcctgatttgtattgggatgtggaatggtttgtgttgaatgatacaaaggacacaccaaaggttggaaagcacaactgggg

SEQ ID NO: 85048 - DNA, 591 bp, Citrus clementina
  Intron number 1 from transcript clementine0.9_003004m (loc us clementine0.9_003004m.g) derived from phytozome v7.0 (c hr-ID scaffold_10; pos 3023246 to 3023836 reverse strand)
aattgctcaacgaactcggtgcgtcttgaactcgaatttagtactgaattttttcttcacttttgttattattttttatttttttcgaaacccacgtactgacttctgacaggtactgttagttaatcctgtttttctgtatgaacatgaattttctcttttgatcgttttataatttctaaaattgtgcttctactatttaagcagcaaactcggtaggctatgtgctttcaaaattaatctgaattagaagcacaacagttacagataggctcttagtcaaaatttcaaatcaattacagctctggcatttttagttggctcttttggggtgaattggaaaatacttcaagtttgtaaggcttttcaatgaggcatataatatgctttgtgctttgtgcttagtgtaaggcttttcagcaaactttgtgctttattaaggcattttttctccttaccaattgaaaaaaaaagaaaaaagaaagggtttgtttgctcgtggatagctgattttgcagtatattttgacactgctgatacttgtttgtttggttattgttctaatttttgaggaggcagggaaggggtctt

SEQ ID NO: 85049 - DNA, 759 bp, Citrus clementina; identical to SEQ ID NO: 80427
  Intron number 1 from transcript clementine0.9_012306m (loc us clementine0.9_012306m.g) derived from phytozome v7.0 (c hr-ID scaffold_33; pos 2435073 to 2435831)

SEQ ID NO: 85050 - DNA, 516 bp, Citrus clementina
  Intron number 1 from transcript clementine0.9_015782m (loc us clementine0.9_015782m.g) derived from phytozome v7.0 (c hr-ID scaffold_136; pos 320043 to 320558 reverse strand)
gtaacaggagagctgaaacctctcatttcttcaaggtcattcttccgtcaacactacaagagaagaagctcgtaactcactcttcttcttattccttattgtgctcctctttgttggctaatttgttcagtttgatatttatagtactgttgccgatatatatatatatatatatatatatatatatatatattctgctgcttcatactatgatctagtaaaaggctactttcaaattttaatctgctgaacaagtttctttctctttactgggtatcactgtatcatgtttatattaaagatgagctactctagttttcgttgagagatgtttatctttttattcagtgtaaatgtttgatgctgcatatcaaaagatcacatcaaattatcaaaatagtcattttgttttggtattaagacgtattttcttgttttgtaactttgatctctgctatatctgtgacttcaatgtttgtagaggattccgagaaagtttgtgaagagatttgggga

SEQ ID NO: 85051 - DNA, 603 bp, Citrus clementina
  Intron number 2 from transcript clementine0.9_028604m (loc us clementine0.9_028604m.g) derived from phytozome v7.0 (c hr-ID scaffold_27; pos 590149 to 590751 reverse strand)
gtgactggcttgacaataagcacgttgtatttggggtaagtgctccaatgttttgttgtcctcatcatcagtgtatctagtacgccacatttaattgtttttggcgtaattgtatattttccatgagccagaattgcacaatattttctggtattaattgatgattttgttactcgtcaagaattattaaatctaaattataaagatctaaacatcatcgaatgtcactagaagaactgagtttctttaccaaatgcttatgtattcttctgttggtttagcttgaattgtagttatcaagtaaatatagtcattggtatatcaatatatttaggctcttttaatcttttatgcggatgcgtggatgtctgtgctgttacttgactgtctatattagttctggttgttcagctctaactttaggggtgacgatctaattcatagtcccgtttataagaataccattttgctgcctggggcaatccatttttttcctttttcgtttatttcaatggctttttgagtccttactgatgaaatagtccctctaaaatgctttttttttttgggtaaatataactttagtgtagagggtgctcggag

SEQ ID NO: 85052 - DNA, 498 bp, Citrus clementina
  Intron number 1 from transcript clementine0.9_006460m (loc us clementine0.9_006460m.g) derived from phytozome v7.0 (c hr-ID scaffold_67; pos 1116812 to 1117309)
aataggaacttgggttaagcccatttcatttgacggtataatcgtatttcccatttgctcaatttttcattttttaattttattaatatctttgtggttacagagaaactatgagaactggaatgaaaattaaacatttttatggcactttttggtacccagatggacaactaaggtttcttttttatttctcttctgagtatctggggtcagtgtttttagggttttgagttactgctagctaattgaagtcgttttattattagtgcttctttaattagcatatgttgccttgcagttttcaaatttcaaatgcaatctgcataaattttaataactaaaatattctggtttatgtctttttgggtttaaaacaagcacaactccagttcaattatgtaatacagtgatttttgggttaattgcttgtctggacgaattctctcaagctaatgatctcaccatcaatttctcatttttcctccttaagagtactgt

SEQ ID NO: 85053 - DNA, 858 bp, Citrus clementina
  Intron number 1 from transcript clementine0.9_024306m (loc us clementine0.9_020354m.g) derived from phytozome v7.0 (c hr-ID scaffold_90; pos 596279 to 597136)
ttcttttctctctgtcttatctttgtgagtttcttttctttctgtgcatgcattatgagatttcccttgctcttcgatatgaatgaagcccttgatatttcttataacaattttttagattttttatttaatccaagtttttttttttttaaaatacatatagatcattttggtaacatattagaaagccttgcacagttagattggcctatagctaaaacaatattgcctgcttttgtaaatacttcttgatttatttttgcaatggaaatttggatcgattcatatttttcctggatttttaacgtttgtatttaatattacgtaaatatttgaacctgaattttatagatgtaactgtaatcttgactcagagatgctgcctagcttttaataagaaatgagacttgccttcttcaccttggtgacaaattaattgaataacagttatgaaacagagccaacctatacaataaattcaaatgacataaaaagaaataaattaaatattataaaacaggattcatcttccaaatttacatatacacaatggtcttgtttctttccagtataatataatagttttgattctttgccatagattcttgtcatatattcatcacataatggccttgatctgcgttttcatgtgcatcacataatggtattatcttttctgtatgtgcgtcacctgctaccatatgatatgtgcatgtcagaatgacatcttcatatgatcttatcacttcctctcacttagaatttgtgcacttctgaagagagcttcttttttttttatttatttattttcctttgaggggtcagtcaaaatatcttatgtgaagcaggtggagagca

SEQ ID NO: 85054 - DNA, 293 bp, Citrus clementina
  Intron number 1 from transcript clementine0.9_031260m (loc us clementine0.9_031260m.g) derived from phytozome v7.0 (c hr-ID scaffold_5; pos 1794320 to 1794612 reverse strand)
agacttttcctgctctcttcaatctttatcggcaggtttgatcagatcattctctctttaggtttcatataatttgttatcatttaataatgaaagtgttgatgatatccatttgagttgctttctggactggcttaattcagcttatttttcaatatatatgcctgacctaggaaaattagttttaactgggtgattatctatggtttgttatggtaaagtttctgttttgtcttctctgggtgtgtttattttgggatggtgttggcatgtgcaggggtttttacagtcaa

SEQ ID NO: 85055 - DNA, 433 bp, Citrus clementina; identical to SEQ ID NO: 83443
  Intron number 1 from transcript clementine0.9_008870m (loc us clementine0.9_008870m.g) derived from phytozome v7.0 (c hr-ID scaffold_23; pos 3357655 to 3358087)

SEQ ID NO: 85056 - DNA, 652 bp, Citrus clementina
  Intron number 3 from transcript clementine0.9_017171m (loc us clementine0.9_017171m.g) derived from phytozome v7.0 (c hr-ID scaffold_10; pos 3475545 to 3476196)
atatattttacccttgtgagcactcacgtggctccgtaagtagcttctaatttccatgtactccctgtttttgctgtgatttccttgcagttacaaagttatattgatggatgttttggtataaatattgatgttctgtcaagattggttcatttttttggttgcactgttaaaagcaaagaaataaacccaagtataacaattgaattcatataatgtattgtggatgtttattcttttcaatatcatattaatgggtaaactaaatttcatctattgtttaaatttatattactcataatgaattatacaaatgaatgaatacatgatttggatcttttagagaagtagcttgttgtgtgactgtatgggtcatacattttagtatagttgacagtaaccacttaagccagtatttgtcagtttcattgttttgatactacctcacactgccccattgaggtggattttgattgctaaatgagaagaagagttttttacatcgtacttttacaacttgtatataattcagcttcataagaaaaacctggaatttaaccacatatgcttagaaaataaagttacttatttaattaatgaaattggatctccttttcttgctatgccaacaatcaggtacgagaagcagtac

SEQ ID NO: 85057 - DNA, 230 bp, Citrus clementina
  Intron number 1 from transcript clementine0.9_004915m (loc us clementine0.9_004915m.g) derived from phytozome v7.0 (c hr-ID scaffold_10; pos 1132536 to 1132765 reverse strand)
tcctcctgctcttatccctctgttttcttaatcatgtaagcattcgcttccaatcaaacaccacatttgttatttatggattttgttccttcgcattatcttcatcttcttcttattattatttttatttttattattatgttttcaatgatttttgtttttttttttttttcgtttttggtttgtgcaatgcaggttaattatttgggcggcaccgagatttcagacag

SEQ ID NO: 85058 - DNA, 611 bp, Citrus clementina
  Intron number 1 from transcript clementine0.9_019192m (loc us clementine0.9_019170m.g) derived from phytozome v7.0 (c hr-ID scaffold_5; pos 1554192 to 1554802 reverse strand)
tagcttagctgctgagaaacggcaggaaacaaaaagtaaggagaagttcgaaacttgtcttctaatttgattatgtctttgaaagaataggagaatctgtgctattacttgaattaatttatggtgattttactcatttttgttttttcttttgactgaatgatttttcgtacttgccttttgtaaattgaaaattgttggacacaggcttcctgctattacgctgtttcaattttcagggacaatgaaattttcatctgcagattgttaattagtataattaatcgtttgtagtagacttgttagtgaaatttgaaaattataatttgtttgattttccaatacttttttttataagaaaatgaaaaaattatgaatgttcaatgttaaactggacaaaacctgtcccctgtccctgtcaatggttcgatttgttagttattattattttttaaaatttattattagcagtagtaggtagttatttttttcaatagttattatttatattataagtacaataaataaaacccagtttaggggctaaatcgtttggttatgaaactattgatttccaattttcttgatttattgtagtttcggaaaggcac

SEQ ID NO: 85059 - DNA, 908 bp, Citrus clementina
  Intron number 2 from transcript clementine0.9_009769m (loc us clementine0.9_009769m.g) derived from phytozome v7.0 (c hr-ID scaffold_20; pos 1771651 to 1772558)
aggtctctctttcaacttcagctcatttttcttcttctttattgcaaattcaataaatttacatgttgattctgggattttggattttgatactgggatttcatgtgactagtcttgtttgcagaattgctttatgaggacaaaatctattagagattgcttgcgtaactacataaacacagagttgtatggttgctaaatgaattaactcaatctaggttactttctagatagtggctcaaggtaagattgatgttactgataaagttgaaaagaggatgtcttaatttctctttatgcctcaatgtggtgtgttgtgtcaaactgtatagggcattaaccgtccttttttccaactacccaattgctataaaattttggcagagttttctcaaggcagtgaagttggtgtgtgattttattagcacatacttgtctgtgttgttgagcaattctgtccgtttggtgggcccaaaaagctttggtttaagtaaatgaattgtgttgcaatcttttgctgattcggcgagaaaggaacaatggatgagtttatttattttgttttggaggttttttgtggactaccagtttggttttgtatctatctctctctcattttcttttaaataatatttctggattcttatcagaaaaaataaaaagtaaacaaaccatgaatatcttgattttttgcagaacgaagatgatcacctctttgtttttttagcttctggttttaaagcatataaggacaccggtttatggcctaaatacatttcagtaatagtatttatatggaggagattaattttggctattacattgttctgcatatccagctgaagatgctgtctgacgttatatttgctgcaggtgatactcacagttgccgaacatcatagtgccat

SEQ ID NO: 85060 - DNA, 442 bp, Citrus clementina
  Intron number 1 from transcript clementine0.9_031309m (loc us clementine0.9_031309m.g) derived from phytozome v7.0 (c hr-ID scaffold_1; pos 2240795 to 2241236 reverse strand)
tcacgtcagtttgtacaaaataaatttgtactgtacctatattattactctaaagaaaaataagatttcttcttttattgcttgaatctaaaagcctgcctagcctacaaatgtacgttccaaattaagtaaaactcataatgctgcgaaagaaatcataatttgattcttaatgtctcgtattctaaattaatgactaggaaaaagccaggaaacaggagaagcttgtcagtatcaatcatccgagagaatatctctgtgaccgttagaaaggaagctacagtgcaggttcttggctcctcgctaagtcccataaataaagagaacccattcacaggcttacaaactcgttccattgttacaaattcttgatctttgttcttgttattgttttttagccatgtctttaactcttaggtctcggaaaccaattgaaaataca

SEQ ID NO: 85061 - DNA, 238 bp, Citrus clementina; identical to SEQ ID NO: 81481
  Intron number 2 from transcript clementine0.9_012645m (loc us clementine0.9_012645m.g) derived from phytozome v7.0 (c hr-ID scaffold_98; pos 317960 to 318197 reverse strand)

SEQ ID NO: 85062 - DNA, 561 bp, Citrus clementina
  Intron number 1 from transcript clementine0.9_021015m (loc us clementine0.9_021015m.g) derived from phytozome v7.0 (c hr-ID scaffold_23; pos 3231213 to 3231773 reverse strand)
aaggcacagatctgggacactgctggccaagaacggtgcctttttttttttcacttctcaattcttcttcttttacgtgtgtaatagcttctgatctgattgtttctgtatcgcatgtttttactttagatttttgctgaaactgtattgtgggttaggttcagtagcagttttgaaccactgggttcggttgatgcctttgaatgtttgtgatttcatccaaatatgggttatttgtcgatgtgtattaactatgcatatcagattgatctttgcggtttaaagtgcgttgatttaatcgcttaaaacttgtgtttgatttctgtgatacaagtgaattgggggatcctgtttagtgatcggattattagtgttattggattggacataagagttacttactctcgaatgatcctgctgcatgagttgtggatttaatttgtacagtttgtcatggcacaccaggcattggatttataatttatcgatttccttcctctccttgtccttttggtgtaatgagcagatacagggctgttacaagtgcatattacagaggtg

SEQ ID NO: 85063 - DNA, 604 bp, Citrus clementina
  Intron number 3 from transcript clementine0.9_009560m (loc us clementine0.9_009560m.g) derived from phytozome v7.0 (c hr-ID scaffold_23; pos 2356570 to 2357173 reverse strand)
acaagtaattatttttttccctctaatgggtattgttgcctggtttgtgtttgactttctcttggaattggtttctggagctgtttcagtctttcagaatattcttttctcacttgtacatttttttttatggaatttatttgcaattatgtgttcattgcttgccatgaattttttccttccctcttaatcttaaatttgttaccttaccaatttgaatacacaaaagtttggaaagtggacatgactctagactatatcattttttatctaaagatggtgataaaaatgttggccatcttcagaagttttatgataaacttggaatcttttttggctgttacataattggcattaagctgagttgagtgaacatcagttgattgttttattcattgctccactgcgtgccgcactgctaatctgaagctattttaaagattattgttttacctgtttataccctcagctttatgattgttgacttcgcttccattcttttgttacacggcctctgtttcattgtttttaaagaatttcagagtatcgtatgaagttttatgtttaaattcattctatttcttattgtaatacttctgcagtt

SEQ ID NO: 85064 - DNA, 615 bp, Citrus clementina; identical to SEQ ID NO: 80691
  Intron number 1 from transcript clementine0.9_009560m (loc us clementine0.9_009560m.g) derived from phytozome v7.0 (c hr-ID scaffold_23; pos 2357515 to 2358129 reverse strand)

SEQ ID NO: 85065 - DNA, 694 bp, Citrus clementina
  Intron number 1 from transcript clementine0.9_003278m (loc us clementine0.9_003278m.g) derived from phytozome v7.0 (c hr-ID scaffold_114; pos 187544 to 188237)
gtgcccagttctgaaaaagaggtattttttatttttttattattttttttgtacattttcttttgttctgttcttggtttgtctaatatgttcatgtggcttacgttttgcagaattttaattatgtttttatgttttttttcatattcttatgtttcatgtatgattcttttgtgttgtcaaattctaggcttgtgttttctgagctttgatttttattaaatgggatgtatgaagattgtatttgtgtttatgcattttgacatgtattgtggttcttcactttgtttttcttcattttgttttgcttttgtgaaaatttgcgagctggttggcagttgacatataattcagtttcttgtaattgtttggttcatagtcctgtaagcctaagattgtaggtgtgtcctacagtccttgggaggaagggcttcattgtttgcatcttatattagttttgtccaacgtatgttagttatgcttgttggaggatgatatcaaagaaagagattccctagtcataacgataagtgtattacagccatgagcaaatggaaaaatgtctcagattttaaactttactacttttagccatctaattttgtacttcagctagtattgtagaagaaaatgataatttgttgctatatggactatgaaacacttcttttatcaggaaccagttaaaagcgct

SEQ ID NO: 85066 - DNA, 938 bp, Citrus clementina
  Intron number 1 from transcript clementine0.9_003533m (loc us clementine0.9_002690m.g) derived from phytozome v7.0 (c hr-ID scaffold_5; pos 1311411 to 1312348)
tcaagtttttgagaccaacattccctcttctgttggttagtctttgctttttcaacactgtaatctttcttgctttcgtatttgtttgttttgggaaataatgagagaaaatgactccaaagttgacatctttggttttctttctcatggcttcctttgaaatgttttcgttgtgtagcctctttcattttgctttttttattattttttttttacgttgttcctccgtgaccaaacatgagttctgtctttccattgtgttatgtgtctttttatttgaaggtagaattttgtgtttatgtatgttatttggaggctcaatttgtattctgttttgagatttttggggttttaagcgttattatatgctaaatcgaataaacaattgttttttgccatgtgggtgttctttgaaatggctgaattagcttgaattcatcttggttttgttaaaagttgagttttgtatctctgttcattttgctcagttcttgaaaattctttgtcctttcctttctagtacattcgtgttacaaccttaattctgcattttttacttgttcagtattttcaactttaacagttcatcaaatttcttagtaacctggggaatgtgtgttggttggttgtagaatttggtagttagggtattgaatgggcacaaatttctgtaaaaattttccacatttgtaatagttaagtgggggtttcccctgtcacagctcgcagcattctagaatttgatgtttgttcacttatgtaggatttactaatcacagcaagggtctcacatcaacatttttacattctagtctaacattttcaatgtagcttgttatttgtttttgcaagttgtgattattatcttctttttctgacactgcaaatttctacttccacatgcttttgtatcttcctaattttgatatcttttgcag

SEQ ID NO: 85067 - DNA, 283 bp, Citrus clementina
  Intron number 1 from transcript clementine0.9_008742m (loc us clementine0.9_008742m.g) derived from phytozome v7.0 (c hr-ID scaffold_23; pos 1930233 to 1930515 reverse strand)
tcctcttctcctccaaatttccattccaaaaattggtaaatttaatttcttactagtattattttctactcattaaatgcatttttatttttaaaaaatttttgaatgttttatttgtttcttgtcacttgcgtgctaacaaaaaaaaaaaaaaaattatcttctgaaatgaaaggttcttggaacattcgaatctatatgcattttctttacagaatgagggagttccccaaattttgtcttaataatttatcgaactttgtttcaattaggacactggcaa

SEQ ID NO: 85068 - DNA, 623 bp, Citrus clementina
  Intron number 2 from transcript clementine0.9_010529m (loc us clementine0.9_010529m.g) derived from phytozome v7.0 (c hr-ID scaffold_33; pos 826421 to 827043 reverse strand)
ctctctgggtttaaggatgtatgtcaactagttctattttagttgtttttgtctttgaattatttctttagtggtttgcggtcatgtagatgcgaatttttataggcattatctagcatagatacctggtttgttagtgatgaacgtctttaactacttctgtgaagacctcattcatttttcccgtctattggatcctccttttactcaattccatttgcacagttttttatcaaataaaacaataatagaaataatcaagggctaaataatgatggagaaacttgtacattttctgattccatcctgtgcaacttgtagtgaaatttctttcgttagaaggcagagttgtgaaccatgttctgaaaatagatgcacctatgccttctggacaactctttatgtgcccaatatcttaagaattaacctttctattctacttttgcatgttgagtttttgaaacatgttttcttgagtttgcattttcaccacgtttagattttgtgaacattgatagattcaagtgtatattagtaatcttgcttggcaattcatttttttttcttttgggacacttattctttcagagtgctgagttttagatcattggcttgattattca

SEQ ID NO: 85069 - DNA, 729 bp, Citrus clementina
  Intron number 1 from transcript clementine0.9_009173m (loc us clementine0.9_009173m.g) derived from phytozome v7.0 (c hr-ID scaffold_1; pos 12265352 to 12266080)
tttttaatatcatcttcagctcgtaaccagcccaggtgattatctttccaaattcctttttcaattcaaagatcttaacaatgcatgcatgcaaattccttttctgcttcaaatttgatgggttttagttaaagttttttttttttttttttgcccttttatatatataaggtttgaattattaggagtttggtagaaaaggaagattcttcgattagttgttaagtgtttgttgagttgaaattgataagcatttgttcgatttgattaacaaggaaattctgggtaaagatatcaatacacaaattcaggttgatgtttgaaagagttgtgtgttgaattagcacagcttaacaaagctgacagtgtgatcttggtcattttaattggggttcgaggattgaaggttttgctttagaatattgttataccatccataaattaaactgcaatttagattctgaaatttttattgaatttatatgatggggtttattgtagttatcatatttttatgtgtagtttatgaactctgaaccccccaaaataaaattttgtcaacgaaagtgaatcttattttattttatttttggttccctcttgctctctatctctcaattttaaagatgtaatggtagatgtattgttgtctagtgctagaattttcgaatatttggaatcatcttcttgcaatgtgctttggacagttattctggttatatattgcag

SEQ ID NO: 85070 - DNA, 836 bp, Citrus clementina
  Intron number 2 from transcript clementine0.9_009838m (loc us clementine0.9_009838m.g) derived from phytozome v7.0 (c hr-ID scaffold_1; pos 10356519 to 10357354)
cgtcttccttcctctcatttcattcaggcgcgttggtaaactctcctattggttatcctaatttttgctggaataatttaaattttgaaaaagaccctcaatcccgcgccccccccccccccgggccttttttttttttaaatgatatccaaccctgaatgtccatttctggaacagtgaagatctagtggtcaattgtggaagaccattggcgcaaactttggaggtcttcattgtcatctttctatttgaataaccttgagtgcacgggatcaagtcccagctattctcctctctaaagtagaggtttatcggtctcatcacatttggagtacaataacttttctttcaatattaaagtgaaggcctctaatattaaatgaggatcaaccttcgaactatgccataataagattattaagaaaagtcctgagcgatttttgattgtacatattagtgtatatatattaaaaaaaaaaaacagagtacatgatagaattgtgttccacatttagctattaaaaaggagtcgcttggggtttataaataagataagtcccttcattcaatagttagtcttttagattaaatatttaaataattatcaatgaaaaatataactctatatgcttaatttaatttttttaaaagatatattcttaatttattgacttagctctactatattttttgttttttgattgattgtaaagccatctttttactgattttagtttctatacgaggttgtatagtgatgttgagcaacagtgattgatgtctgtacttttattgtgctagattcattgaggtacacatcggcattgtcagtcggt

SEQ ID NO: 85071 - DNA, 896 bp, Citrus clementina; identical to SEQ ID NO: 84854
  Intron number 1 from transcript clementine0.9_006696m (loc us clementine0.9_006701m.g) derived from phytozome v7.0 (c hr-ID scaffold_1; pos 9622597 to 9623492 reverse strand)

SEQ ID NO: 85072 - DNA, 461 bp, Citrus clementina
  Intron number 1 from transcript clementine0.9_004174m (loc us clementine0.9_004174m.g) derived from phytozome v7.0 (c hr-ID scaffold_53; pos 938586 to 939046)
ggcagcctcagtatcttgataaattgcaggtataatgatgaatttttcttttttttattagattatttaacatgcaatttaaagtgggtgttttttggattttacattaggtttatggattttttttgtaaattcaacgtggtttttgtcattttagtttgtcagagtatgcttctttgatatcgttgtcgtttgaaattgttattgtctcagaaatatgaagactagaaagcttcgctaaataagcttgagatgatggcctctatgtatacttcatccacattctttttctagacctgtttgttttatttcacatcagtttcacacttctcaaaatgatagcatatatttatgtccgggaaaatatatattgaaggtatttatttactgtctgttgtaaatgtgatgaaattgggatatgtttaggtggagagagaaaggggaataaccgttaaagcaca

SEQ ID NO: 85073 - DNA, 524 bp, Citrus clementina
  Intron number 1 from transcript clementine0.9_031911m (loc us clementine0.9_031911m.g) derived from phytozome v7.0 (c hr-ID scaffold_67; pos 826888 to 827411)
ggcatcgcctcaacacagcaccacagcaggtttccttcctccattgtttgttcatcctcaacaactctctctgcctccgcccgccccccccccccccccccttttttcttttctttcttttgttgtaagaataaagaaaggaaaaaaaaaactgaagaacgtcgccgtttcatattgaagattaccctacgttgcttttccattcaacacttgttttagctgttcccgttgatcatgatgaggttagccttcaatgaccctcttcgtctcatctgctcgcacgcacgcacatgcccttctggggaatgggctgctttgtttgtttgtttgtattagatttaatggatccaatgagattcggcagttgcatcgtgctgtttatctcctcaaactataatggaatttgagctgaaacaaattgtttatatgttgttaattgatcgaccggcggatcttttgattcctcattttggttgttttcttttacagatatcagagagtgagcccagattataatccgctga

SEQ ID NO: 85074 - DNA, 632 bp, Citrus clementina
  Intron number 2 from transcript clementine0.9_028675m (loc us clementine0.9_028675m.g) derived from phytozome v7.0 (c hr-ID scaffold_1; pos 4528052 to 4528683)
agagggaaactttgctcgggattcttcgtgatcaggttagttcatccctaactagaaaataattcaaatatagaaaattatatgtaaaattattatcgaaactattatcttctcataaggaaacttagttctaagatattgaataaaagaatccattttaaagttacaactctgaaatatttaatgttttctattaaaatcattgctagtgacatccatgacttaataattttattggttcaaatgttgaagagaccttgtgacttcttacatctctcaattgactccaagcattttcgataaagacacttgcatctatagtaaaatcaaatccatgagactgaaggatgtatgtggatgtcttacaggcctaatttagatatttgcataggtttatttctattttaaccttaaatacagaagagaagaacaataacctaatatcaatcatcctaagacccaaaattgcagaaattatccttatatttattcttaaagtaggcccaaattccatgattatgttggaggaactttttaattgaggtttcgctctttcttttcattttttaactatgttacaggtttttggacatgtaggtatctgaaccactgcgggctttaatcaacggagc

SEQ ID NO: 85075 - DNA, 967 bp, Citrus clementina
  Intron number 1 from transcript clementine0.9_032234m (loc us clementine0.9_032234m.g) derived from phytozome v7.0 (c hr-ID scaffold_1; pos 8735656 to 8736622)
gaggttggtgattagtggatggccagtcttgtttcgctttgcagcattacgcttctatcttcaatgtggttactcctctatgcactgttcttgttgtttatgaatttgttaattgtttatgagatcacatgctaatccttaaacctttatgttgagtttggtttaacataatcagcgatcgagtctgtatgttctttgcagtacacgattgatttcatttgattttgttttgttagtttttgttgtgactttttgttttttaacgtgtttaacagcttagagatcgatttttgtgttaaaattgatctttgggttggtgtatgatagtcttgttacaagttggttacttaggaactctcggctttctatgtgtttcttttcttgtgtgtgtttgtcttctttttctttctttcttttcatattagataatttggtgtatgtgtaattttttggatgatcagtgtatctgtgttcatacattgggcatgttggttcggagaggaggagtttggaattatgatttccagagtagattattaattctcttttcctgtagaatttggtttgcaggtttcattttataatgataatgtagttgatttccaaaataattctggttatagattatgcaatttctctaatcggcatggaaggctggaaagaagattattcttccttctaggttttcagttttggttttagtgcttcatattcccactgaagtgcatatatattctggaaataaaacatcgcagtcttactgacattttgcatgtcattcatgtgtttgtagctctttgtctctgcatcaatgttacatttttgttggcaatctcactattaatttagacattatatcctttagtagatcatatgttgtgtctaaaacaatttatgtttgtattccttactttttgccactgatgttattgtttattctgtttcgaattctatgttgttttggcag

SEQ ID NO: 85076 - DNA, 396 bp, Citrus clementina
  Intron number 1 from transcript clementine0.9_033348m (loc us clementine0.9_033348m.g) derived from phytozome v7.0 (c hr-ID scaffold_33; pos 1869651 to 1870046)
aggcagtccctctttgatcaggttttgtttttattttttcttcttaacatcttttgtaaaactttcatcaatcatcacacattcaactccaaaaaaaactcaatttttaattttctccctccatggagttgcattttttgaataaattaatgtgttcgtacaacttaaacttattaacatactgaagataaacatggaatggataaatatatcgacatgtgtatgcacatgtcgtcaagacattaatacaagtaattggtcactttaaaattttttatttttatacttttacttcattttgtgcatgtgtgtgtgtgtgtgtgtgtgtgtgtgtgtagaagatttgagatggaaaataaattggttaaattggtgggacatttcagggacatcttg

SEQ ID NO: 85077 - DNA, 960 bp, Citrus clementina
  Intron number 5 from transcript clementine0.9_001662m (loc us clementine0.9_001662m.g) derived from phytozome v7.0 (c hr-ID scaffold_20; pos 3098102 to 3099061)
gagtcaatcgtattgttgttgaagacgttcaggtatgagcctttagaaagttgtttcctatttctgggacttcgatggcctgtttgaatatgcatgatgcatggttgttgtttttgtttttcaagtttttctatcaaaagtccaattttggctaatggtaaaatatgtccagtgcatctgactggaacaaccaatcacttgattcggggaatgaatgtctattgcaattgaaatactctatttgtccgttctaaaaagttgctagtgatgtttttgttctttcctgtttcttgtcgaacacctgctggatggttggttatagccaatcttaaaatttaaaaggctacacatgaatcggaggcttcatatgttgaactgaatttgtttacctgcctattttttgttattagtattctcattgttatctccatgcgtaatatttttttgatatgcaatatacttgcagaccttatgccgagtcataggatgaataggtcattggcttttgttggtttcatttcaagttgtttagtttcttctatttcttccatgactgatagtctttgaatgtttaacttgaggagaagtcccgggatgatggggctgctccaatagataatcattttctttgtgcctatggatcgagtttgttgcttgaggagccattatggagacccctgcaattctaaattcctagccatttgctttttttttttcggattttttctaactagtatcaggatgggtttgagttctctataataattaaatgaatatacaatgcacttactggtttgtgtggtaaattgtgagcttggcttccttctggttttgatccacctatttccattggaaaatagcattcttttttgcttgattaatggatgttgcatgtaaataaaatctattgccttttgatttacagagcctttcacaatttaacctcactgttccactccc

SEQ ID NO: 85078 - DNA, 620 bp, Citrus clementina; identical to SEQ ID NO: 84911
  Intron number 1 from transcript clementine0.9_025862m (loc us clementine0.9_025862m.g) derived from phytozome v7.0 (c hr-ID scaffold_101; pos 421358 to 421977)

SEQ ID NO: 85079 - DNA, 726 bp, Citrus clementina
  Intron number 1 from transcript clementine0.9_014990m (loc us clementine0.9_014990m.g) derived from phytozome v7.0 (c hr-ID scaffold_1; pos 12831404 to 12832129 reverse strand)
tcactgttattatcaccaacaagtggatctttcaggtctgttttcaaaatttttcctgtttctttgtttttttaacttcgtttatcatgtttttcaccagcttcattttgattgtgtcattaatgttgttaatttagtgatcttgatttgttcattggatcagctctgtatgttgttttatttattttaatcattttaataggctgtaattgatctaaggttttgtttggcagcatggagatttgttctcagaattcttaattccactaaattatgattttaatggtttgattaagtactgccaagcgtagctaaagggattcttttattttttaatttttttggggtttgctttttatttctttctattgttacttaaagaaaagagtaatgtgttgattagtaacggttgctgtgagacacggaacaatatttgacctaaaaaatgccaaatttggtgaatatccatgatttatcaattgatctgtttctaatatgtgatttattacatgtctctattactgcatgcagaagaaaattgcttctaagcaatttggtttaaaaacttgggtttttttgagaactgagttacagatctaaaagtatcaatttgctgcaggcctgcaaccattaaaaaattaatgtggaattagataatgatttctcttttccttttcattttgtctttttacagaaattagatttcaagtttcctctgtcggtgtc

SEQ ID NO: 85080 - DNA, 831 bp, Citrus clementina
  Intron number 1 from transcript clementine0.9_023574m (loc us clementine0.9_022829m.g) derived from phytozome v7.0 (c hr-ID scaffold_5; pos 3129857 to 3130687 reverse strand)
tagcaggtttcaattacccctatgctctgtttcttgtcattttcacttgactatatatatatatattggcaagaattgttcatgttccagtggttgttgttttcaatttcctatcacttgtattttgtgtatgaggtgaatttttaagatgaaagagattgaggtaggagataatagtttcgggaaccaaggaaagtgcttgctaaagattaggttattgccgtttgttatcttttctgtcttttatgcatcttaagatttttggataatactcctaatacatcttcagacccaaaaaaaactctctactcacatgattagcttatactgaaagcagtaacttaatctttagttagtaaattgatgagtttgatagtatgtttgaattgagtgattctatccgtatgcaattattcttaatggtgtcttttagtgtttacagcacgatgattccgtgatcttgtttaatctggtcatgtgtgatttggattttagtgtatgtgtcttctgtgcaagttgaaatttttattataatgtataattggaatcaatccaattttgagcagctagctttataattccactattagataccttttaaatcttttccaaaaagggaaaaaaaaaaacattgtataagggcacattgcttgttgcttaacattgttatgctgcttctgatatctttctcctggaccatcaagaaacaagtagtggaactttatttgttgctctgattattatgattgggaatgttgtggagcagattccatgagctatcagaatttgatgaaaccaaacgaagttgtcgcaggcgtttggctggacata

SEQ ID NO: 85081 - DNA, 962 bp, Citrus clementina
  Intron number 1 from transcript clementine0.9_013604m (loc us clementine0.9_013604m.g) derived from phytozome v7.0 (c hr-ID scaffold_29; pos 1339466 to 1340427 reverse strand)
acgattgctttgtaagttttcttccaattattttgctttttcatcattgatgagtttggacgtgggttttgggtttttattcgataaagtttagatctttgttaaattgaagtttttttggatcttggcttttggatctgtggagctttttgctgttggttaaattggaagcagtaaacaattatttccctttttttttttgaaaaaaaattgatttgatttgatttgatgggtgggacatgtataaattcttattgctatttggatctgggattgttgctcgacaataattttagcttaactgtgtctttaaaatcgatccactttttctgcattgttgcttgttgcatgctttgttctgcgttgaattgcacacaacacacggcatttttttttctttaaaagaaattatcttgtagcttaaaagttgttctgagttttgtctagaggagaatcatatctaagctcttttgcaagtcattttcagtaagcattgtgagcctagatctggcatgggtcttaatttaacaaaatttaactcaattcatgatctaaattgtgaaatttgaaagtcttgattggctctttaaataaattttaaattaagtatgcagatgtctgtttttttggcagactgttgatttagtatgctttgattttaatctgtgccatgcgtgaggcttagcattttggtgtctgccgttcatgtttcactttcaaatttcagtggttctcattcaatgttgcattaattttataagcagctttcctgcttaaatgtttgcatattctcggatacatttacgaaagacactccttgttcttaccttgtttgcgttaacttaagatttttaccacgacatgcttttgagagtgcgcaattgcacatggatcttggatcttaagtttttgagtattatttgatttgcaggttgctaaagacccatctggcaaagaaatta

SEQ ID NO: 85082 - DNA, 948 bp, Citrus clementina
  Intron number 1 from transcript clementine0.9_015755m (loc us clementine0.9_015755m.g) derived from phytozome v7.0 (c hr-ID scaffold_65; pos 253797 to 254744)
aggtttataataattctcttaggtttacatcttgtgcttttttctttttttgggccgggggggggggggggggggtttaccattaattacccaacaacaccatttgctctcaacagtattaatggaatttgatagtgtttaatggattaaaattgcatgtagtttcaaccattactgctgatctttcttggtttttgagatttttatgcaaaatgtacatttctatgtgtttgtgtgcatttggcagtgtgaatcagagagagcatataagtttattaaaatcttttgacatgtgcagatatcaccttgccaaggccttattagagttcgtgaattcacacttgcagaaattgagcactttgttgatcctcaagacaaatctcacccaaaattctcagaagtcacgaacttggagttcttgatgttcccaagggaggaacagatgtcaggtaaattgtatatacgagctagtttccgttctctttcctctgcctattgtgaaaatattgaagtgaaagttgttgaatatacctggatcatttgagggagcctgtccctccacaaataatgtcagtgttttcaagttcagagagtctaccccctgttgtttattgctggaatttaaataaagaaagattacaactgtcctcccaagactataggcatgtgtcagcaaaataactaaccaactagcttggactctaatagctaacttgacttattcaaacaatgaaaaaaacaaataaaataaattaactggaaaaatatagaacatgtaatagtaaatctaaaaagaggattccaccaggtgaaactgttttaaaggttggtttaaaattgtttttaattttaccatttcttgtccaatgacatttttggcctctgtaccacttcacgtgctcctcttattgattattctctccattgttgttcagggaatagtaaaca

SEQ ID NO: 85083 - DNA, 437 bp, Citrus clementina
  Intron number 2 from transcript clementine0.9_033947m (loc us clementine0.9_033947m.g) derived from phytozome v7.0 (c hr-ID scaffold_27; pos 2077777 to 2078213)
ttctacacagaaggtagcttatagaaaaatgcaaattatgattgattcatttcaaagatttttgtattgtgattattattattattatgttcacagtttttttttttttttggcaattcaaattataaaatgctgcaggttatattgcatcgattggaagctttggaggcaatcctataaaacattggtacttcttgagttcttactaactcatggtgctgaggattttgcaatagaatttcaatgcgatacggctatactccaagagcttggaacttttgtttacatcgatgaaaaagggtgagtgttgctttattattctaatgctggatctgaactgcgccgagtttttaaaaatcttctacagagtgtgcatatgtatgccgctaaaacaatttctacaacaatcgtgttataggttcaattggggtgctaac

SEQ ID NO: 85084 - DNA, 897 bp, Citrus clementina
  Intron number 1 from transcript clementine0.9_035245m (loc us clementine0.9_035245m.g) derived from phytozome v7.0 (c hr-ID scaffold_67; pos 1337680 to 1338576 reverse strand)
cttacaaaggtggtacctacagccaaattcagcctctgcttggatttgactggagtgtgcagctcctgagaaatgcacacgataatggggaagaagtttatcaggaatgatttgcttcaaggtggagtttgttgtgtattcagtgaatcaaatcaaagaggatgaaacgacagagttagcttgcgttttgtgatgctcgataacttcagtaaaacgacacttaaagactgcgttttatgaagtaaatgttttgcttgctacaacgacatacagtcttgccgttttgaagttaatagaacacgagcagaacacgtgcatacaaaaggttgttaaagggccgttattgcacatggtcctcacgtgcgtttctgggaagcctctgaggtggtttataagctgtgatgctcagctggaaacggggtgtgtgttggttgagagagagagcattgtaacgagagaaagaaagcttgagactgagagttttcttgttcctgttgagtgcttgttaatctctgtaatcaagtcttgaagtcatatcaatgaagctgttaagtttgttcccccgtggatgtaagtcagtgcaaattgactgaaccacgttacatagttgtgttctgtgatttcttgatttcaattcatttctttgcttgtttctaaacacaatcctagtcttagtaacaggtcattaatccattaagctttctggttgtctttgggaggcatcttgattgattctaatccaagatcctttgggaagtgttctgtaaagcttctgttttcagcttatcagaatcttcagtacgtatgaacatgttgctcccagatgttgcattgcagttgtttagggatcgcccacagttagccactcttcgcgctggaaaattgtgagacagcgct

SEQ ID NO: 85085 - DNA, 851 bp, Citrus clementina
  Intron number 2 from transcript clementine0.9_031378m (loc us clementine0.9_031378m.g) derived from phytozome v7.0 (c hr-ID scaffold_1; pos 10379692 to 10380542)
gtcttgtcacctttacaggtaagaagaatcaaaagtattttctgagcatgtattttgttgtgcacttatgtttattacatgcagaaactgttgtttgttggtgatgttattgaaacactttctcatttaatattctcagcattttttctgtttgtcagtctctcactctcttggtttatctttactttgcaatgatcactagcaaccttgcgacttctgttgaatcagtagactttaactgatcaacctttgtaattttgtaacataaacaaatgaatttggatttggatatttgtggtgcctccaaatgcatagcttaggtacttagttttgatcttgaatctttttcctccgctgtatttgccatcacaatccttaaccatgctcatcttctgctactttgtgtttgagaatggatgtgggtattctttatcagtatttgtgatggaatatgatgttgtcaaagtaacagagaacttaagaaagatacacaaacatcttatgacatagtgtgcacaaagtggagatgaaaataatttcggcatagccaatgtgtgtaactattaactgtcattcctactctagtagtagaaccactttttgtccaaactctgcatttttgcctcttcccatttttgtttcttttaattatatttcattggagtttccagttgatcttcctgtgttcacctgtgtatctgaaatatgtgcataccaaaatactataattggtcattctttccaacctgaaagttagatattattgtatacacgcatgttctcctttttggtcattcaagggcctttttgattattcgcatggaggttctcccggtcagcagagagcaaag

SEQ ID NO: 85086 - DNA, 462 bp, Citrus clementina
  Intron number 1 from transcript clementine0.9_002741m (loc us clementine0.9_002741m.g) derived from phytozome v7.0 (c hr-ID scaffold_107; pos 431880 to 432341)
tctgcttcttcttctctctctctttccataataaggtacgtgattctgccgtttgtacatctccatttcgattcccatcttaaacaccgcattttcgtcacttcgttttgtttgcgccatttttgtttgtttgtttgtttgtttatagctcaagaaaattagtcagctaaacgctgacgttttggtttagctttagatctggatttgttcttcgtttgtaatgttgatctaaacagttagttcgttgttgctgtcaattaagtgacttgaaatggagataattaagtgattgactgtgattcctaagttgttaagagtaatagtatttcgttattatacaatttggcgtatggttagtactttttgtcttctttttttttaattttttaaaaaatttttaacttatgttttttgatttgatctgcaggtgtaagtccttaatttcaaggacatattgagatt

SEQ ID NO: 85087 - DNA, 657 bp, Citrus clementina
  Intron number 1 from transcript clementine0.9_029764m (loc us clementine0.9_029764m.g) derived from phytozome v7.0 (c hr-ID scaffold_51; pos 1412931 to 1413587 reverse strand)
tcgctagcatcagttttcttcccaagcttgcttgggtggatttgtttggccttttggacacttgtgcctattacgttaggcaggcgctcaatcaaaccaatttaccaatggctcaaatatggaattttggaattagtttcccaagtctacaacagatttaatcgattctggcgtaattgtgtcaccatgaagaaccaaaacttgcccatgtaaatttctcaaatgttgtaattatgaataataatagattaattgctacaattactagataatacttctcttgtagttacattgctcacgaatcaacaatccacactgtaatattgtagatgggaggggaggttaaattaagcctatacctccctaacaaaactgaccccaaggtatttttatacaaaacattaaattttcttcatacttttctaacgttaatcaccataaatccctttgacgtggcactagatcattgattcattaatgggaaaatcactgtatgcatagaactatgttaatactaatacataaacgtacgttactggggtacattttttgttttatcaagggacgtattatctataaattgatatgttttacgtgttgttgacttgattttctattactaattaaaatattaaatcacatgtacaaaaagtgaaa

SEQ ID NO: 85088 - DNA, 592 bp, Citrus clementina
  Intron number 2 from transcript clementine0.9_012278m (loc us clementine0.9_012278m.g) derived from phytozome v7.0 (c hr-ID scaffold_109; pos 259360 to 259951)
ccaaccttgtaagtcttttatttttaatttattttttcatgtattatttagtttattcaaagcatccattaacaaggattgtgtgttgcaattgtagagttcaacacctgggagttttccaacaggttttgggcctaaaaagcggatattgactgtgcataaattaatggatattgcattcctttgtgtaaatgtactaatttgtaaaattatttgattatgtagaacctgctaaaagaatattattaaaagggcaaaattttggaaaaatatattttgacatttgaaggtatgttattactttggcacattttgaaatgaaaaggttaatggatgaatggttttaaccaactgaaggaacttgtagatcatggatgtgctgtttgttttcatgattatgctgtctacgtgtactgtatagttttggtttgttgaatgataaaatctgctaaaatcaaaggggcatcatgcacatcttcccttcttattgttaactatcttttgctttttacttgttttggttgtggaaaaatactagctgtggaatagttttttttttttttaacttgtagaaaattggagtagctcatac

SEQ ID NO: 85089 - DNA, 631 bp, Citrus clementina
  Intron number 1 from transcript clementine0.9_029210m (loc us clementine0.9_029210m.g) derived from phytozome v7.0 (c hr-ID scaffold_136; pos 382424 to 383054 reverse strand)
ctcaatcagtggcctgattatcctcctgaattaaggtaaaattaactcttatattgtgatggtgaagtttgagtacttaacgataatttgatcattgcaatgtagtggacctatttgatttgaatagataattatcttgttttcattatttttcgaaacaatatgttttttatttatattttttatttttagtataaattcttaaaaatttaagagatctcaaatgaagagataaatattctaatcttttagtacaagtgtcgaaaagagtttttccctttttatgcatctaattgacattttgattactatctttgtgctatccaatttaatatgcttgagagtaagcaaatctaaattggtgacgtgaattttctcatggttggagagaagtcacaatatagtccacaagaggtacttattgacaagataaacaaccataacaagctgattcgtaggtgttaaataccactcaaatggttataattggttgttggtcaatatgagaacttgtaatcttttggagccaccgtatatactttgattaatgcaaatgtttaattttgcaagaaaagattcaatgataggactttagttatgaatttatctttggtatgcttgacagagagtc

SEQ ID NO: 85090 - DNA, 578 bp, Citrus clementina; identical to SEQ ID NO: 83512
  Intron number 1 from transcript clementine0.9_007694m (loc us clementine0.9_007694m.g) derived from phytozome v7.0 (c hr-ID scaffold_1; pos 9850821 to 9851398 reverse strand)

SEQ ID NO: 85091 - DNA, 732 bp, Citrus clementina
  Intron number 1 from transcript clementine0.9_015456m (loc us clementine0.9_015456m.g) derived from phytozome v7.0 (c hr-ID scaffold_120; pos 198447 to 199178 reverse strand)
gtgcaagtacgtacgtatgtacttcatcagattaacacgaacctcgaattgcaaatgatatagtgaagaaaatttgatgcttacaaatcatttgggtaaattaagtcgggtgaatggatgggattttcctttttcaatcaaaattaactaaatctcgtcgtcacacacacatccaagtgagagttttatggaagcttgatcaaacaaataaacctagctgaaattttgatcaattaatgcacaagagtaaaaataagattaaaattctctctttatctgaattttacttccgcaaattatacattaatagtaaatgaggttgtaaaaaactagtaaatcttcaccgcacatacgtgatacacaagtgttgcttcatggcttgcaaagttgaaagacaaggatacgtttgtaatctacagcaaaacattaaaaataatgctcaacgtttgtcaaatgagggaaaagcttcttctttacactaagctaattttgtctctcaaaaccatcacagtatctcacccacatacactatttaaacagcctagctatccgttatatttccaacattgatctaaagcaaaaatttatctctatagatctcacatagcaaaaggtgtcaagactctctcttcatctcatcgctctgctatatattgaattgaaatataaaaaatgcaataaacataaagataactgattattcttttctgtacatatgcagagaaattaaag

SEQ ID NO: 85092 - DNA, 408 bp, Citrus clementina; identical to SEQ ID NO: 84601
  Intron number 1 from transcript clementine0.9_006508m (loc us clementine0.9_006508m.g) derived from phytozome v7.0 (c hr-ID scaffold_1; pos 8182874 to 8183281)

SEQ ID NO: 85093 - DNA, 440 bp, Citrus clementina
  Intron number 1 from transcript clementine0.9_012016m (loc us clementine0.9_012016m.g) derived from phytozome v7.0 (c hr-ID scaffold_82; pos 748143 to 748582)
ggttgtgattggaaaggtaaactttgccccttcgtttatcacttcatttgtcttactcttgttttttcaatgtttttgtatttgtcatttctttgttggggaaattcttttgaaaatattttgatgggctcttctacagttatttatttgtcttttttgattgtttctatcttttgttcgacggatttgagttctcatctttgtcatttattgtgattagttggccatggaacttctaatattacaattatgtatacttgaatggttgttttctggctaagttctaaccacttgagtgttgtctagtcatctcgactttgtcgtgccccttcttccaatttcactgtctttgctatagtcatttttgcctataactaattgtctgctggctacaattattcacagggttcagggtattcagatattgtgaagtccaacag

SEQ ID NO: 85094 - DNA, 647 bp, Citrus clementina
  Intron number 1 from transcript clementine0.9_004888m (loc us clementine0.9_004888m.g) derived from phytozome v7.0 (c hr-ID scaffold_43; pos 1835640 to 1836286 reverse strand)
gccagtttgtccggctttaattctcttaacatcaggtgaaaagttagctttaatttctcatactaatattcaacactgtaaataaaattcacgcagcactcttagttaaattttccagatgataaactacacttttaaattttttcatgcatcaaattctagacttcttgaacttccccacttttgaactcctataaaagaatttttgcagaattaataataaaagctccagaggtttacaatatattttaacaaaattaatggtgttctgtcgttttttaatcaatttcaatctcttactcatataccattaggaaaaaaaaaatctcttccacatataacatattcctgtaattaaagagttattaatttatagggaaattagaaatttccttactcaaatcaatatataccacttattttgactatttttacaatatttaataactctcctggagtcctggtaccatcactttgcaatattatccttatgaaaaaaaataagtggtatatattaatttcaataggaaaactagcaatctcctttatttcaaattttatgcaaatcccttctatttgaagttaccgctgctaattttatgtatttggtaggcctgaatcggaacttataaacgaagttgttcatc

SEQ ID NO: 85095 - DNA, 1014 bp, Citrus clementina
  Intron number 2 from transcript clementine0.9_034562m (loc us clementine0.9_034562m.g) derived from phytozome v7.0 (c hr-ID scaffold_40; pos 578362 to 579375 reverse strand)
ctcatctggtagttattatctctgcatgctatctataattttccctaagcttgccacactaacattgttgtgatattattgcaaatctttttatttccattgttttctttaaaaaaaaaaaaaattagctttggatttttctttcctgggtggtgctctaaaattggtcaagctacagccttttgtttctttctcccaaattttgttttagtaccgcccgaattttgatggtatgtgatacttgattagtataaaattagaaaaaaggcactttgcatttttttcacaccctgaatttctaaaggttgcacttgaccagtttgatggtgcatataattttagttttgctatctgttccttgtgtggatgcagttatttttgatgcaatgaagaaagtttaaggttttatgttcggattgctacctttctggtcctatcaggttgcttctggtatgacaatgtggaaccatatacagcctgcatatgctgctaacatgtgtaaatgaagccttaaataagaaaattggaacgaaggtactataaaaatatgcttcaggaccaaaacaatatgtttcaccatttttcattttatgtttctggggatatagttgattgaaatatggtttgggaatcatggtgtttccctgcaaaaaatattaaaaacaatgcaattcagtttgtgacctgttgtatgtgattgatgaaatagtatctgcatctatcatatactttgtctgcttgaatttggtaactgaagcgtttcatctgaccttatgaaaaattcatcacctggtcattcatgagttacaccaagtatacctcatgagccaaacacggacgatatggcttaatggtatccacctggctctggtattataattagaaaaccatagcctagagaatcattggactattatagtgttctttttgttggaaatcatgttaagtaagctagatcattattgatacataatttgttatcaatactattgagtaatcaatgtagtttgtttg

SEQ ID NO: 85096 - DNA, 912 bp, Citrus clementina
  Intron number 3 from transcript clementine0.9_022238m (loc us clementine0.9_022238m.g) derived from phytozome v7.0 (c hr-ID scaffold_38; pos 758056 to 758967)
atctaactgatgtaagttttccaaattaattaaataggtcgatatgttttacagtttacttaagctgctactagctatgttttttccctacctatgtaaataagtgaaataaactatgatactttccgatagcctgttgtttgtgtcgttcttgctaactataactacttttatccgttatcaatttagctagaggatatttattcatataaattaatttaacatgttatcagtcttgaacttgcttcacacaattagaaggtttccaattaaaattgtacactattaattactggcacgcctctccactacagccatagcatcggtttcagattagcatatggccttaattaattggtaaggatagtcctcgtccattgtcctgtggtgtaatagttagagattttgatgtcatttttaaaggatgcttttgttggttttagcaaaattcccaattatgcttattttcaataagctttttatctagaaatttgatttgcctttcataagggatatatagcttttatctggcttgagaagagttcaacaattgctattacatgccttgcaaactcttaatccgactctcatacatagtgtacgtctttaatatttaattaagtggttgaattcttaatgaatgatgtatacataagagtgtaatttacataagatccatggacctgagtctatttctttttctattttattatgatggcaacacaattccttgtttattaaaaaaatactcaatctgcatctacgattttttttttttgtctcttaaaattttattatttaaaacaaataaagagaaaattttggccctagcttttatcccatgtaatctaacatataacatgttcacaaatatcaggtgattcaagattagcatattaacaagggaagctg

SEQ ID NO: 85097 - DNA, 962 bp, Citrus clementina
  Intron number 1 from transcript clementine0.9_012180m (loc us clementine0.9_012180m.g) derived from phytozome v7.0 (c hr-ID scaffold_20; pos 3408730 to 3409691)
tcgaggtcaaggttttaactgttaataaacttgttattagatttattttttcttatttttttttaaatttcaattatgggtttgattgaaagattgcatttttgtaacttatattgcatatggaaatgtaaatgctagatgttggatggttagcggaatggtttggattttatttctggtgtttacttgataaacccatgccaacttttatttttctttaaaaaaaaattctgggtttttaaatttaaaagaaaaagaaagaattggtgtctttatttgtttgaaaatgtggagggctcttggagaaaagggtgtttggagtctgatttttgctcagaatgtcttattgaggatttcccggatgtactgttcaattttatgagaacaaaaatggagcttcccagtatgaacagtcagagctattagggcttgtgttggatattaaaggatcagaagttgaactctgcatcacctatagagaacgattaatgcaaatatttagtcccatgcttattttattgaacacttttttccaattttggggaagaaagaaattaagtcctctatcatttgagttcactgattgggattctcttgaatgattgaatttcctgaacattggataatctaataaagtacgcaagtttcaacctttggctggttattattattttttatgtagccctaattgatgttgcacgctctggaaccggaaacatgccatttataattgcatccatatcaacactaatgattatttgtgcaataggtttctaatgatttacgtatgtagtgtgtccttctctacttgctctttcacactagtttttactcattgattacatttgcaacttttttttcctgcttcatttccttaaacatgatgtataattgaaccttgagtttatcgacgtgtcatatttgcagaagttggcttgttaatagtagggctattgcaaaga

SEQ ID NO: 85098 - DNA, 594 bp, Citrus clementina
  Intron number 2 from transcript clementine0.9_017501m (loc us clementine0.9_017478m.g) derived from phytozome v7.0 (c hr-ID scaffold_82; pos 133541 to 134134)
caggctcttggtacaccgacaattgtaagtcttcataacgcagtactttaatttccaaacaatttattttctatctttagactctgtttgatttcgaggagacgctatgattttatttacgtattgttgaggaattgtagtttataagtaacacttgctccggtaactgacgaaaggaagcatttttccccccttcaatgaagaaataaatattttattacattttatttttaggaatagtaggatgtgattgtgaaatttatccaaatttggctgcttacagttgattttttttaattttattttaatctttatatttgcttagctagggcttgtttgtgaatgttctacttttgctaaatttttagaagtacctgctagcaaaagtgtttcgagcaattcaatctgaaacatacctaaatgtcctctgtaaattgtttgtgaatgttctacttttgctaaatttttagaagtacctgctagcaaaagtgtttcgagcaattcaatctgaaacatacctaaatgtcctctgtaaatagttatgttttgattttctatcccttttgtcagctaaaagattagcagaagagctgg

SEQ ID NO: 85099 - DNA, 717 bp, Citrus clementina
  Intron number 2 from transcript clementine0.9_013422m (loc us clementine0.9_013422m.g) derived from phytozome v7.0 (c hr-ID scaffold_27; pos 1577763 to 1578479)
aatttagaccccaacgaatacccagaagtttgcaggtacatactttgatcgctggctatgtatagcattatctcccaacatctgaatccgactgattgtttaatatgcaattggatacactttatggaaggcattgggcttgctaccacaagttcaaataataagttcttttggaccaaaatttgttgaagttgaaaaagaaagtcttagttgggacgcatagttgctgcaatatgctgaggttttttctcatgttgggttattaagtttgtttattgaatgtgaaagacacggtctgtaagcatgttcttgttcctgctaatatttcatttaatgtttcactatttgctgctgcaaatgagcaccctactttatgctcacttaggcatttaatcaaacttcttcatagatattatcaaacacctgtgaactccttgtaatagacgtgaaaacaaaccatcaacagaaatcatcaaccaacaactacaagagcaattaatgtgtggttcattgaattggcttatgtacatctaagttcctatcattcgatatcacaaaattgtaattctaaatgaatcaacaattttgcattttacaggtctattgaaattaattaattcgtgatcacagtgatatttttttctttttacttttttctgttaatacccaattgattgtatcttctcctgtgccaattgttctcacaaatttgcagag

SEQ ID NO: 85100 - DNA, 424 bp, Citrus clementina
  Intron number 2 from transcript clementine0.9_031176m (loc us clementine0.9_031176m.g) derived from phytozome v7.0 (c hr-ID scaffold_1; pos 1035807 to 1036230 reverse strand)
tcgaagaaggttcaaagtaccgacagtaatttttattttgttgaacccactttgcagagggacttcatttttctaattgtatattaacgattttgtagatgcatacatattgattcaggcagacaattagttaagatgaaacaatggattcactttgttctatgcttcgattacggaatatctaggatatctgtttcttttttatgttcttcttttctgtggagggactgacagaaaattgtcagcacaaatttcagaaaagttatttttaaccttgtcattcttgctttcttattctcactggtggcatatgtgatgtcaacacaatgttttgagtttgtcgtaaaataaatcattaaattgaagtgatcactcatttttttcccccttttccctaggttttgggtccattgccttgctttac

SEQ ID NO: 85101 - DNA, 586 bp, Citrus clementina
  Intron number 1 from transcript clementine0.9_021074m (loc us clementine0.9_021074m.g) derived from phytozome v7.0 (c hr-ID scaffold_43; pos 75069 to 75654 reverse strand)
gaccttcttttgttgattcattccatcctggtgaggttagttcatcacgacccatctcttgatttttttttttttttttcatttgcttcaagttttgatgagtttctgaggtcatttgtacggttttggaatgtgaatacaattggtgattttggtgctgtaactgtcattaatgatatgtagtaattcaatcagaatttggatttagtgctggtatgatctctgctcattttttaaaatcttgtgtccacatgcatttttataatcttgtacggttgagattgtatgtagattaatctacgtacagtattcttgtctaatgactagtaaccacaaccttatgagacgatcgaaaccaagctcagatcaataatccaatcgagagaggatcataactcaagcttatcgtgtgtgggaatatttcggttaaattgtaatcatgatcatgaatcatgcagggaaaagggaagttgaggtcaatttatgcacttgatggaattaaagaaccaatatttgattttggtttacattatttctcagtaatggtgactttgtgatgttaaatttatgcagcctataaacggat

SEQ ID NO: 85102 - DNA, 568 bp, Citrus clementina
  Intron number 2 from transcript clementine0.9_035358m (loc us clementine0.9_035358m.g) derived from phytozome v7.0 (c hr-ID scaffold_23; pos 3741355 to 3741922 reverse strand)
ctgagcaatttgaaattatcatcaccataaccaaggtaattaatctcgttaattcagttttaattcaagttctgtttatacacaaattcaagttggaattggtgacatataaaagaattaaagaaaatgatcaattgtgttgttaaaaaaattgtatttttattcaatttattttgtgtctcttttattattttccttctagaatcagacgtgactacttctatctttctttctttcttttactttttttttttgaatgtttttttctttcttctactgattaattgctgacattcgcgcagttagttgctagcgattgattaataagcacaaaaaagagaaaaaaaaaaaaagcataagtttgattgtaggggtaaaataataaaattaaaaattaaaaaattaacataatccttttagagcaagggagtttgaaacatgaggagaaaaatgattaatttctgcaaacacggattttgatcattttccttagaatattatatatatgtaagatgaaagtcaacaattgttatttcaggataagagcagtgggaattggtggcttcta

SEQ ID NO: 85103 - DNA, 674 bp, Citrus clementina
  Intron number 3 from transcript clementine0.9_031797m (loc us clementine0.9_031797m.g) derived from phytozome v7.0 (c hr-ID scaffold_1; pos 4117231 to 4117904 reverse strand)
agagggaaactttgcttgggattcttcgtgatcaggttagttcatccctaactagaaaataattcaaatatagaaaatttcatgtaaattactactgaaactattatcttctcataaggaaacttagttctaagatattgaataaaagaatccattttaaagttacaacttgaaatatttaatgttttatattgaaatcattgctagtgacatccatgacttaataattttattggttcaaatgttgaagagaccttgtgacttcttgcatcactagcaaagactagcatgtgacaagttattggctgtgagttctctcaattgactccaagcattttcgataaagacacttgcatctatagtaaaatcaaatccatgagactgaaggatgcatgtggaagtcttacagccctaatttagatatttgcataggtttatttctattttaaccttaaatacagaagagaagaacactaacctaatatgaatcatcctaagacccaaaattgcataaattatccttatatatgtccttgaagtaggcccaaattccatgattatgttggaggaactttttaattgaggtttcgctctttcttttcatttttctaactatgttacaggtttttggacatgtaggtatctgagccactacgggcgttaatcaacggagc

SEQ ID NO: 85104 - DNA, 839 bp, Citrus clementina
  Intron number 3 from transcript clementine0.9_024478m (loc us clementine0.9_022628m.g) derived from phytozome v7.0 (c hr-ID scaffold_82; pos 1106467 to 1107305)
gcggcggtggaagctgtgggacttgcattgtggaggtactgtattacctttattttatttttaaaaaaattaatgtctaattacattacattcaccgctttgacttgtaaggtactatttgacattaatctttaatctttaccttgaaggtaaggatccatgaaatttgagcttgtctaatattattaacatcctctctcacgtgcaagactaattttagacttgtcatgcgtctttaaaattcaacggtctattttactagtgcgaatttaattcgtgtttagacattaagatagttcagttgacttaactcttataatgaaagtaagcggtcatagattcgagtccgcgggaatacatgtagaaatgaggtgcaatgttattaaaagaaagaattctagcacaagatcttttaagtcaaatctaacctaatatcttgctaagttaccatttgacctaaaaacttgaacttgaaggttgtgtcccaaacaatagtatttaagcttgtctaacattgatgtgttcctcattttggcagattattgatggaaaagatcttttgaatgaaagaacaaatactgaactccgttatttgaaaaaggcaagctcattttctacttaacccgaaatgctgaatgtgcattatatttataacattcgttagtgaagaaaaaaagagacatgaaatccacttgtcattatacctgatgtaattttaatttttttttggtgctgtatttgtgaatctgatatcaaattttttttgtttttagtatttgactgttgttttttattatggttttattgtgcatgcagaaacctgaatcttggaggcttgc

SEQ ID NO: 85105 - DNA, 1025 bp, Citrus clementina
  Intron number 1 from transcript clementine0.9_007356m (loc us clementine0.9_007356m.g) derived from phytozome v7.0 (c hr-ID scaffold_1; pos 2913276 to 2914300)
ttgatacaatcaataaagctacttgcctggtatgcctctcttaaacgattttttctttttagttacagtctaagtgcgacgtaatccatttctgcggagttcaaaatcttatcccccttttttgtgttttattaattgttttttatttttatcaacgtacatacactaatgaggctcgaattcaggtctttaagtcttaggatagttgctcctcaccagtgaaactagacctatttctttttactcaaaaagttttacttggcacttatgtcttaacagaatattatatgcttttaaaacatattacgcctataatcattcataaagttgttacatcactcttcaggatgagacttccagacaagagcagttaattttgtagcgtgtgaattgagagtatttaattatgggtcttgttaagttacataatatttaactcatagcaaatgcaaaagtaatcacccatgacctctcacttatttcacatattactattttttgcgttgggtaacttgttttgggttgctttatacatttaattatattctgctttctcctaatcagttgagagggcaaaataattaattaaaaagtcgatgaaatcatcttccacttatatatcatcgcatttgttatttgggacctaaattttcaaacaagtttttgataatatatttgtggatttaggaaaagtcttgggtgatttagggatattgctcatttttcattcatttcttactatgtgtatgcttcaaattatcatgacaatattgatacacacatagaaaataatgaatgactaaagaacaatgctcgaagggcactaaagaccttctcgtgaatttgatatgatgcattaaatctaattcatcttaatagtcaaaagatgaaaatgaaaatctttaagatgaatttaattaagttggattgtgaatgagtgtaacatatgaaagttccaaaataatacttttagccctaccaattttgcagggtctcgtcttagcagcaacagacaacacaaagat

SEQ ID NO: 85106 - DNA, 950 bp, Citrus clementina
  Intron number 1 from transcript clementine0.9_030830m (loc us clementine0.9_030830m.g) derived from phytozome v7.0 (c hr-ID scaffold_1; pos 4583067 to 4584016 reverse strand)
ccataaccaatcttgccggtaggctttatcccttctcttcggtagtttcgatttttcattttataattttaccatagagatctttcagaagtagttggtggagatatgcttttagacatattactcatgtaattatatactgagattgtgattgactaatctaatcaatggagagtaagaggatagatggagatatttgtgtggcaaatatgcagaagctctagctagtatgccagaacatggaaacacaacacattgaatatgtgtctttctattgtatgagtagcttggtgaatgcagtagccagtttaagagcttcgattaactttagacaaatgcagggcttagtaacgaagtttgcactagaacatatgtgtgattattcatgataaagacaacagctaattgccggtaatgttttctgatgatggtgcttcagccctgggattaagtttcctgagaaagcatcgtcttcaatcatttgcccttaaatctcaaacaaccttcaccaattacaaaagaaagcaaataaaaataatgtcaaagaatagatcatatttatgtacccaacttggagttgacttctaacattagagtgcacatggattaaacaagggacattctctggatatagattgacctagcaatcactaagctaaaaggacggttcccttcttgatttgagaaaagcataggaacttcactcaaactgaaatgtctgaaagataaacttgttgctgcatttatgctttaggaagcaagagacaaatagattccaaattgtactgctaatactaatctaagcaacagtggtactcatgcaacttcttacttgataaaggactactatactattcaaggaagaagtagcattcagcagtttgatgtttaaaaagttttcctgtttatttgcagcctcagtcttcggggagttgtggaaattggagccg

SEQ ID NO: 85107 - DNA, 638 bp, Citrus clementina
  Intron number 1 from transcript clementine0.9_000978m (loc us clementine0.9_000977m.g) derived from phytozome v7.0 (c hr-ID scaffold_5; pos 1258822 to 1259459 reverse strand)
tccaatttttgtagcttccattacagtttacacaggtgcatgtgatgtcttaacagtttatgttttgtcatttgtgtactttcgtctggtaatttttttgctgcattgcaataatctgttatgtcttttgctactgtgagctcaaaaaaatggacggttctgattatatcaacttttatcttctgtggatctggttttaagttgatggtgagcagtaaagaaaataatagctttgaacaaaatttttaagtaaatgagaaatcatttcgattttattttaattggattcgctagcttttttttttttttttttccttaaagctcagtttttgctgtttcagtgttagctgtttagttcaagttttattgcattaaatgggcttaatgtactttgatttcacttcttgcttgctctatttttattttttttacttttttggctcattcatttttttaaaaatatatatctcttgttttctttcttttgttttacttttaagcttgcttaggatttgtacatttattgccttttctacttattaggtgtggtgtaatgtggatcatttgatgactgcacagtgttgccttaattcgtaagcttaaaactgattttgagttttttttattttaggggtttg

SEQ ID NO: 85108 - DNA, 722 bp, Citrus clementina
  Intron number 1 from transcript clementine0.9_010068m (loc us clementine0.9_010068m.g) derived from phytozome v7.0 (c hr-ID scaffold_1; pos 12424446 to 12425167 reverse strand)
tccattacaccgagtgtatgttctctctatgttcaattaaatttagctttaattatgatttttttatatttttatttttcaaattgagcatgaaattggcttagggtcgtggtgattgactgtttgtggttcattatgattgttttgtacttaatttgtgtacttttagggattaggtttagttttagggttatgtcgtattatgccttgttttattcttgaatagtaagtttaaagaagctgaagctagttcttaaaattatcaattgatttgcagtgaaacttcatggaattacttatgccatgcttgttcaaatgttattcaaactgaaagtgttggatataagattattcaaattgaaattgttggatataagatgttaataatgcaatgaaagttccgtttggtaaaggcatcgatgttcataagatataaattgattagtttaaggagtttgatctttttggagatttctttgtttagaaataaggatgaacttttttttttttggttgatgatatatatgtcttgttggtgattacggttaatttattttacataaagggtatgattattgtatcattgttggttttttgttatgtctggattatccgcgcacatgcaagctattctaattaggaaaatttaatgattaaatcttcaattttttttatatattccttccttgttcacccttttttcacagtcaataggaggctcg

SEQ ID NO: 85109 - DNA, 914 bp, Citrus clementina
  Intron number 1 from transcript clementine0.9_027901m (loc us clementine0.9_027901m.g) derived from phytozome v7.0 (c hr-ID scaffold_27; pos 2030982 to 2031895)
gctttcgctgcccgagactaacaaattggtgcatattttaaatttttttcttttattttatttatttaattgttcattctttaagcttttcgttttttagttgtgctttacttttttatatattgaagatgatcagttgaatggaattgtttcagttgttagcctttagcttcctgttgtaagagctttggtaatttgggttgtgcagaattatgtgtgttgttacatgtgtatgttgtttcatgagtgtaatattagttttttgtctagagtgtggggatgggataaaatttcagtgccaattcagaatttgatggctcatttgaccctcaataaatgtagttagaaagctttgttgaaatgctttgaaattgggggggaaaaaggatggatttttaaatgagagggataagtacagaggagggggagtgttgtcttataacttataaatgagggggagggataagtacagaggagcggaacagtacaacttataaattgggaagggaatggtgaatattggtaggtaaaagatgttcaaacatgatactattgactgacacgttcaaacatgatactatagaattaagagggactagtggttttgagatgtctttttatttttgtcatgttgcaaggttaatctttggggaaatggcgttaggataaagaagctaacaataacaaacaaaatatagctaacacccatgattaatcccgcagaaaggaaaatagtagcgtgtttttcttgacgtagtttctgatttcaaaatatgagacgaaaatcaagagtgtttgacttgttggatattgacattatcttttttgtttttggttcattttggactcaatgttttcattctcaaaagtatttctttgcgctgtttggacataggtgaagtcactgctgtctg

SEQ ID NO: 85110 - DNA, 878 bp, Citrus clementina
  Intron number 1 from transcript clementine0.9_003916m (loc us clementine0.9_003916m.g) derived from phytozome v7.0 (c hr-ID scaffold_5; pos 4062197 to 4063074 reverse strand)
gggaaggacctattaggtcaaagaacgagctgcaggtacgtaattgtggttttgctggtatgctgtgttaaaaatcttgctgatttgtggtgaatgccaaactagtaaggtctggatcatggatattatgtgctttagtttgtggatgctggtgtgtatagtgccaaactagaattaaagattatttttcattcacaattcaatcaagtgaacctttttttaatattttattcatactcaaaaggcagacatgattatcctagtttttatttccatgctacctttttaatattaaccattggattgtttacaagttttcactgcctaccaaatgtttttgctggcatgcattttgtaaaaaggcggctgttgaggtccaatatttattgcagtttggggaggtagagaaaacggagattgtacatgatttcgtaatcattcagttcaaatatcagaagtgaaatgcaatatgcattaactttttgttgcttaagctgaagcatggacaccttgtaattgtgaaagtttaggatatgaatttgtgatttatgactattggaccttattaaagtttaggatatgaatgcatggctcatgaagactgaacaaagtcacaaactttaatttgtttgcaacttttgtatttttgacatactgttaaggaaggttacagtttatgaattctagttcttgctttagaacttctatggatggtctatttgtgcacgaaacatgcttaaacgcttttgtattttgttataaattatgatccaatgaggtgatatattgcaagtcgttggttctgtttactctatgatacttacaagttcatggtttctatgaaatgttgcaggttctacccctggtccctcaagtga

SEQ ID NO: 85111 - DNA, 335 bp, Citrus clementina
  Intron number 1 from transcript clementine0.9_028292m (loc us clementine0.9_028292m.g) derived from phytozome v7.0 (c hr-ID scaffold_51; pos 367999 to 368333 reverse strand)
tgctgtcaaaaactcagcacggaatagaaactcatgtacccttcttctgtggatcagttttttcgcaatgattatagaaatcaaatttttttttttgaaaggagaaatcaattaaacttgtcgcctcgcgtcaaattcttcaggcaaatcccacttgctccttatctataatttactagtcatattgtgcactttaaacttattagcaaaccttattaagaaggaatttcttttttgaaaaaaatgatcaaatctctttgtctgacatatatattaactctctgaatcacaaatggctagacaaagctgccattatagaatcgtcaagctctttt

SEQ ID NO: 85112 - DNA, 883 bp, Citrus clementina
  Intron number 1 from transcript clementine0.9_021204m (loc us clementine0.9_021204m.g) derived from phytozome v7.0 (c hr-ID scaffold_63; pos 474278 to 475160 reverse strand)
gcggtaacaagtaatttcttttatttaggtttttttttgggaattactgctgaatggatcataggaaatttttttttccttaaaaaaacaaaaatttaaatttagtaattgatgttgcttgtgaatattttcgaaatgacgaagcttaaggaaaattagttgaaaataggtggagttacagtgtagaaattggatctatgcatggaacaattaagtgatatgtactaggatgcacatgtactctttaatttatgaaagagagatgcgaagcaattgagatttgtaatttgccctgcttatatattgagtttttggagttgagtgcttgttgattcttgtatttgattggcttccagttgttcctggaactgtcgcattttgaaaactcttcaaagaaagtaatgttgagtggaagttgttctctgaatttggtcttttttgtcggatgttgtccaagaaacatcctcaatttgggttaacatctaacaatcattgtttttttagcaagtagctttcacaagtaattcaaatttcaccatcgttggcttgatgatgatagtactttattgtgctttagatgttggatttagtgctgcttggtagtttctgtttgttttggctagcttcagatagattcttgcattctggtattagaacagcagattatctacactactaatgtgctttttttttttcaatcgggttttatctaggcaatttatgggatataagtgaacagaaccccaaagtgaatcaagtttatttactgctgtgttgcattttgcatttcttgtaaatccacttatttgagaaagaagagttattaatctcaaggactttttctgtgatgatgatgataggactaggaggaattggaagccaa

SEQ ID NO: 85113 - DNA, 659 bp, Citrus clementina
  Intron number 1 from transcript clementine0.9_017184m (loc us clementine0.9_017184m.g) derived from phytozome v7.0 (c hr-ID scaffold_1; pos 11352410 to 11353068)
aacggtaacaagcaaaagaaaaggtcaataatacgaaatattgtcccaagattacaagaaaaatactaattaccgccatgaatgttagtaaagctgctaaggcatcatttgattgcgatttgatttgatgtacctagtgcataatttagtacgaatacatgtacaaagagagggacaaaaaaggaaaaaaaaaattgatcccaatcgatgatcatgatgatcatgatcacacattcacatcacacgattgattcattcatgatatgattctttgcgtgatgtggcatccaaaccaatcccgtttagcttatacaccgaatctccaatttgtgtctggcccattttgtttatatttttccatattcgataaatttccttccgtcttctattctatatttatatctatcatcatctactctcttttctaaaataatataaatatgtatattgaataaaatatcttcgaacaaacagataaagaatacgtatttaccggcccacaccgagctaacctcaattatgaattcctttctaggcaaacaaaacagcttgatattaatacaattgtcttttcacgcacgcgacagagaaaatgatatccacctcaacttaaattaaattaaaccgcattatgtgtatatctacttcgatataaatag

SEQ ID NO: 85114 - DNA, 652 bp, Citrus clementina
  Intron number 1 from transcript clementine0.9_002224m (loc us clementine0.9_002224m.g) derived from phytozome v7.0 (c hr-ID scaffold_29; pos 473901 to 474552 reverse strand)
ctgttcggttctttgatcgcagggtcagttcattctataagttaaattggttgttattattggttttatagattgacgattgtaaatttgttctatatagtgtgtgcgtgtgttccaactaatgcttgtaatttttgtgacgttgctctatttttaaaagaaattaatctgggaggtttcttatgatatgaattttttgcattctttctaaaaagttgtccatttggaaaatggatgtcctttcttgccattttcattcacagaatttctattttaccaactgaaacactaagaacaagtttttctaaaagaaaccaaagaagaccttgatgttaagaattgcttaatcattagattgttgaataagatgtttgccattttaattggtttatctcttgaaggattttggtaatactaatttatgttatgcataatatttaattggagtaatgctgcatattgctcatcttcactttacatttcttttatcaactgtattttgaatttcatctcatggtttataagcattcttcttagtctgacagagttttgttgttttatttttctttctttcccacatataattttctaagttatcatgtttaatggtgtttctctattttcttaaatatgcaggactactatactgctc

SEQ ID NO: 85115 - DNA, 531 bp, Citrus clementina; identical to SEQ ID NO: 81522
  Intron number 1 from transcript clementine0.9_006641m (loc us clementine0.9_006641m.g) derived from phytozome v7.0 (c hr-ID scaffold_1; pos 10660595 to 10661125)

SEQ ID NO: 85116 - DNA, 756 bp, Citrus clementina
  Intron number 4 from transcript clementine0.9_013705m (loc us clementine0.9_013705m.g) derived from phytozome v7.0 (c hr-ID scaffold_29; pos 1597678 to 1598433)
gggccactgggcacattttattgctggagctgttggtaagctgttgtcgatttgcctttcctttctaactcatcccataatgcatgtttgaatttgttgcaaatatgttatggacaagagtgtactaagagaattgtcaaatgattagtatctgctgtaattctcatcctatgagattctgcatgtcattccaatgagtgacaatcatgtcgaaattagatcgcagtcaagcataaatctgcattcatttcgtgaatttgccctggaatttgcaaggttttatgttaaccatatacttatgaacttgtatatacttttattaatttctaacatgtacgcttggtgttgtgttatttgttgcaccacatttatgtgaagttgagggtgcagagtggtcttgttctgtgagacttctttctctcaattcatggcctattattattgtcttagattcttgttgctgcatctgtttctgcatatgtactgactttgcattatgaggggttgatcttttttttccaatctatttttttatatggggtcttctaatatagatcatcctagtgcatattcacattaaaataatgttactgatttatatttgttatgtgatgccaatgcggtagcccttgtagtgcattggattggcaattgagaatatatggacttgctggccactggtatgcctcagaagactcaagattttcttttcttgttctccattcttttcaggtgacactcttggttcttttgtgt

SEQ ID NO: 85117 - DNA, 687 bp, Citrus clementina
  Intron number 1 from transcript clementine0.9_007463m (loc us clementine0.9_007463m.g) derived from phytozome v7.0 (c hr-ID scaffold_10; pos 2698853 to 2699539)
cagagtgagggaagaaaagagccttgaggtaagtaatcaccgccgttgatctttgtaaagtttagaggattcaaaaaaggccttcggtctccttgaccattacgagccccgcgttcacacacgtggaattccggtcgagtaaatattccactttgtggaggcaatcgtatgcccacgtcacgagctctcatcctttttacataaatacccttccctaattcaaatttagcccttttattggagtttcaaaaaacgaaaaactccaataaaaagctaaattaccaaaaaatgctaaattttaatttctatttttgacataaaaaagttataaatgtaagtaatattgacccatatttctctagggtttttctaatatatctcacacgacacccttagttcactcaacaaacacgaacacaaattaaaccgtaacttgaaaagaacagttagggcaaaaaaggcaaacgacgatggcatttcgggaagccagaatttggtaacacgtagccgtaaatatcagagtaggggaattatcaccaggacaaagtagcgtgcgggtgagaaagaagaaatagcgagaaatgattgtaatgggccagctgacgtggaaaaagacgagtgggtaaagaaggcaggcaacaataagagagagagagagagagagagagagaacacaaacaaacacca

SEQ ID NO: 85118 - DNA, 730 bp, Citrus clementina
  Intron number 3 from transcript clementine0.9_024100m (loc us clementine0.9_023250m.g) derived from phytozome v7.0 (c hr-ID scaffold_120; pos 115402 to 116131)
ggtaaagggaaaattgctgcccagtgcaggtaactattgtttttactctttagatcaaattttgtgtttattcttgtctttcttggtacaagctttgtacatttatatctaatatttttaactattaggtgtcatgggagattagcatccatcaaccccccaccctatcatcagatgcttcatatcttacgtgcctgcttgaaaatgttatcactgtttaattaattctttaatcaatgaaattaaaattctttatttgtagcatagaagatgctactgtttgtgataattggaagaagtgccaattaggctgcaaattgtgtgagtagaactgttaagaaaagaagttggcctccttactggcaagtaatcctctcttgattttattgggaagaaaagggaaggagagttgggggggaggactgaggaggtttcactagtgtgctagtgtggcaaatacattgaccttgatgatccttaattgtcatattattttagatttttttactattaaactgcttttttgctttgattaactatccaaatctgtcccttctttggatagtcatgcaactttaggtctctataaaaaggtcctctatcgggctccaaaagctttaaacaggtacagccgcactctaatctggatttatagcacactctgaaatatgtattttgctttcttattcttgctcttttttattaaattttgtcaatacacaggtgggag

SEQ ID NO: 85119 - DNA, 626 bp, Citrus clementina
  Intron number 1 from transcript clementine0.9_008002m (loc us clementine0.9_008002m.g) derived from phytozome v7.0 (c hr-ID scaffold_49; pos 1194499 to 1195124)
ttgtgcctccttctcttgttatcaccgccgactcggtaaaattctttctagtcctcctcctcttaaaacatggagtaaactgttagctggatactcggtcatgatttccattctttgaccatgtgtattagttagtgagtcctgtggtgtatatggcattagggtatgcttgaaattgaagtgctgtggcttttaagtgacaattgctgtgaaatggaagtgcttggttaactttagctgctaagtaaaaggaggtgtttactgaacattttggcaattgtgcttcaaaactaagcaaattaaatcatgatttggtacattagcaatttgagaaaaagcaaattacattttttgcaattaatgaaacctgtgatgcttcaactgattttgtggtagattataacttactggagcttaagatttgtgttttcatatagtgcacagagcaaaacagcttatgaatcagtttatcatctagttatgatggctgtagttccctagttatgggatcttttcttagttttctgctttagtgattcttcaaagttattctgctgtctatgtataaagtttgactttgtgggggtgataatttctctctctccatggcattttggatgatagaa

SEQ ID NO: 85120 - DNA, 541 bp, Citrus clementina
  Intron number 1 from transcript clementine0.9_024960m (loc us clementine0.9_024960m.g) derived from phytozome v7.0 (c hr-ID scaffold_1; pos 7822710 to 7823250)
acctctctgccgtgcttgagtacctcgctgctgaggtttgtttgtttgttttattattgcctgataatgaaattagggtttgattgaattgaactttgaatttgtgaaatttgcttctcattggtaaatattttattttttaaaggtgtcttaaatcatttcttcatgaaaacaaatacaacaggaattatgttttttggattattttattcttaagtacggctgtttacttgttgaatacttcaaatgtcagttttttttttcaaaattgtttcttggaaattgattattattttttttaattttttaaatgggtcttaaacatttcttcatcaaaacaaatagaactgggattatataattagattaatttattcttaagcactgatggtgaagaagaattaaagctgtttgcttattgatacttcaaaaattgtttcttgaaactgattaaatggttcaagattgtgatttttccagtcttgtaatatgggaaatgattttatgtgtttcaatctacaggttctggagcttgctggca

SEQ ID NO: 85121 - DNA, 1001 bp, Citrus clementina
  Intron number 1 from transcript clementine0.9_016047m (loc us clementine0.9_016047m.g) derived from phytozome v7.0 (c hr-ID scaffold_27; pos 360494 to 361494 reverse strand)
gcttcattgtaatcgctcctcaggtaagctatcctaattaaccctttgtacgggcatatgttatgcaattgtgtcatgtttatcgaacttttgatcatagttacatgcatctatatatgattggtgctaatctaacttacatgatgggggtatagtactaattgcttatagagtgcaaacaggggatgctcattggtttgcatttgagaggaatttctattttagtagcataacaaatatatctgaaccgaactctttgaatgtttgattttcatgcgaatttatttgtgtatttgagagtttagggctattaaaaatttatggatgtacttgagttgtataattgtgattaatacgcaagtctaaattaatgttcctttttaactctgatgctgatattagataaggtgattgccagcacagacacatttcgttgcttgtagagagtgaatgaagtagctggaaggctccattttcttgtcaaaatactgttctgtatttttttgtttcttttttcttggaggtccacactgtccttgtcaatttttacataataaaagaagcaactaaagtggaattagtcagctgttcacattcaaatgtcataaaaagaaacggcagttaattcactcaattcattttgctgctgacttagccaattaattatgagaccgacaaatagagaatgcaaaatctacatgccataacccattttaatttcctctaattactagttttaactaatacatagacttgtagttgttgtaacatagtgtttagctctgtccattaacaaagaaattgagctctgatgacgggttttggaaagaaacaaactgatatcctctaattgaactctctagctagtttttgttttacatttttggatttgaccagattagagaaatgggtagaaagaaagaatttaaaattgaaaagtgacactatttcgtgtttggctcatggaagtatttttcttctttgccttcaatagttataca

SEQ ID NO: 85122 - DNA, 705 bp, Citrus clementina
  Intron number 1 from transcript clementine0.9_020213m (loc us clementine0.9_020213m.g) derived from phytozome v7.0 (c hr-ID scaffold_29; pos 543097 to 543801)
caccatcaccacaagcagttcaaaggccttgcaaggtaaatactttgagtctttttaaattcgttctttaagttgggtgcagaaattgaatgggtatacataaaaattgaatgagtttgctgtagaaattgcatgaagaaattatttatgttgtaattcgggttaaatggaatatatgtggggtaaatttgggtagcataaatgcaaatgcatgtgggttttgatttaatttttctttttcctaggttgattacaagttattaaataataatttttaggttatttgtccatttattgcttgattttgttttttattgtaaaccttgaagacttgaactatttgccgcttctagatgtaattttctaacaagtcttgaaaataagttctgtaataaaatgttgatacataattatgcctggcaagtatttgacagaatgtctgaaaggatcaaacctgttgaaaagttgattaaagagagtgacaatgatgttgagatagctgaaaagattagggatcttggcatggccaagcaaatgcaatggaataataataataataatgaaaatcaaggatccaaggcatgggaggaatttttaattttcttttctttagatactgattctattttcaagccatatttgttcttagttttcagtactatttatttatttgtttctttttggtttttttttcttaaggtaata

SEQ ID NO: 85123 - DNA, 457 bp, Citrus clementina
  Intron number 2 from transcript clementine0.9_020213m (loc us clementine0.9_020213m.g) derived from phytozome v7.0 (c hr-ID scaffold_29; pos 543805 to 544261)
agcaaaggctatagagaatatatattttgaggttggcattttagtctataattaatgtttgtttgttcctttattacagtaaagtttgttggttttgggatatatgaaaaatagattccaagagatgaggagacattttttttctaattaggtggacttgaaactcaagtattaaaggaccaaaattattgactttagttatgtagttgcatgtagttgggggagaagagttttggaaatgtaaatttggagttcagaattcttgtacgaaatgcttcccttagagaaaatagggaactcaaaattgacatagaatgtgtttttatttatacatgcttaacttgtattttaatgtcatttgtatttttgaagttcatttctgattttttagattcttgaatgtctaggtaatcatcatgaataaacttacgttaatataatttcccacttgtgctag

SEQ ID NO: 85124 - DNA, 946 bp, Citrus clementina
  Intron number 1 from transcript clementine0.9_007672m (loc us clementine0.9_007672m.g) derived from phytozome v7.0 (c hr-ID scaffold_27; pos 1849998 to 1850943)
tttggtctctcttactcatctttgttcccgttgaggtcagtttatttgcagtttctgctctctctgctccctttttttggggattttttttttcttttcaatgattattatgttaaaaaatataatcttgaatacgggcttttagtgttttttttttatctttatttattgaagctcgatgaaagagatcaaagttgaagttctctttgcagttttgcatgcaaggctttgaaatgagagattgtttttggagaagaactgttcataaattttgagcacatccggcttttctatgtgccaattcttataccaaatatttggtgtatttttagttctaaaatttgagacttttgttacacagaaaaccctttctttgcctcgtgttaaagcattatattgtgattttagctatgtgttattaaaagcttgggattaacctctgtgattgcttcccctgctattccaagttcaggtatttagagttgtttagagccctgatcaaattaattcctctgaattttttttttccggttatttccaatgaaacttaaactgttacacgcttacactgctgaaatttttgttgctaattgagagagagtggagggactgtaaataattgggttatcaacactttattggattattattattttaataacactttattgacccatgacttgctttaaccctatcttatcattgtcaccgaccacattgtcaatgacttaatggtcctcacttggactctttaatgagttcgtatgcttgtggaaaagcctggccctcttttttgtcttcctctcttttgacctgtttttttattttattctttttcttaattttgtttgttgcagcataacaatcacaagtcatgtgtttcttttaattgtaaaatagttttttttcagggaaacaatcaagctcagtgccaaagcttgtgaca

SEQ ID NO: 85125 - DNA, 793 bp, Citrus clementina
  Intron number 1 from transcript clementine0.9_027340m (loc us clementine0.9_027340m.g) derived from phytozome v7.0 (c hr-ID scaffold_33; pos 902955 to 903747 reverse strand)
cagcacagactgatttaagaaaatattcaggtttctaattttttttttttaatctaatgctttgtgatttgctttgtattcggagggttaattcatgttcatcaagtgttttgcctagaatcgagcatttagtgttttctgaggccttttaatattttcctgcatttccatggatttgatgctgagatgtctaccaatcatgtgtctagagtctattagagccgacggagtagttttttgggggaaggccttacctctgggagacgcagacgctgagatagtatgcttatcattttttaatgggacctatttatatctttaattgtatgcttagattcaccatgatgatgcaaaaatacaaaaacatattgtacactttccaagtattaactttgtcgttttcgtattctctgccttttctggtagtatttggaaaatgaccctgaaattacgattcctatggaggaattggacatgctgagtattgttttggggtataaagctagttactgttacatgacagctactgaggtatatgtatatctaggactgttatttacatgttgactttttaattccccgtgtgatccaatttcagcattatgcctcttcagacacatgtttgagcgcttttaaggctcgactcgatgcaagcactgtcttaagaggatttttgagctattattctgagcctaatacttttatccctttgtttgaaagctgattgaatcctaagcgttgatgtggtttgatttcaggcttctgcctctattatcacctatccagttaataa

SEQ ID NO: 85126 - DNA, 562 bp, Citrus clementina
  Intron number 2 from transcript clementine0.9_001106m (loc us clementine0.9_001106m.g) derived from phytozome v7.0 (c hr-ID scaffold_82; pos 239273 to 239834)
ggcggatttggaatctggctcgcaagaagaaacaggtttttgttttgattttgctagtcttttcaattcttcttcttgctttttttccgcttagttttagctattcacattgtagtttaaacgttgaaatttaattttgagaatttgttctgttttgttgctgtgcttcgtatcgtacggattttcacatccgttattggatcacgtaagaatcctcaggtgcaggtgcagatgttcgtattctcaaggatcacatgcaatttgtgcaatttctaacgaagttaaataataaatcggagatgacggccaattgcatactagttcgctttatttcgcttagtttatgctctgttttcactattattatttttttaataatctcattttagcatgacagtgtgaatgtggcacatagtttcaattttttttttccccacagatatatgtgtttttcaaatactcaattgtttttcaattatttatagatttgttaacttgattctacttctctttcaactcaaatatagattgaaggagaggaagctcagcgtaaagctaaacg

SEQ ID NO: 85127 - DNA, 308 bp, Citrus clementina
  Intron number 1 from transcript clementine0.9_025912m (loc us clementine0.9_025912m.g) derived from phytozome v7.0 (c hr-ID scaffold_33; pos 1718251 to 1718558 reverse strand)
ctatagtaagtttttttttttcttttcctttctaattcttttcctcaatttctttgtattttgaattttcctgttggggaattttttttttataacaattttacttttgtatttgaatagtagatttgttaagataactgtttttactttgtaagtattacattaagagggaaattagtgacaaataatgtacaaatttacatttattaaagtacgaattcattcaagccggaaagtaaaatatatatgcgaagggtaatttttatttttatttttgggttggttgggaaagcaggaggtggctgcag

SEQ ID NO: 85128 - DNA, 771 bp, Citrus clementina
  Intron number 1 from transcript clementine0.9_014703m (loc us clementine0.9_014703m.g) derived from phytozome v7.0 (c hr-ID scaffold_1; pos 12152484 to 12153254 reverse strand)
cggtttcttcgctcggttcccgtctatataagtaggtgcaatctcgcctctccattttctccaaattaatttactttcttattgcattttgcttttaatcaatttcttgtttctgggttgttgcgtttttctcttctttgatcatgtatgttttgttccatgtatttgatttgtttatatcttgtgtcttatgatattgattgatttttttcatatttatgagtacttgctctttaattattgcatctttgaatttcgttaattgaataaaacatatggggcatttctggactttgagcttctgatggttgtcttcaatttggatctgtatatctttgattctctgtttataaccggttttttgcatttttttttctttttttgggtggcggggaaatctgtttatttgttaaagcatgatgtttttaaatggtaatcatgttttggaatttgtagcataccacatgcatgtttaaattttataggagctttttgtgcttaatgcaaacgttgttgaatgtagatgcaaagataccgtttataatgtgattgtgaccttgtttgctcggcatttatttaattttaccttttccttttcttaattcaccttcttttcttttgttagaccatgaaaaagatatttctgatgctcatatgctgcttgagttaacactgattgctctataatgtttttccattttactgcttgaaatttactttattatttgctgcaatgtaaattgtaatctgtctgtatatttggttttcaga

SEQ ID NO: 85129 - DNA, 710 bp, Citrus clementina
  Intron number 1 from transcript clementine0.9_028610m (loc us clementine0.9_028610m.g) derived from phytozome v7.0 (c hr-ID scaffold_38; pos 1434722 to 1435431)
ttcttgaaaaaggcgctgtcattttaggctctcaggtattaaaataatctctctctctttctttttttatcatcattattattaatttattattttgagtgattatataataagatacaaatatgaatgagatgaccgaaaatatgaaacgttaaactcgtaatgaaacgtcaaagtgatgatgtgaatggatgacaataggattttgttagctttttttcttttttcttttttcagcatattttagtctatttgaaatttgagagatgaaaagggtttgaaaaggtgaaatgaagaatttaatttgacggggcgtcaaatattttaatgtgtatttggtttggtcacggttcttatgctcattttgtcctttttgccactttttttctttaaatttaaagacatagaaggttggtgtgctctgattttatttgtgttcatatttaaggtcgaattagcgggacccaccataataatgtattaaatttgttactattctttagtatgaatgtgtatgtaatgtgtgtgtgtctgtatgtatgcatacaaaggatttggttatgtgactagctgtccatcattatgtaagtgatcaagtttatggttccctgtgttcaaaagaagaaaatgtttatggttccatggctcagcttataaataattttgttttgtttagtttctaatttgtttctttctatttttaacaggac

SEQ ID NO: 85130 - DNA, 992 bp, Citrus clementina
  Intron number 3 from transcript clementine0.9_015146m (loc us clementine0.9_015146m.g) derived from phytozome v7.0 (c hr-ID scaffold_133; pos 448866 to 449857 reverse strand)
aggtacattatttcacatgattttaactaccaacaatgcatggcaattttgacaatttatagttaaaaatttcaaatcaattatcatatatatacacacgttaacattttggttcgtgttagtgtattaagtctgcatcatcattcacatttgaaaaaaatcaagaaaatatatatatattttattgattatgttaataaagagattaaagggaataattgtttttttagttaattttgaaaagaaacgtttccaattaatagatccgaaacatataaaatgccgtactcatttttaacttagtatcatatcatattacactttcacattttcaactgtaaatctctttattaattaattttgattcttttttgaccaatcaaaatgttttatttatttatttaattataattaccatacactccactacatttaaactaaaaaattggaagaaacaccagaagaaaaaaatgtttattacaacaagaaatttcttctagaggccgaccaattagactattcatttgaagtgcgataaattttgaattacttctctcgtaaattgactattttcaaatggtatctcttacttttgaatacctcaaattactcttatatttagtcaaaatataagaaaaaaaatggggtggattgatgatttttttttttaaaagtattaacaaaaatggagataattgaagtttttttaaaacaaaagggacgatttgaagatagttaattcaccaaaggaataatttaaaattaacatttgaaataatccacaaaaatattggatggtgggaatggctttcttttgacattataaatgtccctcaaattaagtgcatgaatcctaagcaaacaaaatgtgatgcacaattttggactacttagtgtcacatcatattgcacttgccctgtgttacatatgtaccgtcacataaaatatgatgttgatttattttatttttgtatgtagaattgtgtgataa

SEQ ID NO: 85131 - DNA, 963 bp, Citrus clementina
  Intron number 2 from transcript clementine0.9_031285m (loc us clementine0.9_031285m.g) derived from phytozome v7.0 (c hr-ID scaffold_63; pos 44320 to 45282)
tgacaacgtaagaatggattttctcaaatgctactttttgctttttcttgtgatttttagattttgattctgggcattgtgttctatatttctttattaatattgatgctgcattagtactttgctcccacatttgtgcttgttcaggtggggaaagtgcaataataaggacttttatgcctcattttgttgatgagaagtaatacaacagcctatgccacatgaagaaacttgagaaagctagatactgaccaagataatggccatgataaatattattttttcaaaaacaaaaaaaaatttcatgccttttttccttagtttcatttattcaaaacacttgaaggttgattgacgtctgctgaaaggatttcagaagttggctgcttaataaatataattgacatgtcaattatattatcatccataatatcttttcccgctgtcaattatattatcatccataatatcttttcccgcttggttggttttgttttgctagagagtttataatctgacaaggtaaaaataaagtattcatgttttgctcctcatggatcgcttgatttgaagttaaatttcaatctcacttttttgttatcttttgttattaacctcacatctgtagttgcaaataccttaaatgataaactatgaataagtcaggagttatgcaagcatctggtagtaacgactgctgtctccctaaatattatttccttgtttgacattagatttttctcagttgtctgcatgctttctggtttgatttgcataggctggttcgccaaggtacatgatgactacatatggtcatccttttgggtatttaaatattttgatgtctcttgttaaatgaatccattgttttcaaatggagggggcatgttattataaatatatggtttcaactttcataattgtttagctcttacttctcttttctgtgtttaggtgctcaaa

SEQ ID NO: 85132 - DNA, 1006 bp, Citrus clementina
  Intron number 2 from transcript clementine0.9_030029m (loc us clementine0.9_030029m.g) derived from phytozome v7.0 (c hr-ID scaffold_107; pos 135897 to 136902)
cagaagaacaaaagcagggcacgggaaaattacaagtaaagattcccaaatcaaagctagaaacggccttgtggataccaaatttttttttgactttctaccaccatggtgctgctcctaagaaagctaataccgagggggttatgcatgagtaccatgtcaaggaccacccaagttataaggcatgagctttgttctttggatgtagagatggcaaaactccgggccgggtccgggtattgccatgaccggaccctgcccggatgcaaccggtccgggtctgggtccgggccgggttttaatccgggtattcggattttatattttttaatattttatgtgtatatattttttattttttgataattttataagttttaaatttatttcaataaaatttgacatgaaaatataaactttaagtgtttaaaactttatatatgtataataaataagtcaaataaatataaaatatttaaaataatatatattttataattttttttaataaaatccgggttccgggtttatcaagtgatgcccacgaccgacccgacttcatacccggaccgagtaatacccggcccgcaacacccgggtacggtccgggtccggaccggacgggtatttttgccatctctatttggatgtgagctctgttatatgaatcttattagtattattactatgaactcgtgtattccttgaagctcgaaccgaggtcctgagtcctaaaaaagtagcttcttaccattgaagtcggaccctggcttcgcatgttttgtgaatctttcaaagcttttaatctgataaaatgctgtgtaataaaatatatgttgcatgccaattagttgttggagatataataggattaattaaccaggcaaagtcttaaaatttctttcatttcttttgatctggacagtaggcacgatggccatttagagtatataactttgttgcctattgctaaactgttgttttgtttcttctagaagtttgctga

SEQ ID NO: 85133 - DNA, 1019 bp, Citrus clementina
  Intron number 1 from transcript clementine0.9_029083m (loc us clementine0.9_029083m.g) derived from phytozome v7.0 (c hr-ID scaffold_33; pos 275968 to 276986)
atttgggtcgggctaggcctgaccctaactaaatagtgttcgggtttttttagggttgggtttcaattttttttttatcgggtcgggtaaggcttggccaagcccgagcccaacccgaccttttgccattcttaaaaataacaacttattcatgcataatgctttcgtttctgtccatgcaatgtcatcgtcatcttgtattcttattattcaaatatcatttttctattttaagtcagaagttggctacctccccatttggccttataacagtttggtgccataaaaattaaaatataatattttaatctcgattattagttagcagttgatttcaaaagtttgactctctgttgacttttgaaaagacaatatttccttctaaccgcaagatcacgtggtcaaattcttaatggccatttttatcaacatttgtttatcattggtgagccaccaaaaattttaaattatcatttgtcaattgagaggtgtggatagtgagaaagtgggcatagacgcgaagtgcttttcttgcactttaaagcattgcaaagactttccaggaactgaaatatatgtttcaaattgaggttaacgaaaatggaagaacatttaattaatacactattatttttgcaaaataaaagttaagtgaatatagtgatcgtggctcttgattgtagccctattttgttgcagatcatgttgttaatctagacaatcaaacataggtgcctctctatttgtacatgtgatcctactgtgatttctcatgtaacattcttcaaaataatgaaatatacagtgtgctaaacgcaccctaaatgcttcaggttgcattattgtgggcttggaatgttgttactagtgacaaaaacattgtggttgtgaaaatttgtgaaaagaagaagggaaatcaaactcaactaaaaagttctttaagagaaatgatggtttgttagtgtaactatagttgtcttccagtaaaggtaatattgcgaagacaaaattatttactt

SEQ ID NO: 85134 - DNA, 742 bp, Citrus clementina; identical to SEQ ID NO: 84396
  Intron number 1 from transcript clementine0.9_017646m (loc us clementine0.9_017647m.g) derived from phytozome v7.0 (c hr-ID scaffold_1; pos 6192400 to 6193141)

SEQ ID NO: 85135 - DNA, 613 bp, Citrus clementina
  Intron number 1 from transcript clementine0.9_018424m (loc us clementine0.9_018424m.g) derived from phytozome v7.0 (c hr-ID scaffold_20; pos 3585541 to 3586153 reverse strand)
acgccttgttttcattccagtgggatcaatctcaggtgatctttttggttttcgttactgaaacctagcacgtttctttttgtttgatttcagtaagattttaaccttaactactgttgatgcattaaatgttaattaagggatgagtgtagaactaagtgtagtataaaaaagtttgtaataggatcaaaaccctaaattattttccttcaactatatttacagtgcaatcaatttagtatgggaagttgaaaaattgaaaatggtattgtattggaagtagttttcttgtttttggtagcaagatctgctttcaagtagccgatttagtgtttcctttcttctgaacaagttaggggttggttttaaatgaattgttataatttgttcctaatgtattagaattggttcaagggtttggtataacgttaaggataattttttcactattcaacagggttaataattcctaatttaatcaataaaattactctgccatggaatccccttggcgcttttagctattttgttcagctatcttgtgttattaatgtggtggtctgtgaggtgaaaaactaatatgctaattgacataggttgaagaaagtttaaa

SEQ ID NO: 85136 - DNA, 568 bp, Citrus clementina
  Intron number 1 from transcript clementine0.9_032380m (loc us clementine0.9_032380m.g) derived from phytozome v7.0 (c hr-ID scaffold_23; pos 2500963 to 2501530 reverse strand)
cgttcgccgcctcttcgaattccttgtccagtttggtatttatttccattcttcttcttttcatcttcatataaatataactactatgagccgatcgtttgagataatagtggaccgtttgaaacttcttaatatccatttcgtattcagatcagatggttacaaaatttatgcccttaataattaaatttgttttatcaagattagggctagatgtcgattggaaaaaaaaaatctgaaattttgaccattgatttacgttttcagaaatgttgaggcacaacttaagcttgtaatgttcttgcatgtttctgcacattactggaatctaatttacttacatgaagcaacatataaagtttgttcgctcattaaatccacattgagtaactttgagttgtaatttgagtcactttggaagttactctgtctgttctcatttgatcttcaaggcggtatttgattttgtgcatgtgttaaagtgagtttgatttgacttttacttattggaccattgtttgatgctaatttagaggctacaacaaagagcaaattggcgttgttgaat

SEQ ID NO: 85137 - DNA, 691 bp, Citrus clementina
  Intron number 1 from transcript clementine0.9_018593m (loc us clementine0.9_018593m.g) derived from phytozome v7.0 (c hr-ID scaffold_23; pos 1519293 to 1519983 reverse strand)
atctccggctctcctaggtaacctaccaagctcgccctattcacctccccgtatatcattttcagaccaatcatttttttagttctagaacttgtggtttgcttagttgaaatcttccgtttaagttaatctaatggggtatctttaaatatttaattaatttatcgtcttccaatactactactcataaattatagtttttcatgtaccttattgatcaaagaacagatggtacgtccttttcagcaaccagtagaacttgttaattgttttatctttatgtcactttagtattttccttttttttttcctaattttgtttcaccctctgatggcttaaacacgatcagtagttttaactttgaagttgttaaatattcctagtttgaaattgacaaacgataattatatataataaacccctggcttgtagcttgaaattttctaattaattattggtcacacatcagaggtttttgacaagagacaatttttaatttgagtgagtttattcataattggaaagctttgtgataacttatacgagaacttttaccaattgaaagaataaggttgaacagaagttcctaacagtaaaagtaatcattaattaattcatcaactagagacaaattgttcacctatgattttgatgggcattcttttcactggtttattgataggtatctca

SEQ ID NO: 85138 - DNA, 1000 bp, Citrus clementina
  Intron number 1 from transcript clementine0.9_031407m (loc us clementine0.9_031407m.g) derived from phytozome v7.0 (c hr-ID scaffold_1; pos 8974158 to 8975157 reverse strand)
acaggtacccactatcaataatttatggttgtatatttataaacatttgattaattttacaagaaagttttgaatatatatagtattgtacggatgacctcttatgtcacaagttggttaattgagaatgaccacgacaagaaattaaatcctatctaaactttatgttaagtaattattttctgaagattttcctttttacgtaatagtatcattaattagaataagtctttggtgaattgttcctaccactaaaaattgttgtgatggtataagaaacttgagagtcaaactttactctcatggtcttacataaaaatgggtagagaatttaatttctttagatacttaaacaaaaaaaaaaatgttcttgtatttacggtccaaattaaaattatgcatctagctaacatgaaacattacctatttttgtattgagtccactctagtcgttgggagtattatatgtttcatgatctgtcttacccgttttattttcacacacataagatgatcaaatttatattttcctcatcctccatatctttgatgttgtattgtccttattacatatatgatcgcaacaagataatatgttgttgcatcaatggcatttgttcgcataattacgtagggtcactatcttaaactttattttaattaaagatcaggatcctcttatcgtgatacttctcttaagtgaattttatttaaagtgacacaagatttttaaaagttcaaaagagaattatattccattaaataatcgtctttgataacggatttaaataatatcctcatcaggctcaaatcatatatatctgaatcagtaagcaattaagcatgatccattgaaaatagttattaatcagattcagctcttttgtcgttgtccttcgaattttatataatttgcggtaaaaattttaatccttaatattgtcctaccggagcttaatatataggttttggaggctctcagttcccaccggagctactc

SEQ ID NO: 85139 - DNA, 770 bp, Citrus clementina; identical to SEQ ID NO: 83794
  Intron number 2 from transcript clementine0.9_010248m (loc us clementine0.9_010248m.g) derived from phytozome v7.0 (c hr-ID scaffold_20; pos 313906 to 314675 reverse strand)

SEQ ID NO: 85140 - DNA, 896 bp, Citrus clementina
  Intron number 1 from transcript clementine0.9_026600m (loc us clementine0.9_026262m.g) derived from phytozome v7.0 (c hr-ID scaffold_63; pos 932664 to 933559 reverse strand)
ccttgctcttgacgctatcatcgctatcttcagtaattaatcgtcttctctttcgtttaattagcatgaactgcaatagtacaactttacaggttcttaatttctagtatgtctcgtaagcgagggttttgtttctcttccttctttcgaacttcgaagttagggttctagtttttttttttagcttcgctaggatcatatcttttaattgcaccaaaaaaaaaaaagaattctatgaggtgatattggcgtttgtctgagctgttcttgaggtactgtgttttgactggagttgacttttttttttttttttttgggcggggaaatgactcaccgttttgtcttgaattgaactgatttgtggtacaagttatagcttcatttgtatttgaacgactggaggaatgaaattgttaaaggattttgttgttgacattgaaacttgacaaatagattggggttaccatttacgattgaagcgtgtggttgatgttgcaccgataatctcttgattttgttataagcaacttttttttttgccccaagtctctgaaagaatgcaactttgtgctagatactgtaattgagcatcactctagtgtttggttacttttcctaaaattaataaccatatgccactgggaaaaggggaaccctgggaagttcattagctaccttgcagatgcattttgcggcttctccctattttttatcagaaaatctgtgaaatactcttattattttattcaactctttgtgatgtttttgagattgtagtaatattgtgcctaaatctcgtttgtgttctaaccttttgactttatattcatgtgtaggctaataggcacaccattattctgatgcagacttctccaagcagagcaacaagaaccttc

SEQ ID NO: 85141 - DNA, 701 bp, Citrus clementina
  Intron number 2 from transcript clementine0.9_006805m (loc us clementine0.9_006811m.g) derived from phytozome v7.0 (c hr-ID scaffold_1; pos 6568433 to 6569133)
aacgagtccattacagctctactgattgttagttctctaagctttacgtgtttttttctggttaatttttatacaatgaagaaagtgacaaaattgatgtcattctgatcaagtcttgttgctttcaatagggagtcaattaagatcgattagtacatgcattgatgtaggtcagtgcaagctataagtagatgcttacgctgagtgcttgcagtaggcttaaaccagtggaggttttgagacactaatgattatgtccaaaatagatcggtggttcatatatttgattgatattttacttaatttgagttgatggcaacgtgcgtatgtatacattttgttgtaattttaagtttctttctttttttttaataagtgaaaaaagaaaagagaaaagctagctattttagctgaatctaacacgcgagtggatgatcttgagaccccaaatttttagtaattactaagattgatgggttggctaacatatttgatttagaatatcaattaatatgggtttatggctgcttatgattgagtgcagtatatagcattaagattaaacaagtgggggttttgaggtcatattgaggatttttcagtttttattttattatatttttctattcttgattttgtgcattaatgatgtgggtttggtggcagggagtttgtgcaggtgtgattattttgctgacaac

SEQ ID NO: 85142 - DNA, 709 bp, Citrus clementina
  Intron number 3 from transcript clementine0.9_003881m (loc us clementine0.9_003881m.g) derived from phytozome v7.0 (c hr-ID scaffold_1; pos 11122476 to 11123184)
gttttgaaatctgctgctgctgcagttttgacaaggtatgtatttctctttacctactttttgtttttcgttttcatagttgtactcaactttgtaagcacatatagaaggctggatcaaccataaacctgtaaagttaacagctcacactcaatgcttaaatgttttctgagatattgcaccttgaattatgttcttagccatagtattgcatttgagtttcttctcaactctttactcttacttgacagattcttactctcttatatttcagtaaaggtgcctgaagcgattagttttatcctagtttaatagattctagcactgtagaatttaacgtattcagtgttgataaccagattatacaagctctagcttccttgtatgctttaggccttcaatcttcatggtaagagatgaactaccagtttaagagatatgtcatccttaaaatgcttagaccccacgtttagctactttttactggttgttcactatggataaagtcatgcaagtagattcttttgcaccttattgcagcatttcacccatgtacataaaagcatatgcacacgtgtatttctttgttctcatctaatcgaaagaaatctctctttcttgccttttatttttgtgtggctatgtacatataccatatcttattgaatgcatgattagtattaaatctctctttcaaatttcaggtcat

SEQ ID NO: 85143 - DNA, 1032 bp, Citrus clementina
  Intron number 1 from transcript clementine0.9_028135m (loc us clementine0.9_028135m.g) derived from phytozome v7.0 (c hr-ID scaffold_1; pos 8215556 to 8216587)
ttgctgaaattcagagatcagatcaggaatttactgtaagaacttacatccctcaattttaagtgcagggttctgctgtttgacaagaaattgttttcttcagatgggtttaattttgttattgagttcttattttcatttggtaatatcatgtgtctgattgttagtgggttgcattagattttttatttttccttctattttcctttttaattctttcatgtgtgacccagttaattctcagaattgtaggatgaaattccctcattaatcgtttagatgattgttaataaattctcatattgagagcaattgttgaggggaggaaattttcaatcaaaacttttgaatgtctgacttttgctttgtcgaaattaaaatttttttatgcttttcaagggcggtcgtgattaagaaagaagttggctcttaattctctattctaatggatgtatcatttgcacgtgaatgcaactttactgtatcttcaaactatgaccaacttaaactctgctgacaggttcaagaaaacaaatggaagtaatgagccagagcctggcaccttgatttggcttctctttattggcatgctatgtactgtttgaccaaccgtacctggcaatattggttcatcaccgtcctagcaagagactgagggatgtaacacaagttgatcatgcaatgatatttcttcctcagcttgggagtccgatgacatctgcaagcactgacaggtggtggagctttggggtagtgggacattttggatcaatggacatggaggtttctgaagaatattaaatgagtcttcatattccccaacattgacaagtcctactactagtcccaccttccccatggctatgcttttgaaaccatacatatagcgaccagttcaagctgagatgtcatgcttttacaagaagcaacattgcatttcaattagtagatgatcatttctcagcaacttattatcattgctcttcacccctggaagagatacccgaaatctttgtccacctggagatttct

SEQ ID NO: 85144 - DNA, 746 bp, Citrus clementina
  Intron number 3 from transcript clementine0.9_019277m (loc us clementine0.9_019277m.g) derived from phytozome v7.0 (c hr-ID scaffold_27; pos 607432 to 608177)
attacaataataattgtggaactttattgtgtaaagtaatatgttcacaactctgtatgtaggaaaaaaaataatagtaataggtaaactgtagaaaataatgtgtacttcaagacacgttacaaatatcgctttccttaagacattatctggccccaccaattgagtgatgcatatggattaagcaaatatgcttataggatacaatcaaagcacttatttgtttgcttgcattgtgcatcgacgagcaagcaaacaagaatactcttgaatgttgtaaatctgctaagaaacaatatattgttcctgcagaaaacaatatattggattttttaatgcagaaaaataagagtttatgttgaaattcgttctagaaaagagggctaagaaaagagtggtgtgagatcattatttttcatctctaaatgacttaaacatgacctctatttatagacatacttgtgccccttcatttgggttgtcatcttttatgataccctttcattcatggttattggattaagatttaattttaatcaatagtccaaaattgagccatcacaatttcaaatgaaatgtcaccatgaaaaattatatccttaagtggaaaaatattttttctataagacacaattaattagatatatctttacaataaaatactatttatttagacacgtctttacaataagacaccatttattttgaaatttttttccaaacatgatgttccccttagttggcga

SEQ ID NO: 85145 - DNA, 432 bp, Citrus clementina
  Intron number 1 from transcript clementine0.9_009972m (loc us clementine0.9_009972m.g) derived from phytozome v7.0 (c hr-ID scaffold_53; pos 336811 to 337242)
ggagatcccgttgccgccgcctgcgtgcactccgggtccgccttctttgtttccttctgtttattattattgttactattatttttgctattcatttactttgttcgatcagattaaaggtctgtttctgtttgaggtgttgtgcctatacctgccgtggaattgtggaattggaatcactagtacagttgtactactttcaaaattaagctgtcgcataactctgagaacaacatacccaagatagttttttttttcaattgagtttgcttgtcgattaacaaattggagttccattggaacgaagagagagagagagagagagagagaggaatctgttacttttgtatgtttagtcagtgttgtgatttctctttatgttgattttatctaataggtgtgactacttggatataagtggggagccagagt

SEQ ID NO: 85146 - DNA, 765 bp, Citrus clementina
  Intron number 3 from transcript clementine0.9_003477m (loc us clementine0.9_003477m.g) derived from phytozome v7.0 (c hr-ID scaffold_107; pos 649675 to 650439 reverse strand)
gcacttggtggtgaaattgggaaggttgctgatatgtaatatccaaaaaccttttatatcttcttggatagtcaattcagcggctgcagccatattgtcactgcatgtgttggaaattgaatgtcagacaaatatttgcatttggacaaactctttacaaatttttattttgtctgaaagctcaaatactgcatggtataataagaatatggttgtagcccaagtttctgggaatagtagttgattttgacatgtcttgctaacatcagatgattgaggcttggaaaacaagtgaacaatctatctaacattttcataagctgtctataactacaactgcaaacttttgagaaggttcttcatctgcgctaatatttttatggcccttagacagctgcaatacttcattatcgttattttgtgtcattcatgatatagcttatagaatttctttgagcacttcatctgtttttccttctgttttttgcttacttgcgacatcagttttccggtcacatgccttattttcaagttgttgcttatgttagtactttctggtattgttttcttagtttttgttgtggtcccttatatttttctagaagaagttgaattaatttatttcaagcaactgacatgcatttttattttgtgtttttatcttgctaaaaattaacatttttgctttgtattataacaaacgtaacagtgattcgtctttgtaatttaggtgctatttacaaaagcgtgtcctcaatacctcga

SEQ ID NO: 85147 - DNA, 594 bp, Citrus clementina
  Intron number 2 from transcript clementine0.9_010961m (loc us clementine0.9_010961m.g) derived from phytozome v7.0 (c hr-ID scaffold_27; pos 925650 to 926243)
tcttcactcatgtgagttcactctgcacattttcttgtattattgatgtttcgatgtaatttaatgccattttgtttattcttgaagttgggttctgtggttctatatgttatgttgagtcttgtttgttattaggaattgattatggtgtttttgtatgttgattgtgatctgggtgtctcatgattttcgttttcatggcctcagttgattagactgtttcagattttctctgtctatgagtaatgattggactttatagatagtgatgtgttgactgttgctgttacattgttcacgattagtaatcttttttgcagcattactggcaaggagtccatgtttgtcattctatttttggaaaagttgtcatgattttatttatatttaatggttctatatgtgaaagctgattccgaagaatagtcataggaatgactatgaatggtaaaattttaaaatttttgttggcatcgcttgttggatcggttttgcatcttataaaagtgtaattatgctgaacaagttgattgatacatgcctttgaattgtacaacagtttgcaggaagtgcatatacgagaagataacagaa

SEQ ID NO: 85148 - DNA, 890 bp, Citrus clementina
  Intron number 1 from transcript clementine0.9_003128m (loc us clementine0.9_003128m.g) derived from phytozome v7.0 (c hr-ID scaffold_27; pos 2622098 to 2622987 reverse strand)
tttcccgtgataacgaagctgaaaatatcattcaggtaactcaaaacaacaacaacaataataataataataataataatgatatgatattatcatgatcttcttttaatatatacattcttttttatttattttttttgccttttttttttaaattggtgtaattacactacgccgaataactggctagtgtgtgtttgtgtgtcaggccaatagtgtgtgaaaagcaaagcggcaatattttcaggcgaaaaaagaaaaaaaattcttgtttcggcccattttttctccgatatttcgggattcatttttttaatttaatttttttccttgaaatttgatcctcgttgtttctgctgtttgcttacgtaccgccgtaccagaacactgctttctgttttttcaggtgattttctgctttcgtagctgctaaaaaatttaaagtaataacaataactggaaaatatcagcaccgtccgattgaattgggtcccaccggtagaaagaattatttgttttcgtgtagtaaatctccaccgcccgtttcaggaggtcctaaatcgtaggacaaaaaacaaatgttaaaagtatgataataacgtaaaatatattttctttgatatatatatatgtatatatcaattattaattacaaaaaaagaaaacaaacggcaaatatcacgaaactgtcgtgactagcaaaaaaaggaaagctacccacagacaattaattacaaaaaaaaaagagagagagagaaaaaacagtgaaaaagacgaaaaatgacatgcagaggcagagctcaggttgttgaaagtaaataaaaataataaataaataaatatatatatatcttaatattcttctgtacttgcaggtcaagagaaaagta

SEQ ID NO: 85149 - DNA, 607 bp, Citrus clementina
  Intron number 2 from transcript clementine0.9_007958m (loc us clementine0.9_007958m.g) derived from phytozome v7.0 (c hr-ID scaffold_1; pos 11631172 to 11631778 reverse strand)
ttcagaaggttaggtttctatacaatcatgtgttttgactatattgattattcatttcttggatatatttctgttaatcatatttgaactctttagttattgataaatgtagcgcactagatttgaaactcgtctgcaagtataatgtaatacgagtattttcttggcttaaagaactactctgaatattcgaacaggagttccaattgaactatattagatttattaagtatcttgagctaggttttgatttcttttttgttaaataaatttataaactgtttagaatgagtttattaatatgacttataaatgggtgtcagactgtttaaaacctgaactaatagtcctaatgatgcaatttaaagttcctctatttttcctgatgagacgtattagttggctagttactccattaccctaaattcaaaaccaatgtggctatgatctgaagttcataagatttgttttatgattatagctcaggagaaaaaagtactaataataagtcaaacttatgaaaaaaatatgaactggttttcttcttagttttatctaattgtcactcacagatagcaggaagttgataggcttcgtgaggaaagaa

SEQ ID NO: 85150 - DNA, 892 bp, Citrus clementina
  Intron number 1 from transcript clementine0.9_000858m (loc us clementine0.9_000858m.g) derived from phytozome v7.0 (c hr-ID scaffold_27; pos 1290017 to 1290908 reverse strand)
ttgggaacagaacagcctctggtcttcggtttcaggttcgatctgtacgacgtcgttgccaactttcgattcccttaattttaatctatccctattccttccttgttttgttttagggtttgatgttaattggggttttggggatttatttctacgatctttagtttttcgccgatgatcgttttggtctttatgggtttttttcttttatgcaattgggtttatctagataattttctttgtttgagtttttgtttgtgctacgtgtttctttatctttttaatctgaacgattgttgttgagctgggtgtttgattttataatctcatgatgttaaaaataattttctgattgattatgaggagattgggttttggtatttggattacaaatgttgaattaaatttgattgttagaaaacatattgggtgtggaagttgaagataatggtattttaaaaaaaatttgtgtgttttgtcataatttggttttggaggaattgaatatacaataataagagcattcaggtaaaactgccatattataattaattcattggaggcttttattcagataggtcctaattgatgaagaattcattgtgctaactgtaatttcctttcctgtcaccacttttttcaacggcctaatggattattgccattttgattctattctttagcttttgagacttttttgtcgtatttcatgttttggttttatacattgttaattaatgttcttttgtcgtattcggggttttggttttatacattgttaatatatgttaggttttttgttatgtgacgtgaggtttaattgctaactttgattctttttgtttggtgcgtcatagcaagtggaattgaacgagtgtggggtagggagttc

SEQ ID NO: 85151 - DNA, 566 bp, Citrus clementina; identical to SEQ ID NO: 82298
  Intron number 2 from transcript clementine0.9_030598m (loc us clementine0.9_030598m.g) derived from phytozome v7.0 (c hr-ID scaffold_29; pos 2160940 to 2161505)

SEQ ID NO: 85152 - DNA, 1025 bp, Citrus clementina
  Intron number 1 from transcript clementine0.9_023159m (loc us clementine0.9_023159m.g) derived from phytozome v7.0 (c hr-ID scaffold_1; pos 9787222 to 9788246 reverse strand)
gatctcaatcaggtgagttacataattatcatttcatagttaatttgagtcgcaatcgattcattctctaattcttttgtgatatttttcagtaggattttagatctgtgttttccgaagattttgaatatgcccatttgtttttttcccccttatgtaatcagaaattatatatagcatctgtttggttctcgggaatctgattaaagattagcaaatgcttgatacagtgttgtgcgtctcggtagtctaaagatcttatagttgtgaattatatgttgcttcaatctcaatatagtagtgaacttgttgagattaagctgggttttgtttggttgcggacaaaatttaggaatatgctcttacattttaagtctttaaagggtccgagaaagcttgaacaggcttatttatgaaggaatattttaactctttcgactgatcaaggaaattatttgcgggatactttttttctggttcttcgtgatattaatgatttcttggagatcaatttggattgtctttgaccatatgtgggcctttctgaaggtttttgctttagtttaatcagttatttgggaattaggataccgtgttgacaatgactgtctcatgcgtgattttgttatttttcattatcagtaaagagcttgtgggagcctgtgtcggtactcctatgaaatggaagagtcatttgcccttgaccctatgaattctgtcgtgagtgcaagagttttagaatctatacctttttgattaatttcaacacttcctgtaacaatgaagtttgaaatacctctctaagtgatatgcaaaagagatacatacctatggaacattgaatgtttttgctctttgaagaaaagtagaacctctcatatgactcattttgtttatgattgttagcatttaacattgggattttctagaggcaaatttaaattgcttcattgtttcttataatgaattcaattcttgttgttcctgacctagttttcatcatctgtagcctcctggtgaaaatt

SEQ ID NO: 85153 - DNA, 1037 bp, Citrus clementina; identical to SEQ ID NO: 79490
  Intron number 4 from transcript clementine0.9_021973m (loc us clementine0.9_021973m.g) derived from phytozome v7.0 (c hr-ID scaffold_5; pos 834310 to 835346 reverse strand)

SEQ ID NO: 85154 - DNA, 859 bp, Citrus clementina
  Intron number 1 from transcript clementine0.9_016179m (loc us clementine0.9_016179m.g) derived from phytozome v7.0 (c hr-ID scaffold_1; pos 963927 to 964785 reverse strand)
tattctagtttctcacctgactctcaactcaccaagtaagtaaattttttgttttggttcttattttgttttcctcatcttgtatagctcactcgttttgtttattgttatcatcattattattactttcaaatagtttttttactcatcagatacatttgggaaagttttaattttgatcggttgtgggttttgattttgatttggtgggtaattttcttttgcttacattttaagcattgatttggtttcatgcaaaatggaaagtaagttcattatttgatcttaatgttgtgtttgtgtgatctttttgcatttgggttttgagttttgagacttttgatcaatggaggctctactttcaccgtttgcttttgcatgcaggagattacaactttctagctcttattcacattttgttttcatcattctctttgctaattatttcattcatgtagtctgcttctgctcaagttacattttttctggttaaattttagatttattgaatttttgtttctggctctgatttgtttgctgggttcctcaggttaaggtccagtttcttgtcgtgcccagaatattttatttttttcccttttttttaggtccaaaaataataataacaatattaattcacattgaatgaatgtattttaagctgtgtactttgacgaggttgtttcgagttcttgttttaaaatttttgtttaatttctttttaattttgttttgagttctgtgtttagattttgatgaaatttaatatctgatattatgaactgcatgtttctgatgacctgactttgagatggttattccaggttccgaatttggggctgagtttgaagatttggtt

SEQ ID NO: 85155 - DNA, 714 bp, Citrus clementina
  Intron number 1 from transcript clementine0.9_022070m (loc us clementine0.9_022070m.g) derived from phytozome v7.0 (c hr-ID scaffold_101; pos 769451 to 770164 reverse strand)
ctgcttaatttgacctgctcaaatttcgctaaatcgtaagtggttcactgcctaatctctgtggttttttatttttccatgtgctatcattagggtttaataaaattacattttctcttattccaataatgatactatcatttcatgtttcattttgatttcaaaaatcaaagtttgccacctgggttttgatgtttaaatggtgtttgttaaaacgctccaatgaattagatgtcgtattgtgtaaaaccatttaatgggtgttagggtaagttaaatttggaaccaattcctattagctgcattatagttgtatggtttgtcattgtgtaccgaaggatttgttgatttgatattttattgtgtttggtcaaagtgtactgaagaatatattcagtctctcgttactgcaaggagctcaaaatctgaatataaacatgctgtgaattgtaagtcggttttaattgtaaatgcataaacaggggagagttatttgtaaacatcattcaatgtgtagctctacaggcaatgaaagtgaagaatctatttttaatgtttgtttgcatcaaagtgcaggataatgggttgtaaactcgaaatatttatctggctattaaatgctaactttcatacttatattgaatctagctttgatatttaaggctcttgttttgcctataggaagagaagagtagaggaggaaaaaagcttaca

SEQ ID NO: 85156 - DNA, 477 bp, Citrus clementina
  Intron number 1 from transcript clementine0.9_021928m (loc us clementine0.9_021939m.g) derived from phytozome v7.0 (c hr-ID scaffold_20; pos 1470223 to 1470699 reverse strand)
aaacagcgcacgtaagcaaaatctatcttcatttttaaatttctgccagttttattatgttaaaatttctattacttgaatttctattatattattcggccttgtttggttgctgaggaaaacaaaaaattaaaaaccaaaaacatattaacataaaattattaacgtattatatcaattcgatattttatccttattgtttttctgtttcagcaactcgccgcgaaaggtacgagtttgattgtttccttgttgcttttcgtgttgttgcagctttattattttattcacgcggtttttcatttgatttgattaaattattagttggtggcgaatttatttgttagattttttctaagttttgaaaaatccatgttatttaactgctttctgggttgtgctttgcgttttttgcttttctgtgatgtatctatatttatgttcaatgacagatttaatagacaagtgagtgattcc

SEQ ID NO: 85157 - DNA, 598 bp, Citrus clementina
  Intron number 1 from transcript clementine0.9_015418m (loc us clementine0.9_015418m.g) derived from phytozome v7.0 (c hr-ID scaffold_29; pos 2746177 to 2746774)
ccaaatctaatcctggctgtacgtttccttttacttttctttgttacctttccttcttgccttgttaaatcactttgtttcttgagccatgagttttctttctttctttttttatttaatattgattctatttggaatgggtttttggtgaaattgtatttctgtgattttttaaaattaatatatcaaaccctaatatgagtttagagcggataaaattgagtactttatcaagaattgaagtgtaatacgaatagtatttaactatttatgctgtatgtggtaatgtgagattttggaaattgagttttgtatcattggaagacagtttctagtttcatttatttacagtggttgaaatgcaaggaaagaagtaactgatgcttttgattttcatggtactatatttattaacaagttgtattgtacttgagcttaactgaggttaatagtctggtaagaatttttcagttttgttgagtctatagtttttcttgatttccaaatacagaaaacattttttttttagtttatctgcttaatttgcctcaaaactttttcagggtccacctggaaccggtaaaacaacaagtatttt

SEQ ID NO: 85158 - DNA, 751 bp, Citrus clementina
  Intron number 1 from transcript clementine0.9_001281m (loc us clementine0.9_001281m.g) derived from phytozome v7.0 (c hr-ID scaffold_111; pos 335538 to 336288)
tcgagttcttcgcagctcagattcttaagcgaaaggtcaatttctagggtttcgattctagtcctacgcttctagctgcgcgctttttttttttccttctattaacatttttttctcttcagtttttctgttaacaaaatggaggctttacgtgcgggaaaatacaatattcgtaaagttattttctagcaactgctctgaaagtcaaaacgtgtcgttttatgtgtgttttgcgctgcagggtttcgaaaaagcatgtcttttttctcctactcgtgcatgcattttcattggttttccctcgaaaatactgatttttaaatacaataactgtagcatttttatatttggaagtagaaaatttaatttctctttttcctttttctgttttacaaacagtttttcaagcgtctatacttattgcagtagttaaggtcttggtgtgctagcttggattgtttcttcctatagttatttggaggatgaagtgtgcttgcattattttgattaaagagttgacaacaataagagtaattccaagtttactgttgcattgacttgatttctttggtgtttcaaatattaaacccatatgacaacagataaaaattgtttgaattattggagtctcgttaattgatacattcgatgcaattgtttcaaattacctccgaactctctcacaaaaaatattttcttccattttttgagtgaatgatacttacacactatgtcacaatgcagattcaga

SEQ ID NO: 85159 - DNA, 972 bp, Citrus clementina
  Intron number 1 from transcript clementine0.9_035780m (loc us clementine0.9_035780m.g) derived from phytozome v7.0 (c hr-ID scaffold_120; pos 250078 to 251049)
tgttggtaccattgtcaacattgctaacccacaaggtccttttttttttttttttaatttcattttatttatctaatataaagttttccattcacttacatacactaacaacagcgtatcaaaggtcattgaaaaaaaaagaaaaacaccaacaaagtgttggctctactggcaatagagtccccttaagtggcttgagtgagtttgctcctcagttcgagtcgcaggaaaatcgcctttgttgggagaacctgtgcctcccggttcgagcggggacttctagtctgggttgtggtacgggcttaaaggtgcctcccacagttgaggccctccccaggatacctcgtggataagaccaaaaaaaaaaaaaaaaaaaaaaaaaacgaattgacggtatttacgtaattcgaatcattagttctcctcgtaaactttgcttgctttccttgggagatgaaggtcatcggagctggctggtatagagagaatgagagaagatcgaaaaaaaaatctaattaaaaattttaaactagacagtatttgttttttatatctttgttttttatatatgaaatctgaatggatctaaatttttttttttgaaatctaaatgaatttaaatacaaatatctaaatgacatgtttattttttatttttcttttttaatactgaatattatttgtttttataaataaaaatatttaaaacatcattattagatatttatgaccttgtaaatcgaaactaagaaatggattatgttttatagtttagaaaataagtacatttaatagagatatttttagaatataatatttatttctcattcagatttttttttatttagataaaaaaaaagtgcattgtcatttaactatatattgattttcttctaaattaatcactatgagtatgtgtaagctgttgatcttttacttgctatccttttttaatttgtttccagaagcttc

SEQ ID NO: 85160 - DNA, 204 bp, Citrus clementina
  Intron number 1 from transcript clementine0.9_008660m (loc us clementine0.9_008621m.g) derived from phytozome v7.0 (c hr-ID scaffold_101; pos 754431 to 754634 reverse strand)
ggaatctcacatttggtttgttatttttctttttatatatataatatatatataaaaattcattaaaatagtagtcaaaacttttttgctttttgtttctgttgaagatttttttaaagttcaccttttttttaaatatttgtgtgtgtgtgtttttttttttaatttctgcagggattgtgggaagcaagtctatttgggtaa

SEQ ID NO: 85161 - DNA, 943 bp, Citrus clementina
  Intron number 1 from transcript clementine0.9_010855m (loc us clementine0.9_010822m.g) derived from phytozome v7.0 (c hr-ID scaffold_82; pos 1093787 to 1094729 reverse strand)
tgggcccatctcttcttcatctgatcttgcttctggttagtcttttttttttttaaagtctttgaggtttgatcacaaatgggtgtcttctcttttttttttttttttggtctaataatgtgaaaaatgtttgctttatatgtttttgcttttgtactttgatgagtggctttgcaatttttttccccttctggtgttatagatcgtctagctggaaatttttttttgttctttctctagtttagtgggaaagcttgtacttttttgtggtttagggatgcatgctgtgtttttgtgtgcgttattaaatgggtggccttgattttcttttagtcatgtaacaatccctctctctttctcatggtcgtgggggtgggtgtctttgttatggattagttttagtgaggtcagtgatggatttgttagcttttgtctgtgaattctagttctctcttttattttgcgtcattaaaattttcttcaagttggtttgtagagtttgcaaaaagctttgaacttttgtttgattttgctaatgttttctctgctgttgcctttttgcctttggatgatgtggctttacaatgttgtgttttgtgttttcttttacttaatttttgttacctcttggggaatgagcatgttgaaactgttgacaatgttgagcaatttattcattttcttcagagaatttttcttcatagtttgagatatttaattaagcatctctttgttttcgtgtcattcgttgtcttctctcttgtattggctacctcagtggcggacttttttaatgttgaagctttcttgtggtaattgtatttctaaaatttgagtccttatgttttgtggactgggactagggtatgaaaatctaagtttaataccttctctcatcaatttagtagaaaagcaggtcggaaatcatcttgagggggttcca

SEQ ID NO: 85162 - DNA, 768 bp, Citrus clementina
  Intron number 3 from transcript clementine0.9_019117m (loc us clementine0.9_019117m.g) derived from phytozome v7.0 (c hr-ID scaffold_10; pos 3088488 to 3089255)
gccggcggcggttgtgtttacccatcaactggcaggtatgcttttatgtttttgttctcttgattgtcttgctacccagttcaggttgttccttgtgtgtgtgtgtgtgggatgagaattgatttcctttttggatgctgttcagttgtcctgttctagatctccttatcaagatcaaaatacgtcatgaagaaccacagactgattagatttcatcatcaactgtcttaagaatccgatttccaacaatctttgctttttaaatttcttacttgcgagcatcagtaaagcagttaggacttttgctttaggatttcatgttatgtacaacctttcactttccttcacccgcatgttgcaataattgtgatccacaactgggttttgcttgcatgtgcatcactgtattagcttttgtgtaagatctatcactcgtctctctctctttctttcttccttttttttataaaaaatttggatgattgatttgtttgcattaatttgttggcaagtcagaatgtttggcagctctgagctgttctgatgtcgacatttcattagtactttgtcctctttctccccggagatattgtttccgcatcttagctttgacatctgttcctgcatctcactcagtgccgtctccgattaatgtttgctgtaataatttctattattttttatttcattttactaaagttttttttgggtttttgtcttcttttaacaacagccccgggacaggcgcaggcacaccaaccacaacac

SEQ ID NO: 85163 - DNA, 693 bp, Citrus clementina
  Intron number 1 from transcript clementine0.9_015902m (loc us clementine0.9_015880m.g) derived from phytozome v7.0 (c hr-ID scaffold_1; pos 11737320 to 11738012 reverse strand)
cagtgattatttgctttaggttcgttttcctgtgaccttgattagttagttttggtgccctttgctcactttctctgtaaaagtttccttgtaattcaatatcttttgattctcatgcgcctgatagtttatctaggcaattttatcaagtgggttttgttggatctctaaagctgctttatttgtgtcttttatgcatcaaattttacttatttgtcagtttttttcttgcccaaattaccaaaccatggattttcctatcatgtttcccaagtctggtccttgctttgttattatcggagaaataaaaggagtcccatttttcacccttttgttcttgctgtatttatctgagactttttctttagtaattcttttcccttttttgcatattgaattctcctttttcactaggtgtgttcattttgttggcaaattgtcagtttccttatgctttcttgttatacaaagaataattcttcactttgtttcaatggaatgtaaaaactggtgatatttttgtaggcgataacatctcctacttctcatggtctgtttgtgataattggttatcattaacgttcattgttgaggcactgtctcatataagttctatgtggacatttatagaatgagtctaactttgaatatttttgctactttttgtgtattcagtaccttaaggtagattaa

SEQ ID NO: 85164 - DNA, 789 bp, Citrus clementina
  Intron number 1 from transcript clementine0.9_028781m (loc us clementine0.9_028781m.g) derived from phytozome v7.0 (c hr-ID scaffold_1; pos 11545257 to 11546045)
aaacttgtggggtaattaaaatgctttcttttcttcaaaacttgttattgcttgtttcatttaagcttttgtcgcttgtaagttataatttggtttggtctgaatatatcgtttgctttttctgctttatgagtgtcttaccagaagttatggaaactgaaatccaatcattgaaagttaactgatatggaatttattagcccaattgaaaatgtatatgaactatcaagttgtaggtaatagtgtttagggtatcaaataagagttcgtgactgaagatgtggtcttgttatcaatccaaacaaatatttttatatttgaggcaataatgcttgtgcatattgattcttggaggttacacgaagtaggtccaatagtgaaaattgtcggcagaaatacagtggtgtatgagattgtatctcaatggaaatgtttgtttacacaactttgatgtagattcccttgcagattagttctgtgattagattagaaaataatcatatcagatgctattaagaataaatttcctttatttcatgaacttatcacatatagttgttacttgtggagagatagtcgttggttttttaatgtttatggttgattggaagcacttgctatgtaatgtagactttaattgtcctttatgtttcttcttatatcttgttttgttttatactgaattgtggtaatagcgtctggttagattgtgacacttttatgaagtttataagtgttcttctttacttcaaaggttgaatcttctactgagggcacatctactgaaga

SEQ ID NO: 85165 - DNA, 863 bp, Citrus clementina
  Intron number 2 from transcript clementine0.9_008289m (loc us clementine0.9_008289m.g) derived from phytozome v7.0 (c hr-ID scaffold_5; pos 3946900 to 3947762)
ataatttgatcagccccaaacttcaatcttgcaaggtaactttgtttgtttgtttttaattttcgtaaattttgttgttaatttctttgcggttggttaattttgaatatttaattgattgaacgtctgggtcagtccggtttaatttgtgtgcgtgagtcaacgatcgtgctttgactgactaatttggtcgtaattgtgcaattttacaaattaacttgcgaatttattttttatttaatttattgtcagtcggtaactattttatagttgtgtttggttgctaagaaatttttttctttttactctggtaataaaaatccaaggcaaaaaaaaaaaaaaggactttggattatgatataagggttctactttccctttattttttcttattcttcacgtcagttctgtaaaccaaaacctagtttagtgaaattatctatttgaaaattttccagagtagtgatcgctcatctgcaattccattttttctcctatttgaaacaattctctagcagattgactgattgagtatgttttgctttttgtaagtcattaaaagttacttagtcgatgataagagatattatgttggtgactgaatttgaaaaatacacattgctattacaagaattgcaaatccttatggacaccccaatattctttccgaatttaggaggatatggtgttggtgatgataatgatcataaattaattctctcttatacggacacgcctgcatacccatttgttgaggcaaagcattttgagggcattaggaggatatgtctgtaatgtgttgtattttaaacattgttcttttgtgttatcctgctgctgaggaagtaatctattttttcagg

SEQ ID NO: 85166 - DNA, 864 bp, Citrus clementina
  Intron number 1 from transcript clementine0.9_025893m (loc us clementine0.9_025893m.g) derived from phytozome v7.0 (c hr-ID scaffold_67; pos 778914 to 779777 reverse strand)
tcttcttcatccacttttcctgctgccgttccaaggtgagtgatcaagaaaaggccaagaatcccactagagatttttttttctttttctttctattgctatggtttcatagtctgatgggcatgtcttagttttggaattaaaattttgattatgctaagttcagtgaattgttcatgtttgtttatgtactttgattcttcttaccttataattctttttttttttttgcgtgtgtttgggcttttatagttgtttcctggaaaatctttgatacttttggaaaagacttgcttttggttttccattttgaggcataacatagatctttctcactgatgtatcgattcgcagcacattgttttctgcaacagaaaagtgttttcctttcacttattttctggtcctcggaaatttgggcactttttgagaacatcaaatgaaaaaaaaaaaaaaaaaaaaggtatcttttttggggaaaagtgtctgcttttttgtacacagaacaatcccatttcattgtctcttatgcacttctgctgattctctgtttggttgctgagaaaaaaaaatagtagggaaagcatataaaatagagtcatcaattcatgaaagtgaagttcttggattagactcaatctggtggagggtttcaaatttaatcactatggtcccataataatgctgaattgatgtccaaatgatgagcttttgcattttgagttttttaattgtaagaagaatgatgggctcccataaattttttttcttttttaaccctcagttggctagaatcaatgctgactttgagtctttgatgcaggaacaggactgctggaaactgttaaggaagtgaaaactgaa

SEQ ID NO: 85167 - DNA, 705 bp, Citrus clementina
  Intron number 1 from transcript clementine0.9_000935m (loc us clementine0.9_000935m.g) derived from phytozome v7.0 (c hr-ID scaffold_29; pos 1471838 to 1472542)
tggaaggcgcctgacccacaaaaggcttcctcctggtaatctaatatttatgtataagttaatcagatgaatctattgactctgataatgcttggctgtgataaattcatatgcaacttgtgttgaaatcaataaagtgttttctttcttctgtttaaattcatggcgaacattggcctcatctctttctgcctttgcaggatattattttcacgaattctgctaatcttatatttggtgtatttatgcctgtgtgatacgcgcatgatgtgctaacattcttggtagcatcgtttgcttgtcctaaattatcgtgcagatagaattctctcaaatctagtttcaaagaaagttttggaattccaacaatgttttatctcttggtgatgatcagaatttaagttcttttacttttatgtattaacagatcagtttgaagcttttatgtattaaccgatcagtttgaagtaattgtttatgattgcaagcctggtttagtgttttgtgcatgtttctcttctatcccttgtatcagatctttcagctgcattctattcgagatattatagagttgataagagcctaagcatcttcaatgtttttgaatgttgtaatgagttctcagacattggaaattcattgacactgctgaataattcaacatgtaattctattgtgcttttttaggtacttcccatttccaga

SEQ ID NO: 85168 - DNA, 681 bp, Citrus clementina
  Intron number 1 from transcript clementine0.9_001575m (loc us clementine0.9_001575m.g) derived from phytozome v7.0 (c hr-ID scaffold_1; pos 6243370 to 6244050)
tggcagccgagggtttgtctagacagtattgggtaatagttttggagctcaatttgagtgaattcagctgtttacctttttcaattttattgagtgtgattcattttatcttattaacttgaattcagctgttttttttttttttttaacttgggttttgctcattttaattaattgttgaataaggtaaatttgttaattgtttggaataaatttgaatttgcggtattagctgtagtattggctagtgatattaattaggttgcctttttcattttgaagcaatgtggtcaattgaaacttcttgagccctccatgcagtgaaaggtagtgaatgaggttgaattgtcggatatgtgcctctaggtatttgattttacgttgatgttgattattgaaactaagagtttaattgacagttaactagggggaaaatgctaaattgacatggttttagtttttggaagtgtttgctaatttagtttttgccgcacctatgtcatgaaactctttaaatgtttcctgatattactgcctgatgttatgaaaatctttaaatgtttcttggcgttagtgcttggttgtgttctgccggtgtattctgatatggaataagattaatgctcttgtagttctgtattgcttgacttgccgttggttttttgtttcactaggaataca

SEQ ID NO: 85169 - DNA, 922 bp, Citrus clementina
  Intron number 1 from transcript clementine0.9_017300m (loc us clementine0.9_010562m.g) derived from phytozome v7.0 (c hr-ID scaffold_150; pos 154676 to 155597)
ggaagtgtgtaacttttgactcctaggtgcgtctttgtacccttgagtgaatttgtgattaatgcaactatgggtcctttcaggtttgatgttttatcagtgggatttcccattcatactactactaaaaagagtgtacacagaaagagaatggtggagattagggatgactgcctcaattttgttaatttgtagtttctgtagcagttgccgattattagacttaatgcacaatacttggtgatgacagattttaaaactttgaaatgctaagtttgtgttgggccacaacgtcaatcgtacttgtcattcccagtgatgtcagtatgatagtgactattcttttaaggtctgttgattgtggaagcagagttgtatttgcacatctttataatggaaacacctgcttaaatattcacttttgttgctgaagaagaaaattggattgaattaaattaatcacctgcttaagttgcttaaactctatgtaagttctcgtaggcatttttttatttctggcaatgattttttctctgagttcatttggttttgtctttacattttttctcagttattgaattggtttcaataactggcaattggtaagtttgtgtggttgcaatctagagtttttgactttgtgtaatattcagtggattttttctgagttagtgttagttagttatatgtcagtgcaatggggtggatcactatgcttttcttgtcttcatttatatttttaaattgttctcaatttaaacatattaatttcttttggatagtttgaacttcattatgggaactgtaatgttgtcacataatcatgatatataatgggatgaagtatgatcatgattgtaatgtgttgtatggtattgcatttgcaggaatttgatcctttttcattgagcattgacgggga

SEQ ID NO: 85170 - DNA, 832 bp, Citrus clementina
  Intron number 1 from transcript clementine0.9_034424m (loc us clementine0.9_034424m.g) derived from phytozome v7.0 (c hr-ID scaffold_1; pos 7068121 to 7068952 reverse strand)
ctagagacagtgtacagtataaagtagattgttgatgctgaaatctgctcgcccaatgttgatgctgaaatttgctcgccctttaccccaccagattcttccaccaacgcttagatgtttaatgggaacgatgttattttctccttgccttaacgatcgcttacgtcactgggttggaatcacccctttttatcttgctaagcctgcgttcacaaaaaatggatcaaagacgccgatggttttaccggcgtaaaccttccgatgcctaagttagcacaaggtgtttacgggaaaacggtttaatttagattttggaatggcttacgatttactctcaatttaggtagaaaaaccgtctggttttaacttggcagagttttcccttctctctcagttttttcatcccctttcttcattggtttcttcctcttttatagccgttgtcccacatttctgttcacccttcatcccctctttctcaagtagtggcagcccttcatgggactccaactgctacattgtgggcaaacgtgggacaccgtgtctccctcaacggttctggaaaaagcgcaactgtcgagattttgtgggatcgtgttcccactctttggggaatgcgtatctactcggtatatgtctctagtcggtgtattcctccggctggtactcgtctctggtcggtgtattcctctggctgtactcgtctctggtcggcccatgtttgtataaggcttattatcagtgttctgctcgtaccattcggctgaggtgatccaccccgaggtggggatgatgacatggttgagctggtgctcttatttacttaacatag

SEQ ID NO: 85171 - DNA, 759 bp, Citrus clementina
  Intron number 3 from transcript clementine0.9_015220m (loc us clementine0.9_015220m.g) derived from phytozome v7.0 (c hr-ID scaffold_33; pos 1554644 to 1555402 reverse strand)
aacgtgctgtggaaacaagagcaaaaggtaaggtctgaacctataattgtctctttgtctaatgtgatagttcttgttgacagtttgagattcctgggttcctcaaaacttctatcttaagtagattggagatatttgatgaccttgggactgatttatagggattagggaggaaggatggttatgcacttgttatgtcatctaattcactgttttgagatgattaattaaagatgaagcttcccgcctataatttcttgtcatgggctttgttgctggttgattgaaatatatttgcaaagaacttctctaacctttgagtttgatggatgctcttgagacgaatgtaatggatgaatatgactgttaatttttatttgctgtttgttttggaaccttctcagaatagactatagttattgggagaatagtatctgtttcaatccttgggcccaaatgggaaatttgaaaattaaagcatgcatttctaaatgagctttttgccatttgaatatataaacagtatttttgttcgttctagaaagtagttctttcaagataaaaaagtcaaaaggggcccagtaagtgggtatcataacaaccaggatttctttcatgttttcatattccagaacagaaaaattttgtttcctcaataaccatttattttgttgtgtcttttgctcagctacctaacctactaagttcaaacttgtttttgcagtcagaactggtttggagggacctggacttacgaat

SEQ ID NO: 85172 - DNA, 1019 bp, Citrus clementina
  Intron number 1 from transcript clementine0.9_013143m (loc us clementine0.9_013143m.g) derived from phytozome v7.0 (c hr-ID scaffold_23; pos 2415662 to 2416680 reverse strand)
ttctctacttcatttgctccgcaacggctgctcaggtgcgtgtttcatattttttgttgactatttttctgagtgtgctctttatgtatttataaatatattaggcttcggttgagccggttttgtcttatttcttttcaaattttacttgaaatttgtggttgtgaacactgagatcttgtagttagtgtgattttttcctttttcggtaatttttgaattttatttctatcaacaattttggagctctcttttttagtttcttttagaaactattttttttgtttggttaaattttaacctgaaccatgctcattgaagttcgaacctcccttttagttattttctctttattctttctgtttggttgccgagaaagtgaggagaatagagtgggaaaggaaacagatttcaagaagtacaacaactaaactgtttttttttctttattttattattaagaatacaaaaaaaaaaaattaattgtctgaagaaaacaagtgaacaagactgaatgtgaatgcagttgactttttagctgaaatactctaaatgtttgcttcagttttcaagcatgataataaactacatgaaaggcatttttttttcttttttgttgaagtattttactgcaggcttgaaagtactatgaaccgtggaatcattctgtagtcattttagtcattttaaattcatgaacatgcttgcacttagacttatttctgtgctttctcaagtagttttttttttctctataatcttgctatgttaaacaagaaattatttccttaacggttggcacgtggcaaagttcaaacctccttaatggttagcaaatgtcaaagttcaatatatctattaatcttttctgcttttggtcttgtctaagtacttgataacaaagtcgcacagacaagtttagcgattcaatttttacagtccatacatgcctgtattttgtaatattaagaagtttctctcattaacaaagaaataaagctgcaagtttgatctggaat

SEQ ID NO: 85173 - DNA, 522 bp, Citrus clementina
  Intron number 2 from transcript clementine0.9_016227m (loc us clementine0.9_016227m.g) derived from phytozome v7.0 (c hr-ID scaffold_53; pos 484690 to 485211 reverse strand)
ctgagaatatcactttcgagaattctgcacctgaggttgccttttatttattatatatatgcttgatgagtttacatatttgttctttgatatttttgatgaaaaatgaggcctaagctaattgatgatcttgttatgttagtgagtaatgtttcgatcttggctgatttggtttttggtaaaatggggagacttttttttgttacgttgcacacatactcactgattttttattgtttctgcatatgctatgattttcggcatagggttatataatatgttgggtctcttgtaaaagggcaattttcatgctagctttatgatttcttagagtgtccgcaactgcatcgtgccctgttaaaatttgatgtggagatctgggtattattggaggtgcttattttgagttgattataaatgctttaataatttctttaatatgatctttgaagttgttattcagcactctctgtcttcctcattatagggttccggccaagctgtggcaatcagggtaactgc

SEQ ID NO: 85174 - DNA, 596 bp, Citrus clementina
  Intron number 1 from transcript clementine0.9_018142m (loc us clementine0.9_018142m.g) derived from phytozome v7.0 (c hr-ID scaffold_29; pos 2075074 to 2075669 reverse strand)
ttggcaattacttcccctcttctcttcctgtaactgtaagtatcttttttttttaaatatttttaatttttattattggataattgttgaatttcagctgtgttatgtagttcatgtataacaacaatacccttttgaatttttcttttgctcgttataaatttataatttttgggaatttcttttttttttttttcatttttcacgaatttgtggtaatttttttgtaattgcatgttttaattagatagatatccactcttaagagcttcattgcattttggcataatttatcttgggacttatgatacacttacagagttggatacagattaccttgtgttgataatgtcacatcaattgcccaagattattgtttgtttagggtgtatattcatttatgattaatttgggatattaatgatcaaccttattgcttactttttggcaggttgtatccaatgtgatgggtggttttgattaagaagagtttactgcaaatatatctttgttgattttttccaagtcaactttttactcatttacaatgtggaattttgcttccaaggctatttctggagccattcggttgaaga

SEQ ID NO: 85175 - DNA, 860 bp, Citrus clementina
  Intron number 1 from transcript clementine0.9_029212m (loc us clementine0.9_029212m.g) derived from phytozome v7.0 (c hr-ID scaffold_10; pos 2040869 to 2041728 reverse strand)
ctgctacaaaagcgtaagcactactaattctttatacgtctgctttttagcatacctccaaaaaaatgtttcgcattaatagatttctgacactgccgacagttttgaataacactaagaattaattacataagaatatcgaagtgatttttaaggtttttttaatcattatttgagttcagattatagaagaagtaggaactcaaaatttgatttcaactttattcactttttttttttttgttataaattatttaactacatttgtagatctagaaagcactattttcttcatgaagtctagaatatatattccccaactccttaattgagttttcttacctttttaagtgatcagacaagactgtatgcctttttcttaatactaaaccagatgtgtgaatgaaataaacaaattgttttcaaatactaaatacattttggtaattttgtgagaatcatatctcaattttagctattaatttaatttggaaaaaagaaattgatcgtaaaaagagttattgccgacaaaaatttcgaaggagtaggtagcatttctataagttatgcgacaggcctcgtgagcattaaggtatataaaaatgatatggcgttcctccccctacgtacaaggattaggtaacgccacatgagaaacaacaatatagagaaacaaaaccttcactcttgtcgattcaacgtggctcaagtacccaatttctgtcgtatacatcgatcattgcttttgttagattgatcttgtcatatgtacaaattcgttttcttaagctgcatgaggatgaggtgattctcaatttcttacgcatccaggtacatcgatcaactctcgagatcactgt

SEQ ID NO: 85176 - DNA, 1003 bp, Citrus clementina
  Intron number 1 from transcript clementine0.9_015527m (loc us clementine0.9_015527m.g) derived from phytozome v7.0 (c hr-ID scaffold_1; pos 9012032 to 9013034 reverse strand)
acaggtacccactatcaataatttatggttgtatatttataaacatttgattaattttacaagaaagttttgaatatatatagtattgtacggatgacctcttatgtcacaagttggttaattgagaatgaccacgacaagaaattaaatcctatctaaactttatgttaagtaattattttctgaagattttcctttttacgtaatagtatcattaattagaataagtctttggtgaattgttcctaccactaaaaattgttgtgatggtataagaaacttgagagtcaaactttactctcatggtcttacataaaaatgggtagagaatttaatttctttagatacttaaacaaaaaaaaaaaaaatgttcttgtatttacggtccaaattaaaattatgcatctagctaacatgaaacattacctatttttgtattgagtccactctagtcgttgggagtattatatgtttcatgatctgtcttacccgttttattttcacacacataagatgatcaaatttatattttcctcatcctccatatctttgatgttgtattgtccttattacatatatgatcgcaacaagataatatgttgttgcatcaatggcatttgttcacataattacgtagggtcactatcttaaactttattttaattaaagatcaggatcctctcatcgtgatacttctcttaagtgaattttatttaaagtgacacaagatttttaaaagttcaaaagagaattatattccattaaattatcgtctttgataacggatttaaataatatcttcatcaggctcaaatcatatatatttgaatcagtaagcaattaagcatgatccattgaaaatagttattaatcagattcagctcttttgtcgttgtccttcgaattttatataatttgcggtaaaaattttaatccttaatattgtcctaccggagcttaatatataggttttggaggctctcagttcccaccggagctactc

SEQ ID NO: 85177 - DNA, 804 bp, Citrus clementina
  Intron number 1 from transcript clementine0.9_029957m (loc us clementine0.9_029957m.g) derived from phytozome v7.0 (c hr-ID scaffold_1; pos 17473 to 18276)
gaggttagttccaatcttatagtggggtagagttggaattaaatgattaggcttatttaactacaagcttaattgttgtagccactattgtatgttccaaaatgatccccgggttagctcatttaattgactgcaccactactggattaataagcaagataactagctatttgggtcaaaaggctaaatatatcatttagtgggaggctccatttaatatgcttgtgtgtaagggaccttatgttattttacaaggtggaccccctatagaaaaagcaagtaccgtggcttttggtttttattatttggagctaaggattttcactaaatggaaatataaaaaggcttattttctctaaagaaaagagatagagccacattatacagaccaagagaaaaataatttctctctaattttgagaaaaaatttctcctgctagttgcttttagtggtgataaaggtgcccacacgttaagtgcagatcaaacttgagttatagcctggaaggttatttgatggcggatcgtgatctaaaaggagtggtggtgacggatcgtgatctgggagcctaaatcacttcagcggaaaaagcaaaaattgttcatcttctcggattgtcaaggtatgattttctagattatgaattcctatatattttatgagattggtcctaaaagttttttaaaaaaaatttaaaaaactgatttttccccaacatcaaccccacaaaactgcttattgattgtcctcattttgaacttactataggattcaccctccttgttttacaacttactttatac

SEQ ID NO: 85178 - DNA, 702 bp, Citrus clementina
  Intron number 1 from transcript clementine0.9_010528m (loc us clementine0.9_010537m.g) derived from phytozome v7.0 (c hr-ID scaffold_111; pos 350612 to 351313)
ctgctgcgccgtcgccgattacctctctcatctaggttaaccgacagaccgcaatgcttccttcttcttttcattttttagcaactctactcatcgagtctgtttcatctgcggctgattcgattctctctttcttttttcactttctttaatggattaattgattgttttccgattcgtttattaaagccacatactattcactgctcctcctcacttgcatctgtgaagttcgtttccacgcgtttacttccatttttttaacgtaatcaaatttgattcgccaattgcttattgttttgtctgagttaaatttaatcctgaaatacgctcagatcttgtcggtttaacactcttcctttgcattttttttttaattcagattttttgtttttgtctcatgttatgaattttaatcgatcttgctttttcattgtttcatgatttaattgtgtgcgcgcgcactttaccaggggtttcccaatgatgaatgtttgtttgtgttaattaattagccggattgtgcttgtggtttcttggcttgttggattttcgttgaaagtcatcttttgaacatatacatatacgtatagagtctttttcatctagagaacccgattattgaatttgttgtagagatggtttcaatactctggttgtgggcttttgaaggttgtattaaagttgaatttcctttcaaga

SEQ ID NO: 85179 - DNA, 876 bp, Citrus clementina
  Intron number 2 from transcript clementine0.9_033051m (loc us clementine0.9_033051m.g) derived from phytozome v7.0 (c hr-ID scaffold_1; pos 5151727 to 5152602)
aaattcttcttagaaaggtaatgattaagaaaatggaataaaatgaagttatcttatcatggaataacattttaaaagaaaatccaaaatacaaataggttatgtttatgccaaaaatttaaataaaaaaatataaattagtaattaaattaacttaacaaggatgatgttgccgtattacacacaaaaatatattttattttgatgaatacttaacgtttgtaaaataaattaaattaattaggagtaatatggacttcttattataaaatagcttaaattgttagggtaagagttgattgtagcattattaaatttaaaggagtaagtagtatttctaacttatacttgaggaaggaatctgtaatttttccatgcaaataagaaatatgtttgtttaaggtaatggtaaatagctactcttagacattactaagaaaatcataaggtggaaatcaaatcattgttaaaattatgtcaatttatttgggggggaaaaagttcactcctttctagtttctagccttgaagcagttgcctaggttacaagatcagccacaaagtttgggattacagaaatagatacccctgagtatgtactctgttttgtcgtgaagcaagcttgaagcaccttgatttgattattaattggtttgactttcctctaatcttttgggtaatttctatatatgctttcactaaaaacaaataaatttgcaaagaatacatacatagataactttctttcaaaattaaaaaaaaaaaaaaaaatgaccaacaaagtgttggctccactggcaatggagttcccttaagtggcttgactgggtttgctccccagttcgagtcgcagggaagtcgcctttgttgggagaa

SEQ ID NO: 85180 - DNA, 848 bp, Citrus clementina
  Intron number 1 from transcript clementine0.9_023807m (loc us clementine0.9_023807m.g) derived from phytozome v7.0 (c hr-ID scaffold_53; pos 301679 to 302526 reverse strand)
aatctttttacgtcaacgattggcttagtattctctctctctctctctctcttcttttcttcataatcataggcttttgacaatcaatcaagtttgtgctttacgtactgaaagaaaattggaaaattgaatttctttaacaatcataatgatctatgattcttttttcttttttctttttctaactctgccagctaatctttcttatttttagtaattatttgtttctctatacaatcttagctgtaaattgcagttttaatttgggcaattgtgacatcgtgaaaagccatcttaattcattcttatctacgtattctttatacttaacgcaaaaattttccccttaactattgctgtaactcataggaaatgttgattgtatgcatgcgtgcccaatttgaagaaaattatgattcttttttttttttttctagtaatcttttaagtcatgaaaaaactttatggcatatatgttttagttttaagaaataaaagaaggggagatatgaataaatgaattttttgtccaagtcaaataatgaaattgatattaaatctttttttttttttaattctctctctctctctctttttgtcccttttcttttctcttatttcttttaaccaaacatgaatttaagataccagatcaagaagaaactgattttaattttatctcttcggtggtaagatacaaaatgtaattaaaataattgattatatgcacataataaattcagagtcacgtacaaatgatgaagtttcatcctaatttgtgcacttagatatttatttatttattattattattttttgttttacaagttttcaactttgacaagaac

SEQ ID NO: 85181 - DNA, 446 bp, Citrus clementina
  Intron number 1 from transcript clementine0.9_027219m (loc us clementine0.9_027219m.g) derived from phytozome v7.0 (c hr-ID scaffold_23; pos 1555124 to 1555569)
gtacaagcttcctttggcagttcattcaactttgagtttagtcagatggttgctgacataggaggagaaaagttaaaaggatttgatatgtacgcagcttgaggttaagtatgatgttctgcctcatattgataaattgattttatgttttaatcattcattagcttccatttcatttctttttgggacattttgtttatgcctgtttcaatacatcgtctaaatattttctttgaactaaagaaaaatctttgaattttaagaattgttcctcttaatgcaaaatacagatcacatttataatatgaaactgaaaatgaagcaacctccatttttgccctttactttactagatcttcccatttgcagtactgtccacctgctaatgcacgatagtatctatctctgcagtagactggtcttccatctgcagcctctgcagctgc

SEQ ID NO: 85182 - DNA, 483 bp, Citrus clementina
  Intron number 1 from transcript clementine0.9_030761m (loc us clementine0.9_030761m.g) derived from phytozome v7.0 (c hr-ID scaffold_20; pos 2860288 to 2860770 reverse strand)
tcgcgaccctaacatttttccaattgcgcactttggttagagatcacaatcctcttgtcaatccatttgcaagactgagtggttccacaaaaattaaatttgattgaaggctgacttgaagattggaattttgaggccaagagtcatcatttatgcaggactaccacaattaattttcttttaaggcctaaggttgatgatgatgatgcctatgatgatacaaaagacatcagaatcagccattcaaccacacgagactaagtaggagaatgagtcctctctgtttcctctgttttcttcttctctctgtcttcccgcctttcacgtctccgagcccgaccatattatttcaagtaaggcattcaatgaccctcctcaattttaacttttttcgttcacaaacgaatgtatgtacttgcaggacgatttgttgagggaatttggtttgatgaggtgcttttgatagggtttcaactgggaatc

SEQ ID NO: 85183 - DNA, 824 bp, Citrus clementina
  Intron number 1 from transcript clementine0.9_016336m (loc us clementine0.9_016336m.g) derived from phytozome v7.0 (c hr-ID scaffold_33; pos 1368621 to 1369444 reverse strand)
gtcacttcgaattgggttctaaggtttgtcatctgggttcttttgtttttgagctttggtttgtatttagtgacagtttatgagaatgaattaggaaagttttcattttcattggatttgattttgatatcattcctaactaggtacaatttgcttctggttcatgaatttgtcttttctgcatgcaaatttcgattgatagtgtgatagttctggattgatttgatttgtatagtacggcacaatgctactgtatcttcttctttgtattgttctgtgttttattttgtaacaaactgtttaatcactggatttaggaagttgaactgtttttcatcttagtttggggttgagtaccattgaagatcaagtttatgaatctccattttgcatatattagatcataaatacgtaggtcttctaagtctcaggagagcccagtgcgccgataagcatagattatgaatgagatggaaagcgatttattgccaatccaaacagtttcaagatagattcagcgaagagacaagttgaattgatttgtggtgccttttcaggtgattttagcaatattggagtaaatatggtggagggagaatgacatctctccatagttcatagttgattaccttagcttgggtagggagatttcaattgtaggtataaagggcatgctaaatatatctggattgttgatgtgtttcatgaatttactattttctcatttaatatttccatctgtttttgcttctgaaatttaattaccttatctgttgttttctccttcagttcagtggtaaatctgtcggcattgttgggctggg

SEQ ID NO: 85184 - DNA, 501 bp, Citrus clementina
  Intron number 1 from transcript clementine0.9_026671m (loc us clementine0.9_026671m.g) derived from phytozome v7.0 (c hr-ID scaffold_10; pos 5890513 to 5891013 reverse strand)
ttcttcgtttgccgtcgtcacgacgaccagaaaaggtacccaccccactccctcttttgatcatcatttcgcatacacttttcttcaatttatttttttttaatttttttctcatgtacccttgtgattcttttgcattctttattggatgttattaattattattaaaaaaattctaaaaaataaataaaattcacggcagctaggagttgaatgaaactctgaggccagtccagtttggtaggattctttgatttacaaagcatcgagtaatcagatttgctgggcattcattttgctttgttatttttccatgtatcaattttcagttcataatttgtgtctgagtgtgagtgcacaaattttgatctgtaactaattaatggatatcattgtttaaaatgtgaaaaatttagtttattctatgctagtttttcataacatgagttggactgagctcagtcagttgatgctccatgtttttgattcattgaaggtact

SEQ ID NO: 85185 - DNA, 784 bp, Citrus clementina
  Intron number 3 from transcript clementine0.9_026390m (loc us clementine0.9_026390m.g) derived from phytozome v7.0 (c hr-ID scaffold_5; pos 6925837 to 6926620 reverse strand)
agttctttaccagaggcaaaggcaagaaggaagaggtacctgtgcttcatttgcaactgtgaccattttcattattttgcttgcataatatgacctaaggcattgaattatgttgagttattttgttagttacttagtacgaaaattaatcatctgagacatggatattttgatgaatactgtttcattatcacaaagtaaaagtatgttatttatagtgattaaattccaaatgggagctggaatgcttgacctctgattcattccatcaaaatgatgatatgaaatggctagtggaaggagaatgttataaccttagttgaagtccattttatatccttcctaagattatggagttaaataaaccagatcactaatttagtgtgtttcaaggcctctagaggaaacaatggactgcgtggccttttcaatttgtttcagaagttggtcctgcatgctattgtaaaacctatagttctgttcttacactcaatgcagtgcttctcttctttattttggtttgccattggaaattagacaatccaaatgcattatttatctagttaagagataagcttggatggacttaagttcgtaaaaataaggggaaattatcaaaattgacctacctgaccggtttgttcctatttagcacggatttgttgcctttctgattaaatgctaatatttgtattggtcagccacataagggttacaagttttcctgattctttcttgtttattgacagaaaccggtagaagcggcacattaaggtgtggagct

SEQ ID NO: 85186 - DNA, 464 bp, Citrus clementina
  Intron number 2 from transcript clementine0.9_026390m (loc us clementine0.9_026390m.g) derived from phytozome v7.0 (c hr-ID scaffold_5; pos 6926638 to 6927101 reverse strand)
gaaggaagagcatgtgagtccgttttcttttaattttcattgtcattgatgttttattaaaattttgttctttgggctaattatctatgtgtgcgcatttggaagtgcttccgtagaaagctgtttttaagtaaaactaccgaagcgcgtgaaagtttttcttaagaaggagctccgtaaactctttttccaaaatgtacctcaagtgcttctatcctcaagcagtttttttcacttttgatttcaaaactcactttcatcaattttaatcaaggtcttcaaattttttatagtgaagcagaaacttatagctatttaaaagtttaacaattccaaaagtacactgaaaagcactgtcagctgatggtttatagaggggttatgtgcttgggaaacaaagtattgactggatatatttgtattttgcagttcgtaattgtctctctatctggttggggtctact

SEQ ID NO: 85187 - DNA, 916 bp, Citrus clementina
  Intron number 1 from transcript clementine0.9_023718m (loc us clementine0.9_023693m.g) derived from phytozome v7.0 (c hr-ID scaffold_1; pos 11084796 to 11085711 reverse strand)
ttcatttaacattccaagtttaagctacaaggcaagcattctctctctctctttttgtttttttcccctctcaagtttttgcatttctctttttcgttttccaaaaaaagatacttaatttgttaaaggaacgtttttgacaatgaagaaatatgaaaaagcttgaagctttggttgtcgtttaaatgctgtggctaagcttaatttcttgtttgattgatgaatgtataaatttgaagggaaaaaaaaaataatcaaattatgggttttattttttaaaagatgggtattttggtttgaataaatgagtcacatcatgcttcaaagtttagttatttatcttacgatttatttctatttatggtaaagctgtgtcttgtatttatggtcagttttgttcctccgagctttttttaatatagaatgattaggttttctatttggttgtcttatgaattcattgtattatattgacagcatatgtatctggctgtattgtaatttttagttaatgtcctgttactttctgttcagttgttcggtgagggaaaaaaaaaaaatagtgattttaaatgaattgaagttcctgtttcttttgtgcaatacaaaatgaaaagcttgtcttgattgagctgaaagatgttaaaagaatttgctgagatgtttgttgggttcattgttacaacaaaggaaaatataaggttttgagcttttttttttttttttaattttttctgcttaattctgcctgatgtaaaatttgtgcacatagtgaaagaggagttaattcttcttaatcatcagcctcgtccactgttattgatttttgctataaaattgtttctgttgttcactaattattttcattgtttcctgttacaggcaagcaagtttgcaaccatttacggttgattga

SEQ ID NO: 85188 - DNA, 589 bp, Citrus clementina
  Intron number 2 from transcript clementine0.9_035494m (loc us clementine0.9_035494m.g) derived from phytozome v7.0 (c hr-ID scaffold_38; pos 285474 to 286062)
ctctctattgctgactttttattggcccatgtaacaaatgtttttccttttttttccttttatgtttttttattgttgattctatcatgcttctttgcttgaaaaatgggcaaattgtctaactaagtcaatggtaagaatctgcagaattattttgaactttgctggaaggtagtgttgaaacttggttattcaaattccgaaaatcattatagttttgaagtttgaccagagaaggaacataagagtatttcaaattaaaaccacaattacgtgatcacattctaataccacaattacatgatcacttcatttcagttgcttaggctatatggttgacttaatgaaataatgaccataatgatcataactgaggaaaagaagaacaagcatgaacattctgcaccactgtattatgaatataattccttcaaagtaaaaggctctatatatcgaatattaatgttgaattagagttagttatatacaacgtcttagatggtatgcaattattattaaattatgtaaatcagttcctttgtccttcatgctatgggtaaatacattttcatgcttgttgcagacctct

SEQ ID NO: 85189 - DNA, 722 bp, Citrus clementina
  Intron number 1 from transcript clementine0.9_011709m (loc us clementine0.9_011709m.g) derived from phytozome v7.0 (c hr-ID scaffold_1; pos 3112424 to 3113145 reverse strand)
gggttagtgagttactctttcttttgaaaccatataatcttatttgtgttgtggggatcttgttttaaatgatatgtttcgtccaatattttttttcctattaaagaatcaatttttattttggttttagatctgtaatttaattttcatattaatggtcattcattgtatttgctgggtgattgtttttctgagtttttgattttttacaactgataaagtgacagtaaagtaaattaggaaggctggtttagttttgttcttgttaccagtctttttacgccttttcttgttctttgtcttaactttttcattttcccctgcataaagtaaatgatttattttactgttgtatttggatgatattagatttataacccatataaaggctttatttcttagattttgtgccatttgagttctgtgacgcacagctttcactttatattgttcgtgttcacagagaactgcttttctttgtcatttctggcactccattttttccatgagctaaattttgaagaaacattatctccttcttcttcttcttcttcttcttctttgtcttatttatcttaatagtaatttcctcgatatgtgagattaacaactatttctataaagcattttcagatgtagttttcgattttctgcttctattttgccatttttttaaccgggttacattttaatctgagccatctaaattttatggtgcagat

SEQ ID NO: 85190 - DNA, 964 bp, Citrus clementina
  Intron number 1 from transcript clementine0.9_007391m (loc us clementine0.9_007391m.g) derived from phytozome v7.0 (c hr-ID scaffold_27; pos 2567724 to 2568687 reverse strand)
tcggaatcgggtggcctaaaggaagtggatctaaggtaattttaaaaatcactcttttttattatttctgatggttttgtaattggtgttatactgattttctaactctgcatttgtgtgtcgctatgttggatagtacatattttttctcttcgtatttgtgttgtagcactgtatgcattgcttcatagaaatgatggcatggattgcttttaatgttttataaaaagaatttgtatgattatataaaaaagatggccacggactgttgttattgtgaaatataagtttggttgttaagttatatgagcttgtaacttgtaagattaggatatcacatgttgaatagatgaagttgaattatgttaaaagtttagataatagaattggcctgtgcgcagactcttaatattcgaactaagtctttgattgcagttagtatccattgaacttgtgttcagcacagatttttcagacatttatattgtcccatcatgtggcctgaaggtgaaccacaattgcttcagaagaatttcataggtttctccaaccttgttctcttctaaattttaatgcactaattaagaatcaagatgcttgtctatttatgttctacctcatgaagcaatcactttaaaaccacttcatcttactcttcttactccttatgctgtgactgtgttgttgactactcacagtttctggtatttgatctgacactatattggctaacactttagttgttgatgtacgtgagacagctctttgtttgacactaagtttattgcttattcaatttttttactatttaggtaatcgacagacttgattttaactatttatgttgacttttgctaagaagcctctcaaatccttagcatattttattaaagctaggtaggcacacgttctcctaaatcattttttgttccgtacatttattttgcaggtgagactggaagta

SEQ ID NO: 85191 - DNA, 990 bp, Citrus clementina
  Intron number 1 from transcript clementine0.9_023144m (loc us clementine0.9_023144m.g) derived from phytozome v7.0 (c hr-ID scaffold_5; pos 975717 to 976706)
aagactcgtgaggctgctaagcgcaatcgcagaaggtttcctttttatttatttgttttttgtgattatgaagagaaaaagataagatttttggtagtttttgaatgaaatacttaataaatttcagaaatttattgaaattgagacagcttgttgtacgttaggcttaaacaagtgggcaattttccatttttcatgtttgggttctgagaaaatttattgaggaaaaacaaaaatatgggtttttcttgatgcttgttgcactaccttttgttatgtctgaactaataattgatattctagcttattggaaaagctaatttgctggtttaatagatatcaagagatggctactgcaatttgattagtgatgcttagcagtgtggaccgagtatctagtgtcttttgcgagctcccgatggttcccctactaattgaatgtatctaatgtagagggactttgacagtaccagttcatcacttagcattggttcatcaaaaaaattggagcactaaaatttttgatatcatttttcttggagactgaattatacaatattgcattgatatacacagatgtattttacaggcatgtatactattacagaatacagcgcaaactaccccctgaattgttatttttgtttgtttatgtcattatgtggggttatttaatttgtgcatctctcgtttatatatcttgggacggttaaaagtggctatatttactgtggtgttgatatattatgctgttcaacatttgcttctttagtggtgatatggtggcttctacgtgactataaatctgtattgtttgggtactcaagtcatgttgatatattttctctgtttagtagatgtctagctttttgtatccatgaggaatttctttttgcatgtttatctgacagattttcttgatagagattacttatttgctcatttttatgatcaggcgttctcaatttagagttccggtccagaacaggc

SEQ ID NO: 85192 - DNA, 938 bp, Citrus clementina
  Intron number 1 from transcript clementine0.9_004147m (loc us clementine0.9_004147m.g) derived from phytozome v7.0 (c hr-ID scaffold_1; pos 9775682 to 9776619 reverse strand)
tcaggaatttcctccttcatactttgcaattgcaggtaataattagttattcaatttattgctttcattttatttcagttttttattttgtgttctggcttgagtactaaatgtgcaccaattatcttgtacatgacttgtgtttgattgtgaatttttaatgttagcttatactgaatttctcattaaatatgctagttaggattgaataatgtctttgtgcaagattaagtattatattcacttaggagatgaaaaatatacaatctttacagacaatatcattttcagatgacagttttatgattttggtgatggctaatatttgatgcaaagtcgcttaaaagttactgaagagagatactcaactctgtttttatctagtttctaattgcctcataagtaaatgatttctgttcccaaaaatgaagcctgcttttgatcgatgattgagtattaaatgcaagtttcttccctccttggaatttagaatattttagtgataatattttggtgtttaattgatgtggttgcatggtcactgtcttttcattatgtttatttaggaaagtatcttcatttccatcagcaatgaaatatcatgagcttttctggcattgtgattggggttttgtgtatggagtgggtggggatgagtggtcactagttgaaataatttactatttcttcttagcaggggaggtggagggtgttgttgtcactataataactgttcctattattattttgccattttattaactttcttgcttctctgctccctggagttgattatctatttgctatgttggttatccatttgtattgattgcatgttaccgaactgtagccatatagttttctcatggtagatttgaacttacaatcagtttctcatggtagagctgggagaaaacagtggactgctatagcccagg

SEQ ID NO: 85193 - DNA, 735 bp, Citrus clementina; identical to SEQ ID NO: 79876
  Intron number 1 from transcript clementine0.9_023230m (loc us clementine0.9_023230m.g) derived from phytozome v7.0 (c hr-ID scaffold_120; pos 192137 to 192871)

SEQ ID NO: 85194 - DNA, 608 bp, Citrus clementina; identical to SEQ ID NO: 83735
  Intron number 3 from transcript clementine0.9_001408m (loc us clementine0.9_001408m.g) derived from phytozome v7.0 (c hr-ID scaffold_29; pos 730584 to 731191)

SEQ ID NO: 85195 - DNA, 485 bp, Citrus clementina; identical to SEQ ID NO: 81209
  Intron number 1 from transcript clementine0.9_005106m (loc us clementine0.9_005106m.g) derived from phytozome v7.0 (c hr-ID scaffold_20; pos 1731428 to 1731912 reverse strand)

SEQ ID NO: 85196 - DNA, 884 bp, Citrus clementina
  Intron number 1 from transcript clementine0.9_020365m (loc us clementine0.9_020365m.g) derived from phytozome v7.0 (c hr-ID scaffold_90; pos 633712 to 634595)
cttattattaccaggattgctgtcttcacattactgtatctgggttctctcctttttctctttatcttatctttgtgaatttcttttctctgtgcttgaattatgaaatttgccttgttcgtcgatataaatgatgcccttggtatttcttataacaattttttagatttttttaatttaatccaagatttattttttaatctatatagatcattttggcattagattagaaagcctaacgctgatagattggcctatagctaaaacaattttgcttgcttttgtaaatacttttttatttttgttatataattcctttattcataattttcctggatttttaacgtttgtatttgttacgatgtaaatatttgaacctgaatttatagatgtaactgtaatcttgactcagggttggtgcctagcttttaataaagaataaaattttccttcttcacattagtgacaaattaactgaataacagttatgaaaaagagccaatctgtgcaataaactcaaatgacataaaaagagataattaaacactataaaacaggattcatcttccaaatttaccttcacaatggtcttgtttatctccagtatgatataatagtcttgattctatgccatcaaggttttgattcttgtcatatattcatcatagaatggcctttatctgtgtctttatgtgcatcacataatggtattatcttttctgtatgttcatcacttgctatcatatgtgcacatcagaatgacatcttcatatgatcttattacttcctgtcacttagaatttgtgcagtttggaagaaagcttcatttttttttttttctccttttaggagtcagtcaaaatatcttgtgtgaagcaggtgga

SEQ ID NO: 85197 - DNA, 981 bp, Citrus clementina
  Intron number 1 from transcript clementine0.9_022457m (loc us clementine0.9_022457m.g) derived from phytozome v7.0 (c hr-ID scaffold_10; pos 2742664 to 2743644 reverse strand)
aagatcagcttctgatctctaacttgctttctcaggtttttataataaattgaagccaccactatcacttgcatttcatttctttttactgtgagtttttgggttataaactctggttcttgatctcataactcttataaagtttttgatatagaggaaatgaaaagctttaattcagtcggatacaaaatggtttccttcactcttcgtgtcgtgaaggtttgttcttgctttctgggcagtcgttattcattaattgattatgttttccgttgttcattctaattgctgtgcaattgagtaatttagttttgtcccttagggctctgtgtggattatctcgtaccgaattcaacaagctccaaacctttttttttttaaaataaataaattaaaggagggtgctacgcaagaacttcgcgagttcatcttcttagcactgtttttgcctaagcaacccacactcactatttcaaatgtatccctttggaataaaaaattctctttctagggacacatgcatatctagctgtaatatgttgaaagaacgcacatcatacaattgatttaaaaactttaccgtgttgtcaccatgattcttttttttttccttgttaatcatcagggcattgagaacaattggaactctttatgtatgatattacagattgtcttgttgaatgatatatttgaaagtagtgggggtggtggttttatattttaagatgaacgcatctcttcttaatttgcattgtttaagtacggtaaaagtgtttaaaacacttgtaaattgtgccagtttaattttgttaattgaccaaattctatgcaacaatgttgtggacaagtttggcacatgtgagtttactttgaattcagcttaaaaagaccatgagtatggtggacaaattgtacatgatgtgtctttactttctactgatgatagttggagtcattagaagggggtggggtcctaaagca

SEQ ID NO: 85198 - DNA, 854 bp, Citrus clementina; identical to SEQ ID NO: 79963
  Intron number 3 from transcript clementine0.9_026025m (loc us clementine0.9_026025m.g) derived from phytozome v7.0 (c hr-ID scaffold_5; pos 854121 to 854974 reverse strand)

SEQ ID NO: 85199 - DNA, 332 bp, Citrus clementina
  Intron number 2 from transcript clementine0.9_012623m (loc us clementine0.9_012623m.g) derived from phytozome v7.0 (c hr-ID scaffold_53; pos 1528007 to 1528338 reverse strand)
ggcagtctactgggaaggtatggtttttggattttcttgtgtttggttgctgagaaaaatgaggaaacaagaattttgaatttcagttttttttctgttagtaattgtttttttagttgagaaaatggaggataagaaaggcaaccatatgattttggagttttgatcctgttttatgctcggttaagtgttcatagtggaaactaaaacagtgttttagcataccactgtttttctgctaccaagattaattgatttttgaatctctgtttatgattgctgaaatatagctttcatactctttgaccagccaagtgagcagaacacttatt

SEQ ID NO: 85200 - DNA, 924 bp, Citrus clementina
  Intron number 1 from transcript clementine0.9_014942m (loc us clementine0.9_014932m.g) derived from phytozome v7.0 (c hr-ID scaffold_114; pos 205289 to 206212)
ccacttcactcgcatttcttccctcttttctcaaggtttgttttgctgcgcttttcctgttttgattggattccagaaatgtattctcaaaaaaaaatttcacgacaaattgtgtcggcagtggagaaatttcttctctcaattcggccgttttacgatttcattttccggaaaccgttttacgatttcatttgattaatttctctttctctgcaggttttcacttcaaattcagctctcgctctctttctctgccgccaactccacgaggttttgcttctttctttctttttttttttcaattttcttctaacataaagaaaagaaaagaaaaaaaaatattcaaactccacctcctatttttcaaaatcatatgaaataaaataatgcccagttttggaaaataaacccactgccattttgcgaagtgtcccaaccttgagtttatctagaaaactgcgcctttcctgctaaagtacgcttgcggtgaattacgccacattccgcgcacacagaaatatgtatgagaattttaaaaaaatagaaaaagtaaaaaggaaaaagaaaaagagaaatcaaatttcggctctctttttatttctttccttctagataattacaaaaaagtatttaaatttcgaacatttatcggtcccccataaaagaatttgaatttttacaaccaaagcctatgttaaataattgcatttgctaacatgcgccacgcggctcgtgagctggcttcttcgcttggcttgcattatatttaaatattaacacattggctttgtccactttcttcttctacacatatataaattcacagcagaatcaaaattcctctttgggtttcttttgggctcattttttttttcttttgtttccgtcactttctcaggaaaattttaattatcaaactcaaac

SEQ ID NO: 85201 - DNA, 810 bp, Citrus clementina
  Intron number 1 from transcript clementine0.9_025975m (loc us clementine0.9_023511m.g) derived from phytozome v7.0 (c hr-ID scaffold_1; pos 10645734 to 10646543)
gcaagacccagaaggtttgatgattctttctttacccatttcccccgaatttttaattgttttaaattgtttatattttgtttttgtggcgtttgtagatgtacagaggagggaagatttgcttgaccgtacatttcaagccactttgggctaaaaactggtacttttgctttacatttgttgattattttgtgtattttcggttttgattgagttgacaatggaatttataatttctgtgatatgcttttggctgtccagaatttatcaaatgaaaaatgaaattaaaattttcaattgtgggtggtattgttatgggagcagtgtaagtatttgcagaattgtgttacgaaacatcaccggttttgttatccttttttggttttctggcaaactgttcccctgttttaattttagatcacctcagcttcttctgagttaaaggaattttatgtgggaaagaggttggaggtcaggaaggaatgtttgagtgctgttggaagttgtaaactcaagttctaatttgatggccaaataggaaaaggggaatcattttcaccaatttttttgaagattcttatatctgctcaaattgttttcttttttggcagtaacattctcaataaccaagctattctttgtgtgccgtggtttcactcatttgcaatgttaatttgattttcattttacatttttcttttctttttcatttgggctttctttacatagtaaaatcattaacttaactgattggctttgttctacgtcttttcttgttgtgttttgccagtcctaggtttggtatagcac

SEQ ID NO: 85202 - DNA, 504 bp, Citrus clementina
  Intron number 1 from transcript clementine0.9_004240m (loc us clementine0.9_004240m.g) derived from phytozome v7.0 (c hr-ID scaffold_20; pos 3745103 to 3745606)
ctgaccctttgcctccatatccagcttctgtcaaggtttattttcataacacgaaaagctcttttcttttcacttttcacttgacatgattaattggttggttgtattttgattgatttcaattttgtttttgaatatattcgtttatatatatatatatatatatggatatctgttctgatgctctctctctctctatatttatatatatagtggaaaagtgtgaattggtgtctatagagtgggaatgatgtctgattgctagactgcatttttgcatcatgccactctagtattaatgctctttatcttttggatgtattatcaatcttgaatttcaatgaaatttgattttttcttttttgactaaatggacgttctttgtgtacaaaatagaattctttgcatgtaagttgtgaaaccaccaaggcttaggaatttgtaatttacgatgggcagttgaatgatgttcatagagtaaaaattggctgttgcaggacggct

SEQ ID NO: 85203 - DNA, 979 bp, Citrus clementina
  Intron number 2 from transcript clementine0.9_004240m (loc us clementine0.9_004240m.g) derived from phytozome v7.0 (c hr-ID scaffold_20; pos 3745715 to 3746693)
tgacaactggaggtttataaatttattttgggttaatatgtatatctgatagttttatctatcaagctgatctccagttggttgttttgtgaatgataaaattcaagtatgtttgtgcatcatccagaatttgaactgtgcagttgaaaatacaaaccaagacatggcaactgtatgtcgtccatccctttgtccctccttgaatgagcaacagcctcgtcaataaccattttagcagtcacctcaactcgctttcttatctattggtcatagagttatttaaaagaaaaaacttgacattaaaaaatgtatcctcggctgagaaaaaaatggtctcattagtattctgaattagccgtctaaaatatcaattttctgtttttcttttgctgctttctatggggttgtttaggtcaagcggtgttggtttttccctctgagctacaactttttccattgtaggatctgcatttgctgaggttggattggactagggtatgataggtttggatggcctgggttcaaaagcttttcgaggggacctttgagcataaaatgataattgctctttcttgtgtgctttttcttttcggtttttcatgattgatcaatcaattcacaaatcatgattgaatatgctgatgcaatttgtgagtcaattggatgctgattgggccttctatatagtcctaatattccttcaactgttcaaaggcatatgacctagaaaacaaagtttgggatttttttttaaaacttttttgctaggtcataggtatttaaataacctaagcttttgaaacaagatcacaactttagttatattatttttgtctggaactaaggtgttgttcgattataatttaaattgcaaaagaatttttgttaatgccattcaaattggtttaagctctagatctatgtgtgaatttttttaccttctctctggtctttcctccttcctcaggaccaataccgg

SEQ ID NO: 85204 - DNA, 773 bp, Citrus clementina
  Intron number 1 from transcript clementine0.9_003783m (loc us clementine0.9_003783m.g) derived from phytozome v7.0 (c hr-ID scaffold_29; pos 2197355 to 2198127)
cttttgagaaactagaaaaggttgctctttttttttttggcttatattaaaaaatttactcatttaatgtttagtttattgacattgtaattctttgtagcgaaaaaacaaaatattaatgtatttattattttttgttgctttttgttgggtaaatgatatttttgagaacaaatgtgaaaagtaatttttttcttttttggttggggggggggggggattttcaagttctgacaatttttagtgctgagaaaatttgattcacagttgcttcagtatgcaatgtgatagctgtaaaggagctaaaaaaaaaattgtttgcttttgctccaattttaagaaaattgctggttgttgaagggacaatgtactgtttatcttcttgtctaatttttttctgtttgattggtagccttcgtctcattcgatcagctgctctgtttgtttcattcagaaaaagacttgaaacaacttatttgctttgttttttctgctgtaaaacttcaccgtctttgcttggaattaaaataattcaggaatgcactgtgagctgacagattctaaatcttttactaaccagtctcaagtttcgtggaatggtgctttttgatttgatttattcattatggtttgctttctgattttagttttcaattcagtggatgttatgaaatttaacattgctcttgcaacgttaacaagacgacagatggtattgattttgaattgctttaacagattggacaaggtacatatagtagtgtgtttcgagc

SEQ ID NO: 85205 - DNA, 727 bp, Citrus clementina
  Intron number 1 from transcript clementine0.9_026158m (loc us clementine0.9_026158m.g) derived from phytozome v7.0 (c hr-ID scaffold_10; pos 3194515 to 3195241)
tccagatctgatccaaatcaatcccaactagtaaggtaatcctttcttcttcttcttctccaatttttttttttttttgcctctttttcattttcccgcttctttattattactgttatgtaccttcaagatctgttagttcatctccaactgttactcccccacccccccgggggctttggcacagtttgattggttttaacatttgatataagaatttatgtataagatatatatatatatatatatatatatatatatattttcaattatgtgggcgtcgataaactttcaatgtgaaggttttacttgggcttgtttgctttaacctgaagtgtgtcaatgtgtaatttgatgtttaggtttaatgaaaagaactggaaggcaagaaaagaataaggaaataattaattctgttgatcaatagtatggaagaaaaagatggttgtaaagcattcaaagattttgataattttgggcccttaattatgtgatgattttaggggcaatttctctctcttgaacttgaggcggaaacctacactcttatgataacatatctaatctgattcgatgggaatgttttttaggagttaaaaatttattatgttttgctgatcgtgtttgatctggctttctggattgagctctattttgattctactgtctgtcttcttgaattttcttggaagacagggtgtggggcttttggtcttagaagttggtg

SEQ ID NO: 85206 - DNA, 552 bp, Citrus clementina; identical to SEQ ID NO: 81197
  Intron number 1 from transcript clementine0.9_009931m (loc us clementine0.9_009931m.g) derived from phytozome v7.0 (c hr-ID scaffold_5; pos 4705973 to 4706524 reverse strand)

SEQ ID NO: 85207 - DNA, 587 bp, Citrus clementina
  Intron number 2 from transcript clementine0.9_011928m (loc us clementine0.9_011928m.g) derived from phytozome v7.0 (c hr-ID scaffold_10; pos 1230891 to 1231477 reverse strand)
agagtttattcgttccaagaaccttcaccttgccggtatgtatatggatgtatatatcatattctattatattatgtgtttctccccccttaatattcaagttgataatattagtttaatgcgaatctcaaatctcgaggcatttaactgaatacgttttgcaatagacagtgtaattattggtttactttgtctgaattggagcttgatctgagctcaactggcctttaaagatagtatcatggtacctgctttgcttgagctgaattttgtttaaaaactggactagttgctcgtttagtcgactgcatcatttaaatgtgtgatatcaagatctcaaactcatattgtagtaatgcattttcgttaattatacattagctggcagttaatgacttagccacacaaattggtctttcattagataaaagctaatgtataattgtcagaaacaaattcatcattagaactaactttagcagtcaatatgctttggaggcaagcttttagcagacaatatgcttttgaggacatatatgttcttttcatttgcttacaaataaagatgaatccaggtttccggcatc

SEQ ID NO: 85208 - DNA, 521 bp, Citrus clementina
  Intron number 1 from transcript clementine0.9_026279m (loc us clementine0.9_026279m.g) derived from phytozome v7.0 (c hr-ID scaffold_108; pos 189495 to 190015)
aatataaattccttagcggtggttgcaaaatttgatttctagtgagtgcttttttcttaaactcttacatttatttcagattcgttttttgtctcctgcaaatcacaattaaatgctgaattatatggagtcaatgctttagaaaattttcaaggcactgccatttccttttttccatttttttttgggtcgaattgatgctctggctttttactttttgttgtcaaattttgctctgttttttcaagttgatgcttgaatagttgaattcaattaatgctcacataaatttgtttagttgccgtaaaaggatataattagactgaagtacacacttctagaatgaatacaaaatgttaagtatactagccctctttacagaaaatcaaatgaaaatcaattttttggggctttgattttctatggtctattatatactctttttaatatcttctgttctaactataaccaaatcctttgttcaaggatttttatttggggtattgataactatccaccaa

SEQ ID NO: 85209 - DNA, 779 bp, Citrus clementina
  Intron number 1 from transcript clementine0.9_016816m (loc us clementine0.9_016760m.g) derived from phytozome v7.0 (c hr-ID scaffold_67; pos 1011249 to 1012027)
catttctgtttctcaggcaccgctcactcctaccggtatattaaatccaagaactctaactgtttcattctgatattattgttgtattttcgtttcttcaagttttttttttaatgcaattttgttgttttgacccagataatctttttctcactgtctattgatttgtgcattaaaatgcaattataatgaatactagtgctcctcttatcaatttcgtggattattttttcttagctaaacctttgttaggagtaacttatgtgcatcagtgtgtgtctttattatattgtttttactctcaagttaaacagattaggaaaagaaagaatctttcatcagctcttgattcagcgttggctgaaggtgcttttttttttatatatatactttggtttaaattttatcaagtttgaccagtttcttcaatgcaatatttgtatgagtcttaattagccttctgtccttgataagctagagcagttttgcaattaggtttggaaattaattgaaaatctaaacctgaatacggttattaaaatagattacttgtaataattttgcaactctgagatgatttgatttctttgtccatatgttgaaagacttttcatatcactacagcagcaacatgctgttctttgtggatgctgatagacttgcataaattttgatgtctgagctcccaaacaattagattaagttgaggctagaggtttgacatgcaagcttaatttgtatctttttatacatgtttgtttgctatatacaggatttcg

SEQ ID NO: 85210 - DNA, 598 bp, Citrus clementina
  Intron number 2 from transcript clementine0.9_016816m (loc us clementine0.9_016760m.g) derived from phytozome v7.0 (c hr-ID scaffold_67; pos 1012170 to 1012767)
ggtaatccttgcttttctattttgctacggaacttgttgaaattacagttgttatataatctcataaaatattttaaacacatattatacctagttatagcataaaagaatttagttgctcaagcctagatgttaaaggaatacaattttattccctttgatctgtcagataattgaaatgcttcatgttaatctaattctgaagtttttttctcatagtccctgaaatgatgctaggttttcatttatttttctctgaggcttagtattttagtcaagaaaatcgtaagatgtgtttagcctttgtaaccatcacttgattggtctcttatttttgccatgctactaagttagtattaatggatatggtaacagcccatacagcttgatcttcatggtttgaatctatttataataaaatattatttatctctgactgaatactttttctctcatgtttcttattgtggagctagtattagtttatatgcttcttttttcttctcagatagcttatgaaggatgtttttgcctgttcttttatctgatattcaagcataacttgactctttcccttacagtgataagagctccaggg

SEQ ID NO: 85211 - DNA, 594 bp, Citrus clementina
  Intron number 2 from transcript clementine0.9_026437m (loc us clementine0.9_026437m.g) derived from phytozome v7.0 (c hr-ID scaffold_38; pos 1792896 to 1793489)
gaggtgagggttcaattactttgccacgtacaatcgtaataccaccttgtgtgtgtatatgtacaagcaaaattttttcatttcgagaagagaatcaataattcagccacaaaaaaagaaaaaagcgatagaatattgataaaaatagtgtacaagtccagcagggtgtatgccaatttttatcggtgtgttttgagctctctttatcctttttgcatggggtaaaaaaaaaagtattatcagacagctaagagcacttagagctgcgtatgttaataatttctcatgtaattaaaactgcaatttttgcaggcacgtggtattgttgctttagaatacgttaaagtagcttcagtgagtgattatatttgttgagatggtacatgatggactgatggtttctttttgcatgcatgcaaatccttggattgatgaatgattagaatttgtatgttaagctaatatgcattatgccacctgtgcgtgttgtttaattctagcttttcttgcaaattgaaatagttgttaaatgaactgatggtgataatgaatagttgggatttgattaattgcagggatcagaaagagtggaga

SEQ ID NO: 85212 - DNA, 792 bp, Citrus clementina
  Intron number 1 from transcript clementine0.9_009574m (loc us clementine0.9_009574m.g) derived from phytozome v7.0 (c hr-ID scaffold_27; pos 562361 to 563152)
acaacgtcgttgcgattttgaacgagtgagtttgctggtgcaatttttggctaaatttaatatctgtttaggctaaactttagaccttttagctatttgcagaatttcaaaattaagcggaagcacaacaattacaaatatacccacaattttagataatgttgaaggttgaagctgttttattgacaatcaagaatttttgcctactcatatttttttttatgggcaaaaaatatgattttttttttaactagttgatgtttatggtaaagatgggcatgagtcatttttcaatgggtgcattttcatactcatgttgatttttgaggtgtggaatcaggcccaaggttttgggcttttagtctgttctttttttttttttttttttctgaatgagggctttttattctgttatagattagaaaagatgtgtgtcattaatttctttccggatacatctttgcgtcatgtagttattgtttggaatttttttttgattttttcctttcttcataagtgatgcagccatataacatattctaacactgtggaccaaaataccaccagaataccagattcatgagtttcaaatgatggcagtttatctaattatattggtgtctctcgtgtttataggagtattatgattagtttcatgaattatagaacaaaagtttttgtcaactcttttttttttttggttgatagcagttccgttttcacttctcatgtatttgctattcgatgtgtatttcagcattgagatctacaagcaccccaaagaagaaagga

SEQ ID NO: 85213 - DNA, 968 bp, Citrus clementina
  Intron number 1 from transcript clementine0.9_020907m (loc us clementine0.9_020150m.g) derived from phytozome v7.0 (c hr-ID scaffold_1; pos 10376003 to 10376970 reverse strand)
tcggtctaattggcgccaccgccactacttttgccgtaagttaatttacttgttcttttttcattgctatgaaaaatgtaatgccgatattagggttttgtaacttcagagtttttagtaattgataggcgatgcctcttgtttctctcacaatctctgtccaaactgttacggtgcttggttgaattgcttgtataagctaatgtcattttgtgagtgcgaatagtcgccctattgatagtgaatagaatattcatgtcttagattttaaaacttgatcttctggttatacgtgtgaaatccggaacccatttgcaatcaaatattgtcattggtagaaagttgttgtgctacacagtcaatttgattcctatagcaaatttggcaggttgggcagctccggaagactgttgactgggtctattctcaggtagaaataatatgtttccatcaaccttaaagtgggaagcctgttttactacactattacttggatgttgctgattgtttattagtgttcactggaaatcctttcaaacagatgttcaaggttctgcatttgttctgctgcattgaaggttttaatttgtgttcttgttatttggaatgtgcgtgcacatccccatgcataccagcgagtttcaattcttaagcaagattgttttctaacaacaaaatttgggtccgtagcttttgaaatttgaagactgagatctcttttcattaagtttagtatactcgatcctatgtttgaatttgattcttatagtaatggatggattgaatattttgtgtctctagcacggtaagttgatgaatatgatttatttatttatttattattgtttgatttatgttccagaaaatatcatttttttttttttaaatatcattggctgatggagctgattatgttgtaaatgcaccataaagttaagcaggccacagtcatcgtggaaaggagcaag

SEQ ID NO: 85214 - DNA, 489 bp, Citrus clementina
  Intron number 1 from transcript clementine0.9_011067m (loc us clementine0.9_011067m.g) derived from phytozome v7.0 (c hr-ID scaffold_5; pos 1350307 to 1350795)
ccctccaagcactccctcggttacctttatttcttgtaattacttctaataattctaacattaacttttaattattatgcttgtgcattgtgttaggcttttataattcaagggtttgcttttatgttattgttggttctcagaaaaagaaaaaaaaaagcatttgtttattagttattgtactcgtagattattttaagatttttaactattgtattacggataaatgtttgttttgtttaattgctagattagataaataaagtcttttggttgcggagaaatcaaatagatgagcattttttttttcaaattttatttttagggtttataggagaaaagaaaatgtatattttttaggaatattgacttgttgttttcttaaagagttttgagattaatgttatttagtgaaagattattatttcctgactggtttttgagcattggaaggagttaattgtatgtgttttgtggggacagagagcc

SEQ ID NO: 85215 - DNA, 765 bp, Citrus clementina
  Intron number 1 from transcript clementine0.9_006418m (loc us clementine0.9_006418m.g) derived from phytozome v7.0 (c hr-ID scaffold_27; pos 168265 to 169029 reverse strand)
taaaagcgaaaagtcgcttctcgattacgagagtggtacgtttgtggtctctcttcactgccggttattttcatttattttacgcgtgtaattttggaatttgaagcatgattagcagatttgtagaaatttaggaagataatgttggtttactggtgttaattaagaaaaaattaaatttaggtgcattcgtcgaacctttagttcagagaaattgaatagattataactacgctcacaatcctcatcctgtagcatgggatcatcatagggcttgctgatcacactgattgctaatatttaagttatttgataattatattagagttttttcactgcttatgaaaaatgattcgctatttgacaacaataactttaaatctgtcagaagctggtatcatctgtagagcaagatttgaggaatatgatgcagttttcaggtcttattagtctagtaggaattatgttttcaggccttatttgtccggtattcatgcatcaacgaagccattaaggagacgtgaagaaatgttgtaggaattaatagcttgttactctattcttttgtttgactataggcacttcaggctcagtgtgcatgtgtttcaatgcaagtatactatgtaaatttaagtgtttgtgggacagtgcaacatgagaacatcttctatcttgctctccctcttcttcactccctccccttcccttgtgctcaacttctcacactgtttatacatgtttgatccaggtgctggaaaaggggac

SEQ ID NO: 85216 - DNA, 386 bp, Citrus clementina
  Intron number 4 from transcript clementine0.9_011700m (loc us clementine0.9_011700m.g) derived from phytozome v7.0 (c hr-ID scaffold_67; pos 497109 to 497494)
ttacctgcctatcttactggggctagtcgaaagtgtgtacatgattagcggtttgccagaaacatttattgtactttcttggaattcagtttggttgctaagaaagtagaggaagacatgtttagttctacaatatttctgtttgatttccaatggaggaaaaataacgataaattggcctacatagttgatttatgattagctggctttcggtaccaattttatttctttccttcttctgccttttcgtggcaaccaaacaaaatttaaagccaagttcagcatatacaattcttttcaagcatgcatttctggtttaagattagtcctttatattttccaatacattatgcaggaaaccagctgcaagataagttgcaattctc

SEQ ID NO: 85217 - DNA, 950 bp, Citrus clementina
  Intron number 1 from transcript clementine0.9_020802m (loc us clementine0.9_019198m.g) derived from phytozome v7.0 (c hr-ID scaffold_53; pos 480653 to 481602 reverse strand)
tcgctactgatattcctctatacgaatctcctggggtctgtctacctttttgctttaactctctcatttttcttttttcttttttctgtgtttgcaatttcaggtggggttgctctttgacttgtgtttatgtcgcaggctttgtttgatcagtacttggaggacaagccaagagtttttaatgcaatgtttcctgataataaacaaagaagtcagaggcttaatgaggtttctaattttggttttgtgtttgatttcactgtttacggttctggaattttagaccagttttgtttacaattatgtgcctacaatgagttttgtagcattattccaagctaatattttggaattgttggtaattgatatgattatctgggcttaattatgagacttgatctccttgttttcttgtcatttggatggaatttagtaatgattctcttctaagaatgggagtccatctgactaaaagaatcgcttgctttagaatttgtcaataaacgatatagtagtactggcaatggtggttgtgaatcgtcatgattgaaagatcgcataatcatacctaaccatgtagttctagtcgaaagagagtgagattgattcttctagctttatctgttgagaatatattaatgccaagttaagctatcagaggatctcttcatggtgtatgatacctagatatacttgcttgattttaaggcctttacatagatccgtcgcatagcctgaacaaaaatttgccaaaagatcttctttgcatttagacctgtgtagtcttttcaaaaacagaagttgtatatcacccccaaatgatcgttggtagaagtcagaatatagccatcagcttaaatgctttttaagcctacgcattctttttatatgtaagagaaggttccctaaatctgagatatgtaatttggatatataatatattttgcagg

SEQ ID NO: 85218 - DNA, 962 bp, Citrus clementina
  Intron number 1 from transcript clementine0.9_027882m (loc us clementine0.9_027882m.g) derived from phytozome v7.0 (c hr-ID scaffold_23; pos 2561816 to 2562777 reverse strand)
cggcaacaactgcaaaccttgcaggaaaaccatcggtacagtctttcttcttgaaatttggaaatacttcgtagtgtattctgtgtgtagtttacaaaattgaaagtgattcatgctatctaaaagttagctttgtcattgcatgctttatagtttactcatggcagatacaagtgaaattacatagcaattagcaagaaaaattatacaacgaagtccattgacatttcatgaggaaaaaagaaaaaaagtacactaccaaaattggagcagatgagatgctatggccaaatgcgcatagcttcactagtacgttttgactcattcaaatggcacatcattatgatttaggttattgaataagtattgcaagacgtggcagtttgtttattgtattccaagtactagataggctcagaatatgatattcacttgtgtcctgatttagtttgtcacagctaaaatagttctagattttgcatcactaagtgaaaggcaccatagaactcacctcatgtaaacacaattatgtaacttctcaaagttcgataatctaagggcctcctccggacatgctgcatatgaaagtgtcttgatatgctcaacttctgaggtgtatatctggtggtatctattaatctctgtcttcaaatcaagaaagacaataatactcaataatgcacagcattgctgcgttttatcttagttaactagctaaggatcataagcaaactttgttactaaaaattccaaacatgcaaagtctattttctaaattgacaaggatgtgaccccatgaacatcgccataaccccgtaaaagaaaaaataaaacaaaaaccttttttttacgatttattaaaccaacataaaaacattgtagagtcagatatgaaaacagatgtaaaatatctgctgcatagtgattgacctacattttgcattctgatatgcaggcgattg

SEQ ID NO: 85219 - DNA, 688 bp, Citrus clementina
  Intron number 3 from transcript clementine0.9_011814m (loc us clementine0.9_011814m.g) derived from phytozome v7.0 (c hr-ID scaffold_122; pos 325061 to 325748 reverse strand)
gtcttcttggcgcaagtggttatactggtgcagaggtttgtagtacatgggtgtgagtatgcatggaaattgggatgattaattgtttgttcggttgcaaatatgagtgattgcttctgctatgtaaagacttagctgaaataaccgtatacgaaacacttactttcagttattgcttctgctatgtaaagacttgccatccatctgttagttcaaaagataaaaatgggttgccactgtgtattcatgacattattttatttgtttaatgctttgagttatacttagggaaggatacaatgtgcttttccatttcttttccatagagtagtttaattagcaactattattctctttggatgaaagatgggggaattgtcgtggctttctatgcttcttgaacaaactgatagcatatatgttgctaagctcatatgactgaattaagggaactagtgaattcttgatgaaagaaaattatgattttagcgatggttgtgtcctggagttttccattttattcctttttaagctgtattcattttgtattcaggagtttgcactggttacttttgaaaatttaacctttcaaatcaagccatctctctgcaacttgttgtctggtgacaatcctttttacttttatcttgcagattgtacgactccttgcaaaccatccatactttgg

SEQ ID NO: 85220 - DNA, 522 bp, Citrus clementina
  Intron number 2 from transcript clementine0.9_005191m (loc us clementine0.9_005191m.g) derived from phytozome v7.0 (c hr-ID scaffold_67; pos 221214 to 221735 reverse strand)
tgcttttgcaagggtggcctctgtgactcggtcaagttagtttcttcttcatttttttttccccaaatctagttatgatattaatttcttttttcttataccgttatacatttttataattatttcagcgaaatacttcaaagacaaaagaatgattagacaacctatgaaaatcatctatgcccatcacctaatccgaaagagatacggagattatttcaaaagaattttagcatatagttgcgttcgatatgactgtattgcaagtttagggctatgtaaactcgaatcatgagcaaacaagccctcaattgatgttaataaaaatatgttgcttcgtttggaatagttgcaagttgaatggtagctgccaacattaattaattgcttccaactacatcagagtccagagatacctttgatgattgtaaatacctgtgattagatgaaaatttcactattttttttttcattttcaacattgcaggcggaggaaatctagactgccgctcattataggta

SEQ ID NO: 85221 - DNA, 330 bp, Citrus clementina
  Intron number 1 from transcript clementine0.9_034615m (loc us clementine0.9_034615m.g) derived from phytozome v7.0 (c hr-ID scaffold_20; pos 31484 to 31813)
ccaactgctggacttgtcctcgaacgggcttacaggtaacatacgaacttaacttcattaccgcatattatttgagcaatcatatttaaatggattaagtttgagagaatactgacaaaaacaaaggtaaaccagccctattttatcatattaattgaaaaaataataataataattaacacggtagacacacctgtttacaccattgtttttatttatgctctatcaacgtttaatttcttcaacattttttttcattattttcgtagactaataacataaatgtatataataggtacaatccctccagaaattgggaacctgaagaat

SEQ ID NO: 85222 - DNA, 542 bp, Citrus clementina
  Intron number 2 from transcript clementine0.9_005183m (loc us clementine0.9_005183m.g) derived from phytozome v7.0 (c hr-ID scaffold_53; pos 1485861 to 1486402 reverse strand)
gaggaccttgtcagctctagatagagaaggaaattgtaagctacatactgaactaagtatgctttgttctattcttatttattgagcataaattgttgcttgagaaacttataaaataacatgcatcctctgaaacctcagaccactaaaatcattatgaactttgattagatatatattttttttcccacgttccatctggtcattctacttctgattcaaaacaatagttcagccttgggcattggctgtaaaaggaaaataaatcaggggttatagttactggcttacagttacaacacatatttatacttgactggttaaattctaccacttcttgataaagacatctgagaaataaagaaataatttttttgtacttgttggaagaaaaaagaagaaacaatgttttatggttgtttcctctttgatattaggaaaagatgtccagtgcttaagctagtgaagttgttatctttttctcgctttttaacaaatacatgacagggatcagtgacaaggatacaggcagtttggaagat

SEQ ID NO: 85223 - DNA, 350 bp, Citrus clementina; identical to SEQ ID NO: 84445
  Intron number 1 from transcript clementine0.9_014508m (loc us clementine0.9_014106m.g) derived from phytozome v7.0 (c hr-ID scaffold_5; pos 2402260 to 2402609 reverse strand)

SEQ ID NO: 85224 - DNA, 965 bp, Citrus clementina
  Intron number 2 from transcript clementine0.9_029714m (loc us clementine0.9_029714m.g) derived from phytozome v7.0 (c hr-ID scaffold_1; pos 13029417 to 13030381)
ctgcagcttcccatccacttctttttccccacctggtttaattttcagatattattttcattacaatcttaattcatacgcctattacgtgaattgctcgagtaatattgttgatcaggcgtatgcgaaagttccatgtttgagtaacaattagtcgaatgtctatgtttatgttgcacatgatttcatcgaaaccacacatcttccagactcatgcgccttcattacaaaggttcctgtagtacttaatgggagcgtggacaaaccttcttatgaagacctccgaaaattgctggagtcagggttcgatcttacatggtcagattggagctggagcctcccaatgactcactgtaagcttatgcttatatttatttatgcattcaaatgcaagggctttgtttttgttttccaatattctacgtaataaagaatttgtgaactatctctaagagcataccgatatgacctttaatttctgtttctttttcgcttttgcagtctttcctgaatgcaatgattactatgaaggaataatcagaaaatttatttgctaccaagatgacatacgtaagtagatccttacatatcattttgcttatgggttttcgatgttaataaatgtgatggctttatgtactctctaatcttttactttctaacttttttctaaatcatctctctgattagatataaagcttaattttttctatctccaactgcagttttccatgaaatctcgcggcgttcctaccgtaacatagaatcaagactgggggtttggataagttttttgttaggtaaaatctcctctccaggatcctctttttattgctttgcttactactatttactttcaataaacgttctctttaccagggtttccagttgatgttctgataattggtagatttattcttgctccaatagtccttcttgtgttccttatccacaaatacagaacg

SEQ ID NO: 85225 - DNA, 1048 bp, Citrus clementina
  Intron number 2 from transcript clementine0.9_032973m (loc us clementine0.9_032973m.g) derived from phytozome v7.0 (c hr-ID scaffold_51; pos 627867 to 628914)
aagctcgtttttggattaaatttgccgaagacaaggttcgcatcacaacttttcttgccaacacgtttataaattttataatcttgtcggatttctttatatactttaatttttcatggtatttgagaaatatgactctaaacattaatttttatcttcttttaatgctcgaactaatgtcctcgcatgtgcaaatgcattcacggccgactaagctccatgaaccttttattttacattagagaaaattataaaaaaaattcggttaattactttaaattttttatctttagaaaattttcttaattaaccgtggattttactgaatcaagggtaaaatattaaaatataattgttttagcgacagggagaattttaaggacttttgaaacatgaaaataaaattataatttactaaaacaattagaggatttttttatctttttccttttatttcattagtatttgtttgatatggcttatttattactcatacgtgtttatttaataaaaaaaaagttcttttcaaaatttttattattgtttagttttatttttagtagagctttttgggattaaataaattcttttgcctatattagtaaaagtttaaatttacacttttggaaatagagggttgaggattttttttaaagttaaattgtttaaaatattcatcatttattttataatcttattttatttatttcataacataacattaaaattttgtctattaaagtaatttgaaaattttaatgaaaattttcgttaacagctaaataattaacatttttttataaaaattaaaaatttactaataaaatttctatttaaataagctctgaaaagttatactaaactagtctaaaaattagtgggtaaactctcctaaatactctgacagtttgaaacgtctagtctttgaaagatactttgacgcgtgtgtacgtattatctaatttctcttcacctcatatatattattaatcatgtggtgataagaattagatataaaatattgtggcagggagtagctgtttggaaa

SEQ ID NO: 85226 - DNA, 482 bp, Citrus clementina
  Intron number 1 from transcript clementine0.9_005806m (loc us clementine0.9_005806m.g) derived from phytozome v7.0 (c hr-ID scaffold_49; pos 1518917 to 1519398)
ctgtttctttgcaagatagtgagttactggttcctctactgtagtcctttgaattttgtaaataaaaatggacattgttattattttttgctttcaggttcttttcttttttatggggtttatcgtcagttatggtgtatgcaatgtgtagctcaccaaattcttttgttgtttacgccgaatcagtatctgagggttttaattctcagtcaattgcttattcataaactgtgtccaaaatgaatttcttatctaaaaaaaagatttttcctttttttgataattaccaaatgaatttgtatatgaagaaaatttctttttggaaagagagtttatcaaattgtaggctcatcgatataatcacaatcatatgcaatgattagattttgtcttcagtatatcagtttgtttctaattgctgatttctagctgcaattttgattttaggtttagctggaaaacctctggccaacgatcattcc

SEQ ID NO: 85227 - DNA, 293 bp, Citrus clementina; identical to SEQ ID NO: 81353
  Intron number 1 from transcript clementine0.9_032145m (loc us clementine0.9_032145m.g) derived from phytozome v7.0 (c hr-ID scaffold_20; pos 2507494 to 2507786 reverse strand)

SEQ ID NO: 85228 - DNA, 710 bp, Citrus clementina
  Intron number 1 from transcript clementine0.9_003786m (loc us clementine0.9_003786m.g) derived from phytozome v7.0 (c hr-ID scaffold_10; pos 5158135 to 5158844)
ctgtattgttgcttcctctggaattgctttcagcagtatgtttctttctcagcttttgttattgttttttcgcttcaaatatattgtttgatgtgtgagtaactcataattaaacagtttgcagtatattaagttttgggatgaaatttggaaacagagttatagaaacgatcaacttatatttttttctgaaataattttaagaagtatagaaatctaacgttcgttttcttagattgtagatcatttgtttccaaaaacagaaaagtatagagaagggaactgatattcataaacacataaaaatctatgagtatgggtgggtaaagcatagagtttttgtaagtaagatgaattgatttgaattgtccctacaaataaataaatatggtgggatttggagacatttatgttcttggacttcgtattttaaaacacatctatttggttagaagaacctgagacttataaaattaatctagatgtctggtcttattattaaagtaatgaaacatattatattttgatctcttatgaaatcttaatattactgctctgattgcaactatttcatacgaacagatttttcaaaacatggtgttatgtttttgtcagcacagtgagtgaaaatagctgcaaatcatttaatattttgtcattctaattattacttttgggatgttaatcacgtaggtggtactgccagttat

SEQ ID NO: 85229 - DNA, 366 bp, Citrus clementina
  Intron number 1 from transcript clementine0.9_019564m (loc us clementine0.9_019577m.g) derived from phytozome v7.0 (c hr-ID scaffold_63; pos 290522 to 290887)
tcagacgcatagtgccaacctcgtgactagcttgggtataaattttttctactcaagttttcttatgcaggtgactgtcttggtagagcaatggatttgatgttggttactaaaatttctgttgtcaaaattagtcttattttgaatgcttgctttttgaagtatttgattttctgtgaatttaatattgctatcatgaaaacaacggattagagttataccttacattaatcgatctcggttttttgtattcagtgtagggtggaaattcttcatgcatacattgaaagtttcttattttaaatcataagagttatatttggaaattgactggatgaatttttccaggaggggcagttgcattga

SEQ ID NO: 85230 - DNA, 1027 bp, Citrus clementina
  Intron number 1 from transcript clementine0.9_029720m (loc us clementine0.9_029720m.g) derived from phytozome v7.0 (c hr-ID scaffold_67; pos 134295 to 135321)
ctagcaacctcgttgatgaattcttcaccattgccttttgaattatttaagagctttactgccacattatgaccgtcaaagtagttttcctttgtaaacacctccatagcctccttggccaagttgatgtttgaaataattggtcattttcttaatatctacataacaatatcttttaggagcctgagattcataattccataaaaatgcctcaatgttcagacaactttcagtggaattgtatgatgaaagttttcacctgaagtaaaaggctataaatatcaatatgccaactgcaatggctgatgctcctgcaaccagagaaaggagtcactgtcaacttaaaatttctttctctacttaaagacagatggatgcttccctcaaaaccatgagtagaagccaaaaaatacttcagaaaattttggatggtccaaacattgtgctagcagatgtatttgattaaaaagatacattactgttttctgagttttctgtttcctgcaacagaattaaacaaagactggtgttagttgagaatacgaaaaaatgtcatgatgttctcaaatcatccaaattttgacaaaattggacaggcaactgacagaatagccaatctcaaccagatacagaacttgctgcaacaaatctgctgctttctccaaatacaggtaaagggacagccgaaatccaacaaataaataaaaagagactgaaaaataggaactcgttttgttgcatgttattagattagacatagcttatgtaaatgtacaaaaagaaaaaaaataaaaattactaactcggagcagatagtgttttgttcttagaataacaaagaacacaagaaacgagtaagaagccattaatattccgaattcccaatatggctggagaaatcaactaataaactactaagaatattcttaatcaactaataaactactcagaataatctttgtaattctgaataatctttggaatggcttcaggctctacctcgagccttagttgctggatttgtgaa

SEQ ID NO: 85231 - DNA, 499 bp, Citrus clementina
  Intron number 1 from transcript clementine0.9_020327m (loc us clementine0.9_020327m.g) derived from phytozome v7.0 (c hr-ID scaffold_27; pos 69118 to 69616)
tcgctctgcggtttccgtgtcacaaatcacaacgggtacgcgttcgctttttctcttcttctaaaatcaattgaagtaaacacaagcaaagtagaagttaacaatttcatctattctttaagaattgtgaacgttttgtttcttgaacaagttggctatattcaaaatgttccatcactgagcttgtcatctccatcaatttgatttttctattttatatttatgaacttattgttgcatttagttccttgctctcaatattacatctccacattgcgtgtggtatctgctgccagtatatatgtcatatattatttgggcgatgaggttgtttagggtttgtttctgaagctgttgaataaaagtgggagtttaccaattgctttagctgttctgttgccgctttcataattaagcaaaagcacaagagctgcaaacacaactttaccatccggttgtttcaggtgtactcacgcttaaagaatccaacccagttttt

SEQ ID NO: 85232 - DNA, 621 bp, Citrus clementina
  Intron number 2 from transcript clementine0.9_012241m (loc us clementine0.9_012241m.g) derived from phytozome v7.0 (c hr-ID scaffold_1; pos 9822108 to 9822728)
agagatccattcagtatcttatccgctcaggagtaacatctgtcaatctttcttctttacttccttagtgtcgtacccttaattatagggtaaatacttgtttagttcttaggattttggctaatattacctacttagcttttctatttttaaaaaaattattcaaacatttctatgaatgttacttccatttttatagctgttgaattttttgactgatatatatatataggcaaacgaaaagatagagtattattaagtagattttaatgaaaactagtatacaatcgggatattttgcactttttttaataaaaaaataactggtcaattgacttaaactttatggatgaataatttaaaagaaaaaaaaatctataattaaaagagcattttacatgtactcatttactcaaaagtccaaaatatcactattgtttgtctgtgtttcctgaattgttctctgcgtttaacttgttaaattttagtaatattttgagtaatttttttaaataactactctaaagtgtgaggactaaagacgaatttatccatatacttttcaaaatttaatttgatgtgatctattgtaggaccctaaatttgaaaacaatccgtaca

SEQ ID NO: 85233 - DNA, 761 bp, Citrus clementina
  Intron number 2 from transcript clementine0.9_030128m (loc us clementine0.9_030128m.g) derived from phytozome v7.0 (c hr-ID scaffold_150; pos 216409 to 217169)
aggtaattataatttgtacgaggatcatctcttattgttccttttcttataatctctcagtgaaataaatggttaagattaaattttataatttaatattgacaattaactcaactttttcatttttttttctattcaagcattttttattttatttgcaatcactttattattttgaattttttttaaagcaaatagattttacaatttaggatttattagaagtctgaactcaaaaacctataatatagcctaaaaattaaattttgaaagataatggacaaaacccatatttatttttttgttccttatatactattcaggattcgaattcggacagcagtcaaatatatatatatatatatatatatatattaattaattaatatttgaggagatatatagtacgtgcctgttcctgcatttatgagatcaaattttgttgagttttccataataagacacattattgtgccctcaccattaacggatgccttagtgacatgataattggtaatcagagagcttcgctttcaatagtactttccgctccatacaaatcatctgtttaataatttaattacatattaaatttagacgttggggcacgctggctgcttcttcccaacaaaaaataaattaatagtttggtttctttaatccaaagtcatgcatacataatagtgattttaatgatatagtaatcattattttatgctgaaacaggagattggcggttacctacgcaaaagaaatcaaaa

SEQ ID NO: 85234 - DNA, 367 bp, Citrus clementina
  Intron number 1 from transcript clementine0.9_008863m (loc us clementine0.9_008863m.g) derived from phytozome v7.0 (c hr-ID scaffold_63; pos 823100 to 823466 reverse strand)
tcttccatcatctatttgtgacacctccaccaaaggtcagtacatataaattagtaaacaatactatgtatagataaaataaatgtacaagaatcctcttcttatcttttttttttttccactccttgtcttttttttttaaaaaaaataagccattaagattgagtttcacatttatttttttatctgtattaacaatcaaatcagtttctttatttagattacgaagacaaagagctgataagaagagagacaaataaggagaagatcctatttcataataaattgatgcatgtgtattaatttattaaatattttttaaatgtgtatcccctccatcacggttaataatattatatgtcagcta

SEQ ID NO: 85235 - DNA, 704 bp, Citrus clementina
  Intron number 1 from transcript clementine0.9_018831m (loc us clementine0.9_018831m.g) derived from phytozome v7.0 (c hr-ID scaffold_20; pos 1502310 to 1503013)
tacggatccagagggtaagttgctaaacttcatgtttaattccttgttcggctttcattattttgttgtaatactttatttattttttaaaaaattgagttaggcttttattttccacttgtttgaatttatgttttgttgcaatcgcttactttgttaacaaaattgagattagaactgcgaaattaaggagattttgtttaaaagagaataatatttcaaaaaaagtaatgatgaatgttaaatagcttgtttggtagtcattgataattgattaattcattctttgtattagttatggcacagatttcatgtatcatgattttatgatgatgattcgctgataaatttctttctcctcaagtcgtgtcatatgtgattgatgtaactcagtgtaaaaactgtgttactttgcatgcaaatttgtgatatcttttgtggttgtatttatttttctgctttgttttgcatcttgtttgtttccttgtgtactcttatataaatgtatgcgtgtcgattattcttgggagggttgcccaatatgataatgctttgaaaattacaaaagtcgaatagacattaggtgtctgggaagagtgggttgggtttggttttattaacaggttgagtggggattttttttttccttttgggtatggataattgaagggcaatattgggaagcgggggggtttcggacgggt

SEQ ID NO: 85236 - DNA, 1025 bp, Citrus clementina
  Intron number 1 from transcript clementine0.9_018611m (loc us clementine0.9_018611m.g) derived from phytozome v7.0 (c hr-ID scaffold_40; pos 22920 to 23944)
atcaattcttttctgctcacatctctccacttcaggcgagtgattaaatcttgaatttttttttttattcttttacaatttagcccaattcttttccgtagtgtaaataacaagttaatcctggggaaatagtggcacattttcactggttgttgtgtaaagagtttcagggatatgattgatatgctctgtttgtgatttgatagatacagatcagaccatcatcatctattgatctttggaactcactggagcaactaggtttatgttccagtgagttccaaattttggacccactccttccttaaaataatttccagggcccaccattaaacgggtgctttttatttttttattttttcccaaatttgaggtcaataaacctcacatgcggtatgcctgtatggctgtatctgtatgtgccccttttcttggatcaatattttgggttgtgactatagtatattgggtgtcgtactagaatataaaaataccgtccattcttagatttaattaatttgtgttaactttataattttgacaatgttcagactgtagtgcacgatatatttaaagttaggccccagtatttgggctacactaaattaattgatttgctacactgcttttggcttaaacaagcatgacttcatcgacatgagccatcctttgttgtggggtatatgcaattatctaagaagatgaaaatttttgtaaccattatgaaccccaggaaagtttgtgccaacaatagggtaataataagtaataaccaacacaaccacctccattattatgaaaggctaatgaattttggccccagataaaggtaatcaatcaagcccacaacagctagctttgtcttcattgcaaaagatagaaaaagggcacgttatgttattgttgccagccttgacttgtatgtaaagacatggttagcagtttggtggtgggttgcttgcttttattaaggttttgattcttcttttttttttctccccccctttgtatttttcacagtcagg

SEQ ID NO: 85237 - DNA, 924 bp, Citrus clementina
  Intron number 1 from transcript clementine0.9_012772m (loc us clementine0.9_012772m.g) derived from phytozome v7.0 (c hr-ID scaffold_20; pos 2576521 to 2577444 reverse strand)
atcttcgttcatcgtcgaggttttctcgacactatgtaagctgtttacggtcttcgaactttataccgtttgttcgttttcatttttgattgtcactaaaatttataaatcagtttcatcatctgcaggctcagatcaccaattttttgccatttttttttttaaacgacgatggttatcaaatttttatttggataagatgatttatatgtaatgataaagtgagatttgtgattatctaatggctgatctatcaatttagagaagaaataaaaaaattaaaaaagaaaaaaaaaggttgtacaagcatcaaagtggttgatgatgattatgtgccaagcaatgggtagatttggaatttggggcaaacaaacgcatgacgaaagtgtggttccacgtgacattgcacgtgacacattcattaagtcatgatctgggcccgctgggccaaaaaatcacgtgaaatttgataaaagttatttctattcgttttgtttagttagagaataataatgttcatgtatcttatattatctatcaattatctgctaaattatcttgatcttcagttttcacatctgcagcatataattaatttactctagaaacccaagtgaattatttaaaattaaggcagcgtactgaatgattataccggtttaatggatgtgattatgaagttggactatgatttatcagagataagaaattgttgtaatatatttgaatacggggaacattttaagaacttaaaatacatgagacaaagctggaaaatgtttaaataataaatttgttctctttgaatttgtttctgtcttactatctccccgcccaatttgtttactatggtttatgttatctaatttcttagtatgactacaagcaggcttcttctggaagtaagaagattgttggggtgtt

SEQ ID NO: 85238 - DNA, 767 bp, Citrus clementina
  Intron number 2 from transcript clementine0.9_034940m (loc us clementine0.9_034940m.g) derived from phytozome v7.0 (c hr-ID scaffold_20; pos 3977329 to 3978095)
tggaatttgctacacacatcctgaaaaattacctggtaattaaattgagtttaattctgatgagcgaaatgtgtaaattttctttaatatcacgtgtatgtggattatttattttattttttcatatatatgatatgacaatattttattagttggttgtttatagatccattgtattgctggagaaattctaaaacacattaaaagtaccatgtcaaccatacaataagtaaatgatgcagagacatgtgtatttattttgaaaaaccacaatgcaagtggtggatatattaagttcaattacacgtatcatacatgcattaattaattcgtcagtactatgaactcttggtgaagcaaaaagcagagtgatggttcattttaatccaaccactgtggttcatatcattaggttttctattaatgttaagagttggttaatacttaatagtagtatgtcattttaatccaaccactatagtttcttaattcaaagataattgtgtaaccccattgcccgttaacacccgatgaactaattaaatcaccgtttgccaacaaaggaaaccccagctaaccctaatatgtcagctacaaaagtcaagaaaatactccatgttcatgtatgcatacatatatatacatatacatacatacaaaaaacacagatatacaaatattcttttcttaattttaacatataatgtgaatcgtcaattaatgttgttatcctcatatacatatgatgcacgcaggagtttccaaag

SEQ ID NO: 85239 - DNA, 401 bp, Citrus clementina
  Intron number 1 from transcript clementine0.9_002463m (loc us clementine0.9_002463m.g) derived from phytozome v7.0 (c hr-ID scaffold_10; pos 993095 to 993495 reverse strand)
gctgccgtctccgatcgatcactgcagtgttaatcgtaaggttactgccggctgatttttttttgaccgttgaagcttgtgtcttgtcttgggatctttaataaacttactgtttaatttgtctctgttttgctgttctctgtttggttgccaagaaatgatgacaaaaagaatgagaaagtaaagttctgatctcgtcttttagattataatttcttcattgttttcccgaaacaaaaaaagaacgtgagtttaagatataggagtcgttagttccgggtttttctcggcaaccaaacagaagatttagcgttttggttgagtttatttgtttatatctttgatttctagtgatgttttaattgttaagtgtgtgattttgactcccaagtgcaggaaat

SEQ ID NO: 85240 - DNA, 536 bp, Citrus clementina
  Intron number 1 from transcript clementine0.9_031857m (loc us clementine0.9_031857m.g) derived from phytozome v7.0 (c hr-ID scaffold_40; pos 977122 to 977657)
tgaaacaagtagaaggtaacgaaaaactacatggcttttattggctttgttgtaagctacattatatatagcttagcaagaccctctgtattaatactttttctttcttcacaaagctttggcatttatccaaataaaaggttgattatattttaataaaaacatactttaatgagaatatagacattttaagtaattcttaaacatacgtcatgaattaattaaataattaactcaaatccttataactaaaaaaattatttaccttgcatagttgttttgtaaattttgttttgttcgctttgattgttggataagaaagaggaattaagcacgtgctttgactaaatatcaatatttgtcacggaattaaatctctatataaacttcctttcttcttcaaggcactctctcaaccaacaacacaacaaatacaactttcttcattcttcattttctcgaagcaaatggctacaagttctccaattaccatatattttatagcactattcgtggcaagctctataacatctacc

SEQ ID NO: 85241 - DNA, 433 bp, Citrus clementina
  Intron number 1 from transcript clementine0.9_001818m (loc us clementine0.9_001818m.g) derived from phytozome v7.0 (c hr-ID scaffold_20; pos 1831254 to 1831686)
tgtactagcgacttcaattttcattcagcacaaaggtactctctttcttctccctccctctggagtatacgtgtgtgtttgcttcatactgagttgcgagttgcgagttgcgagttgcttcatttggtttatgtttcagctccataaactttaaattttgttgttgtgttattcttttgtggacatgcatgttgaatcaagttctaaatgctgagactgggaattgggttgcattctatctgagttctaagttagtgtatgtgcatattgccgctacttaagattcaatattctacttcaatgttattctttttatcttttcgtctattctttgaactttggtttcttagaaatcaaactggttgttttccatttatgtcataattaagatggtaaaaactatgtgcagattgcattaacgagacagaaatat

SEQ ID NO: 85242 - DNA, 996 bp, Citrus clementina
  Intron number 1 from transcript clementine0.9_027835m (loc us clementine0.9_027835m.g) derived from phytozome v7.0 (c hr-ID scaffold_33; pos 103342 to 104337)
tcaggtaagttcaaattttattcgactggatccacatcaatcttgtattgttattaaattgcaggttggtattctaccttgacaaatcaattttgctttataaaggaaaatagagaatctgaatttaaatccattcctgatacaagctcccatgaatttttgaagattttacaccaaatgtgattttaattatattagaatttggttaaaatttattaaattaatcctaaaataaaatataaattaatataaatcatttgttattattttttattttcattaacgtctcataaattgttgcgaagatattgtaaaagtcaagaaaataatgggcacgattaatgtaacataattaacaatagcagaatcttgagattttttttaaaatatggggagtaaacgagtaattaaatcaaaatgtaggtactaaatgagcatttattctttgctaagtaaccaacttcaaaattgtaccctaaacaacatttaaatttaaatatagggaataaaaagtcattgattaatactgcaaattaatttagctttgttgtatcttcgaaagtcgagaaacgttaatgtagaatatatgttaattaagctcaaacaacgggatgatgatgtttaagatttttttttaaaaaaaaaaagacttgattttgtattaattccgtctacaaacaccttaggttttgattttataatccgaataatctttttgtccccataaattattgtcctgtctccaatatcaaaccagttagtgaaatttcattgtcaccagcaaagaaaattaaataaaatcagatcatttgtttgtcccattcaagctcaaagcatccacgaaactacataaatggctgaagctcttgaatgttaaagcaatactgcagaaaccaacttttttcattactaatcattaaacacagagatagaagaaatgggatcttaaactcccataaagcttccgataatcgatttctccaagccaaacctgaa

SEQ ID NO: 85243 - DNA, 458 bp, Citrus clementina
  Intron number 1 from transcript clementine0.9_006632m (loc us clementine0.9_006632m.g) derived from phytozome v7.0 (c hr-ID scaffold_67; pos 701201 to 701658 reverse strand)
gcttgagcgttttcatttcatctacgaaagacgaggtatttgttaatttcattgcttggtttcttcttcattatctttgattacccatttgtcttagatttcttgtacagtgaatcgagattcaattttgattgtatgaaaccataagctaactcattgcttgtttcttctctgttccgtataatgagtttttttatttctttgttaaatgattttgctttaaaatgcgaataagattatttatttttttggtgggcttttaatttcagttggttttgacctttgcttgtacaatatttttgtcttttcgttacagattaatgtagttttcttctgtgtttgtgtccattaaattaaaatgatccttgttttttcatctgatataacgtttgtttactttactaacaaaaacgtttacatcattgcttgataattcttgtgtcctttgcagttacaat

SEQ ID NO: 85244 - DNA, 744 bp, Citrus clementina; identical to SEQ ID NO: 79988
  Intron number 1 from transcript clementine0.9_012310m (loc us clementine0.9_012310m.g) derived from phytozome v7.0 (c hr-ID scaffold_1; pos 12303629 to 12304372)

SEQ ID NO: 85245 - DNA, 894 bp, Citrus clementina
  Intron number 1 from transcript clementine0.9_031250m (loc us clementine0.9_031250m.g) derived from phytozome v7.0 (c hr-ID scaffold_20; pos 1165860 to 1166753)
cctccgtcaccaacgtcgtcggctttagttttcttgtaagccttaattttctcttctctaatttcttcttcttttttttcccccaatacgctagagttttgaattcatgagagagttagcattgctactacttagtgatattatatatgacctacgtattgtattttgtggtattttcttagacattgttgttgtacaaatgacattaggagcggagcagccaagaatcgtcaatctagggggtcattgtgttataaataagaagtcattggggataaagtaaacaattcacaattttgaaggttcagtttctgaaaatatagcgaccattttgggttaagaacaatatactactactttcgtacataagacaaaaatgacaggaagtttgaaatgatttataagccgtgcgttttatttttgtctaagttatttgtatttttatttgaaaagaaaaagtgaaatgagatggtacgttactacgtgattgtcattttttttgttgataaaagaaaaaaaaaacattttagtcaattctgtcacattgattttatgtcaatgttagcttgactgttactaactaaatttgaattaggtaaaaaattcaataaaatctaatgtcaaagttgaatttataagaagatatatattttttattctcaatcacttatttactagaagagattaagaaaaaaaaaaattaagagagaatccttgtcattttttataaattcatatttcttttaattatttcataaatcagcgtgtatagatgacctgatacctctgatgaattttaatcgtctccaatgttttgataatgttaataacttggttacattttgtacgcgggaatcagtcaggattggccggtggattggagacattgtgtgg

SEQ ID NO: 85246 - DNA, 796 bp, Citrus clementina
  Intron number 1 from transcript clementine0.9_030161m (loc us clementine0.9_030161m.g) derived from phytozome v7.0 (c hr-ID scaffold_51; pos 812861 to 813656)
ccaggcttctgtcgacgctccgagaccagaagctggtataattcatttcttgataacccttcattttttcacaaattgtatggtcctctgtagcaatgagattttatctaataacaaaattttctttacttaatcattatgggctttaacaaacttagaattataatgcttgcttcatttttttttttccttctgtgattcttttctcttgatgtacaaggggtatgcagaaagggattcatgaggtagtcctctggttgtattttgaactttaagggagttagtgaaatcttgcttcattcgtttcaaagtggatgtaggcttacaatgccaaaccacttaattcttttttgtgtgctttacatttccaatttgctcatgcttcttctttattgagttagatcatttgtggtatggattataatctctagtttcgcttaattagggatttgatgattaattgcttcaagattgggtctaggggctaaagatcagctgcatgctggtttgagaatcaacaacaccattagtttctatttctttatattattgtttaatgtggtgaaattatgattatcctatgctaaatctttttacttgcgagcttgaattttagtctgcgagaattgaagtgtgctacaatttctgagatcaatagcatgaaaaaattgatttagtattaatattgttgttgttattattggttgattttcacttgtcttcgaatacatgactctctgactttatttgcttaaatgtagagaattctaaataaaattgtgaggaagatcagtca

SEQ ID NO: 85247 - DNA, 570 bp, Citrus clementina
  Intron number 4 from transcript clementine0.9_009487m (loc us clementine0.9_009487m.g) derived from phytozome v7.0 (c hr-ID scaffold_10; pos 4325601 to 4326170)
acaaaaaccaggtgagctttgtctctttcttgattttattctttgtatatacgactatatgtttttgttttctgtaaatcatctgttttcttttatctgcacttaccgtgaagtgggaatctttgggcttagccttgatggtgggtcatcttgttaattgagaacctacagtgaatttggattgtagtacctacagactttttgtagatgtacagtaatccgatttctgttgggtgatgttggttatgacgttataaaatttgatctctgggggcacaatctgatttggggtatcaattcgttagtatatgctgcattcattttgctaaagaaatcttcaaactcatgctgatgggactgataagaaaatttagctgatgtatcatattattaatagttaatccccattgaattagctgatgggattcaaagcatatgaaatttggccagccagagttgcatactaaatgatttatctatgcctaggctgttatgctaatattgtgtttttattaccctgattttgtgggattcaaatttattttggtatttggatactgctgtaggtta

SEQ ID NO: 85248 - DNA, 677 bp, Citrus clementina
  Intron number 1 from transcript clementine0.9_004298m (loc us clementine0.9_004298m.g) derived from phytozome v7.0 (c hr-ID scaffold_5; pos 943013 to 943689 reverse strand)
gaggctcggcgcgctcttgttccggactccgatcggtacaaatacgtttattattttgtagttctgtaaagattgttttggtcattagatcttgattgatataaggctgcgtatctatttgtgtatctttacttcaattatattaattttagtactataatttaagatattgggctctaatgttctgaattttacttggagttgcatgattgaaattggagctgaagctggatttttttttctagaatttaaaatctgaaaagtctttttattaattgaattttggcaattaaccgtgattttcttttctggtatgtttgttgttagaaccccattaatgatgaagtaacaaaatgagggttagtcacttttacctatttaacgatgaacaatagatggcttggcattccatggagcttatgtccattgtctctgtacatgaagctagatgttgaccgtgaagaattcctggagttaatagagttctggttaagcatttgaactttgaatttattttatttagttaattttgatttgggtctattgactaggactatgcattttatgtcaaatttctcttttcacttgctgagatatactctctgattttcaattttgataatttgttcaatgcactcttaggcgagcatttgaacaggcaggcagagctcctggct

SEQ ID NO: 85249 - DNA, 415 bp, Citrus clementina
  Intron number 1 from transcript clementine0.9_008632m (loc us clementine0.9_008632m.g) derived from phytozome v7.0 (c hr-ID scaffold_27; pos 1014542 to 1014956)
cagcagtctgcagtggctctcgcggtatggatgcgcatgctttcgtacaaaatttaataccataattgttttttaaattgttcggttttttaataaatttttaaagattaaataatttattctaataaaaacataaattttaaccttttaataacagagtttgaaaactttttaaaatatttaaatatctaaaatattttttatttgtttgacaatttattttataacataattttaaaaaaattattcattaaaataattttataattttaatcaattttttattggcaatcaaaaaattaaattttttttgataaaaattttactaacaggaactattcttaaatggattttatttttaaaataatatcaaacataagcttagttgtttaattttcttttctttttaggtgtg

SEQ ID NO: 85250 - DNA, 564 bp, Citrus clementina
  Intron number 1 from transcript clementine0.9_034299m (loc us clementine0.9_034299m.g) derived from phytozome v7.0 (c hr-ID scaffold_67; pos 134025 to 134588 reverse strand)
gttggcatattgatatttatagccttttacttcaggtgaaaactttcatcatacaattccactgaaagttgtctgaacattgaggcatttttatggaattatgaatctcaggctcctaaaagatattgttatgtagatattaagaaaatgaccaattatttcaaacatcaacttggccaaggaggctatggaggtgtttacaaaggaaaactactttgacggtcataatgtggcagtaaagctcttaaataattcaaaaggcaatggtgaagaattcatcaacgaggttgctagcattagcaggacttcccatgttaacattgtcactcttttaggattctgtttcgagggtcgcagaagagctctgatctacgagtttgtgtccaatggatcctcttgagaagttcatttatagaaacagcttatcgacggaaaatcatgaattgacacgagaaacattgctacaaattgtagtaggcgtagctcgagaattagagcacttgcaccttggatgcagtacatgaattctgcattttgacatcaagcctcataacattctcctag

SEQ ID NO: 85251 - DNA, 670 bp, Citrus clementina
  Intron number 1 from transcript clementine0.9_000021m (loc us clementine0.9_000021m.g) derived from phytozome v7.0 (c hr-ID scaffold_63; pos 540258 to 540927)
ctcgctgctggccgtaaaaaggtttttgtttttttgctttaattttcttttattcttggattataagtgtttagttgacgagaacccgcttcattgcctatgtttagctcataaataaatgaaatcactttctatattagttgcattattatatatatatatattagatttgcaatttccaagcctcgtttattatgctaatctcttgtattcaatttgctttctcagcaaaaaaactaatgcatttctgatggttagttgataaaataaatgaaaaactaggtttattagttgcgtagctttttggaattgctttactaggtttcgagtttgcgcgtctactgattagatttgtgttttcttaatcttgctttgtgaaagtgaaccctgaactcttttcttatgctaatcttatgatttttctgatcactagcttagaaataaacgaagaacttggattaagttctatgatttgtgtaaattacagtgataggattttctagtttgttcagtgcatttgctgattagatttgtgaaagtaaacagttgatctcgtttatgctaatcttttatgttgataccatatagagagggaaggcttttgttgtacattttgatatttaatttttatttatgttttatcagcttcaacaattccgacagaagaagg

SEQ ID NO: 85252 - DNA, 873 bp, Citrus clementina
  Intron number 3 from transcript clementine0.9_011370m (loc us clementine0.9_011370m.g) derived from phytozome v7.0 (c hr-ID scaffold_1; pos 11435511 to 11436383)
gaagaagtgttctgttatccctgttgaatttgtaggtgagtggcattgcttctcattttcacttgagcaccgacagtttctcacctgtggtttctgttgtcaaattatataaatattgttcagtgctggatgaacacagtatgatgttcctggaattctattgtcttgtaaacaccgtggaccatttgtgctgaaactgatgaggcatgtcatgtggcagctgtattcaaagttcacgagtatcttagtgaatgcaatcttatctgcgtgtgtgtgtgtgtgtgtgtgtgtgtgtgtgtgtagttagaggctgtattcagtgcgctaaaaaagaatcatgtattgagtgttttgacttgttatataataatgcagggatgcttaggtgaattctctttgagtgatatagcctccattgcatttatttggggttattgaaaactcaatgcatgtctgtttcttcttttccgtcttattatttttaattaaatgaacttgggaagatattttattgatggcctgtgagataaaaatttggttggccaactgtcaaagctaatgattttctagacatcaacttgctgtgcaaatgttaacagctcaaaacttgtggttagaattgttcttccatgttcgttgactgggttttcagtttctaatgggaggattatagtgtttttaagcagacaagtgatggtgaaatcttcattttctagtgtgaatcgtcatgtatataattttcattctgttaatttatgaagtttttgcagccacctggtgtcaatttactaattctgaaattctgaaattgatcttaattacgttggtgttttaaaagtcagaggttttgtgactggaagtactgatacctct

SEQ ID NO: 85253 - DNA, 657 bp, Citrus clementina
  Intron number 1 from transcript clementine0.9_001958m (loc us clementine0.9_001958m.g) derived from phytozome v7.0 (c hr-ID scaffold_1; pos 12319638 to 12320294 reverse strand)
aatccccgcaatcaatcgctacactcttcagatctgtaagttgttatccttttatgtgatttttttttttaatttaactgagaaaggaagttgttttttatatatcgcctttttttttttgagtctatctgatgagattgatttcactaatctatgatttttatcgtattaatctgattgatgatgttagagagaaaagccaagaaaataaagacaaattatattttgatttttgaggtccgtgcagcgcgtattaagcctgaaaagaataggcgtttggcagtgccggtgtttttctgttataatttatacattaatctatttatgaattttgctgtgttcttctttttaatctttatttattgctaagttcggttttctttgcttctttgcatttgtttgattgcttgctggctcactgtgaaaacccgaatgtatctgaaatctgtctaaccttttttattgctcagatttttatttattttttaatgtttatttattgctaaccttctttgcagttttagatatttacagaagagttcttacaatttttttttgaatttatattctatgaaattgatgagttattgcagagatttaattgataagttattgttgccagattggattgctgagtaccaacgttggtctaagaac

SEQ ID NO: 85254 - DNA, 768 bp, Citrus clementina
  Intron number 1 from transcript clementine0.9_009104m (loc us clementine0.9_009104m.g) derived from phytozome v7.0 (c hr-ID scaffold_10; pos 4029012 to 4029779 reverse strand)
tgggtggactcctatagaggtactgctttttaacctctattaattatctgcagctgtttcctcgcttaatttccaattggtcgctgccgcctttttctggtgcgcttgtagcaaccaataaagattggccagttctgtttgttggaatagtgcactttttgacatttgtgtaatcttctgcaatttttttaataaaaaattatagaaatgttttagacatattcaagttttagcattggtgatactcttatcattcttactaaatatgaaaaagaaaaaaaatacaagaaaacgactttcaattgtttgatgcattttgatatgaatgttagtttcataataagggtgaaaaaatgtagaatttttcagaaaccaaatctagaatgggctttaaaattttgccaaacaatatttccaaaattggtaaatggcagaattgaatccttattgcacttttcagctaaaatcctgtatcaaactttctagtgaaaattcttacatttattatcacattctacagttttaagaaccccctttttttcattttcattaaatctcaacggtccaacagaaagttgtttattttattggcatttgagtgttaggctcacaaaaggcatatttaatttactttcacacgttgaaaataacatagtacaaaattcctatatagactgcaaataaatgtgactaattttgatataaggtctgaatgcgatatttcttgctctgattttcttcaaatgcagggtgtctcgtgtgatatct

SEQ ID NO: 85255 - DNA, 349 bp, Citrus clementina
  Intron number 1 from transcript clementine0.9_014804m (loc us clementine0.9_014804m.g) derived from phytozome v7.0 (c hr-ID scaffold_122; pos 572861 to 573209 reverse strand)
gctgaagatctctgttccttcaccaaggtaaaatgtttatatatcttctctctttctttcttttctttttttttccatttaattatatttttggttcccatgtgagtgtttgtgatctgggttttgaataaataatattttgtttcctttgttttcgggtttccttttgtcaaacagaagcaagtccccattacccagatttccttttatttaggacgtgtgtatagttaacttttgtttatattaaaagtgattaatgaatgttttgcatttcttattgtgtgttgacatctggttaaatttttaaatttcaggatactttcaatttaaagtctcctaagaagtctcc

SEQ ID NO: 85256 - DNA, 1060 bp, Citrus clementina
  Intron number 1 from transcript clementine0.9_020077m (loc us clementine0.9_020077m.g) derived from phytozome v7.0 (c hr-ID scaffold_53; pos 214770 to 215829)
agggtttttctaattcaatcgaactaatactttaggtgagaaattctctcactggatcctcttttcacttcctttctaatctatttcacttcaatcgcttcaattttcactctctttgtctccagagcctgagttcgatctagggtttgctttatctagtcctttatatatgtgttgattttatctgtacatttgacgaaatgcagcactgggtttacttgaatgatcaagatttcatatgggcatttgaaattctaacattttgttggataaaaaatttagacttttgaccttatgtaagaaaaaattattgatttgctgatgttttgatctgcatgcaaaatgagttgcgtattttgaaaataaccgatgttgttgtatatatatgattgttaaggattattgctatctttttgtcgaacgggccctctagattttttctttttctttttctttttggttttatgaagtatagaagctcgattaggagagatttgagttgtatttggttaatatggttgccaaagatttgattttggagtcggttgaattgtcttttgcatatgctagtattggagcgtgcttattatgttaagttttgtgaggtaatcaacttggcttttgatactatgaccgaaaaaaaaaaactagattcttgccctacatttgatgcatgtgcatttgttataaattttcatctatattcatgactcccctgtgtactgtatgtttgtaagttagattctgttgggtttattatattgcagttgtggtcatggaattgacttgatcagatgaaggctttgttttggctattactttaatttagttgtctttttgtattgattagaaaagcggttcatagccacctgaaaattttgatgctcgtttgtatgtttaaatgattttgctgctgtctttcttgttgtctagtgcatctctgtgttcaatgctctagttttgaaccccatgattgcatttagtttactttacaatttgaaaatttcatatcttctcctttacagggaatttcttctgaatcagctgcttttggtgtctc

SEQ ID NO: 85257 - DNA, 788 bp, Citrus clementina
  Intron number 1 from transcript clementine0.9_018230m (loc us clementine0.9_018230m.g) derived from phytozome v7.0 (c hr-ID scaffold_98; pos 384362 to 385149 reverse strand)
aagctttctttttgttagcttttattgcttgcacggtatgctttttctttaattttatactctcgttcttgtttttttttcttcttttttctttgatggttatgtctgtttttgtgtgagtttatgagcgtttctttctttttctttttttttctcattttgttctgtttagtagctttagagtattgaattcgtttatggtttgttttgtgaagctgtatgcaaatttgaacaacatggtagtatggggcatggcaacaaatggtgattatatcaggctttggatatggttttgtgggttttattgtatttgagagcttaatggtttgggattgtttgtcgatagttttcgaatcaaactgctgtctggacctgcaaatttaggagaatatttggggattaggtggtaaaggcctgaattcattggtgggtaatttctcttgtgtttttgtgggttttcgagtaatttggatcgatctcataagctaatttgctgattacaaatatagtttgtgaactagttaggagaatatttggggatgacattgaggtaattaatgggataatgttgtgaattcttttaactgaaaattctttatctttaagttctttgaacactgaaatggtgttgttaggtttggatttctttgagttggaaaattttaaatatgattatccacctttggttgttgattattagtcttggctatttggtttgatactcatggaataagtcagtttgtttgcctgcagacttctgtggcttttacaagtcttgttgttgcggc

SEQ ID NO: 85258 - DNA, 920 bp, Citrus clementina
  Intron number 1 from transcript clementine0.9_016874m (loc us clementine0.9_016874m.g) derived from phytozome v7.0 (c hr-ID scaffold_1; pos 3185209 to 3186128)
tttcgttctccgtccgtctccactattccgaaccggtggctctctatctctctccccacctctcactttaattcagtatttatttttttggcttcaaaggatacgcctcttctgatgaataaatggaaatattaattttttaaaattatttatcttttagactatatattttaagttaattaaactgcttctcaattctcattgaacttaaattagatttcctttttggaattttcatttttcaattggaaaggaaatgagtgtttccggttcagaaaagaaaaaaagtatttttttcttctatcgataattctgttgtagctattaaaatgtgtgttaaaattatgtatgttaaatttccgtctacaagtttattaattacagggttttgtaagacttttctttgccagaagataaattgcacaagaaaaagaatcaaaaactcaagttttggtggaattcagtaatatatagggcagtagaattgtcttgattactcaaaattacgaggggattatctacaaattgtttgttaattaacaaagttgttggggcgttactgggggaagaggcattcccgtttgagctcggttaatagtacattggaagaacaattgaagaagtaatagaatttggaatactgagaattctttaaagaaaagttataagtttctcaggtgttttacttaaactgatgataaaataagctttatacatagttgagtagtaaccccattggtctcaaaatcttaagctgatgggagagagtaaaaaaaatggttttattttttggccctttacgctgtatgctgtttgtgtttttcttctatcgtggttttaagacctgatctaatcattttatgtggttttcttatctgattttaggttctacaagtttagagtcaagtgcagccgtgcgg

SEQ ID NO: 85259 - DNA, 882 bp, Citrus clementina; identical to SEQ ID NO: 84851
  Intron number 1 from transcript clementine0.9_017737m (loc us clementine0.9_017737m.g) derived from phytozome v7.0 (c hr-ID scaffold_53; pos 1110013 to 1110894 reverse strand)

SEQ ID NO: 85260 - DNA, 377 bp, Citrus clementina
  Intron number 2 from transcript clementine0.9_023456m (loc us clementine0.9_023456m.g) derived from phytozome v7.0 (c hr-ID scaffold_1; pos 7407662 to 7408038 reverse strand)
actcatttacaggtctgtttatctgtcttgcatctcttttactgtctgttactgtttgtgctccatgcaaattggatgtagtggtactatggttctggcaatttagtccttgaaaacagggaactttgcagccctcagaagaaaatatgttataataatgtgtttgtctgtatggaaagtaatgtcatttatgtataacttaataggtgtcaccgtatgtagaattcaaaattaaggcaataaagaaggccagaagggtgaatatctaaagggtgatgacaattataatttttcccctcatgaaacttaaggggcttatttttttcctcttaattatcaaatcattttcttttttatttgcacagactgcggtaaac

SEQ ID NO: 85261 - DNA, 802 bp, Citrus clementina
  Intron number 1 from transcript clementine0.9_023456m (loc us clementine0.9_023456m.g) derived from phytozome v7.0 (c hr-ID scaffold_1; pos 7408042 to 7408843 reverse strand)
gtgctcttcagaacttggccttgccttgccactaggtgagtgtgaacttgcattaaatgttaaaactatcccaaaaatggtaacttttggtggtttgcatatttgggtttgttaaggaaaagatttgatttttaagaggttttgtggagcttcttttagaaacttttttttgggggggggggggggggtgtgaaaactacatgcttgacattattttgctgtgtatggaagtggaatatcagttggtttgtttgcgtggtctgttttatcattgtgttcttcaagtaagttcaatgatcgttcacattgattttgctttcttgactgatctttgtgcatcctcagtctctgattttagtatccgattggttctgttacactcttggatccacgtgttgccacatttcataattgttgttacaatggtgtcatgaagtgaatgagaaatgagaagtcatgataattgaatggctttttgtttcgactataaagtgcaagtctgtatggagtgagttcagtatgatttaattatctagaaactgtaggttactaccgacagtttatctaacagtcatttactgtgcttctagttaacttcttgttttgcaatttgcacactgagaaaagcctttatgctggttatggaattaattatgcttagcgttgagggctgtgactgacctttaagcagatacttgtatttcacagttttgttctgttgaaaatatacatttttagtttctagaacatggttctgttatttaatcttctttcacttttatatttcttgcaggacctaaca

SEQ ID NO: 85262 - DNA, 606 bp, Citrus clementina
  Intron number 1 from transcript clementine0.9_020793m (loc us clementine0.9_020793m.g) derived from phytozome v7.0 (c hr-ID scaffold_111; pos 276730 to 277335 reverse strand)
aggtcggtcttacatttgtttcagataattaagaatagttactttgatgcacggctgatgtaaatgcatttttattcttggttggaaaatgctcttagacttctgtttggaaaattacttgataaatgattctgcacaaaacggttttgagttagataggctctttttaagttagttctcatgaatggtaatgccttgaattatataaataaattctgtctagaaagttgatatcatctgcaacaattactattctgttcgcaaatctgcttgttcttgagactgaaactaaattggtcaatctagtgtagtccagaaaatggtaatctgtaccgtgtcaatttattgtactgagaagataggtcattcagaaatgtttatactatgacataatgagcataattttatgcaatttccttataaaaattaacgtataatgatgtaaagtgttgctgtataacttgtaaaaccgtccatatttgtagcgtatcttctcctgtattttctgttgcagatatcttgatggttactcctaagatttgtttgtaagtagtttttgaagcagtttgactttgattttgaccaaactcttcaacaattcttagg

SEQ ID NO: 85263 - DNA, 701 bp, Citrus clementina
  Intron number 3 from transcript clementine0.9_028740m (loc us clementine0.9_028740m.g) derived from phytozome v7.0 (c hr-ID scaffold_53; pos 437067 to 437767 reverse strand)
aggctgcgaggattaaaagtacgtaactttaacttaggcatcgtcatgttaatcaaaggtttttttttttctctatttcatctatatatctatatctttctggttttttttttttaaatttgtttcttatttatctataggaaagggccaacggtgtatttgcaagtaaagaaagttgggtcggtataacaacaacgagggtaagaatttcgctcatcttattagacacttatgatttatgtctgttcttttgttgtttttattttcatcaacaaacagtcacattagtaatcgtataactttgaccaatataccttgctgcttctattgtttattaaccataatttatgaaagcacatgccataggaaacatattgtgaatatctataaatattttgaactttttttccctctctttttgagacaagtagcgaatattatgttcttttattctttatagcgaaaggagttgggaagaagttgttaataataagattattgagaaaaatagtttaaagaaatatcctgtaaatttttaatgtagttgctaagttaaaagctaagatgagtagtggttcttcgtccaataattttctttaaatttctctcttatttcgttctataatatatattgtaattaatttttccaaggaaattttaaaatagattgaaagctggtctttggaaggaggggagattaa

SEQ ID NO: 85264 - DNA, 744 bp, Citrus clementina
  Intron number 1 from transcript clementine0.9_030260m (loc us clementine0.9_030260m.g) derived from phytozome v7.0 (c hr-ID scaffold_65; pos 1366486 to 1367229 reverse strand)
taaagaaactgaagatacaacaacaaccttatcaggtttactttacctaatcttagatttaaaactactaaccttatatatacagatatttcaatgtgtgtgtgtgtacttttattgttatgatcattgtaattgtttatttcatgtggacatttggtttggtttgtcatcatgtatccatgaaaatacgatttatctttgcccagctctaacatctgtttggttggagtgttttcagcatcagattgtctaaacagaaattttcatatctatgttcatttttcatcgactgtttgtatgagtatgggttttttattgttctgtaacttcttcacatgtaagaagaaacttgctttgatttgttatgttgttggatggtgagtacatagtttgaatgcgacttagcctttgccatgtttactgaccccagcctttttgtctcttacaaattatggtgaacttacttgaatgtttataggttatctaatgaagcaatcttacctagtgataggagaattttatctgtggagaccagaatggttttatgcttgtcattttttggagactgagtttccttctttcctgaatgtatagtaatttattctttggatatctagttatcattggttcttgaccatttgataacttttgacaattgattttcttttcatagttttatttggtgtttgactttctgtcttatttccaggggagcaggctgagtgtgctatagcagttccagat

SEQ ID NO: 85265 - DNA, 509 bp, Citrus clementina
  Intron number 1 from transcript clementine0.9_004618m (loc us clementine0.9_004618m.g) derived from phytozome v7.0 (c hr-ID scaffold_53; pos 150720 to 151228)
ggctctaagatcttctaaaagctccaataaaacaggtcagttttgctttgtactgtccgtacacgttagattttttttttaaagatttaaatcaaagcctttttttttttttaatcatcacttgtatgcttttcttagcttctcttttagaaacccatttgtgttttatgcattttgttcacgttcgtgattataaaggcctgccaagtgccaaagattggaacttgagttatgtctttctgttgctcttgtcttgttgttattactagatcaaaaagtggattttttctattaaatgttcgttttaatcaactatgttggtcttattgaattgtttaaccaattctttgatccttctagcattttgtttgaggattcttcgtttggtatcttccttagtgatcatttcatttgatagaaagttatgagttctggtttgcagaaaattgatttttctgtttgttgaaaattcagggatttagagggcattacgtgttggagcagtgctg

SEQ ID NO: 85266 - DNA, 1003 bp, Citrus clementina
  Intron number 2 from transcript clementine0.9_030357m (loc us clementine0.9_030357m.g) derived from phytozome v7.0 (c hr-ID scaffold_1; pos 5526107 to 5527109 reverse strand)
gccacgaggttttgctcatttagttttcaatcttctgaatgctttcattggcctctgaagtacatttttccctaatatgtttcagttttaccattcatcctcttgcctaaactcaaaaatttcaagtaaattggcttctaacctcaattttttcaaagtaaatagcagaggcttttatcagcgtttcggaaaaaatatcagcagtcataatttttcttaggagttggcattatttcaattcacaaactttatttcattttgaactagtatgtgttattctgattttgttgatggtgtaagaaattagaagaatttttattcctttttgttaattgtgaacctgaattaagagcttacggagaagatgactttgtcgtgtctaggattaatcaagtaacgacaaagcaatcagacagataatgctgtgcatatgacaaccatatcctgtcacacgaatagcttaagtaatgcacgtgaattgcacgagcatctacggattcaagctttagttaaacggcagcagcaagtgtcgtttctaattaaaaggctgttatcaacggttagccttggcgggaactttctgggtttgtttcaacaaacccagaacaagagctggcaagcagcacacttatctggatccttcgagagctgtatataaggtctccaaggccaagtttagataaccaacgttctttgtaacaaactctctaagtcttgtaatctgttaagcatcaaagaaaagctatggcttctgtttctcaagaggatgtaggctacccagccgaacctctataattctccttgtgtccggtttattctatgcttttaatctctatttctgtctaaacactcttgctttatttctgattactatcttgggtattcattcttgtttcaataagatcagtgtgtggagatttcttggggaaagaattaagtttaatcaaacataattctcaacactttttttttttaacttttcctttcttccaggtggatatat

SEQ ID NO: 85267 - DNA, 633 bp, Citrus clementina
  Intron number 1 from transcript clementine0.9_004636m (loc us clementine0.9_004631m.g) derived from phytozome v7.0 (c hr-ID scaffold_20; pos 2657834 to 2658466 reverse strand)
ttcgatttgggtgtggcgcctcgggagtgtaggcggtaggtttctctctttaccgccctttcatttattatatatgctaatgctgccatcttcttccttctaaaacgcaaatcgcttgttcttgtatttaatttcttttgcaagttcaggtctcttacctctctttatctgtttttgttatagacaacaagatacaacctctatatgtgtatttttatgttctcctgtttttttggtttctttttttattcttgttttattttcttctctgtttttgtcctttttcttctttatttctattctgcataattgtcaatttgattgtgacataacatgatgtttctttctttcaagtagaacattctgtaaaacttttaaatttttgtttatgggcagtgttcttttttgcaattaatgtagtatatatgagaacaggggaaggtgcacgaagctacccgttttggtattatggtttgttggtgacgtttagctcaaacttcgcctgacatccaagttcttttgcttggaaatataagatgatttataacgtagatttttttttttctttgacttttaaagtttgttggagttgttttgattttgtgtttattggttatgggcagaaagattgca

SEQ ID NO: 85268 - DNA, 822 bp, Citrus clementina; identical to SEQ ID NO: 79804
  Intron number 3 from transcript clementine0.9_023043m (loc us clementine0.9_023043m.g) derived from phytozome v7.0 (c hr-ID scaffold_1; pos 11307518 to 11308339 reverse strand)

SEQ ID NO: 85269 - DNA, 839 bp, Citrus clementina
  Intron number 2 from transcript clementine0.9_015144m (loc us clementine0.9_015144m.g) derived from phytozome v7.0 (c hr-ID scaffold_33; pos 1634186 to 1635024 reverse strand)
aaagcattgcagcttactctatccttcctgttctggtatgttctgtaacctaagcaaataataactatagacaactgaagtgtataataataatgtctattgtccaaacaaaaagaaactgcaattggctatagcattttgggcaatcttatggcttgcgcttactcatcacagacgttgcgtgaattcttagacagttgtgcgtttatattgtttgtcttcttcagctgttttgatttcttcactgtggtctgcctttttagtagagttaagatcaaatgtgttgcatttcttttagaggagggtgatatgtataaccagaagaggactgtaatttcttagggttcaaagaatactatatttggggtatgatgttcaattgtctaattgaattgcgaggtccctatgggaatcataaaatatgtagatgtattttgagcatacatagtttatcaaatggaggaggttaaatattttggaacctgtttaattatacatagtcatgacttgtcatgttaaatgggtaactaatggtaaactcctatgcttttaatgagattatgtgtggttgtattccatacaacatcttgaaagtatctattgaaccatatattaacaaagtgggtataataatccaacattttttgtatatgtgatgtgattggggaaaaaaaatgagtgttttataaaacagaaggtggagagttgtgaagttaacagttttgagagaatgagtgcttttgtttctatcttctccaaattctagctatctaaacttttttttttcttttcttggaaaacgattgtttaaatttgagccatcgttcttgcaggtattc

SEQ ID NO: 85270 - DNA, 814 bp, Citrus clementina
  Intron number 1 from transcript clementine0.9_014788m (loc us clementine0.9_014788m.g) derived from phytozome v7.0 (c hr-ID scaffold_1; pos 7811180 to 7811993 reverse strand)
attccaaggtgtgtttttcttttccctcggaaaatttacttattttgttcattttgtgatctttttcgttcaaagttttgttgaaagatttgaaactcctgatgggtttgctgtcggtatatggatttgatcagtgttttggtttctgagagttgaaattttctctgattttgagtcggccacttgggggaaatgatgcatatgtcgattttttgtactggtttgttgttgttattgttccttttgtttttggttttgatttcctgtcataggatgctatggttggttttaagactctgggttgcctaaagtttagattttgccccattgcttctacttttcttctctttttatgctgaagttgaaaagtcaacagttccgcttccagtttaaagctgttttcagtaggtttttgatagattttgaagattatttgagggtcttattaaaaaccaaagaaaaaaaaaggattattggagggtttgcttatgagtttcttttactattgttatcatcgttatcactttttatttatttattttttttggggggatttgatcaatttaatttggagggcacctttgatttgcatttttggttagagccttgacttttgcttctgtcccttccatattggcatctgctccttgattttctgctatgtaattaaagtgtgtgattgttcatatctggggtttctatagctcttttcttttatattgttttcagtttcttaacttctgtttggatagctacaaatcttggtaatatgttggcatgaagttgaagtctgatcctgtgattttctgtctag

SEQ ID NO: 85271 - DNA, 608 bp, Citrus clementina
  Intron number 1 from transcript clementine0.9_021214m (loc us clementine0.9_021214m.g) derived from phytozome v7.0 (c hr-ID scaffold_51; pos 754394 to 755001)
ctcgattttggattaaattcgccgaagacaagctggttcgcaccacaactctagcaatcccgtttataagtgtattcttttcaaatttgtttatttattctatggtttagatgagatcatgataataagaaacttcacccactaaaccaccaactcttattctctattactcagatgatgcacgtaaagcacgttcatagtcagtcgagcctagctgctcaagggcctttttcataatttattcgtgaaaaattccttaactttcaactttttggtccttcactattttttctctagcaatttttagaaatcattagtggatttaacttcctcgggtgtaaattactgaaagacacaaaacgttaaacttaactgtttttaaccatacgggggattttgattattttcaaaacatttaaggaaaaagtaatgaatttaccgactctcttaattgacttatcaaacctttaattaaaggatattgtgacgtgtgtacacattgtctaagttttcgagcttagtattaatcatgtggagataatttagatttttttaaaaaaattattgtggcaggttgttgctattttgaaattgtttcgtagcattac

SEQ ID NO: 85272 - DNA, 600 bp, Citrus clementina
  Intron number 1 from transcript clementine0.9_032437m (loc us clementine0.9_032437m.g) derived from phytozome v7.0 (c hr-ID scaffold_1; pos 6089112 to 6089711)
gtcttccatgtgtgttgaagtggcagaaggaatatgtcatgaaaatatgtttgtctctattcaattcatttctttggttttatacgataatcttcaaacagagaattaggataaaaattgatttgtgggccattggttctagaagaaccttggctgtagactagatatcatccagtgcttatgatgatttgagtcttttagatttgcgattatgtgctttatcttggaattggtattagctatgctgctgtggaccaattcatatgtcaaatatatattcaaaaggccacaaattaattttctaaaggtggtactattaggctttacctatagccgtggcgaaatttttccctcctgtgagctcttctttattatgggttgtgactaattcttcctcctttcttttcctttttcttggaatttgttctttgtaccaacccaataaattttgcaattttttttttcaattgcactggaatatagtagcacttggacaattgacttggcaatgttgcatttagtgactttagtatactttgtggcctaatatttgttgtgaaaacgtgtccatttgactttgttgtttgtatcagtgctgga

SEQ ID NO: 85273 - DNA, 633 bp, Citrus clementina
  Intron number 2 from transcript clementine0.9_015035m (loc us clementine0.9_015035m.g) derived from phytozome v7.0 (c hr-ID scaffold_10; pos 4392552 to 4393184 reverse strand)
aactctggtaagctcaactctttccaatgactcttatgctttttctattccaataatcaaatagctgtcaacgaccagagttttgttcttcattgttagaactctggcttcttgaattaagttatctcttacaaaaggaactcataagagctgtacctacaaggcagggcatgcaatttgtacgctgatcgatatgtgaaaaacatgttttattatcatgggacgtgttcctatcttcttcatttgcttcatttgtaactcaacttgtttcgggccattttatacttcatagggagcattatatttctgtaattcttaaacaaattttcttcatgtaatcctttttaaaaacagttaaatctggtccgttttaatttatggcattttgaatattgggaatcaaattttattaatttttttcctcatcagctgagtagacatttctgtactttttgtttttctcctttacttgtggggggttgaggatgaagggctccagaactcaccttgtctaacaggactgaaagttgatttgcttttcattatcgaattttaaacgaaacattctccatgctctatacttcataattttttcatgaacttttggcagagtagtcgggattcgtctgattg

SEQ ID NO: 85274 - DNA, 495 bp, Citrus clementina
  Intron number 1 from transcript clementine0.9_015035m (loc us clementine0.9_015035m.g) derived from phytozome v7.0 (c hr-ID scaffold_10; pos 4393237 to 4393731 reverse strand)
ctcctgtacgttttaacctctctgcactctgcaatttctttcttgtcaagtctctgctttcattttaattgggtatttcaccaagtttcttatatgttttctgagtttgaattatcttattatgtttgtgtaactttgtttcttccctataacattgtgtaaaaggaaaaatttgtttcttccctataacattgtgcaaaaacctttcgccagtctctattttcttcattttcaaattcaattgctcttttatcatttagtacatgttatttgactgtgtataagtctttgattatattgatgatgcttttgaagaatgcttcaacttactttcatagcccacatgagacatgtcttatatgtttttgtttggggaataatttgtcaaaccgaacacttcagcaattgtttatgttctgtatttacagaagaaagattaagtagtttgtatatctaacagggagatcctgtgtgggccatcagttcggaaacagt

SEQ ID NO: 85275 - DNA, 723 bp, Citrus clementina
  Intron number 1 from transcript clementine0.9_035669m (loc us clementine0.9_035669m.g) derived from phytozome v7.0 (c hr-ID scaffold_40; pos 1615608 to 1616330 reverse strand)
tgccgctttggtaccaagtgccaggtaccattttaggcattcgttgactcgtttattataccatttgactcgtttattatgccatttgactcgtttattatgccatttttaagcattttaacattattatatccatattcaaatagcaaaaaacagatgcatctatttaattgtgtttgatttatatgccaagctgaagctgataggtaccttttttataaagcatgtccgaggataggaaactacaataaagagtttcaaattcttgtgtagaaagaattatttttcccaaagaactttctaagagaactcttcaaacaaacagacctggttaattacatcataatgatgtcctagcatttttatgatcattagggtgtacgtacacacataaaatgaacaccacaagctgtttttgaaaatattttgaatgaaataatgttagtggagggtgacttaagatcatcaacagctctcgattgagtctcctctaaccctttgattcgtatttgatcacatcttctttctggttgttatttcatggtcacgtgtaacagagcagggtcatgaactgaccaaatttcctagggctatggtgaccttgtcatgatttgaattttttatggtgaatggctgtcaccattatcagcatctatgcaaggatgactcttttgataatttgatgatttatgaacaaaattgttcattctttgcagtttgcac

SEQ ID NO: 85276 - DNA, 786 bp, Citrus clementina
  Intron number 3 from transcript clementine0.9_021031m (loc us clementine0.9_021031m.g) derived from phytozome v7.0 (c hr-ID scaffold_111; pos 444662 to 445447 reverse strand)
ccagtttggatcaccagcggcttctccagaggtatgtcttatacttagccactaaagtgggcctaatagttttttattatttttgttttttagaactaaacttttgttcaaatttatttattaatgagctaaagaactaaagttttgctcaaaatgtatttattaatgaaatacatagttctttaggaaacaattgtataagaggatagttatatgagaattacatgctagtaaaatgtgctcgtcagttcttctttgtaatctgggaaggaagatctgagaatgactcttgacctgaaaagcctcacggtgagaagccaccgagttattggccatctttatgtggatttatcatgacatgggaattgtatgggcaaatgaaatctcaccaagtaatattggaattttatgatgtgaggaagctccctcttctgcatggatgaaaaggtgtatgaagttatctggttgtccatctaatcatgttaagagaaccttaaatatgataatttgaaaagaatccactttggtggttttacatttctcaacatatagaaagtatttctggccatccccacatgattcactaattttttctctgtataatttctgaatttacccctttcttccaaacttatgcatgttccttgcctccttggtctgtgctggacagagtatttgctagaagtttttaacaggaaggtctttggatgctgctgcttttgtcttagagttttttctttggtgaaggtattgagtaaattttttattattgttcgcccaggctaa

SEQ ID NO: 85277 - DNA, 852 bp, Citrus clementina
  Intron number 1 from transcript clementine0.9_021031m (loc us clementine0.9_021031m.g) derived from phytozome v7.0 (c hr-ID scaffold_111; pos 446274 to 447125 reverse strand)
gtttatttgagataaatcatccatctcattcccaggtagcaagacttaatcgttttcttgaattctctcaatgtatgtaattaaatcttattcattttgattggtttcttatattctcttgaatcttgatgatcagttttttttttttttttgctttttattcttagttccatccaatgattagcctcgttcttgttttggatttcaatcatagaaatggaatgattaacattctctggacagaatgagtgtgcaactgttcattgtttggacagattgattcattttcatggacggccatctgcctgttgcttttacatattacataaatactgtgtttatgtgttgatataattcagccactggcatttgagcttcttttgtcgtaatgggtggcttcatattgattgaaatctttattgggtcgtgtcatgttcatcacatttgcatattgatgattgtagtctattaattggttcattttatcttcatctttatgattgtagtctattataacatattgatgtgttacgttgcttttacattttacataaatactgtgttcatttgttgatataattcagccactggcatttgagcttcttttgttgtaatggatggcttcatattgatcgaaatctttattgggttgtgtcatgttcgtcacatttgcatattgatgattgtagtctattaattggttcattttatctttatgcagtgttgattgatatgaatgtatcaagcatgtcaaatgtgttatatctttattttcattgtaatggtagtgattcatttaagtttttatcttaagcagttctgtggcaaagggctgtttacttggtgtgatca

SEQ ID NO: 85278 - DNA, 709 bp, Citrus clementina
  Intron number 1 from transcript clementine0.9_022493m (loc us clementine0.9_022493m.g) derived from phytozome v7.0 (c hr-ID scaffold_20; pos 1749234 to 1749942)
accaattttgttgctgccaccacaactcattccctgtaagtttttctttttttaaaaaaaaaattcagttaagttgtttataaaatagagtaatgaaatttggattgttgctttagagtatttcacttccgtatttgaatttgtatgtagaaatgagatgaagacattcaaataagctttctcactgacatgttttggtcaattgcttcgaaaatggtttactttataacctccctgctagtgcttagtgttagtgctagctttttgttgtgtgactggaaaagttaatggagaacaaggatcgacacctatataaccatcttttgatttatcaagtctgaaaaagaaattattattattgtattcatgtttgtgaaattctgttgttaaattagttgatggatttagaatttctggtttctgttctttctttatgctgttgttgaaagtcgggcctttggtaggccatttcatgatttgaattggatggatggtttagagtttcaggttttagttccatgtgaatttgacctcccttgcatgatgacatacctaattttccgtattaacattgtacattttattcctctatgctattatggaaacatgacattggttatttgccagactatgtgttttttgttaatttatgtacaagtcaaggcaggacctgtctttcttgactgtatgttttcctttatgtgacagt

SEQ ID NO: 85279 - DNA, 976 bp, Citrus clementina
  Intron number 2 from transcript clementine0.9_008979m (loc us clementine0.9_008979m.g) derived from phytozome v7.0 (c hr-ID scaffold_82; pos 250287 to 251262)
gcggccatttaccgtaaccccggcgcattttatcagtaagtagtttactttgattatgttttaattaattaattaattaaagcttataatgaaggttttggaactgctttgcttctaagctaccgccggccaaggcaaagagagcataagtgtatcgcagcgttagtttttcttgtaactgacgcatgcatgcatggtgatggtgtgcgtatatacatatagtgcgcactacgcactcactcattgctctggatcagttttacaattgattacttgttttgtgcatcatagctactgcaaaaacgcggcgctgctactacacatctttattttcacacacacatatgtatgcatgcatgcatgcatgtatattacacaatatcatgatatatgatatattattaatttattaagaagacggtgagatgatgtaacaggttcaattaaaatttgtgaaaatttatcatccatcataaatggcacatcatatatcacaaatagtattaattcattatggatattaatgatatcacaattacgtacggactcttgttgtcgttacaatcatataatgttttaggatccttagactctaattctgatgcaatcagtgagtggttgattgttcacaaagaaaagccatttctaaggtactttatggatgtactttagccaaagagtgtttttacacttgtaagtaatctattttataaactcattcatgataaatggcttggcatcatgatacgagtaattaaatatatatatatatatatttctttgtttttcactctttcaagcattgtatgccccgttcaaataatttcggatgaatttgcaaaaataatttgtaatcagtgttgctgttggtaattgagtgcctgtatatacgtatatatatatatgcaaattcttcttctacatatattatataatataataaagtcataatatatatttttaaaatgtaggagtt

SEQ ID NO: 85280 - DNA, 424 bp, Citrus clementina
  Intron number 1 from transcript clementine0.9_000626m (loc us clementine0.9_000626m.g) derived from phytozome v7.0 (c hr-ID scaffold_82; pos 43849 to 44272)
tgactctcacgtgagtatatttatcgtatctcttacgaattgcattttatatttttactgtttgcttgattgttaaaaaattgaaaaattagagaattgagaagcgaattagcaacgacgtgtattagtaagaaggtgaaaaaaaaaattctgtttgatttgttgaaaaattaccccaaaaaaaaaaaagaagagaaatgagaagtcaatcagcatcaaactttattattattattttttatttgaagtgaaatgtgaccaatttattgccgttcatgtcaaaaattaatttaaatgatgtactattagcatataatttgcaactttttgcccttgaatttgattgctatatgtggcatggctgaattcattctttttaccggttgcagctagaggagggtggaaagaagggggacaatttgat

SEQ ID NO: 85281 - DNA, 482 bp, Citrus clementina
  Intron number 2 from transcript clementine0.9_005701m (loc us clementine0.9_005701m.g) derived from phytozome v7.0 (c hr-ID scaffold_20; pos 3172399 to 3172880)
ttaaagcaacttcaagtcaatacaaagcttttcaggtccgcacctcttacttcacctttagtatgtttatatgtgagcttgctgtatcttttttattattattattattattattattggaaatcagaaaatcaacttactgaagaaatataattaatgtttgtttacttatgtagactttgaggattttagctaaatattgatggaaacagagcggttgctgtattagtgtatttaattttaatttgttcaaacacatagtgtgaacatttcttaggtaaatcatatgagcaggaacttccaaaaggcatcaaccagttttattttctcttatttatttattatttttttttttgctgtgctgaaagcgtgaaattagagctttggtatttgagttaatggaataggcaatgtcaattctgaccttgctgaagaagatatgctatgcttattgttttgttggcttgaaattttaggaaatt

SEQ ID NO: 85282 - DNA, 423 bp, Citrus clementina
  Intron number 1 from transcript clementine0.9_013893m (loc us clementine0.9_013893m.g) derived from phytozome v7.0 (c hr-ID scaffold_10; pos 3258540 to 3258962)
attgctttgtaagctctctttctctctaattgcctcattttagcatttctgtgaatcgtggacagataaatcatatgatttgctcttgctgactctcaattttgaaaatttgaagaataccatgctatagttttatactatttttcaaaatagatgtctaaaagtttcaaatttgacatttggttttgatcttcgaacgttaatcagttgaggattctccctcttgagccgattttgtgatggttttaacttatcttattgtttgttcattctttatcaccaggatcttgttatcaggctatcaccgttataatttgatgataacggctcttggttcttgttattgaattttaaagagttttaattttaagaatctgctatttgatgtgcaggttgccaaagatccctctggcaaagagatca

SEQ ID NO: 85283 - DNA, 603 bp, Citrus clementina
  Intron number 1 from transcript clementine0.9_007479m (loc us clementine0.9_007479m.g) derived from phytozome v7.0 (c hr-ID scaffold_38; pos 132687 to 133289 reverse strand)
tttatcgtacaagtattagctcctcgctaacttatgtaagtgttcttctatagttttattttagggtttattacatgtgggtccggtaattattgtgtgtagttttaaattgaatatctttttaagtgatttgggtgtttttatgtttgacccattaatgggttcttgctattttgtgattttttaaattattttatagtcataatgtctttgtagttttagggtttatatgcttatgtgctggtttattgtgttactatttcaaaccctaaggtactccagctcaaacatgttaattccaggttagtgcggtgctctgttgttttcctttctgttaattttttttgggattattactttttgaattgtttgtagattctatttttctgcgatgctatgcgtagtttattttcttaagttagtgaaggttaggagaagtgaatattgtccagttggaatcctgagttctgtttgttgggcatatgtattgttgcttccggtgactaagaatatttgatggccggagttcaaatatactaattgttaatgcattttctttttgaaataatttttgaatctatgttttgttacagtggggaaatt

SEQ ID NO: 85284 - DNA, 870 bp, Citrus clementina
  Intron number 2 from transcript clementine0.9_031741m (loc us clementine0.9_031741m.g) derived from phytozome v7.0 (c hr-ID scaffold_20; pos 2833547 to 2834416 reverse strand)
tcggaggtcaggacaaggtaagcatgcatctggaatttgaattcatattttgcccaaatagaattatttagttgagagtgacaatttggatcttgaataattgccaagataggtgaaaggtgttgtttctgtactctgtgtgacaacatacgaagacctggggaatgaatcatctctgatacgatgaatcgtacttaactattgaaattttaaattctaatctctgtttctctttgtaaaatgaacaataagaaggctgtgaacctctttgcaaggcttctatattggttttggtatttattttctaggtttactacccatttgggaattgcatgttggtccataattatatgacaaaaaattttatgagtaaatttagtgataaagaagcagaagattcggtagaagattagacaacattattgttgaatggagcatgtctatttagtttttgtctttcattttctttttcatgtaataaatatgcatttgaccagagtcaccagatgttcatttttacactctatacttttagagacttttccttgagaagaaattcaaaacttattaaaatttgcaatcatctctgtgaaatagctcatagcttcctggaatataataccgaagaagaagtaattatcctactattggtttgattccagggagagcattgcatttccaaatgttcctacatgggtaaataattgtggacttattgtagatgcttaatgttttttggggatagccaaaatgagtcatttttgtagtaatacgtgcctcatcattttgtgacaaatgtagctttctttcgaatgtagatccgtccattgtggaggcactattttcagaacactcaggcctcatttttgt

SEQ ID NO: 85285 - DNA, 954 bp, Citrus clementina
  Intron number 1 from transcript clementine0.9_016031m (loc us clementine0.9_016031m.g) derived from phytozome v7.0 (c hr-ID scaffold_133; pos 440474 to 441427)
acttacatgtaagtttattgacttccatgaagtagtttggtccctttgtcttgttactctggtcaatgtaattactagggcataacagtgatatccatgaagtagacgtaacttaattattatttgggattttttttcccctttcttgtttgaatatggaacttggattcttggagcataatatgtatgtatttttataacaatatatgtgattacattacttctaattgatacagttcttgtgtgccactctgatcctatgactgtgaagtcttccatttaagtagagcagaacttctgatgagtttttaacatggattgatgaaatgaacaatgaaaaggaggagcccatatgaaaagatgatagatcttgaaataaggttttgtaatgaaagttatatgtaattgtttgccggtgtgtccacttcatgtccatgttctgtgagtgccgagatattattctgtatttatgccacagcatccagtgagagagcacctgttggaatctaacatttgaagcaagtctcaatgtccttttaattcttttgcttactatttcctttctaagaaagctgctgcatatagacctcgtgctccacattaatgctgttcttttggttttgtcattaattgtctttcttaattcttctcttctcactgaattatgtttgaagttcacttgttagttctttaacctattcttattcctccacctccttttgttgtttctgaggagtactggtctaattatattcttatgtaaacgggtatagaaattcattacttgtctgattgagtttttatttccttccttgttaaagtagtttacatgctttccaagttctgtttatgacagttatattgtcctgaaatttttatcatgtataatcatgtttatacatttttatgtttgctgtagctcagtggaaattagtccctcactggccgagatac

SEQ ID NO: 85286 - DNA, 966 bp, Citrus clementina
  Intron number 1 from transcript clementine0.9_007265m (loc us clementine0.9_007265m.g) derived from phytozome v7.0 (c hr-ID scaffold_143; pos 16419 to 17384)
tgctcgccaccggtggcgccgactacgacatcaaggtttccgcttttgcatttcagtttttttcttttcgttttcaaattcgtgggtgcaattttgatctgagaactagattttgttgaatcgtttgtatcaactcatgttattatttagtgcttcattgataggttgtttgataagtcgatccaagccatttaaagtgattggcagctatctctgattgtatttgatgagaatctaaaatatgggttaattttttttttgaattaattagagccatttactaagattagtagacagatattttctaatttcttttgttagaataatgcatatgatgttgtgtttggtatacggtgttctgttggtctgggcggaagagaaggagggaagagaaagctaaaaaagatcaaaaagagatagaaaggaagaaaagggttgtcattgttaattatttggtaggagagaaggaaagaaaagactttctgtgttaatttttatatatttataatttataccaaaagttaagattaactgtagaaagggttattttcatcaaacagctttatgcttctcgtcactcttccaccatttagagaaagattcagttatgtgggttcagagagatgggaagcctaccacacagcgaaatgataaaaaccattgtaccactgagatcaagttggaacaagtgaaatttgatttttttttccccttgtagtttcttaactaaacattagggatgaaaacaatgaattaattctggggtgaaactaattagcgtatttggttctgttgaatttctgttatcattccaaattttcatctcatatctctggttttgcgtctcccattttatttatagcagtcagattttcttttgagttgtgaagtcttacttgggctggactaactctaaacgttaaactttcagatttggctaataaattcaggcgaaaaacagaagaa

SEQ ID NO: 85287 - DNA, 701 bp, Citrus clementina
  Intron number 1 from transcript clementine0.9_018184m (loc us clementine0.9_018184m.g) derived from phytozome v7.0 (c hr-ID scaffold_63; pos 973007 to 973707)
aacagaagcaagtatttgtcgtttttaagggaaaggttgaattttgcaggtcagtagacagtagtttgttgtattgcttgtgagagagcgagataatgtatcgtgaaaattgaaatacgggcattcgtacctgtattaggtttttgatgctctggtttaaagataagattctggctgtggcaggacactgttatataactgactttgtttatcagtttaactccatagccacagactgtggtttgtgaatgcttttgattttgatatttcttgcgttgcgatagttattggtgacctcttctccttatgctttgtttcatctttggctggcttgatagcccattgccaaattttacattacttttcttttcccttatctagtaaattaactcatattttaatcattttaaccatattttattaatttttaaaaaaacctatagcatatgaggaagacttttttcaaatttatttttggcaccgataaatttttaattctaattttagtgaattatgatgtcatatatatatatatataaaaactttgaagtgcttagacacacgtcagcaacagcaactgtggaaagcatgtgacgtacccaaacagcaaaactgaaataacctaatttggcttaaacctcttcttcatattcccaaaagccgtagcgcaaagcaagtacttccttatttgtttcatcttc

SEQ ID NO: 85288 - DNA, 507 bp, Citrus clementina
  Intron number 1 from transcript clementine0.9_001927m (loc us clementine0.9_001927m.g) derived from phytozome v7.0 (c hr-ID scaffold_31; pos 1634386 to 1634892 reverse strand)
tgtcttggagcttgttagcgccgagcttgatcctggtaagtgcatcggagtttttcacttcaaagaaaaatcacacacacacacacacacatatatatatatgccctttttatcccaatagttcgtaaaacacctcaaaacatccatctctccctctttttatataatttgacggttttaactttaatgaattttgatcattcaaataaatgaaaagtattttttttaagccaagaaaaaaaaatcaatgcggattacataattttgttttgctttttcaaagttaatttgtggggaataaaaaatatttaacaattatcattttgaaggttttagcttattgttatacatataattgataattttcttttaaattaatttcttgtgcttatttgtcctcaaacaaaccaaataaattattttttgaatgcttgaaggtgtttttaattacagtttttgtttactttttcagaaactggaaaagagaaacccaccatcaaaagccga

SEQ ID NO: 85289 - DNA, 572 bp, Citrus clementina
  Intron number 2 from transcript clementine0.9_011756m (loc us clementine0.9_011226m.g) derived from phytozome v7.0 (c hr-ID scaffold_4; pos 943221 to 943792 reverse strand)
gtggttggaatatcagcaataaacattactgggccgtgagtttttcccatctatgtcagtgttgattacccgtactgcttatgatgttttgcaattaactgtagcatttgtaatgaatcaaaataaactcctttttgttctgattttgggtatctgtttgtgcttgtgtgaaatttatgagttgtttctccgcgttgtttatatattgtatgtacgttttgatgttactaggatgagttttagccttttatcccttctgagttgttgttcctgagtaagctgttaatttgaattattcttccacacaacacccaaccaacaccccccccacccaacaaaaaaaaaggagttctaagttttggttatacacaatagtcttattattattattttttggttggggggggggtttcttcactttgaatttgcccgtgtgtggtatttttcatttctcaaattgtgtctttgatgttctaatagttaattgagtgattaattgttgcatcttctaactctgattcctattttcaaacgcagtctgtcggttttactgcagctccattttttattat

SEQ ID NO: 85290 - DNA, 783 bp, Citrus clementina
  Intron number 2 from transcript clementine0.9_018749m (loc us clementine0.9_018749m.g) derived from phytozome v7.0 (c hr-ID scaffold_3; pos 1753732 to 1754514 reverse strand)
aaccacttggaattgctgtcacactcagaggaaatgtgagcttatgtctttcactctataatgcttatcttttagctgctttttaagtccttcacctttcttttctgtttttgacttacatattgactgttaaattgttttattctattaatattatctatgtatgaattaatagacgaaactaaagcttcacatttccattggttatatgtggaacagttatcgtattatataggttgattaacaagttgttattttaaatggggatcctagaagtctcagttgtttaattatgattgtgcttgctatgagttcaaatggagaagggtgtcaagtatttgttatttctttttgtgtatgctagtaatacctggatgctgtaggcagtcataatgctgctgaagtttctattttgtatgcttttaaaaaagtagtggaccagtgcttgtattggcttttgagtatgctgtactgcaatgtcagtggtgcaacgcttacattgacaacaccactgcattgcacaagtgttgctggttgcagacttgcagaggttagaaaatatctttgatttgtcttaacaatgagtatggagtgatacaagaagataggcaaatagaaacttttgctttaaaaacctgatgttttctcaaaatcaccctcttttgatgttggatgtttgaagcatatattttgcttgtctgatattatatattgactttgtttcattcaaatcctattcttgtgtatctcttatatctaatatcgatgtggatgaaatgacag

SEQ ID NO: 85291 - DNA, 868 bp, Citrus clementina
  Intron number 1 from transcript clementine0.9_008783m (loc us clementine0.9_008783m.g) derived from phytozome v7.0 (c hr-ID scaffold_4; pos 3707695 to 3708562 reverse strand)
gtcagtactcactctttcaggtgaaaccagtaaaggtaatttcttgtttttcgtattttcattgttctttttgtgatcatatagagcttttgatcatttggcttgcacgtgttttctaaagaaaggtgatgcatttgtgttcccacaattactgcattttgttgttagttgataagcaattcttgtgaagctacttcagaactatttaatttaagctgcgcatacatgcttttgaatatccagaaacttgcctgaatttactttggtatgggacatatttgtgcaaatgttttatcaaacttcccaaaagtgctttccctggagttgttgttgcagcaagcaaaaagaaaagctgctttcttctggtgtactgaatgaattttgacttcatattgacaatttatttttttctctgtctcactgtctgtctcctggaacctaacatacaccctcaagtggatttttttgactttttattttttattttcaaacaaagaattatagaatttaaatatgtgaagttgctgaaacacataaggatgttatatgtattttaaaaaaaaaaaacattgacttcaaggttatgtcacttagaacacatttcaacatttgattagtttactgtgtaaactttcatccaattgagccgaaaacaagtttctttgactgaaacatataaattcaatggtccaactatgcataaggatatgaatttctctcttgttatttgttacaattatttgtgccattgctgttgtctctctgttggtaagagtagtcattatttatgcaaatatagtctgcagtggactaataattttgatggatatgtttatggacaacaatatctttcaatttgggtctttag

SEQ ID NO: 85292 - DNA, 656 bp, Citrus clementina
  Intron number 1 from transcript clementine0.9_003252m (loc us clementine0.9_003262m.g) derived from phytozome v7.0 (c hr-ID scaffold_2; pos 4589524 to 4590179)
ttcaaccaccattccttccttcctggtcacaaaaggtatcaacaatcttgttattaatgtttttagtttttgcttgcactgttttctacaaaacaattctgggtgcaacactcgctcaagctcactcgttttaatgaagcatttctcctcctttcactccagtcatgtttgagtatttcaaagacttttttaattactttttaatgaatttgatcattgtaattcaatctggttatatatatttttcttttttttgggggggttcttttctttttctttttttttatttaaaaaaatcatttctattatgatttgcttcgaattacaagcctccattatggctttcacctcatcggaaaaaaaaaatattacatcattagtctcttcatttttccaatctaatcaaattcttttgcttctagttgagttcagtttgtcaaattaaaactgcttgagtgtgcatgtccacgtggagtgaggtatattaattaattatctttactatatatgaacaattatgccatttaatgttatgttcagttacattttcggttaagctgccattttcagaatctcattgttcttacataattaatacaaaatgtccataagaagaataaaatcttatttgtgttctcatgacgtcagtgcttaac

SEQ ID NO: 85293 - DNA, 675 bp, Citrus clementina
  Intron number 2 from transcript clementine0.9_021954m (loc us clementine0.9_021969m.g) derived from phytozome v7.0 (c hr-ID scaffold_2; pos 4427414 to 4428088)
ttcaggtttgtcttctttaaattctccttttgcatttggttacttttatttttttggttatctttttggatctgtatgctgctatttttgattttgtattttttttcaaattattacatgatttttttgggtcttttcattttgagacgcatgtgatttcatgagttcagtatgggagtattttttttcttttttcctttgtagtcttgactgggatttagtgattctggagcggtacgtacaggctttattaaaaaatattttttggctgcagatttgcaatttgtttgcttaagagttgggtacgaaaaataatttgttttttgcaattcccaaaatatagacgaattgatatgttttgatatgtggtaaaaacttgttttgattaattatgggattcttgcataggattatgtgtttatggataaactggaggaaacagagaaggttctagtggtgttgatatgtttgtgtagtgtattttaaatttgaacaccgcttgtcaattatcttttcttagtgatgtgttcttccaaacattcttgagtactttatcatctagcacttttgccaacttgtaaatcttatttctgaaatttctatcttttctgtgttattattggtaattggccttattaaagatttctttttaaaaattgtatgcactataggtca

SEQ ID NO: 85294 - DNA, 963 bp, Citrus clementina
  Intron number 2 from transcript clementine0.9_014868m (loc us clementine0.9_012010m.g) derived from phytozome v7.0 (c hr-ID scaffold_2; pos 6470324 to 6471286)
atccaggtaataaagacacatgctcgatttatttgtattttctccacataattttctttttatactttttagtttttgtaaaccatcttaaaagtttccttttccttagtataaggtggaaattttccttcaatgtcaaggagttgttgaatttatgcatatgcctctatgcagaaaaatctctgtaggtcctacattataaaaattggaattacataaacatagctgtaaaattctttacccatgtctgcatctcatggactcccataaagtcaaataaatgtggactgcttcttcacttctttgtgaatctatttttcattcaatacaaatacttttggcttcctatcaaaagaattaaaataaaaggaactcaaattaattcattgtgtaaacttctctgtggaaacatttcctcaagcatcactatctatatgtatagcatctctaacacaccatattgcttggattgttggatgcattgcacgaattcttcagttataaaaatattgcacgaattcttcagttataaaaatattgcacgaattctccagttattaaagtgttaggaggcactctcattaattttttacaatacatgtttgtgtatttgcacatgaccagaccatataaaaaattttaatcttaaattagtgtcctaattgtagacttagttctagggtgcttcttacgagtaagttggtggccagagttacctgtatcttcgtgctgttttgactccgtgaatcatttactttgatgctattaacttctgtttgaaaattgtctgaaaataatgtccaacatcctgggtaaaatttgacattggatgcttgtttgcttgtcctatatgcttgattagttattaaagtgcaaaactaagtcaaattatgtatagtacatgtcactaaagaagttttgttgtcagagagctcaagctacaaagctaacgagcatcgctgt

SEQ ID NO: 85295 - DNA, 746 bp, Citrus clementina; identical to SEQ ID NO: 77998
  Intron number 1 from transcript clementine0.9_028756m (loc us clementine0.9_028756m.g) derived from phytozome v7.0 (c hr-ID scaffold_3; pos 6111819 to 6112564 reverse strand)

SEQ ID NO: 85296 - DNA, 437 bp, Citrus clementina
  Intron number 2 from transcript clementine0.9_031510m (loc us clementine0.9_031510m.g) derived from phytozome v7.0 (c hr-ID scaffold_152; pos 175907 to 176343)
atctgatcatattagagcgcgccaagaagtacttggtactacaatcattggagaaacaatacctaacccggaagatgctccagaatcttttcgattgctcgttcgagaactacgatctttggctttggaactgaatcattttcttgtatctgagaaaaacttccagattaataagaaggaagcttaatcggaatgaatcaaaaattttcttctatgattgatcgatataaacatcaacaactccgaattggatcagtttctcctcaacaaatacgcgcttgggccaataaaatcctacctaatggagagataattgaaaaccctatacttttcattacaaaaccaataaaccggaaaaaccgggattattttgtgaaagaatttttgaatttttgggcctataatttgtgcttgtggaaattatcgaataatcggag

SEQ ID NO: 85297 - DNA, 599 bp, Citrus clementina
  Intron number 3 from transcript clementine0.9_020027m (loc us clementine0.9_018379m.g) derived from phytozome v7.0 (c hr-ID scaffold_4; pos 3258085 to 3258683 reverse strand)
ccaagaaaattttgcagcttctccgtttgagacaggtaaccactcaatcctcccttgtgttattgccatttaatttgttattagaaatgtatattagaggtctgcaatttccttttcaaattggataattattggtatagtctgatagtgttggcaagcttagggcttagctatcagttttggatatgcccgttaccattgctgaaatgtttgtatcaaagtagtaaatttgggtgcattaactataatgttttattggaatgaaagaggttggaatgctttttgtttgctagccatttgtttggtggttgaactcaaatttaagtacttggttgagccataggtgttcttggtatagttcgatgctaggagtgctgttctcctctgattgttctcgtagtgtagatgctgtaaactattgggagattcctcttttgatactgccttatatactactctttcctggttatgatgtgattcaaaggattttacatttagaatttgctgccattgtgatggagattatttgtaggtttatatgtttcgtcttctgggctgatgtcattcttggttttgctgttcctgaatacagattttta

SEQ ID NO: 85298 - DNA, 861 bp, Citrus clementina
  Intron number 2 from transcript clementine0.9_022126m (loc us clementine0.9_020066m.g) derived from phytozome v7.0 (c hr-ID scaffold_4; pos 4503402 to 4504262 reverse strand)
tgttatattgacacagttacagattaaggacttaggtaattgctttccgtgttgattctatcctatgtttctcccactctgtaattacgacttataattgaatgtgacatgttcactaccttctttcatttcttactattggttggtagtgtatcgcatctttttctgttgattgatttcttgagtatctatgatgctgacttcgctgacccatgagaatctgtgaggacacgatttcttattcagatcttcagccaggttaatgatcaaaatgaatattttggttgcacaatttgaagaaataattgaggatgagttcatacttgcttaagttggattacttttcgtgttgtttggagtagaatacttctagaaactagaaatcgattttgggtttccttttgtttatgaattggttgatatagtttgacttcatattatcgccatcaagtgacataaattttttttttttttttttttttgcccccacttttttcaattacctcatagcttcttaactcacccagcccaaatgaattaataccccttccaaggttgatgttgagagaaatgaaacccacttcactcagatgtttgtgctcggtgttgatgcacttaagatgagttcttatcatgtttattatatctctcttcagcaacccacttctaaaatcttgttgttgctctgcatgatttgttatcattttaatatatcgacttctagtctgttccttcaaaatgctggtttacacaagaaacgtggtttcaactgacatctggacactagcacacacagagtgagaatatagagtggtgtagtacttatattttatcttttctctattatagagaaaactttgg

SEQ ID NO: 85299 - DNA, 873 bp, Citrus clementina
  Intron number 2 from transcript clementine0.9_022117m (loc us clementine0.9_022117m.g) derived from phytozome v7.0 (c hr-ID scaffold_2; pos 7583526 to 7584398 reverse strand)
acaaggctcgacgcttgggttacaaggccaagcaggtaatgattatctttgtcttacctgtatatagttgctttttttgttttggtatttttttttggggggggggggggggtgatattatatttgttatttggattatctggaatgtgatctaggtgttcatatgcttacccaaattcaaaatcacaattgatagtttaacttggtgccccatagctggaataattttgctttatggaaaagtggatttattacttttgtgttgtttaattacaactaaggcctttaaagatattaaatccgagatgctattagtcaattttcaatatttcagcactgggctggacgattgggctcattgtggccgtgcattcttgcatttattgctcagctgtaaaaaatgaaatgacctgctttattcttgctggttaagcggctccttgatgtgttgatgatgggttgcttcctgagaccagctacattaaatcaacagtcgatcatccgaccaagtggattctttttgtttgaatttcactgttgtctcgatccgatacattattatgacaatattttgttcttgtttcttctcttttcttttgtttcacatgtatatattcactgtttgttttgttggtgctttcttaaattattccttggtttattgatacgtcagtccacttttccttttcatgttttgatcaatgtacatgcgatcttacttccatctttcttggtctctaactgtgtctgttgcgtttgctactgttcaatagtgaatgatttttgaggattctccatttccttattattctcattccctgatgtcttggttaatgagtctatggtcaactttttttttcctttttcagggtt

SEQ ID NO: 85300 - DNA, 421 bp, Citrus clementina
  Intron number 1 from transcript clementine0.9_022117m (loc us clementine0.9_022117m.g) derived from phytozome v7.0 (c hr-ID scaffold_2; pos 7584506 to 7584926 reverse strand)
ggtactctcccttcatctgtgtaatattaagagtcttttcgttcaactagaaaacaatggagccattaacataatgatttggagtttcaaatttttccttcgggttttgcttttaatgagcttttcgtgtttatcgcatgatctgcgtggttgtacgctttcgtctgttagatcattttattgcagtaataaatgaacgaagccattaacaagttttactggtgttttctgaaatccattttgcacttaatttttttatttattttacaaagtggatgctttccgactcaaaacattttaggttggaagaataatgttcttgtagtctttgatgcaaaattggtataatgctggggtttgtttttccaaatttttaatgggattaatttaaaacaggggcttacacgttcgtgtcggagct

SEQ ID NO: 85301 - DNA, 593 bp, Citrus clementina
  Intron number 1 from transcript clementine0.9_013589m (loc us clementine0.9_011497m.g) derived from phytozome v7.0 (c hr-ID scaffold_97; pos 297141 to 297733)
ttgctcagcttctcattgaaaagggttacattaaggttttttgttacattgtgtttaagcttcatacctttttttttttttttccaagaatgggttaagctcaatttttgtttatatttatccggggaattgttaaattttagtgccctgactgagaattattgcaattcatgtaaatagagctcgattttgctgtcaaagacttgaactttttggtcgataatttctatatttcattgactttgcatttcatagcaatgtcttaattttatgtacacatctgaatggttgtcttcatttcagactttgctaattttttgggacgtagatattgcttgtagttgatttgttgtattagtacttccaaaatcttgatttcaatgtgttgcttgaatttgatttgggtaaatttgcactttcattcacttaaaatcgttttttgaagagatggattaaatggaaacacggttttggggaaaatattctagaattatgtataagatcattcattttctatggattttgagtattctgatcgttttcttgatattgacataggaaacaacaccgttggctggttcctcagctggggc

SEQ ID NO: 85302 - DNA, 1035 bp, Citrus clementina
  Intron number 1 from transcript clementine0.9_017801m (loc us clementine0.9_017610m.g) derived from phytozome v7.0 (c hr-ID scaffold_24; pos 86794 to 87828 reverse strand)
accccaacataattcgcctttttgacgctttccaggtgagccctttaaatggaaatttcagattcttaattgcctttcttgcgtttgttgaatttgagtttctttgatttgggtaatgtaatttatttatatttagttcattggttttgatttttagcctgtttgtgggatatccatttaattatctttgataaaggatcgtcccgtatgattttgcttgatttgttgtaagagcataactgtctgcttaatttttttaatttcatttttggataagctgttggatacttgtcaagtgtttgctgaattgcatttgttaactgattgttcaaatcagcttggaggtctgaaaatgtatttttagatttttctttaattattttggagataatagttgttaatttagtgtagatttatcttggaatgcagattcattaattcattagcctgttggttaagttgattttatcaattggatattccataaatgaccattattttttatcatgacatggagatgcaaattgcttattagagaaaaggatggtcttaatgttcaaactatgctattttttgtggttcttttattttcttttctgactatttttagctaacttattttataccttgaattggaaaatgcaaatggttgattttagctaatcaattttattatttataccttgaattggggatgcaaatagtttatgtaagataagatgtgttggaattaagcatactttttggatttctattttcctgtccctcatacacatttttgttattaaatggtctggcggcatgcccgttgcatgcaaattacaatttaaaataagtgatttcttgattgtccaaatctgttcgtacttaggcatatttgtcttagagctacaccattcccttaataaagaaagccgtataggctgttgcaaatgatatataaatcatttatgtaacgatagtactatgacaaattgaagttggctgcctctgctgtcaggctgaaaattgtatattccttgtggttgagttttg

SEQ ID NO: 85303 - DNA, 697 bp, Citrus clementina
  Intron number 1 from transcript clementine0.9_003457m (loc us clementine0.9_002192m.g) derived from phytozome v7.0 (c hr-ID scaffold_4; pos 3218501 to 3219197 reverse strand)
agaatacaatttctctgcttgtgaagactcagaatgtaagttctcacctcttttgtatatcgaattgattgcaccgtgaatttagtactgtttcttgtttgtttattttctcattcagatactattgctaattaatcaacaaaggtcatatttgcagttctcgtcatcatggtcttcttcctaggttgtttggagatgtggtgtaataatattttgattacttatccttttcttttgatgtcaagtgtttagaaaaagtattttggaaactaacagaaaaatggatgaagtagagtctcaacataatatcaaagttattcagtatgattttctatcactatgctttttttttttttggtgctttagttttttagtatccattatactaaatggtacatatagcagcactcttgaacatcaattgccttgttgttatgttggatacagttgttgagaagtttgtgaaaaaggttgtaggttgtcatatttaggtaaacatagcttccaataaatgcttggctacaatgaattaaatcatcatgttaatttcctatttgctgtttggtactcgttgatgttaggtatttaccttgtttatttctttcttttggctttgataaaaaaagtcttgctctatctcacttcccattgtttaatttgtttccttgtgtgatattctacattttctgtacctagg

SEQ ID NO: 85304 - DNA, 535 bp, Citrus clementina
  Intron number 1 from transcript clementine0.9_006966m (loc us clementine0.9_006966m.g) derived from phytozome v7.0 (c hr-ID scaffold_7; pos 2324044 to 2324578)
gagaggcagagcagctcttggttttcaaagccaaggtcagttgataattagtatttattttactaaagtttgaaattttggtttcttttgaccttataagatttcaattcaagcagacatttgaataaaattttcaactttggttcaatttttcaagatttactgttttgaacatttgtttagtatttactatttacattttcttttttttttctttgttttctttcgttgataacaatgattgatgaagaaatggtgctaatatgatgttgattgattaaaggacaagggggtattaatttaatactaaattttgcttgcagaacatgtaagagatttgattagtttatcaaaggaatcaaactcccgggtttccctcgtgcatcatctttatctaatatcgttatatcaatttacaagttgcctattttggttttgatcttggcatgtaatgaataattgaagttctgataagatcaaaagaattattaaaaaaaaaaaaaagacccttgttattaatagggaattgattagg

SEQ ID NO: 85305 - DNA, 851 bp, Citrus clementina
  Intron number 2 from transcript clementine0.9_018318m (loc us clementine0.9_018318m.g) derived from phytozome v7.0 (c hr-ID scaffold_3; pos 1267402 to 1268252)
tcatcaaaacccaatttggaaagcttgatattttggtaagattttatcagttctattcatttccatttcaacccatacccattgcccctcctctaacctcccctaacctaagaggaggacggggatgacatatactgtatttatttcattcttggggtgggtaatatcatccagctccctttcatttttttcatatttttctattaaggacaacttttattctttttctatttgtatgaaataggtccctgactagcagcgaccagtgaccgccctgttggaattactgaaatatcttctaatgttaacttgcgtgaatgcattgcatcaatcaaaattcagtattttaattttactttggtcaaagcaatagggacagtgacctatttggtacaagaaaaatatgaaaatcagggatgtggatgtaattatacaatatgataatgtatgaaccaaactgcaatatagtgagtttttgagacagatctattcctgaaggtatctattttgccaagttatcaaaggttctgtctatgaatatgttctttcaagtctatattcttgtagtcgaagtataaaatgaaagatgctgagggttagacctgtatgtgcatacaggctaacaatgcaggaattgcaagtgtcaagtttgatatggatgctttcgcagattcaggctatcaaattgtaagatgtaatcaatatattatatatgattcaatattaattaacctcattttccaccatcagaaagtgagtttggaaccactaatattttaaatttcacatatctataggtgaaataataatcccattattagttaatgtttgttttctatagacgaagggtg

SEQ ID NO: 85306 - DNA, 768 bp, Citrus clementina
  Intron number 3 from transcript clementine0.9_018830m (loc us clementine0.9_018830m.g) derived from phytozome v7.0 (c hr-ID scaffold_2; pos 7788756 to 7789523 reverse strand)
aacaaggtatccggtttaatgtttcttgagattttgattgttgattctcctgctcgtgttgaagagtgatagtgtttgtgctttcaaggtggctagtagaattgattctccttgtaactaaaagaaacaaattttatattggcactaaatgaagcaagctttatattagcactgattttacagaccaaggattaattaatatggcaggctgggaaaaaagaacattaatcatgatagcggtacattccatttgtgacctaatgttttgtctcttaatatctcttgattaataacatttctggggcgcttttgccatggatttgtcagagttaaaataaaatctgactgtgactgggtggttgaagcgtctgctttcctattaggttttttttttttcccagaatttaaaaggtagggagtggacaaagccaaaataaactttttaactccttagcccactagaattcaaacaagggtggccaattaaagaaagctacttgataatcactcactcaagcctctgagagctgatcagagaaggataggagatgatgtgatgtgttatattttctagtagagatgatatcttaattagtgcattcaacttttttgcaatctattagtgattcctttcattaatccttgctgaaaatatttttgttggattccttccgttagtcttctgtgaaaatttttgtgctgtttcttatgtgtaataaagtagttctaaagccatggttttacaaactctctactaggttctctcct

SEQ ID NO: 85307 - DNA, 974 bp, Citrus clementina
  Intron number 1 from transcript clementine0.9_021497m (loc us clementine0.9_020420m.g) derived from phytozome v7.0 (c hr-ID scaffold_3; pos 1744558 to 1745531 reverse strand)
caaagaggatttcgccagatcgtattttgtcacaggttttgtttgccaatgcactaatcaaccttcgaattttactaaacagtttcttttaggtctgatttttgcttgcggtccgttataattaattactaagaggatgatcatggttgattggggtgtttcagactgggtttatatcaagagaattggcgtggttgtatttatcgtgaaatttgttttcttattagtttatcagtcattaaatggaatattgattagtactgttgaggtgatactttcttttttatggtagaaactaaagctttctcagatcttttaaaatgatgactcgttgcttttccctcccttgaacctgatacaatgactgattttaccggaattgatgcctatgaatttctgattattgagtgggattcgaagaatgtgaggcttttgtacaaatttcagaatcttgtacttcgaaacccatattccttggaccttggaaaagcacattttggtagctttcttatgatattaaagatcgaaacggcatttcgtcattagaagttacaattttttttatatctaactatctgattcgattcactgtactgaaaggtctattactctagttcccactttctgacttggtaatgtgcacatagtcacctgctacaataacggttgcattttctcaccattattccttgaatattcactgaacaagtttaatccctttgccccttggcgataaaactgttaccagacatgttgtaacttgtaagtggacacaagatatgctcaaggattgccatcctagaatgatagatagacagttcagagattagaacgactggacgaaaatagcatccttatctgaacaatcaaaggaagattctttgtttgtgtaatatctgcactccactctgaataagcattaccttctaacagctggattgaatattctgaaatgtcagggaacattacactcg

SEQ ID NO: 85308 - DNA, 613 bp, Citrus clementina
  Intron number 5 from transcript clementine0.9_021056m (loc us clementine0.9_020867m.g) derived from phytozome v7.0 (c hr-ID scaffold_7; pos 2092897 to 2093509)
ggagtgtgggttgcattcttatagaactttgctccgtaagtaactgttacctaacaccttttgcttgaagcatttattagtattcttattaatttggtaagtttaataattgttcacacatcatatctaatggtgtttgtgttagtgtactgtttgtcccatgttaattttactgtcacttatctggtactcatttgatggtttaacagtttggttaccagatctgctactatttcatggatctgcctatatgtttgcccaaatgcgtattgatggtggaatgaatgctttcacacatgcctatgagttttgatttgtattttccttttcttcttttttaatatatttgctaatatgtttgtgttagtgtactgtttgtcccatgttaagtttactttcacttatcttgtactcatttgatggtttaacagtttggttaccagatctgctactatttcatggatctgcctatatgtttgcccaaatgcgtattaatggtggaatgaatgctttcacacacgcctatgagttttgatttgtattttccttttcttcttttttaatatatttgtggatagggcgaggctctttttcaaacgcacgagaatttaga

SEQ ID NO: 85309 - DNA, 822 bp, Citrus clementina
  Intron number 1 from transcript clementine0.9_009794m (loc us clementine0.9_009794m.g) derived from phytozome v7.0 (c hr-ID scaffold_7; pos 4264561 to 4265382)
cagtcactactgaagctgcggaggtttccactcaggttggttagttttttttttttggttcagttttcatagttatgtttatttatgtactgtattttctaaagattattattattattttttttatgattgaaaatttccatgttttgttctttgtgtcaattttttcccccccttaacggggtgttgtcctattgatgctgatttgtcatgaattatctgtggtattcgtagtttaatgtatttggaggctgagattatgatgttcaggtttgatggatttgttagaaatgttgcccagcaaccatttttgtttttggtcatcggttgattttcaaaattgtagttgatagttatcctatcttgcaaatcctcatctccttggaagaaattgaaagctttaaggatttttcttcgggctagttgaaagttattgaactcgagtgaagcaatctcaaacgattctttgctaatcattgttaggcaatttactctttgtgttcgactttcagctattttaaacaattgaacatttttcatcttgatgtagactagttcgatagagaatggtaagaagcagtaatgtttctacgtaggttgaattagcaatacagttgtgaattatcctctcaaccattaaaaggaaatgagttagcgatttgcatctcgtgcatggcaattttctggttttgtgaacagcataccctcatggagtttgttttgatatagcatattttatgggagactatatccaaaatgagttgagatggtgttgtaatgtttgttacatgcaggctgatatccaaatcgagggcccatcaa

SEQ ID NO: 85310 - DNA, 734 bp, Citrus clementina
  Intron number 1 from transcript clementine0.9_010369m (loc us clementine0.9_010378m.g) derived from phytozome v7.0 (c hr-ID scaffold_3; pos 6693904 to 6694637)
ccaccaccatatccgagtgtctccatacgtgtaagtctttccaaactcctttctttctgattattatcgttttttgctttccaattctgttggtcttcactttagctcatcttaatttctacgttttcttgccattttgctcttcttattacgatctgggttcggattatttcccagtctttttcttcatctgggtttcgttggttgactattattcactcgctgttatgctttggagatcaaaggactttcaaatgcttgctttttgggatgcaaagtatccccgatttcgatacttctcttcgtgattttagatatttgattttaaaagtgattgcatgctttgatatattttgcgcttatttagctcatactcctttattttcttgaggttctaagctgtgcgtacatctctgttaattgtcagctttacctgtatgagcgataattgcagtcaatcattggttagtttgatcttaacgaactaaccgctgcttgtcacagtatgtgttcattgcaggtgaatgcttacgggtaaataattaaacactcattatggccttagccttgactttgttataagatggcatttaccgcttgttccctttatatatatatgcagacatattcatgtgcatttgatacaaacaatatctcttctggttttcttgggtctttgcaaaattcttatagatttgtctttgaattttcttcagtttgcaggaagtgtatat

SEQ ID NO: 85311 - DNA, 529 bp, Citrus clementina
  Intron number 1 from transcript clementine0.9_017491m (loc us clementine0.9_017504m.g) derived from phytozome v7.0 (c hr-ID scaffold_4; pos 2859731 to 2860259)
cgtccaaacctcgcctgattggatcattcgtgcctgtaatttgctctttgtttctgttaattttcttttgtttttattaattacatgggtttttcctttctctggtcaataatactattttcattaattacatgggtttttcctttctctggttaataatttggtattgtggttaattgattgtatttaatgagtttaatctaatgtaaacttgtttaaacttcaaaatattgttagcttattttcatttcttgttgattcaatttaatttgattttgattaattttctttgctgatttatttaattactctaattaaatacattaaatttcaatataatgtaaaatgcttaattttttttttccacatatgttaactcattttactttaatttctctaattaaatgcattaattttcttgttgaattgttaatttctgcattatggttggatttttaaattatatattaaattattaaattttaattttacagatctggatattcggaatatccgcagcatccgttgc

SEQ ID NO: 85312 - DNA, 595 bp, Citrus clementina
  Intron number 6 from transcript clementine0.9_017491m (loc us clementine0.9_017504m.g) derived from phytozome v7.0 (c hr-ID scaffold_4; pos 2861542 to 2862136)
ggtcaggtatcctccgagttatttttgctttattttgtattacagttgcaggaactaggatgcagggttttactgtgtttctttcatttgaaagagggaaatgaaggaaatttttttaagatttgagtctaattttgtttctgtattcttacctatttgtatataacatgcatttccaaatttgtaacacacacacgcatacacacacacatatataagcaacaactcttcagtatgattaacgtcacttagctgacagaaaataatttacagagcaacattttatattttattaatgtaatgcataaatttctgtctctccctcttgtatgcattcaattgttcgagccatataactttttatacgtactaatctttgttgaatgttaatcttctgcactgctttttttctgaaaattcttttggttggccttgacttttgttaagtgctcgttttattcttcttttggtacttaaagagtaaaatttctgtaatatttagcagtaacttcaacctggagttgactggatgtgtataattattcgttattatgtggcagggcttgggacttcggcctggagttgttgacggggc

SEQ ID NO: 85313 - DNA, 719 bp, Citrus clementina
  Intron number 1 from transcript clementine0.9_020228m (loc us clementine0.9_020228m.g) derived from phytozome v7.0 (c hr-ID scaffold_2; pos 6789460 to 6790178)
agcccatccccaaaatcactctaggtacttccaagttgcttatgcctgcctttacattgataagaggattttttaaactagaacaagtcagttagtccaacgtagttgattcctatgtgacttattgacgcgaagggacaatttaattcaaagtgaaccaattaagcaagcttttctttttcatttaggttaatatgatcaagctgaggttatcatctattcatgaacgtcatttcttccagacgattatttccttattcctctaatgtgttcagttggatgccactgctttctgcaattagttagagaagattgctcggagagtgaagactttggcagtgtgattgttgtcgatgttaaggaaatcgattatgtttttgtggaacttgtggagctttgattacagcttctgttgtttctcttgtcgtgtaggaactatgatcatgcaatctcatctttacaaactcttgccatctgctatcgtgccattgaggcttacacaagaatatagaacccccttgacacagcttaaaaacttttaaaatagtgtagaagatcaatttttttattttacagtaacataatgtttctggtggtaaattttagttatctgttgtcttcttgcaatttatattggaactaattcttaatttcaatatgaggtatctttcttcaatttggtttctgtcagcatgatctatgttaacatgttacagacc

SEQ ID NO: 85314 - DNA, 651 bp, Citrus clementina
  Intron number 1 from transcript clementine0.9_015597m (loc us clementine0.9_015597m.g) derived from phytozome v7.0 (c hr-ID scaffold_3; pos 753897 to 754547 reverse strand)
gtgaaaaaggtctgagacagacagtttcagttgaggtaagagcttttttggagtgtcagaatcacgcttacaggtcgtgatctttaaactatgaacagagttctttatttttttttcccaaatttctcgtttattttttttttttaagtttttgttttgttagaagttattgttactttgagtagaagattatgaattccaaaatgattttttttttctttgaacttgggctttgtttatgaacgcttaatgaattttcataatttttttaaatatctgtttacatattgtgctctgttttttttttttaaagaaaaaaaatccttaatttcgatttgacgaagtctgatctttaagtatgtttagaaagatgttaagtttgatgttatttagtactttagcctacaagtttaccgatgataatgcttaaagaaaatgttcagctagatgcattttaagtaaagtttttttcttttttgatgattcattttctaatttttgtgtgatacagaaagaaacctagcttaagtcccacgtttgatagatggaagagaatgctacttgcaatttttattttttgacataattttgtaaattaggagttcaattcatttttctttttttattttatgcaggtgaggtctggcggtt

SEQ ID NO: 85315 - DNA, 680 bp, Citrus clementina
  Intron number 4 from transcript clementine0.9_018113m (loc us clementine0.9_011913m.g) derived from phytozome v7.0 (c hr-ID scaffold_41; pos 1553574 to 1554253)
tggaattcctgattatagaaggttttgtcttgtcttcagtttctttaatgaccttatagtatataaaataccttgtcattacaatatatattggtggcattgcagcttaaacaattttctactgatccttgacgttcactttatttattgtcaactgttgagcacttatcctttccattcttgtataactgttgtttgcgagagattctcagttatcaaactttgaccattcatttacactcattaataatatgtgatgctgcattttgatacttggcagtcatcaataacacacacacatactctgatttagttgttcatgtggatattagtggttatgatctacttttttatttaaaaaaaaaaaatcaaccattttttctcttgaatatgtggtatgtgcttatcacaaggttcattcatctgttcatacaattgtgtctgctacatatgagagattatggttttgctttgtagtggaattcgctctgcaattgaacttgattgtttacaattgtatttctcagttttcaattcaaagacagtctcgtttgccaaacttgatttgcataattctttaatttccttttttttaaaaaaaattggtgtcatttttttttttaattcttctgttctttaagttacaataattacttttcattatctttttggcagtccga

SEQ ID NO: 85316 - DNA, 865 bp, Citrus clementina
  Intron number 2 from transcript clementine0.9_036030m (loc us clementine0.9_036030m.g) derived from phytozome v7.0 (c hr-ID scaffold_14; pos 1615820 to 1616684 reverse strand)
gaaccatttatattaaaggtaaccttgagctttactctcatctttaattatgaatctcattgagtttggaaaataaaaaataaaaaatcgatctgataggtcagcaggaatcggaactttgcttcaacaatatcgaaggtttctcgttattcacattttattttattttattttttaccttttttgtacaagctagtttcagttggtaaagtatcttaagatgaaataacaggtttaagagtttgaatccttttaagataggtggacagaaaattttaggattccttagactacaaattaaaggaaaaaaatctaattttttgagaacgtacaggagtatttggttggtgatcttaaatacatgctattgtaattagaatgtcttcgtgaagtttctcatctcatccacttctttttttttcatgaaagtaaaaacaatcgatttagaaaattacatgtttatttatttatttattttttttgtttgagcaaattattccgtcacatacttagacttttcccacatccaccttttaaaaaataaataaataatcacccttttaaattacatctagtaaaaatattcttgacctttcaaaaattttatccaaccagtaactgtaaagcgttttaagtaggatttgaaatataggattaaattagaaaacaaggaacggcatttttgtcataaaacaagaaagaccttgtgaattatgttacccactaaaaggagacaaatatctctcccttttcttttttttttttggtttgggtgctttgaattttaaaatacgtaagaaaatttaattaaaagataatttgtttctcagaaatagattctttgagcaatttagaggagctggac

SEQ ID NO: 85317 - DNA, 887 bp, Citrus clementina
  Intron number 2 from transcript clementine0.9_008957m (loc us clementine0.9_008957m.g) derived from phytozome v7.0 (c hr-ID scaffold_3; pos 6267996 to 6268882)
tttctccctccgaagagtacgacgacgtcgttaaggtttgtttagtttattaatttcttgaagaaagtgaaggagaccaatgtctcagctttctcagtggatctctgccacactcagcgtagtacttctttctgttacagtgcttttagtagtatacactctacaggtcaggaaggaaaccaacacagcgcaggggtttgcttttttcttttgtcttcttccaataaaaaacttttatcttgcactgcttaaggtgtctcatcaacaaaggctgattttcttcaccacttacacaacatacgaagaagaagaaatcaaaatctaggctgctaccttttttctgggttggttcaagcttgactaattacactaatttatttgactgacctagctagctactacatgttaagtatatttaaggcaagaaatgagctggagctggtgtaaacagccttacgttacctgtatgttttcatgcaaagaattttttttactaggagtaaaaagtggagtgtgaaattgggtaacgaggcaaatcaagctgggaatagtcttgtcaagtgtcatgtttctctgtcatctaatgtgactttcccttggtgcatgatcatatccttccgtcaaacttaaacaacctggcctttagtcctcattattaactttaagctaaaacactagtagcaggaagaagctacactggttgatatttttatgttacatcagttgcttaacatggcaatctcctgagaaaaagttgaattttgacgaaagcattattacaccttatataacaccttaattaatacttgtagatgtgacaacactcctgacttaaaattggaatgcatgcagtattttcgttgccacaacagcatccagcctctatt

SEQ ID NO: 85318 - DNA, 512 bp, Citrus clementina
  Intron number 1 from transcript clementine0.9_020242m (loc us clementine0.9_018896m.g) derived from phytozome v7.0 (c hr-ID scaffold_10; pos 1185379 to 1185890)
gtgaccaaccaaacaagtctttcgatctttatcaagtaagcagttatttctttaagctgtttgttcttatcagtttgtgtttatcaaataatacacagttagcagatgcttcaggtatgagacttttgaaacctttttatatgaatttctttttgattaatctttcgcaaacagaaaaatctaatgatgttcaatctttgttctgttggggtttagttgatttgtgttgttattgggttatattttcctgttgtagtagtttgttatcatctccgtcttgtatcatatcctgtattttaaagtaatgtgtcctttttgtgtagtagttcagaatgagcgaaatatgtgatcgattggtacagatcatttgctcatttgctcatttgcttatatatatatatatgtatatatataatcactggttatagaccggtttgttagctcaggggtttttctcaggtgaagtagtgttttttttttttttttttgtcatgcagccttaaggaccatca

SEQ ID NO: 85319 - DNA, 964 bp, Citrus clementina
  Intron number 1 from transcript clementine0.9_025275m (loc us clementine0.9_025275m.g) derived from phytozome v7.0 (c hr-ID scaffold_2; pos 4147300 to 4148263)
cctgatcccaagaccaattgatcgggttcgttttttattttttcttattttttggaggttgagccactgtctatgttctaattttgctagtttttagtattaataattagtgttgtatgaagcagtgggattttcagttgtatgattttgtttaattagtctaatcaatcgtcttcataattgtgatatgggttgctttctgaatgtttaattatattggatggtttaatgggatcaactagcatcaatttgatttgatatgatgggaattgcagtctagacttgggatccatttgaattggtttttgatttatgtcagcaaattggtgtttcaaggtctttttggttttagttgactcgacaatggatcacaattctctcatgatcttaaccgtataccatttttattgtacacctggcgtagcgcctttacaagctaggtaggactaagattatgaaaaattccactaatccatcaataatagtatgttatcatactcattgtgaataacttgctaaaacatattctttgtaaagcatgggaatgttcatgagcaattgggtttgttccaatttttagattgtttggtcatgatggtggaatgggtttcggattctgatttagtaggtttgtttagtatttagtgctgtttgttgatgatttgatggtatgatttgtaattctgttagctaattgatggattggaggcgtaacgtgattttgtatattgttaatgatgttttgatcataagcatgtagggatcaaaattttattctattctgcagcacatatcattgttgatatgattctagaagaagcatgcatgcataacttcatagaagtgtagaattgcattgttgaagtttgaatttataaatgtcttttcttgtgggtgtgccataaacattttcttttaactctgcactttttctttttttgggtattctgctataggcaatagg

SEQ ID NO: 85320 - DNA, 788 bp, Citrus clementina
  Intron number 1 from transcript clementine0.9_028144m (loc us clementine0.9_028144m.g) derived from phytozome v7.0 (c hr-ID scaffold_97; pos 858619 to 859406 reverse strand)
gcaagctcttctgcttttctgggtcagtatatcttaaattcttattgaatttgagctaactgaagaataaagatgaaaacttattcacttgtgaagcaacaaaaatagagctgtacgatatacattgtgagtttttcttttcatgacataaatgtgcaggccctagtgttggttagataatctgaccagtgaagatttagctatctgaaacatgatcacaagctatcacttatagcgaaatcttttctggtgtcaatgacattccttgctgatttaagcaacatttcttgcgattaactcacaaaaagtgaattaacaattacttttgatttaacccagtttctactctgtttttatagaactggttttggaaacgtggatgtctatgtatgagactcgtggaaacttgggaccttggtgccctctttgtgaaattatgatagcaatgcgcccttagtatatatatatatatatatatatatatattttttttaaacttccattaggacttctccaaatggagctttgtaaggcattcaatcttaaatgaactggtgtcttcaaataaatcaactaatacaatatataaaatagtaggcttcttggtaatggaaatgaaaaaagggcaatctgactgcgttaactagaataactaatgtcctgagagttagacaactgcttctttctggttgactactaaatgattattttagtcaattagtttccttctgatcgttttgtctgtggaatttgatgttttcttttgaattgttatcatgtaaaccaga

SEQ ID NO: 85321 - DNA, 395 bp, Citrus clementina
  Intron number 4 from transcript clementine0.9_010488m (loc us clementine0.9_006706m.g) derived from phytozome v7.0 (c hr-ID scaffold_4; pos 6973383 to 6973777 reverse strand)
cagctaattggttttcttcaaaatcatcaaaaaaggtttgaggtttaacttcaaactaattcttgtgcctttaatagacaaaatggaggaacatcttctgtttttcacttatggtacagaaccagtttgtatttcaaattctttgcacgtgtgtgtgtttctttattaatattaattatcaccagtaatacctaagattgagaggtttgcaaatatttacattgaaggtcatgcatgtgaaagttgatgtttaattgtataagccagtttctttccacgtattttttctttgagtgtgtttgcagttctctccttatactataatcatgttatctctgggagtgctgctgctagaattgctttatgaactttttcctgtgtatctgcagatatct

SEQ ID NO: 85322 - DNA, 491 bp, Citrus clementina
  Intron number 3 from transcript clementine0.9_005830m (loc us clementine0.9_005830m.g) derived from phytozome v7.0 (c hr-ID scaffold_41; pos 636445 to 636935)
ttgctactgctaaggtacatacacaattacaatgatcatgattctcttttaatacggaacaaataattcaatttatgtgttttgatggtggttaataaataaaaaatataataattaaattttatttatatattactattaaaagatatataataagagatttttaaaaacttaatatagcgccgatgaaggaaggattttaattgataattaataaataaaaaagttataaatttaattttatttcattttatacactgatagaaaaatatacagtgagagatctttaaaattttatagtaaaattcagactaaaaaaaagatgttatttcaattataacacattttggatcctgtcagtacgtgttaattaatgaagaattaattaaattccaattttaattaattaagctttgctttgcttatgtttgtgtatatatataaatttatatataggcttgttacgaagcgaacttcccttgtcgcacgcc

SEQ ID NO: 85323 - DNA, 251 bp, Citrus clementina
  Intron number 2 from transcript clementine0.9_009385m (loc us clementine0.9_009198m.g) derived from phytozome v7.0 (c hr-ID scaffold_4; pos 3582806 to 3583056 reverse strand)
gctggtatttttcttatctagtttttttctttttaattttttagctttgttgttatcattgtattattactctagctagtagtcagaaatcaaacttctttatatgtatggaattttcacactcaaaatgaattgaattgctgtttttcaaccttaccattttttttttccttcaaaaagaaaaaggagaaaactataccattgtttgttttgcaggcagaagtcaactatttaggacaacttaggcattc

SEQ ID NO: 85324 - DNA, 736 bp, Citrus clementina
  Intron number 1 from transcript clementine0.9_015889m (loc us clementine0.9_015889m.g) derived from phytozome v7.0 (c hr-ID scaffold_24; pos 2815409 to 2816144)
acaaattcagtgccgtatttgcctcgaaactgacggtaattgtagcgaaattactcaattttgtaaaacttttttttaaaattgtagccgacatttgctctgttttagctttatttatgtttttgcttcgtatcagtgagtgaattagttggtttaattttcaaattcgagaaagaattaggagaattaactgaaattagaagaaaaatgaagcaacttcacagtgaagctttatgcgaaaataaaataaaatataagtaggttattttttttccgttaaatgctggaaaatgtgaggaaataattataaaaatttttttgttggttttaggaatttatgaagtgaagtcaactatgggatgatttttgggagtgcttctgttggaaaaccacctggaagtgctttgccctagtaaaaaaatatatatatatagttttgtgcgtttctgacaatgatcaatgattgcatttttagctatttgagactgataaaagcaactcttaaacacacttaggttttgtagttgtggtgttttgtcacagtctagttcagaaatgcttttcactgtgatgttgatgccaatgttatctggctgttatagagtgataaatgataatcttgtatgttccttgtttttaactttgagttaaaatacatgtcaatgctctcatttttatatattcatgtgcattttcttcaggtagggactttattgctccttgcaagtgcaaagga

SEQ ID NO: 85325 - DNA, 292 bp, Citrus clementina
  Intron number 4 from transcript clementine0.9_024413m (loc us clementine0.9_024401m.g) derived from phytozome v7.0 (c hr-ID scaffold_7; pos 4160830 to 4161121)
ttcatcaattgaagggtagcagctcaaggtactattcagaaagcaaaaacacttgcacaatgatgcccttgacatctggagcctagaattgaaattggctcaagtctctcaaagaaagaaaaataagcaataatgatgattgacttagatcagaactgaggcatcagtacgaaaaataaaattgtaatggcaaaattgtttcttttctttgatgggatcattttttcaaatttgttgacaagaaaagggtgctttcttttttctaacagcataggtgcagagagaattaaaa

SEQ ID NO: 85326 - DNA, 898 bp, Citrus clementina
  Intron number 1 from transcript clementine0.9_011548m (loc us clementine0.9_007674m.g) derived from phytozome v7.0 (c hr-ID scaffold_135; pos 181367 to 182264)
gccgcctccctcgacggctcccgctctttcattcggtatgtaaaatttttaaaatgtattattcgctggatctacggcgtcgttttcttgcttttttcttttaattttttttttgctttttcaaatttgtattatcaaatcttggcttaattttttagatctgatagcttactcactgatcctttttcatattgaaacaaacttgagcttagcagtctcctgcttaactatccaaattgctgcattgaaaggcgattcttagttcttttttctttttttgtttcttcaatttgaactgctaagtcaaggctgctgcttgtttctattattattattattattacttacgttatttgaacattgttgattttgctgtgggattgttctacggatctaaattttttgtctggatgaactatgaatgaagttccagtgacacatttcatgctattattgaacttttggctgtagagtttgcttcaagtgtcttattaggtgcattgtcgctttctgttagctgggatggttttacgagatgaagaatttataaaatggcatgatataagattgaactaatctaatctaaaactttagtttagggtaagtaaacaggggcaagttgataaacatctagatctttagttgtaatttatatactatttgttggttttgcataaattttgaaggaccttatttttcagataattttctactttctgatttgtgaaacctgcaaatggatttgattatctgcttccatataaattattatcatatttttaaaagataaatgcggacatcactatattactttatacttttaatacattttgattcgttatcatttccttttcttataatatgatcttttatatatattatttgactagatttgaga

SEQ ID NO: 85327 - DNA, 762 bp, Citrus clementina
  Intron number 1 from transcript clementine0.9_016522m (loc us clementine0.9_016522m.g) derived from phytozome v7.0 (c hr-ID scaffold_10; pos 4092417 to 4093178)
ggcgatcttgatcgtgctatctagaagaagaagtaaataatttatcttcaaatttgattttttgtttgatttttcttctttccttttgctatggttagggttccgcattagtttttgtttttaacaattaattaattgacttacaaccctaatttcaatgagatacagtatgcgtttggtagagaaattattgggttctaatgttttttttcccctgctttctgttatttttagattatgattatttgattttgcttatgatttagagaaaattatcaattctgtgtcttcttaaatacagttaaatacccaattgatcattaatgttatgtgattgagctagtttaagctcggcttgttatcgataccaggagttagagcatgagactttagtgtgtgaaatgttataattttagaaaatttaggcggtgaattcatgataataacaaaagtaccaatatttgcaatgaagagggcttatagtttagagttttgcaggaaatagtgttggggttgcttcttatgtacattgtttgtttactttggcactgttaactggtgtcccagatttgaaatttggggtttgatgaatcataattgttatgagattatggttcttaatttttttccctattggtttacaaatgatgcttttatttgctggttttcctgcttggtgtcatcaatttgttaagttactaaacttgttgtgtttgtgtttttgcagtcttctcttgcagctgctagagcagataattttta

SEQ ID NO: 85328 - DNA, 741 bp, Citrus clementina
  Intron number 3 from transcript clementine0.9_000994m (loc us clementine0.9_000994m.g) derived from phytozome v7.0 (c hr-ID scaffold_2; pos 1898619 to 1899359 reverse strand)
ctgaattgactaaggagacactctctgatttccaggtaatgctttcatatgctttgtaaaagctgatgcatcatttttgaattacagaattgtttgttgatggttatttatttgtcccttttttttgggggtgacattatgtgttaaagtagagtcagtgtgtttattgtcatctttggaatgttttgaaattaattttagctatgattttgtaaacttttgtgttataatgatttttagtattttggcttctcatcaacaaaatcaatatgaaaatttactgatctactatggtagcgttggtaattctgtagatgaagacattaggtgctagaacctttaaaccagaggaccataacttatgtgctaaatggtgtccaccatgcatttcagtgctgcctgttttcattgttctttgagtagcggctggaattataagttgcaagggtaagaaaggattttatgttcttccttcagtaatcttatatgattaatggctggacttctgttgtatatccagttcaggattttcgttccttcagtaattttactttcttcaatggttctgcattctgtactttttcattttgatcctgtctaactatagtgaaaaatgttcatgtctttttatgcttttattctataatcttgctttatttattagtatttgagtttatgaaattttcatttgaattgtattcttcaggctgtagtctttactgatatcagcttagagaaagc

SEQ ID NO: 85329 - DNA, 725 bp, Citrus clementina
  Intron number 1 from transcript clementine0.9_011196m (loc us clementine0.9_011196m.g) derived from phytozome v7.0 (c hr-ID scaffold_3; pos 4176151 to 4176875)
catctttgggtaacaggttagtgtgtctgtgtcttagctgctcttactgaaacataacatgcatgtgaaaaatgtgatatcgagaagcacttgtctgtattgggactggggctccttggaagctggaatgtgaagccaagaaatgcatcgttgaattttctctctctctctctctctgctcttacaaattaaaacggtgatgtgtcatgcgccaaaatactttaaaattttctactttctggacagaaattttctttttcagcctgtgagttttctttttcctgccttaaattaagatcactggcaataccatccctcctttttcaaattacgtcagtttcttattacttttcaggcatcactcaatgatatttattgggagttatctttgacgtaactgtttcttttatcgttacgtgtaacttgttgtcattttaaagtacattaatttttcgctattcggccttattatccaatcatttatttttacattattttatctggatgtaaatatctttaattatctggtttcaaaactagttgaatggatactttccgtgggacaggagtaaccttgtagtttaactaaggatgttttcaaagattataacaaatcaaataaacattacatgataaaagttgatggctattaatttacactaagaaaatcaactttaacgctgaccatcgttacgtgctgcaggtggtctttaattgcaagcaat

SEQ ID NO: 85330 - DNA, 596 bp, Citrus clementina
  Intron number 1 from transcript clementine0.9_035148m (loc us clementine0.9_035148m.g) derived from phytozome v7.0 (c hr-ID scaffold_3; pos 7848895 to 7849490)
tagaacgcgggaatacgtccgggagggctttgctggttagtctctctgttttatttcaacttaaaaacttattttatttttcgattaaagtatcttcaattacgtgcttcgaccatcaaacctctgtaatcttgaatgacaacaatgataataaaaagccacaatttatttttttttcccccttaaattagaatctgaagaatggtgaaagctccatctttgatttctcttgccgccctggcagtgaaacgagaacttctgcttggtaattcttttatttatgttattttctaatactgccgctgctgctcattgaaatttatttgacattgttaaatgagaagaaaaaataatctgtttttgatggttacaggggatgatgttataccatatgtatgtgagcttccggctgacttattcgatattttattgacttatttgcctcctttggccctgcaaaagttacaaacaaaaatgttagttattatttttttttggggggggggggggggttgctagatttcttgtttatgtatgatttttacgtttctttatttctcaatctattgttgtgcctttgagcaagccatttaggg

SEQ ID NO: 85331 - DNA, 575 bp, Citrus clementina; identical to SEQ ID NO: 83571
  Intron number 1 from transcript clementine0.9_004019m (loc us clementine0.9_004019m.g) derived from phytozome v7.0 (c hr-ID scaffold_24; pos 3696484 to 3697058 reverse strand)

SEQ ID NO: 85332 - DNA, 379 bp, Citrus clementina
  Intron number 1 from transcript clementine0.9_012745m (loc us clementine0.9_012744m.g) derived from phytozome v7.0 (c hr-ID scaffold_4; pos 1401019 to 1401397 reverse strand)
ggtgacgccaaatactggttcgttcttgcttctttgattttagagtagtttgttttggttttattatggtgaagttggttgtgacaatatattcttcataaggctcactaggacatttgtttccgggctttttaaatcccatcaatgtaaaacaccaaaataatattactatttgggacaaaccttatcacatgtgctatttaatatctttgctttgtttctggctacttagcataacatcttccttgtaggtcatgcattatatagtcacacagacattactggttcacgcttttcataagggcccattatgacatttgctcatatgcctttattaagtgctaaatgctgactgattttatttgctaaaatcagatcc

SEQ ID NO: 85333 - DNA, 453 bp, Citrus clementina; identical to SEQ ID NO: 78808
  Intron number 1 from transcript clementine0.9_001274m (loc us clementine0.9_001274m.g) derived from phytozome v7.0 (c hr-ID scaffold_4; pos 2869973 to 2870425 reverse strand)

SEQ ID NO: 85334 - DNA, 704 bp, Citrus clementina
  Intron number 1 from transcript clementine0.9_014873m (loc us clementine0.9_014873m.g) derived from phytozome v7.0 (c hr-ID scaffold_4; pos 4907390 to 4908093)
gccctttccctgttgaacagcttcaggtaagtggtagcaaatatttcgatattctatattaatcttcacggttgttcttcaatttttgcctaatggggaataatttaggattaatacccagatgagtttttcctacatttgtcaaaaatgtgttctttatctgttttcttgaaatgggtttattagtttttcctttcttggtgatggcaaaagtttttttttttttcttttttcccttcttaagtcacttgaaaatattttccttgattatgtaattgatatgggttgtttttattttgctaaaaagatggcttctttatctgcatttttgattggtttactctagtttccttgaatgtgatgaaagctgttatttctttttattgaattctagggttaattttcttgtaattgttgcctatattgtgaaattgaagcgtttatttaattctttataagattttcactcttgtgtggtgtccttcaagacacgactttccctaatcttggcctagtcttttgcttgggttgctcaaattagttatcatggatgaatttgtttttaatctttgaactaagctgttatttatcagtattctgactcggccaatttggatggtttgttttcacatgcatttttatgcttaataacatttttggttcttctaatgctcgacacaaggcatcaggcattgctgctctcg

SEQ ID NO: 85335 - DNA, 871 bp, Citrus clementina
  Intron number 1 from transcript clementine0.9_013769m (loc us clementine0.9_013769m.g) derived from phytozome v7.0 (c hr-ID scaffold_3; pos 8721426 to 8722296)
cataaagcaagggcaattcatctgtgagtacgcaggtatcggcaaaatggaaatgtatgttggcatttttgtaatatttgtttagagtttttgatgcttgtgattttaattatacatatgcctagttgcatctgcttgatgattatttgatacagtaagacttattattagatttagcgcgtgccgttgttggaattatatttctgctgtgttacggtagtatggaatcataagttcatagttttagaatgggattgtgcggatgaaggaattacatttgtttatttattttgaccaagaagaagaccaccttcagttcgtacaattctagttcaatggcagtattatcgaatcccatgtttcaaatcttatagtttttatcccttattatttggattaattttgcctaattggtaggcaaattttgttcgtctaatacagcttatattttacatctgctacgtggtagaatagagtctataaccactatgttttgcatctaccatagggctgtttagcttgccgttagccatatcttccagttcttatgactaccattatatagctgcttacttttcctgagttatagctttgactctctattgtattttctccattcaactagccattgttgggcactttgggtgatgtttttgatctttctttccattcttcccacatcacggggtttatgaaacattatggtaataactgattgctttgaattggtctagtgtgtaaaacattttcatttacttggatatttaagaaataattattgtttgtttctgtggacatttgttagaaattgtcttagttgatgtttgcttgaataggtgaacttttgaccacaaaagaagcaaggcggcgg

SEQ ID NO: 85336 - DNA, 495 bp, Citrus clementina
  Intron number 1 from transcript clementine0.9_022175m (loc us clementine0.9_022175m.g) derived from phytozome v7.0 (c hr-ID scaffold_4; pos 5032610 to 5033104)
aacatcgtccaatcgggagctgcgttcaagttcaggtactgcttctgcaatttaattcattcattttcttttagcttaccttgtttctaattgcactgcatattttgatttttatcagtatatgtgaaattttacaactatattcgatgcgccatgaatattaatctactgcatataattcttgttagtttctttgctacttttgggtaatttaagatggttttggtttaatatttaattgaaattttaatttcctctcttattatatgttccggagattttttacctgtttacaactcttgaaacgtctcttcgtgaagcaatatcttatgaacatgaatgacgccatactttcggtttagagagtgcagccactgctcgacaatcatggcattcatagattagttcatgtcttgctagcacagcacaggactgatcaaatataggtaattcttatttcacgacacgttttctcagttcacttgtgccggagaa

SEQ ID NO: 85337 - DNA, 854 bp, Citrus clementina
  Intron number 1 from transcript clementine0.9_002302m (loc us clementine0.9_001169m.g) derived from phytozome v7.0 (c hr-ID scaffold_7; pos 6359388 to 6360241 reverse strand)
cactgtaagtatctaatctgctgattcttacttttctgcttcactaagatgacagaaataggttgcgtagatggtatcactgctattgtgttattctgcacttatgattacatatgaaattattgaggactgctagcacatggtttgccaagttacaccccattacccttgtgtcagaagatgctgtatgagtttttgactgattctcatgtgcagaaatttagagaaggctactgttttaattaggttatacaaaatcttaaaatgactataatggttaaactttggaattcataaatttatcatagaaatcttacatattcaaggaccataaatccactatggtacttggtttgtagatagacacttaaaattctagtcaccatgcaatatgtagtcttctgtcaggatcgcatcttttgttttgttgatggcagtttattgaagattgtggcctagtcttaggaatattctaaattatttgcttcctgatgtggattgttcattttgttgatcttcctcaatcaataataacttccatagatcagccaacttctctgtaatctgatagtgcaccgtttcctccaatgattattatcttaatctttaggcaaatctataccatatgatctaggacggttggaagggtaattcatattataaattcctgtaatcatgtaatagtgctaacatttaatctcattttacctttttgtctgttcatcaatgtgtaccttttcctcaaacactttccgcttcagctgtcattggtagcatatatattttgactgcgcagatttttccttctatgaattgcagcaaataattctgatcaaacaaaggatcaggatctc

SEQ ID NO: 85338 - DNA, 621 bp, Citrus clementina
  Intron number 1 from transcript clementine0.9_022708m (loc us clementine0.9_022708m.g) derived from phytozome v7.0 (c hr-ID scaffold_4; pos 1477467 to 1478087 reverse strand)
ctggaagaagcccatttcttcttcaaatttttccagtaattttctaccccctccttctctctgtataataatttgttttgttaaattgttgtttcaaagtggcaaaatatgaattttcatgttcaattttgacattgacggaaatggaaatatatgttgctttaagagtaaaaaagagaaaaaaaaaatgtaacttgttatggggtttagatttgcatttttagtgaattattttggttgtgaagtgttgttcacttgtagatattctaggtttaagtttgtattgtatgcttctatgttttacaatatgaaagttgtgttttttgtgatgatagatgtcatttttgtatggatttgttcattttgtttgatttgtttagacaatttgttttggagttgtatgtggataagggcaatatggcttcgttgaaattttattttatttatcatcatcatcatcatcatcatcgtcttactcatgctaggttattcacttctctttgaactatcttttctgttttcttcaatttgtgatgcggtaagaattgcttatttatatatttttggttactctgctcatttccagataacctaaatttaaattcaaaccttgctggtaag

SEQ ID NO: 85339 - DNA, 982 bp, Citrus clementina
  Intron number 2 from transcript clementine0.9_005827m (loc us clementine0.9_005267m.g) derived from phytozome v7.0 (c hr-ID scaffold_41; pos 865532 to 866513)
gctgcatctttggtaagaattgaatctgcatcatttatcctaattaaatgtggaactatttctattggtaaagaattcttagcagctggttgtgtttagaaagatggatgcttccattttgtcttcgcctttttatctttatctttttcttttatatggaggatgtgcatgtatttttagaacataaatcacggaatagcgggcattatgagctagattttatctatgtacagacttatatatttgaaattttgattgtgctcacgattagatagatggtcgttgaaacacagtggggcagatgaattgccagtgggtcattggaaatcctggattagggctggcttgagagaattagaggctttaggcaaatttaattagggccctttaatatttattgctaaaatggtaaaaatttataacttccatatttcatttagatctttttcttcttgcttcttaatatgcaaaattattaaaatttatacatttatttttcaaaaaattaaaaaaaaaagtatatatataaggattagtatgacataattgaactatagttattattttcatgagatttacaaatgaacaaccttaatttatgtgtggacattattaagaaggttcaattttgaagactgcatcaggacagtttagcttataaagttatatttagtaagattaaaatattactatatttttagtcaaacattaatcatgttctattattttaaactggggtcttggcagtgctttaatagtttataatttttagaaaaagaagaaacaatatgggccttgttgatattaaatagaggcaccaggaaatcctgataaggctttacttgaattttatttaaaaatttcaacttacacagttgttggtgaatttttcaaatgctttatttactttggtcaacttaccatttgaaatcaattaatattagtattatctggctgttcctttttccagggtcactcaaaa

SEQ ID NO: 85340 - DNA, 569 bp, Citrus clementina
  Intron number 2 from transcript clementine0.9_010044m (loc us clementine0.9_010044m.g) derived from phytozome v7.0 (c hr-ID scaffold_2; pos 4553535 to 4554103 reverse strand)
ctaaacctgccaaacccaggagacacattcctcaggtacccgttcttttaaatatattttaggtaatttgattatggcatatgtttatccttgagttaatcctctgttacattgaattcctttttttttttggcggggggggggggggggggggggggggaggtgtagaaaatcaagtttgatcattagatgattaaaacagtttgatctgaacttttggatatgttgcaggtcaatcaattagttgtagtgattttagatattcttatcgacatgcttgtgaacaattgaaggtggaggcttggaactgtgtttctcagttaatttgtttaatttctatctaatctgttttgtatgaagggcatgatgctaattgatagtaaatttgtggaatttaagaatatgggtgtttttttgtataattatagtgtctatacatttttgagaccattaattggtttggctgctaactgtttgctaatttgcttgtacttttaattttaagcttgtctctgcttctgtattaacatttctgcaattgcctgtgcagtcttctgagaggacattgg

SEQ ID NO: 85341 - DNA, 960 bp, Citrus clementina
  Intron number 2 from transcript clementine0.9_022751m (loc us clementine0.9_022751m.g) derived from phytozome v7.0 (c hr-ID scaffold_2; pos 368076 to 369035 reverse strand)
tgttgacctctactttaacttggccgccggtgaaggtatgaacattcattttatcaactcttcatttttcattatgatcaattaaaatcggacaaattttacaaatacggaggaaaaaaaattattggttgccaagtctattcatggtcgatggcaataataagatcaatgaactatgttaattgtgacatgggttacaattagtagttgggtttaattatgtcttaagtttaccattccgaaaaacaaaaaacaaaattgttctagaaatatttgacatatcaaatagttaatgtcaaatctttgaatttacatggtcaatatacatcaaatttcttctaagaccttttcaactaccgacttagaaggaaaaaaaaaagaagaaagaaattgaaaatgtaattttctaatttctagcgaaatttgacgagtttgataacgtcgaatcttacaatttgtatggtcaaaatacaaatcaaacaccttctagaaagagatttttaaatggtttgtttatatttaccgactaattaaagatatttggggagacggcttttgggaaaatctagaatttagacttattaaatattaaaaaagaaagaatttagcttttgtgagcataaaacatatccttcaaacaccacatctagcttttgctttttgttttctctttaagtttacacattaattaaagagttctcttataaaccctttgcttgagacattttttcttctccatcagtcaaagaattatttctcctgtcacaaagttgcatgacacgtcgcatggcttataatatatattccttttatacgagtttctttttctaatttaataaagtcaacgtgcaataacgctgtttgtatacatgatcatgggatcgctgcatgtaacttaatatgaacgtggtgttggttcacgcaggagcatacttgcctgacatttgccaggctacccgc

SEQ ID NO: 85342 - DNA, 627 bp, Citrus clementina
  Intron number 4 from transcript clementine0.9_011142m (loc us clementine0.9_011142m.g) derived from phytozome v7.0 (c hr-ID scaffold_3; pos 7287694 to 7288320)
tttgaagaacggaatcaaatcaggcaacaaaggaggtaatgtcttctgctaaatggtgactcatccagtaggtgtaataaatctttttaaacaatgtggggaagaaaatgaatgctctgtgatatacttgggttttctcttgactctcatctgggctttggaaattgattatgatcggacagtctgattgatggagacatttattttcctggatcaaatattttgataaaatttttgacatgcataataataacatagtaaaaatattatgttgcattagatcattgattggtttttcacgagaaacgttttctactgggtttctcacacacacacgcaatggggcatggatatagttatacataaaattttcatgcatgtatattctttttcagtcatcatgctgaaccatttcatccataaattatttgcctttttcctgttcagcctttggttataagtttgtgagcaaattcctgaaatgacgaatagtggctttacatgttcccagtatgtccttgttttgattttatgccagtgatagcaagtttctcctttgctatttcttttccttctttactgaacatagaggcttaatatcttacaccaatcattttaggcagcagt

SEQ ID NO: 85343 - DNA, 736 bp, Citrus clementina
  Intron number 1 from transcript clementine0.9_011836m (loc us clementine0.9_010302m.g) derived from phytozome v7.0 (c hr-ID scaffold_31; pos 1356098 to 1356833 reverse strand)
gactttgaggttttcgacagtagtggtaaggtttcacttgaaaatttcgttttttggttgtatttcgtgatatcaagcttgaaattgtaaactttgaattagttttgatgattttcaaccccatgcttgtattaagtttgtgcttaagtaattatgagtgtggtgttatttaaactgattaacaattgaaattaagtgaaatatagtcatgaattgatcattataaattgttttcagttgtctgtagcccgtgtatcgaaagaaattaatcagttaagtagctgaagatttgatttgaaagagagatggattaccagctttctgatagcagtggtgagttaagcttaagttacaagaattagttcatgaatcacgtgttctttaattgctcgatttggttgcagtatagttaataattttgtaggttgtgtggccaacaatagtgctagttattgtgtgatagagggagaataaaacataaattcttctgcaggaaaaagatctttctttgtagagttattttttttttctattcctgctccgctcatgaatgtggatgcaagagataacaagaactgtgttagttgaatgggatgagttaaatactttagatgtgccactgatgctggacaaagatatcatttttttttcctttgaaattctttgtttctttggaagctacatgttagacagtctctcctttaatggcttctgtacgagaaaattgcaggcacgg

SEQ ID NO: 85344 - DNA, 935 bp, Citrus clementina
  Intron number 4 from transcript clementine0.9_017636m (loc us clementine0.9_016387m.g) derived from phytozome v7.0 (c hr-ID scaffold_2; pos 5074889 to 5075823)
gtacagctattgggagtgcagctcaaacgaaaaaggtatataattcttataatcttaacttaagaattcttgataatgtaaaatggaagaagtatttacttgatattagttaacatgaaatctctgcattttttattcatgcgtctaagctgctgctagttatgctgatatgttgagaaacatacatggagctggaattttgataacgaaaatgtttttgagattttggtgaaagttctatatttggttcctcgattatgccttgtcttactagtgattgtgttgtgttaggagtattatttcagatttatttccataatttagtgacaaaattaaccgaagacaatatgtttctctatgggctatgaactaatctcttcatttaatgattgcttggaagctagagtaccgacgtaaatacttttttatgaaagtatcttttttgaatctctcttaaaaacaaaattggtaatatggcatatttgataatttgtctacattttgctctggggtttctaagtaatctaaataagtagtggagatcacctatagtatacgagtactatctgtttcagtttcaaaacaaactcagaaactctgtcaatcaagagatggtattggcgataaatttggtagagaggttaccaaaaccacttgaatgttttctttgtgatcataatagtgtaggctgcaaccttccggagatgaaatttctcttcttttactagtgtattttcttaatggaaagaaatagagaaagcttcataaatttaacaacagtgagccgcttcatcaaaagaagcattaataggcagttgcaaaggaattatatgcaattcaacttgtttttgttactttgcttgtttgattggtagtgcagctacccttctagaacttgatcttatatccttttctttcaccttcttgtcagaact

SEQ ID NO: 85345 - DNA, 663 bp, Citrus clementina
  Intron number 3 from transcript clementine0.9_034647m (loc us clementine0.9_034647m.g) derived from phytozome v7.0 (c hr-ID scaffold_4; pos 3372149 to 3372811 reverse strand)
aggtaacgaatgaaaatagctaatgttattttgttaactcgattttctcttacagtctcatgttgtgaacatgggagttcaagaaaaagtagagtaatgaaagtagagcataagtgtggaagtagaaattccatagttgatgacaatacgacaaaagtcaaccatcatttttttagtcacctgcaatagcaataagcttgatggtcaagtgaatacttacctatagctatatatatctctctgacagtaatttccctatttctttagggctccctatgaatttcaaattctttgcttctttgcttctattgctatctaacttgcaggagcataattcaaaaaaaaaaaaacaaaataaaattgcagaagcatttcaccccttttttcttctcaaattattattatcgttttattttggagtttttgggtggaagaaaacaaccattgtttgctgggacattacttgtatcaactgtgtatcttagcttagtaacattgataggcctttaaaatttccttctgcacttaaatgtagtaagatacagtgtcgattccttgtctcccggcaaacttacctggtgacacatggcagttatatgattattttccaacattctatttttttcagtttgactgggaaggagatttacctctgaagtatcc

SEQ ID NO: 85346 - DNA, 272 bp, Citrus clementina; identical to SEQ ID NO: 82648
  Intron number 4 from transcript clementine0.9_029109m (loc us clementine0.9_029109m.g) derived from phytozome v7.0 (c hr-ID scaffold_3; pos 1300989 to 1301260 reverse strand)

SEQ ID NO: 85347 - DNA, 598 bp, Citrus clementina
  Intron number 1 from transcript clementine0.9_002873m (loc us clementine0.9_002873m.g) derived from phytozome v7.0 (c hr-ID scaffold_58; pos 1050708 to 1051305)
tcggagttctcgctttctcgatccgtctcttctctgtaagatctccgatcatggcattttttagatccgatccgaacaaacgtaatttaatttctttattgtcttttgctgctcagaaatgaaggaataatatttgaagaaattgatcgtgttaatggaaatttacgtttttgtttttcaaattcaatgttcatttctttaatttatcgagaaaacgtaaaataaaacgaaatttgttagtttagattgtaaattttgaattagattttaaattttcaacattttaattttctgtttttgatatattacttgatgcattttctcagaaaaattttgtccgaagtcaatttacgttggaaactggagagaaaagaattttttttttaaaaaaaaagtatagaatttaaagtatgaaaatttaatttttcgtttttgttcaattccatactagagttactatattttcaaagctactaaagttaggttgcataactatttgtaccggctcactttttgaataagcagttcaactactatttatattgttataatgttaatagtctcatggatttgcctattgatttgcaggttataaagt

SEQ ID NO: 85348 - DNA, 667 bp, Citrus clementina
  Intron number 1 from transcript clementine0.9_028802m (loc us clementine0.9_028802m.g) derived from phytozome v7.0 (c hr-ID scaffold_7; pos 3713942 to 3714608 reverse strand)
cctcctctgctcctcctcgctctgctttctaccaggtggtctcttgtcttcgctttgttgtcctgtttttgattcactgatactttgtgtttcgtgagctagatgctaaagaaaggatacattttgccaaaaagggttgaatgctttttgtgtttaatcaaattgagctagctggccaagtagttgcttctgggtcatctcagttggttacctttgcttgtgttgtctttctcctttttgttcatttcatgttgctatattctttctgttgtgttttaaacaatgttagtttctgttgtattttattgttaaatctggtccatgtcgagttaaatttattgcaatatgctcatatctttttctctttcttcttgatatgagtcgccatttgtcattcctctgcggaatttgtttctgttgtaaatgacttcgttttatatgatattgtaaggcctttcttctcttgtatgctcaatcttggagcaatggaaagtttttgctgtagctaatttcctttaggactaatttcctgtagttcagcgttcttttctctttttatttcacttattattattattattattattttgggggtattgttacaccatacttatgtattattatttccacagggtcattccaaatcgacgtttgcagcctgcagctt

SEQ ID NO: 85349 - DNA, 491 bp, Citrus clementina
  Intron number 2 from transcript clementine0.9_033388m (loc us clementine0.9_033388m.g) derived from phytozome v7.0 (c hr-ID scaffold_2; pos 1993645 to 1994135 reverse strand)
actgtggcatttcgtttgctggtgcgctatcattcgtttaaatctatttgtttggttggtttaacaacttgctagtgaaaacatgataggtggtgtttccggtgcaattgtaaagtgctttttcagtaaaagcattttttgtagatagattttgtgcacttttaattaaaatcctattaattgcttcttcaaaatgcaatgagagtgctttcttgccatttcaaaaagtatccattgagtacttaagcaatcacgaacattctttttctaattctgaagaaacaattttgtctgtttccaacaaacactgtaaattttctattaatcttatagacaggattagagtgtttttgattcaagatcaaggaaatcagtcaatttgatgttgacttggttgaattgatattgtactatagcataaactacaattttttttccactaaataatcaaactttggtaaatgttataggtgaagagcacccgagggaaa

SEQ ID NO: 85350 - DNA, 644 bp, Citrus clementina
  Intron number 2 from transcript clementine0.9_021861m (loc us clementine0.9_021861m.g) derived from phytozome v7.0 (c hr-ID scaffold_119; pos 502675 to 503318)
ccaagcttaaacggtacccacctccttttctttatttttgtcatcttattattattattgatatgattttgtatgtaaagaagtactcaagaaattgctaaagaaaaagaatcctatttgatatatttctttcaactcatgtgaaccgtgaagattcatgtttattgagccctagacatgcaatgaattccatgttgatatttcctgcatacatgtgggtgttagtttagttggtaaaattcttaggttgaaacataggtcttagattcgaactctgcttatataggtgggtttattgctgaccatgctatgactaaatagcaaatgagtgtgtttacaatatatttttggcaaagtatcggaaaggcttcagatcataagtatactggggattgaggtgatgcagctttaattcacagttgtttttgctataagattaatagttttctaaatataacaggtgggcagctggttaaatattagtcccaaataagtttgaccaaacaatttaactgatgtgccttgaagttaagtagaagtaccacagttaatacccgtccttcaagtttgctttagtttagaattcattgatttggaaccgttttgattgcggaaataaacttggcaggggcttttctgagtat

SEQ ID NO: 85351 - DNA, 519 bp, Citrus clementina
  Intron number 1 from transcript clementine0.9_030721m (loc us clementine0.9_030721m.g) derived from phytozome v7.0 (c hr-ID scaffold_14; pos 1383765 to 1384283)
caaccttttgactcttggcataaagttgttgagtaagtaggaaacaaaggtaagtgggagggatcaacttttgactttggcactaaagtggaaaagttgggtggaaatttaaattattttaatacccaccattgttgattttttggcatggcttggcctataaatagaggcctcatttgccctcttcattcatcccattttctctaattcaagtgagagtgccaagagatgtaagttgagagtgttgagagctttgagctctagttctagtgttttgagagtttgagtgtattggggttttgggttgtgagacaaaatattacaatacttgtaactccttttcactagtaaaatattttctcctgttttcgcccatggaggtaggctaaaagccgaatcacgtaaatttttgtgtccctgtgtgatcattatttatcaatttcactttaactgtgtgtctactgcaccctcaaatttccaatagtaacaataaaacatttctgctacatattgttcaag

SEQ ID NO: 85352 - DNA, 452 bp, Citrus clementina
  Intron number 2 from transcript clementine0.9_021585m (loc us clementine0.9_021141m.g) derived from phytozome v7.0 (c hr-ID scaffold_4; pos 6798003 to 6798454)
gggggcaagaagaaggcttggaggaagaagagaaagtaagttcctttttttgaagttctaaattcagagattgtgatttgttgattgttaatgttcataatgtgcactgctgttttggatattgttggtttctttacaatcgttgcatgccttttggattgtagatgctgtgtgagtagttaaaacatttgattttgatctcaggttattacctttcataaacaaaaataatctatcaaatagtagtttttaaaccttgttttcagatatgggtattttgcttacacgtctaagggggtttggactattttgtgtttcatatgacggggttgtcttatttttgacagtcgtgcaagctgtctagaaaaaaaaaattaccacccattttgcattttcaagcctttgtttgtaatgtttaattgacttatcttttcttttctatgattgaaggt

SEQ ID NO: 85353 - DNA, 595 bp, Citrus clementina
  Intron number 4 from transcript clementine0.9_021585m (loc us clementine0.9_021141m.g) derived from phytozome v7.0 (c hr-ID scaffold_4; pos 6798758 to 6799352)
ctgcagctgctgccacaaccaagaaagaaggagaggtataacaatttttttgatcaacttatctttgagttggtgccttatgtttatatttctttttacttgggttgccttgaatatgctggggcattgcaattgtggttttagatatggtgttctatattttcttaatcagcttgtatatatatatatatatttcaatacttataatattcattttatggaatagaagaattatctgtgtcaatcaactctatcaggaagaacataagagtatttgtatgtatggtaaggtaatcgtaaccattattatcttgtttggacggcatcaaattttccgcacttaattttcatggttttcttatctttctaactcttgcttagaaaactattgcaacaaagctttcttattagtgtttatgctttataagcttgtttttgtagaatataatttagcatgattctccgtatttttcttctttcgattaaatgcataactcatttcatttgattgcaagattactacttagatatttaacttgtcttgtttcactggtggataggaaggagaggctcccgccactgaggaggcaaagaa

SEQ ID NO: 85354 - DNA, 595 bp, Citrus clementina
  Intron number 2 from transcript clementine0.9_008442m (loc us clementine0.9_008442m.g) derived from phytozome v7.0 (c hr-ID scaffold_2; pos 466643 to 467237)
tgattacccaattgctatctacgggcgcttggtatgttccaattattgtttcttgcatctgtttgttgttgttttggatagtatggactatatatttaactattacataacgtttggttggacatgtgttcattaaaaatgcacttctgttcaaaagagggtaaccggtaacggagcaatgtatttgatttttctctataaagtcggcaatgcttccttgattgttatggccaaatgtcttcttcttggctaaatggtgcggaatggaaggatattttaataagaagtgcaatgaggtggagtttgtttgtgcatgtttgagcatccataggagatgtaggaactttatgatatattatttttgtttgttgatgctaagttgtaatccatatgtgtgattgcatatattgccttgcagagaggatgctttgctcaaggttttgaaaaagtgcaaatttgtttgctttaattttatcttttgtatgggcgagtgggtcagcttagctgcctgaacatcagctactagcaatgttttagtatatctgtgtggatttctgtacactaacttttctttacttgcagaatccctgtgaac

SEQ ID NO: 85355 - DNA, 868 bp, Citrus clementina
  Intron number 3 from transcript clementine0.9_008442m (loc us clementine0.9_008442m.g) derived from phytozome v7.0 (c hr-ID scaffold_2; pos 467276 to 468143)
tgctatctgtaaggagatttccaatcttgaattcttaacataaactaatgggcctgctgatattattactatgcatctcttagtaccatttgatgtctctggatactcttcctttacatgtttgcttgtgtaaagttcaaatttaacctagaggtaatcattctccttgtagtaaattcaaatgtagccatgctgatattatttctatacattaagtgtctttttgcttgttcatggggttcatggggtttaacaatagctttatttctggaaatttcacttgctttgattcatgaactagtgtaccagttgagtttaaagcaaattggtttccacatggatccagagcgatacttccacttcaatgaaaaatgagattgagttcccgtgttttgattggcaaacatctaattttttcctgcccatcattatctgcattgcatgtttacaggggagttaatagtaaagttcccttgggaatgatattgttattattgtgtggtgcattcccctgggatttaatcttggttggttgagctttaaaactgaggatatactttaaacagtaatatgattttctcatatatcttatcccagatccattcgtttggtttgtagtatctttattaacagcataagactattttattactggttatgttgttttgaaaagacctaaattctaaggaacaaatgctatgggtgctttaaaatagaaacaaacaaacaaacatgaggactgtcagtttttcttatggtaaaatttgtactatcgtgcattctctctcccatcgatcttcttttgtactggttaaatgtttgaggaatgcaattagcagtttcacatgctttgttgattgcagttgtg

SEQ ID NO: 85356 - DNA, 496 bp, Citrus clementina
  Intron number 2 from transcript clementine0.9_002627m (loc us clementine0.9_002620m.g) derived from phytozome v7.0 (c hr-ID scaffold_7; pos 5094748 to 5095243 reverse strand)
aaagttctgcaatctgcccaggtgaatctctggctccacttaaataataattttcacagaaatggtaaagataaaatctccttaacttctatactgtaattgcagcttgctaccaaactccaaacacttttgagttgttgttgccttaattgtgcttctctattgtaaccttttggtgtctctaactttactttcctttgaatgtttttttaatgcaaggcaagtgtttctccaaaaaaaaaaacatttttagtgcccgtttgtgccaaatctctttctcactttttgagctcagatctgcaattagacacagaactgtttatttttttcagtacctcttattgcgtctgttgtgtttgcgttcccattcagcttcagttgtttatgaattcccaaatacatttgcggtggcttttctttcattctgttcttctaatctcattgttgatttgttcttataggaagccattattcttcctccatttgtggttttagc

SEQ ID NO: 85357 - DNA, 1057 bp, Citrus clementina
  Intron number 2 from transcript clementine0.9_009332m (loc us clementine0.9_006952m.g) derived from phytozome v7.0 (c hr-ID scaffold_41; pos 1148975 to 1150031 reverse strand)
cagcttctcaaacgtacacgtggcctgataagaaggtttgtttggcttcctctcaaaatctcgtgcttagtaattttttttttttaagttaatgatttcacaactgatgcatttgatgatttggaatttagcgagatgcttctggacatgagttcagatagcgaatgctttgattcccacactacagcaatagaatcttaaacaatggagcatttgttaggacttagaagtaacagtagttaaggtttcatgtttatacacctgcagagttactcccagattggaccaagtgaatatcttccatgcagaattggatccttaaggtgggatccctagttagaccattgaatttgaactcttgcgcactctaggtgacccttgcatgcacagatttttctaaagcaaatgttaccagattgaatattccactaacaaatacgcgccaagttagattacaaagctcgtagagaccatggaattccttccaaaaactagttttatccctcacccttatcgatcaccattctttttagttactagcagaactttggcctaaataaattattcgccgaccgatgaatcaatcacccctgctgccatagtgttccaagccaacaaccatttcccctgacttctccatgaaatggagatacacttaatctttcaaatctctcttgaaagggagatgcctatcaaatcttttgtaattatgtaattttattttatgttggtaaaaaaaaattaagtcttttgttttcttttaatttatgtattaagaagataactctttttttttttttttggttcttttttctggttcttttgccttttgtagagacaaaattacagcattgttaaattttataggacacttgagtttaatgttagttttattttatctttcctataatccccaccttatggcttgagtttatggcaccttttcctcttgcagagagatcaattagcaattctagttcttaggaaccatatatactgacagcaacaagtttttattacagaagccaaggatttgtatattaggtggtggctttgg

SEQ ID NO: 85358 - DNA, 335 bp, Citrus clementina; identical to SEQ ID NO: 82444
  Intron number 1 from transcript clementine0.9_014251m (loc us clementine0.9_011958m.g) derived from phytozome v7.0 (c hr-ID scaffold_3; pos 3613399 to 3613733)

SEQ ID NO: 85359 - DNA, 624 bp, Citrus clementina
  Intron number 2 from transcript clementine0.9_020410m (loc us clementine0.9_020410m.g) derived from phytozome v7.0 (c hr-ID scaffold_4; pos 3855897 to 3856520)
accctcctgcttcttcgggtaccttttttttttaaatttttttatttgtgaagtttgtttgccccgttctgtttggttttcgagaaaatgtggacaattagaagaacagaaggcgcaaatttcaattttggaattatatttgagttcaattttgagacttctactttgggtttcgttgattgcagtttaattttatacccataaaagtaaattgtagggttagggtttttttattatttttttattatctctgttttatttatttttgtatgttgatcaacatttttgggaattgattatcacagattgatcatctgtaccaaagatctttcttttttttttcttttttttcgtttcccccacttagtacataagcaagttctgttttaagtccagctgaaatattctttacaagattcttctgtgatagtgaattcattgcactgaatatattatctgaattttaatttcaaacaatatttgagtcccaacttgaatcaccatattgcatgctgctcatctcttgaatgatgaatgtaaaatttcttattattttattctaccatccgattgataaatgctacatcagttggcactcaaattgggactttttgtgagtgtggg

SEQ ID NO: 85360 - DNA, 587 bp, Citrus clementina
  Intron number 1 from transcript clementine0.9_018139m (loc us clementine0.9_018139m.g) derived from phytozome v7.0 (c hr-ID scaffold_4; pos 2059840 to 2060426)
tccatcagtttgatcccgactcttttggcgtcccagtgagtccactcagtcgcatttttctttctttctttcatttttttttcaaacatgagtcacatttctcttatttattcctttttatttgcttcggattattatttttttttccaaaaatgcaaaagaagaatgagaatggagagaagaaggaaaaaaaaaaagtcaacccaactcatctgggaattaaaagtcaaccgtatagaatgtgcttttatttaataatttagctgatcatatccgtttcatcagtgcaatgctacaattacaaattaccgtgacagaatactatcgattgaatagaaacaaaaaatagagaaatgaatacatgtgatgtgatgtgcttatcaaatcaatagtattatgtcacatcaggttatgattccagcattacttgctcaattaatatcaaaagttacaaataagctgatgagcacagcgtttagtcttttactcgcaagtgttttcttctataaatatgatactgatggtattttgcttttgtcaaagttctattaggatcataaaaagcacttggccgagcgtgagtttga

SEQ ID NO: 85361 - DNA, 860 bp, Citrus clementina
  Intron number 3 from transcript clementine0.9_025920m (loc us clementine0.9_025920m.g) derived from phytozome v7.0 (c hr-ID scaffold_7; pos 5631729 to 5632588)
gtgaagccgtgtttttccaggtcaagttcctatttcattatgttttttggtttatgttcttatttatggtcgattttaagttcttgatgaagccattgtggttcataagtttttccattttctatttctggtcagttagattagtgcttgggctccaatgtgcttgtagttctatttctttgacatatttttgaagaagagtatgcttttgatcacttgccaggttttagttctggaaacaaagaatgttcattatgtgcaaatagctatttgagctcttgatttgacccttgaatgcataatatagtgtgctgctctatcttttgctcccatttttatgtgcaagttctgttacgcttagctgaggaatggtttttttcccttgaattattttagaaggaaacaatttgtactttagcacttcttcctaggtcttgttttaatacattctaactacaacgttgttagttgcctacctttcgatgttgcttgatgcttggtttgtttctacagctggaatttgttctattggaaaagtgtttcaaaatctttgtatagttatatcaatccatacaaatacttttattggatcggtgggtgcttttaccactggttttttctagcttgtaggaaatcagacactttgtactgtctttataattttgaaataaagatggaaaaatcttatttccgtcctgttttcttctcctcaaataattggtattgctcaatttttatgtttgtgtagccattccccatggacctctgagttcagtgtcagcattgactcaaatcctttttgctaataccaaaaattttgggcataactcatgcaggcaacttctagaggggaggagggt

SEQ ID NO: 85362 - DNA, 499 bp, Citrus clementina
  Intron number 1 from transcript clementine0.9_034552m (loc us clementine0.9_034552m.g) derived from phytozome v7.0 (c hr-ID scaffold_2; pos 5270359 to 5270857 reverse strand)
gcgccctcggactctcaggtcggcattccatatacgtgagtgctttatttgtttattaatttttcttcaatagtttcttcttttattcctttattttcttttaaaagccgttttattattccttttcttatgccctttggctaatttttaccttaatgtaacagtcttttaattgaaatgtggttgcatttgctcttttagaaatttctttttaagtgcttttctagaaagtgcttttacagaaaccatctttttacataagtactaccaaacacagtgctaacatttatttgagtcccagtaaatgcattggtatatatgctgttgtgtcaggaaaacagttctactgcatttttatagagtcggttttacttgcttctgtagaatttttttttttattataaaaatttgtctcaatccaagttgatacattgttgtattagtggtgattatttgattgattctatgcagcgtgtttctaggccaagaggaggaatta

SEQ ID NO: 85363 - DNA, 913 bp, Citrus clementina
  Intron number 1 from transcript clementine0.9_020366m (loc us clementine0.9_016744m.g) derived from phytozome v7.0 (c hr-ID scaffold_4; pos 3060304 to 3061216 reverse strand)
taccgacgtaagcaaatctttttctctccagtggaatctcaatctaggtagctttggtgtgttactagtagttttgagtgtttgaagttcatcaagagctcgtaatctcctattcacagatccatgcattgcattgtttatacgaggaagggtgtttgctttcctgtttggcttgtttaaactaatcgtgcataatttttatttctatctaaattaaatttgtcatgaacagtaacgttatgtgcattatgtgccgaaagaaactaaagaaatccaatacgacaagataagaggatttgaaaattgttaacaatttctagattatcaaccatttttcatagacttctgactatttgaaccttggaaaagaataattgcaatctggctgtgagtgtatgaattcaagagtgttaatttcattcaagccaaaggtatcccaagacaataattgtgaaggcaatgatgttgaattgaatataattagatacagctttttgctttcaagcacatacatattgaatctttaaaacatacgtaacacattacctattgcttatttcttaacgcacaggactctgaactgaatatgttaggaaatgataactgtagttccatataccacttcttcgtagaagtcatttttcaagcttggaaattacatacttttcatgtgaaaatgaatagacttgagtgttatggcactgagttggcacataatttatgcttaaatctgtttgtaagcactacttatgatgactgatgacatcaacaacaacgtgatgatgacaattctattgacacagatttcactcatacactgaatacacaacagattgccgcttgttattttttctaacactacttgtggtcattgacagtactagaccaaccactcaggctgggcctgcaggtt

SEQ ID NO: 85364 - DNA, 324 bp, Citrus clementina; identical to SEQ ID NO: 82128
  Intron number 1 from transcript clementine0.9_008364m (loc us clementine0.9_008364m.g) derived from phytozome v7.0 (c hr-ID scaffold_3; pos 2125177 to 2125500)

SEQ ID NO: 85365 - DNA, 730 bp, Citrus clementina; identical to SEQ ID NO: 81906
  Intron number 1 from transcript clementine0.9_011068m (loc us clementine0.9_011068m.g) derived from phytozome v7.0 (c hr-ID scaffold_3; pos 1735436 to 1736165 reverse strand)

SEQ ID NO: 85366 - DNA, 715 bp, Citrus clementina; identical to SEQ ID NO: 80728
  Intron number 1 from transcript clementine0.9_024191m (loc us clementine0.9_024191m.g) derived from phytozome v7.0 (c hr-ID scaffold_3; pos 5531745 to 5532459)

SEQ ID NO: 85367 - DNA, 540 bp, Citrus clementina
  Intron number 1 from transcript clementine0.9_002362m (loc us clementine0.9_002362m.g) derived from phytozome v7.0 (c hr-ID scaffold_3; pos 1818609 to 1819148)
ctctctgctgtctcgctccttcactcgccgaagaggtaccattcaatttccctcttgcccctattttattcttgctctatactataggttaaagagcatcgttttattttcttttcaatttccagatttttttcctgtaatttatcaagctagcgatggcctgatttggtataatgagagttcagtttaactgtgttatcaaatcattattacattcattgatcttcattgagatagtaattgagtgaattgctacaatttgagcgttattttagggcactgcatgaatttgattgagctgttatttgttttttttttttttttattgaattacataagtttctctttagttatcaattgaacttagtaccttagtcgtgtttggctcatcattgtaatgtagatatttgtttgttaatttattaatacggtttgtgtgtattgtgatgagttttaagcttgctgtttaatgcattgaaattggatcatcatatgatgaacatgtagttttatgctcctgattgtgaatatgtgaaccag

SEQ ID NO: 85368 - DNA, 662 bp, Citrus clementina
  Intron number 4 from transcript clementine0.9_002362m (loc us clementine0.9_002362m.g) derived from phytozome v7.0 (c hr-ID scaffold_3; pos 1819748 to 1820409)
tccaagattctaaacaccgcaagacacttgctgaggttagttacctttggaccatttcaggagatgtactgaaaagattccaaagaatcttggcaattactaattactctaaataaaacatctttatcataaattttaagttgttaaagaactaaacgtcctcccattgtatagtatagtatatcaactatcgatcactaatggcagctcaatgcatctgactacatatttggattggaagtagaatgtacctaaattgcacagtcaaccataataatccaaagagtcaatatccccaaatggatagaaagacatctttggtaaacaatgctattattcataatagtcttcacccgccccgcttcaactagtaccgtttatttgtttcaatttgaaactgacttaagagtcctactgtctcttctaacatgacattctgcccattgtcagaatgaggatgctcaaatagctagaatacttcagattatgaattatttgatgattctgtctgtgattctcagtttttcactttagaagagggaaaaaagggccaaaaaaaacacaaaaacaaattgctagttattacaactgacccacaattttgactgcaatgtccttattgtttagctagaaaaaggtgtggacggcttgtttgatagttt

SEQ ID NO: 85369 - DNA, 1001 bp, Citrus clementina
  Intron number 3 from transcript clementine0.9_008715m (loc us clementine0.9_008715m.g) derived from phytozome v7.0 (c hr-ID scaffold_3; pos 870328 to 871328 reverse strand)
tgaatcggcgagcgggtggcacatctacgagcaaggtatgtttcatctaatttatgtgtataactaacagtaggttctgttcttaatgtggtgtaacctgtgacatttcttgattcaacattagaaaatggagttagttttatatgaattaccaggaagttgaagcttgtataaagtaccaatgtacttgtgtattcttccttttaaattaggaggataagatatattactggatttttattggtgctgtattttcaagtatctatttttggtatgaaatgtgcctactttttttaaggaaaatttttttcttatctctgaatgacatatgtttgttctaataagggatttttgtatcttcagtatcaagtttaatgttcaaacaaacatgtgataagcatccagaaaaaagtcgttttcgtcaaatgctaatgtggagaaaagaagacctctttgatttgtggtgcctctattagtagtcatttgaagtaaggtgttgatgaacgggtaagaaatattgagaagggtaggaaattcgtgtgaaataagcaaactggggatatgatcaaatgtatctaataaacacttttttagatatcgatatggacttcacaaaacccttgtcaatgtgataagaaggatgtgtgttatggttgttgaaggatgttttatgagggttttggaattgcttctgctctaacaaaggaaatatgttcagggaaccaactgaatctgttttatcaaaaggcaagttattggtaatagtgaccaacaactacaagtttaactcaaatcaaggttgttggtacttggaatcatttttcttcttttcggttccttactggtgtttgtaatgatgcattgattcctataatcatcattgttctttcttcttgaagaaaatttgtgcaaatttttgggctgtgggttgctgataaattttgatcatatattactgtcatgtttttattttaaaaaatatttgcagagcacctcaccgc

SEQ ID NO: 85370 - DNA, 543 bp, Citrus clementina; identical to SEQ ID NO: 82280
  Intron number 1 from transcript clementine0.9_023727m (loc us clementine0.9_021293m.g) derived from phytozome v7.0 (c hr-ID scaffold_3; pos 997097 to 997639 reverse strand)

SEQ ID NO: 85371 - DNA, 700 bp, Citrus clementina
  Intron number 4 from transcript clementine0.9_018189m (loc us clementine0.9_011233m.g) derived from phytozome v7.0 (c hr-ID scaffold_14; pos 3820718 to 3821417 reverse strand)
atcttgttattattattgctgtggtatgtacttatgatcttgttattgttattgcttttagtgctgtaatttatttatcttttctaaaatacgaacagccatagcattttttaagtggttttaggttgttctgttcccctcttcaaattgcattttttgattgcattctgaagtgtttacttgattcactggtagaaagcttttgaatttattatgtggatcatccagcgatagctgtactttattttcttagaaactgagacacagtgaactttaatggacccctaaatgtaggttatgttgatcctaatgtgttggaccaacactgcaactgaccatgattcaagttagatatgtgcagtcaatttattattgctattctgtcttgttttgacctattgatttgatgaggttgctaagtgtttgctgcaagaacagcttcaaatacaatatttttacaaaatatttaatgttgtaattcgtaataatgctattgatttgatgaggttgctaagtgtttgctgcaactacagcttcaaatataatatttttacaaaatatttaatgttataattcgtaataagcagttcatgtggaaccttttctgttatggttcttctgtgcccctttaactttgtgctcttattttatttttttcgtttaaggtgagttcacggcagaaggaaacaagtagcaccac

SEQ ID NO: 85372 - DNA, 614 bp, Citrus clementina
  Intron number 1 from transcript clementine0.9_003056m (loc us clementine0.9_003056m.g) derived from phytozome v7.0 (c hr-ID scaffold_3; pos 2991095 to 2991708)
gctttctcgaagggtactgtccacatatttctgttttatcttttacttatagctctctgtttggttgccgagaatatgtgctaaaatagcgaaatgatggaaatttaagtttcactattttacttctctataaataattttttttctttattaaaaaaaagaaataaaaaagtcaatatgagatttgaattaagtttcttggttcttgtcatagtagtatacttctcaggcaaccgcagagagagttaaaagttttatgctgttatttaagctaattatgttgatgtattattgggaggtgtattaactgttgtagagatacttgttaatgactgattgaagtttctgtctctctgtttgtttgtttttttttttttcgtatttcaaaggttttggcatctacgggttcgttttggtgaggattctgaataaaggaattttcttttaagagaagcgtctctgtctctgtctgtctctctctctctgttctggtggattcttaatatttcacaaagaacttgttattatttatttatttattgcccatttattttactccttaagcactcatataacaacaccttatgttatatcttcagtgagtgtgaattgga

SEQ ID NO: 85373 - DNA, 339 bp, Citrus clementina
  Intron number 1 from transcript clementine0.9_023930m (loc us clementine0.9_020347m.g) derived from phytozome v7.0 (c hr-ID scaffold_3; pos 507020 to 507358 reverse strand)
tgtcaatattcagccttctgagcttaaattcccatgtaagttctgtttgtttctcaagaaaatttggaagaaaagttcctatcatggtgatcgatgttgattttcacttttttctgtcacgtgaggttcacatgaatgaaaccacgctttaacctctgtgtttgaaatcgaaagtttaactaataattttgaatgttccattttgatcaataatttgattgatacgaacaattggttccacggatataatgtgctgattccttgaatttctatttgttgtctgcatgctttatggcacgtgatgaaatagttgaattgaagaagcagagttcttgttca

SEQ ID NO: 85374 - DNA, 508 bp, Citrus clementina; identical to SEQ ID NO: 81975
  Intron number 1 from transcript clementine0.9_015129m (loc us clementine0.9_015129m.g) derived from phytozome v7.0 (c hr-ID scaffold_3; pos 5101620 to 5102127 reverse strand)

SEQ ID NO: 85375 - DNA, 862 bp, Citrus clementina; identical to SEQ ID NO: 83717
  Intron number 1 from transcript clementine0.9_023915m (loc us clementine0.9_023907m.g) derived from phytozome v7.0 (c hr-ID scaffold_3; pos 217903 to 218764)

SEQ ID NO: 85376 - DNA, 484 bp, Citrus clementina; identical to SEQ ID NO: 83718
  Intron number 2 from transcript clementine0.9_023915m (loc us clementine0.9_023907m.g) derived from phytozome v7.0 (c hr-ID scaffold_3; pos 218817 to 219300)

SEQ ID NO: 85377 - DNA, 960 bp, Citrus clementina; identical to SEQ ID NO: 83719
  Intron number 3 from transcript clementine0.9_023915m (loc us clementine0.9_023907m.g) derived from phytozome v7.0 (c hr-ID scaffold_3; pos 219520 to 220479)

SEQ ID NO: 85378 - DNA, 521 bp, Citrus clementina; identical to SEQ ID NO: 83602
  Intron number 1 from transcript clementine0.9_031677m (loc us clementine0.9_031677m.g) derived from phytozome v7.0 (c hr-ID scaffold_14; pos 938650 to 939170 reverse strand)

SEQ ID NO: 85379 - DNA, 766 bp, Citrus clementina
  Intron number 4 from transcript clementine0.9_022923m (loc us clementine0.9_022923m.g) derived from phytozome v7.0 (c hr-ID scaffold_3; pos 4556831 to 4557596 reverse strand)
aactggctcttcgtgctcctttgggtcagaacacggtatgcatttgactcagattcttttctattgtagtttgatttcataatttagcatgcacgctgcctacttttgagcttagcttattatattattattctatgatttaattggaacagtcaggttaacttgggctgttttgttctcaatagtgaagttgcaccatctagttttggaatgtttattttatgtcagtaaaaatattatagtgtactttctacctgttttatttggattttatttttctgtgaaattttgaaacttgtgggtacagattgggacttagattgcaatagaggtttaggttgttgagcattaattgtttacaagtaaaaagggactgcagtaattattttactcagtttatagttattatatctgtggttttagaaaactattccctctttaaagatttagcagcataagctattatgtaacattttcttctgtagatgttttattctaatcatatgaatccctttattctctgtgtgtgtgtgcgtgtgtttatatatattgttggtatatcttcacaactccaattctggtaacagtgattaatttttttaggagttctcctgatgccatactttgaatgcaacatcatttgctttggtacacaaattagttgggaaaatttagattgctgtataattgtttaaagttatggattaataatcttaataaggtgaattttatggccaaattcaggttctcctgagaggtccgaaga

SEQ ID NO: 85380 - DNA, 814 bp, Citrus clementina
  Intron number 1 from transcript clementine0.9_006553m (loc us clementine0.9_006311m.g) derived from phytozome v7.0 (c hr-ID scaffold_7; pos 3350518 to 3351331)
atcgcagctgaaggcttcatatttagagagagtaagtgcgttaatgtctgtttcagtttcacctttttagcgatttaaacttatccgtaactattaatatttgatatttgaaatctgttatgtttctatttaacgtgttgaatgcttcattttacttcagatctgttgcacctaacgttaaagtttgaatctttgtgtcgattcttgttgttctgttaaccattggagatcttttgttacgcactgtacttgcttggtattgctcgtgcagtcttctattttcttttcacgttgatattttcttttaatcacattgttgtgtaatcatattcttgaaaattaattgattaatttgttgtattgaaatgagatgtcttcaaaaaatcaagtggtttctgaagtgaatttattttttctctacggaaactcttccttttgttgttagcactgactgggagagctttatttatgttcctgttgagactgcaattccacttttatagttggctttgttaaggttcatcgtttttgttagtggattatctgtagttggtcggtaatttgccttttcagttagtgaggtatattcattttctttttctaatttatcggtcagattgagaaagggttttaaggctgactgaggttttctttggatttaccattaggtggactctgagagagaatattttgttctattgtcatcactaagaattacaagctatctcattacttggggttggtatcccttgtgaagaattcaattactgagtgctgacaaatgttctttgacgtatttgtaggcttctttgga

SEQ ID NO: 85381 - DNA, 669 bp, Citrus clementina
  Intron number 1 from transcript clementine0.9_024486m (loc us clementine0.9_024486m.g) derived from phytozome v7.0 (c hr-ID scaffold_10; pos 232210 to 232878 reverse strand)
tttactgcaatcaacgctacttgccgcgtcagctcgtaggtttgattttttttctttaaaaaaaaatctattttaaaaaaattattgtatcatagccttttctttcaaatctatgctgtatctttgatttacttggttttttttttgttcagttctttctttctggctaatgttaggtatttttttcgatttaaatgtctcaattttgcaatatcaatgaatctttaattgaatgaatggaagatgagctgtaatattttggtattgtatctgtttaattttttccgtctgaatattattatcatggattttttactttcatatactgaatcggtattgtatctgtgacctatgtcatgtgatatgaattggggtttgtattgaaagcgcattcagattgcaatttctgatatgagttttagttggaactgcttaaaggaagtttcctgagattggtctttaatctaggctcaatttaagctctgtggtaataattaccagagaatctctacttgttgatttttgcaaaaagtaaactttaagttgttgtatcctttttgctgattacacttgaggaactatcactggttcattattcgtattataattgatgacactgagtattgttgattttgggttggtcttttactgaatttgtaggcagtgaga

SEQ ID NO: 85382 - DNA, 1020 bp, Citrus clementina
  Intron number 1 from transcript clementine0.9_021338m (loc us clementine0.9_016759m.g) derived from phytozome v7.0 (c hr-ID scaffold_4; pos 6909153 to 6910172)
aaagcaacgttcaacgtgttgacgcccctgtcactgtatttttttcccccgttttgatactattttccgtatctatattagaatatatgtttgtgacttgtgtgtgtctgaatgttatatattgttgtgattaaattaataggataaaatttattctgattttttttttgtttggtttttggttctgggtttaatttggatttaggatttgcttttgagctgtgcgatgtttctctcctttatttttatttacgcaaattattaccaaaagaaaattgatgggtctgcttgtgtataactaataagacgtggtgggtgatagctaatttagctggtaaaacctctggggttgtgaatgttggtgtgggattcgaggggatttaatttccaaaatgctatgcttaaaatataaagcaaaagaggggaaaaaaagccttaataaggtgtgatatattggagaatgaaatagatggtctgaattttgagttaattggacgtaaattgttatgtcaaaagagttatgtattgaaatataggaagattatcggatttgattgaaagatgtttcttaattggagattttagtaggcatggatctgcattacattatgactttggggttatgcattgaatttcatagtatggcctggattaagtgaaatgctgctattgaaagtgttttcttccttggttttgaacggttaaatgtctattaatctttttaaaagccattgtagcaactacactagtgtttataaatgtttatgctgctaattaacatttgtttagaagctaagtttacaaatatagagttagagaatgcacagcgcatccaagtgtaagttaccaacgaccacaaacatgaaattcttctaggtagattttggtgacgaaaataattaaataaagactgttgtctatttggtatggttaaccatctaggtaattgggttgagcttcagtatgatcttagtttcgaagaaggatgctaatgttttttggctgttctattgcacagat

SEQ ID NO: 85383 - DNA, 753 bp, Citrus clementina
  Intron number 5 from transcript clementine0.9_021338m (loc us clementine0.9_016759m.g) derived from phytozome v7.0 (c hr-ID scaffold_4; pos 6911551 to 6912303)
tggagatattgcaccgatatttttgattatttaaggtttgtgaatttccattagaaaaacactggatactgtattttggaaattaagggagttttaagaaccacagaattgtaaaagttgcacaagtattggagggtctcatatagtgccagttgaatggtttgatttttcattcaatcagatggttgtaattatcaaattttatttggtacttgcacccaagagagtcataagttggagctactttatgacattttggtgtcatgggaaatttcaccattatgttattgatatttgaatacccttttatctgcctctatgtttagagctcatgtttatttcctttatcatttggcattcataattattgcagttgatatgttacaatcgttattatcgagttgaacaggtgccctggttttgtgttttgttatattttggtgtgtttggaagcaattgctagtttctgtattaaatctttttgtctatatttctccatatgttcttcctgtattattagttccctgaactctcttctttgaagtcattataacaggattgactaatttactagtttttccttcactaaattgagattatactctagtggccatttgcagccatttctttatgtttacgttacttctggatcaaactacgttcagtgattaatgttttccttttactatttctactgaagtttattcttttattgtagtttgtctgctctcatagagaacaagatttttagtg

SEQ ID NO: 85384 - DNA, 530 bp, Citrus clementina
  Intron number 1 from transcript clementine0.9_012446m (loc us clementine0.9_011611m.g) derived from phytozome v7.0 (c hr-ID scaffold_4; pos 2739940 to 2740469)
tgggttctctcccagttctgctttagtttcctctggtaagattagttttttttaccttcattttgactcttgttatctggatttttttttttaaaaaaaaaaatttgtttattgaacatcttggttagtttatgttggctacaagtcaacgcaggaaatatgagattttttttaattttatttaaatgttgcagaaatcaatatatgaaatcatgaaaaaaattttacaagcttaggggagtaatttagagttttattttcttttttgggatcacggtgttgggcctattacattacctgcaaaacaaaatgtgctaaaagtaagcagtagcatgacagtctcaaatatctaccatttagattttatcttgtgccatagggtacaatttcaagtcttattctttctggtttttgggtgtggtctgttcttcggaaagtgttaaattaatgctcatgtacatttttatatgtttcacctcatgcatggcaaaatttacgaaggtagtagttgttggaggaataaagattta

SEQ ID NO: 85385 - DNA, 908 bp, Citrus clementina; identical to SEQ ID NO: 79829
  Intron number 2 from transcript clementine0.9_012446m (loc us clementine0.9_011611m.g) derived from phytozome v7.0 (c hr-ID scaffold_4; pos 2740473 to 2741380)

SEQ ID NO: 85386 - DNA, 680 bp, Citrus clementina
  Intron number 1 from transcript clementine0.9_030853m (loc us clementine0.9_030853m.g) derived from phytozome v7.0 (c hr-ID scaffold_3; pos 3601578 to 3602257)
tttagtggggtaattttgcacaatcttttactgaggcaagtggctcattgagaagatagtcgtgaggatcagttatggtttcaaattagtgagcatttgattcgcttgtcaattgtcgaatggtgcttggttactggactttcatttagtgttgataccaatgaaaaaatgatgaaatggagcagaggctacggaatacgtattttggtggtgtgcatcgtaagattaatgtgaactaattcgatgcagtatttaaggagttgaaattcggggaaatggacgatatagacgcattaaagattgcgctattttattttgcggacagagtactaaatgcaagaaaaaatcactgtcaaatcaatttcaattggcttgaccaagttgatgatatacattacttccgaaagcgtccatgaggtctattgtcgtgggaaatgatttacgagagtcttgacaatgcactgttcgagaaagacgagaaatttaagaagactcggttgaaaaatccatatcataacattgaaaaatacaatctttacggctttacgtctggggttcaggtgcttttttttgtttattaataagttttatagtattaaatatttgatagttgttttatttgatttttcactttggttgttgtaggcttggatttacgaagcaatcggagggttgccatc

SEQ ID NO: 85387 - DNA, 977 bp, Citrus clementina
  Intron number 1 from transcript clementine0.9_011767m (loc us clementine0.9_011373m.g) derived from phytozome v7.0 (c hr-ID scaffold_4; pos 7355213 to 7356189 reverse strand)
ctcttctctgacaggtgatttttctcgtttctttgctcttatttgttctttcttttctggtaaattctgattcaatttgttttggattggttttcattagcttgttatgttgtttaaattttggttttattttttctggaaaaagattgtttttcatgataaattttcgatgatgagtgtggcaaatattatgaaaatgactcatttttcttcgaagtacgtgattggctgtccaatttggatgttgaatacaggggatctgcaattatgttgtgggtttaaattttctcagaacttgaatttgatttctcaattgtaattttggttcctaatttcagatatcaaagttttagatgacagtcaattccagttttgacagatattaactccatagtcggctgctacagttctatttttgtgagcaaaaaaaatgatagaacttgtcgagtgaagcttttaagagtctaagagtgatggtaacacaatgctaagctcatctgctggtgcttttgaaggtgcttttgtggatgttctgtttctggtttcgcagctcaattttaatccaactaacctgctgattagattttcgccttgacttgggattcaggatctgtttgatgctatgatatgaacccagtaaagaccccagcattgctgatgattgagccctttgttttggtggttcgaaacactttctattgcagcatagtcttgtatattaaggttttatgaaatttaactggaatctttagtcatgatcaacaaataatttattcatggattatgggctgcatttgcctctacagttctaattaaacttgcttgtacttgctccaacttcttcttgtgtgcttcctagttcaattgttgaatttgatatgagctgacttctactgttagaagtgcaaatcgactcaaatgccgatatcctttactctatatccctgctgtactgactgctatatgttggatgtaga

SEQ ID NO: 85388 - DNA, 424 bp, Citrus clementina
  Intron number 2 from transcript clementine0.9_005799m (loc us clementine0.9_005799m.g) derived from phytozome v7.0 (c hr-ID scaffold_24; pos 3412655 to 3413078 reverse strand)
gagaaacatttacttacaagtttgttgttgacagggtgagttttaatttcggatcttgaatccctccgttcagcttcattaatttcctatggtcaaagacaagcaaattagaactaaagtactcttttaaacctttgtacctgataacgaaactttaacatggtaataaaagcccgacgtctcttggtctatatcatatgcaagtttatgcttttgggtcaagtggcttaactgacttgacactcactgtatttgcccttcaagacacctttatactgtttttttcttccccctctttctagttgaagcattaatttgttattttccaggttgttttgtcataacaagtatatgcaacaactaagagccaattaattaatttctttaattttgaatttactgtagcctggaacatatttatatc

SEQ ID NO: 85389 - DNA, 486 bp, Citrus clementina; identical to SEQ ID NO: 81185
  Intron number 1 from transcript clementine0.9_018685m (loc us clementine0.9_017148m.g) derived from phytozome v7.0 (c hr-ID scaffold_4; pos 900122 to 900607)

SEQ ID NO: 85390 - DNA, 1044 bp, Citrus clementina
  Intron number 1 from transcript clementine0.9_018607m (loc us clementine0.9_018607m.g) derived from phytozome v7.0 (c hr-ID scaffold_2; pos 3961129 to 3962172)
ttgaacgtaaaaggcgcagtcattggcatacacccgttagtctcgttatcattttctctgtacttcctatgtgggttttgtgcattttgtttatgtcctccatagtttgattggtattggttcgtgggaggaaaaaaagattttttttttcaaatctttcaagttatttcgtattgaattttattcttacgtttctaggatattaatgtaatgtgaagtggaaaaaattaatttttatttttttttgtgtgaatctgaaagggtaatgggaaattgtatatgcgtccttcgactttaatttttggggatttattctcaagggtagagctttgccaattattgtttaattcttctgcttgttatgagagttatgtaaacaatctcaaacagttctgggttcctgattagaagattttgtgttatgaatggaaagagtgtttaatgaaggttgtgattatttagtttattcacgcttaaagagggcaattgtagcgtgaatggtcaacaaattttagtttaggagttttgagagacagcatgatagacatagcgcaagatgcaattccaaatagagaaaaattgtagaacatgattggtgtcgatgattagttaaggattaggttgttaaagttgaatttagcagtatgtgacgaagatgggcatgattaccatgtgaatcacattctcttagagaattgtagactatcttcggttttgctgtcataatggcctgtcttttggttgtaaatttaaccaaggtagctggtttttcccttgcacgaaatgttatgtagttttgattttaaagcattggctttattcttaatcttgttttcaattgtattttgaactaaatggttcaattggtctttcagactgtaagcaactctttctattaattatgctgttgtttttgtttagttttctattaaatcagacagatatctctgcctaattagctttgatgtcaaatgcgaatttatgtggtgcttaaattgattacacgcagagatcccatcataatttcaactcttattccaaaag

SEQ ID NO: 85391 - DNA, 387 bp, Citrus clementina
  Intron number 1 from transcript clementine0.9_010905m (loc us clementine0.9_009681m.g) derived from phytozome v7.0 (c hr-ID scaffold_10; pos 2996425 to 2996811)
tttgttcttcactgattcaacgactctttgaattggtgcgcattcaaaatccctaattttgttttcatttttcttttcttttcatctcttattgtgctcttgatctgatttcttttttgagatctgggtttcctttagttgattatagaaatgggaacttttgcattctggtcttttgggtagttgaagttgtgtaaagcaaatgatagtttttcttttttcttttttttggggaacattcatgccagccgttactgaatctacattaattgtgtgatattgattcggtggatctttgacttttcttattgcagattgatctgattggttggttgattacttgctgttgcagggtggtgtttctacaattggcattactcagtagtg

SEQ ID NO: 85392 - DNA, 699 bp, Citrus clementina
  Intron number 2 from transcript clementine0.9_020028m (loc us clementine0.9_020028m.g) derived from phytozome v7.0 (c hr-ID scaffold_31; pos 320483 to 321181)
ttattgaaaaatcaggttagttcttaagcagtgcagtgatggtgagttcggaagtgcttttatgaaaagcgctctctttaagtaatagcttttttttttttttgttctttcctttctcttctgcataagcaatccaaattccaaggagtgtttttttgtaaaatcaactgttgaattttgaactttgggagtgtttttggcaccaatggaataccttctaaaaggccaaaggtgccttggtgtttattttgaattgcttggttgagatcaaaaagcatttgggaagctttctggagaagcacttgattcactttgttcttttatgaataaagcttttgaagtattttctcaaagaagcaattgctatgtgatttcccaaaatgcctttctagtgattttacagaaggtgcttttatttataagtatatttatcaaaagcacttacaaacacacccaaagcattttgttggaaagcaattagttctttccttatcttactgaagtaccgcaattgattcttgaaaaatacatagaagtgcctgtttattaattaatttaaagtgctgtcaaaagctttcccagtttcagcataagtgaattagttttactagtttgaatttggtttactgtgatgcactatgtgttgacaaagttgcctttggtctataattttggtggatggcactcactacaggaaag

SEQ ID NO: 85393 - DNA, 1020 bp, Citrus clementina
  Intron number 1 from transcript clementine0.9_005286m (loc us clementine0.9_005286m.g) derived from phytozome v7.0 (c hr-ID scaffold_2; pos 8213626 to 8214645)
ctacattgcttaggtacgtccagccttctacataattaataaattggttacttttgttctcgttaattgtaaattttatgattttttttttgttgtaaaaattgctataaagccccaaattcgaatttaatccagaccaatctgaatgcaaattcatccgaaatatttatccgattcgatttatttatttcggattggatcggatcaaatttgaagtttggattgaaatcagatgatttttttttcaacccgaaccattcaaaatccaatcggattaatccgaatccaaaattgcccaaccctacttgcaggaactggtcggagtagggcttggcggcctatcttacattcgcaataccacatctgtgttatttttaatcctacaatttttgcgcgattgtttttcgaacttaatgatttaaaagcaaaaaatccctaggagtaattcatgttcatggaagaaaattggctaacgcttggtgtgaatcataaattaacggttcaacttatataataaatgacgatttagagtttttataactttatataagtttatttaaagttcattttgtaaaaaaaaaataattttaagtaaatacactaaattttaacattatttgttaataagcatacatattattaaaatcttacaactatttttatcatgtgattttctggtagtgtctattggtacatgacttatttttgtcatgtgattttctgttagcaaacattagtatattttaagtagaatttttaagattgaaatgagttattttaactctcttctacttttcaaaaaaaaaaaaaaaaaacatacgagagtaaggttataaaacttttttatttttttaatagtgaaaaagttaactgacgagtcgttgactcaggcaatagcatttcttaaataataaataaacaaaattaatagccaaagaaagtttctagtgactaatctttccacaaaacaaacaaaacccgtttacttcaactgatattccttttacataggaacccgcc

SEQ ID NO: 85394 - DNA, 613 bp, Citrus clementina; identical to SEQ ID NO: 78349
  Intron number 1 from transcript clementine0.9_026957m (loc us clementine0.9_026957m.g) derived from phytozome v7.0 (c hr-ID scaffold_4; pos 1940371 to 1940983)

SEQ ID NO: 85395 - DNA, 529 bp, Citrus clementina
  Intron number 2 from transcript clementine0.9_012839m (loc us clementine0.9_009797m.g) derived from phytozome v7.0 (c hr-ID scaffold_3; pos 7536635 to 7537163)
ctggtagatcttcttcttcttctttttttggtaaatatatttgtatattttgatgaacttgtttgtgtttcatgccttagctagctttcatccataagcattcttcttggccacatgtcgtttggtatgaaattagtattttgatttgtctgtaaattgcgctgtggcttctacatattaatcctctattgtaggtgctgtagaaaatttatcatatgttttttcagtttgcttatgttgagtttattatagcctttgcaagtacaaaacttgtgctagttcccttgttgattgtctgtgacgattagaaggtgagtttggaattatgaaggactttctgccttggttaggctatacagcattcacttgttccttcaaatttttaaactgtccatttaaagactctgtacctgtattttcatcctctgaacgtataaatgactatcttaattagctttctttagaaattcttacttttatctatttgtctgcaggatattcattcactcgtcatctcgctaaatttcac

SEQ ID NO: 85396 - DNA, 816 bp, Citrus clementina; identical to SEQ ID NO: 77811
  Intron number 1 from transcript clementine0.9_016832m (loc us clementine0.9_016805m.g) derived from phytozome v7.0 (c hr-ID scaffold_24; pos 2129410 to 2130225)

SEQ ID NO: 85397 - DNA, 677 bp, Citrus clementina
  Intron number 1 from transcript clementine0.9_007827m (loc us clementine0.9_007827m.g) derived from phytozome v7.0 (c hr-ID scaffold_58; pos 1218202 to 1218878 reverse strand)
atcttggtgtttctggtctgttttttcaattattgtttattctttttccctcatttctaattattcattaacgttttcacttccattctgggtttattctgtttcttcttgttgtttctttgcgaagtgttgttagaatgtttatcaactcatgaacttgagttttttttttcttttttcttttgtttatattctcattatcattcttgtcattttgactgatattacaaaacttagaactatactttatatatatatatatatatatatatatattattatttttttctttttcctcacaagttggaccttagttcaaatattttcccaaaataaaaatagcaataatatttattttttaggccagtctgtttatcttgacttgtttagctttaaaacaaatggcaacaaccatctgtttgtgatcacgatgattgtggatttttcgtttttggggtcgttgagtttcattatgcatcttcaataattcagtaaagttagaaattgcaatacagtccattgatgtgcagcctcacctacacacggaccccacatttgtttatcattatgtttcctccaatccaaatcaaaaaagaaatggtggtgcccttgtacaattaatcaaagaataattagaaacttgtaattgaatttcatgttcaggtggagtgacttcg

SEQ ID NO: 85398 - DNA, 896 bp, Citrus clementina
  Intron number 2 from transcript clementine0.9_017902m (loc us clementine0.9_017902m.g) derived from phytozome v7.0 (c hr-ID scaffold_2; pos 2875697 to 2876592 reverse strand)
cagccgactgttaactcaaggttgcttcttaagtctttgagttctggatctaggtttttctggaattcaatggcaccctttttttgctttttgtatgtttcggtctgcacaactacattacttgacttgccactgtgcttgtttcgagtgttcagatcgtcccagttgttcttctttgcgtcaactctatgcatccgtgtttgttttcattttgggattgtgtttatggtcttggcttgatcacatagatacacttgtttcttcagttcctgtaattattttaccgtgtatcagatggtgcccccggtacctatatttagtttgtccaattgcatcaatggctgaatgtatctcagacatttagtacaatgtggaatttatgaaagaaaaaacttttgactgttacatttggtttctctgcttgcaccaagtacaaagctagcaattgccacgaaggtgtgattctcgacaatctgtaggcttcatgcctgctccagtgagcatgaaatattgctcttttgtggttgaaatctgagtgcatgatggagtttggtacaaatcaacttcccagtgttagcttgaataagataagtggtctgttactgaaataaacattgaagatgtgatattgtctcaacattcctgatttgtggctggagatagtattttcttagccttaaatcctcttcaattctttctggagatgtctagtttttcttcacaatgcattctctttcatagtttgtccttgttgcaattcttttcttcttgttgtgccttttgcttggtttttgagtggatttcttctgtcttattttaatacgtttatcatgatttcagatcatagtctcatataaaatgttcttttacaagcagagatatttcgggtttctggg

SEQ ID NO: 85399 - DNA, 487 bp, Citrus clementina; identical to SEQ ID NO: 82683
  Intron number 1 from transcript clementine0.9_034601m (loc us clementine0.9_034601m.g) derived from phytozome v7.0 (c hr-ID scaffold_3; pos 3964713 to 3965199)

SEQ ID NO: 85400 - DNA, 386 bp, Citrus clementina
  Intron number 3 from transcript clementine0.9_002946m (loc us clementine0.9_002946m.g) derived from phytozome v7.0 (c hr-ID scaffold_10; pos 2388114 to 2388499 reverse strand)
tcaggtaaacttttttccagttcaattttgtgtccggcattgaacaaaacttctcgtgttattgcaacaggtagttaaatcagagagataaaaaatgtgaaatggaaatttaggtgtgtggaattgttttgtaagtttgtctaagctgattggtgttgcttttgtgcttggtggttttctaaataattaattcttttttactatctgccagtgggttgccatgctttacagtgaagtctctctttatgtaatgggtgtttcttcttcaatttgatattatagtttctaatgaattggttaccaaatgccatacttgcttttcttgctgtttagtgatttttaattattttttttatcggaacactttcagattttggagattgtaa

SEQ ID NO: 85401 - DNA, 856 bp, Citrus clementina
  Intron number 1 from transcript clementine0.9_007632m (loc us clementine0.9_007632m.g) derived from phytozome v7.0 (c hr-ID scaffold_7; pos 4755856 to 4756711 reverse strand)
tgagtggtcttgttctggatttaaagcattaaaaggtcagtcgggttttcagtttcaactccgtttgttttgttttgttctgttttatatgtgtgtatgggtatattgcttcatttcgcatctgtttgattgatttgtttattattgtgggttagcttaatttatactcgttcaaaatatgtatatacctgtgtcacactgaccagacaattctcttatcttatgtccaacctacgtctgtgttcctatttacattctcttgcataaggctcactgttctgttaaagagaaatttggtttgagagagaaggtatcacttctgtgttcgtaatggaaaacatgtcttagctatcaaattctgatgaagcatatgatcattgaaatttgaatgtcacaaggtacagtttgtggtattgttgtaacataaacaaggctcaatttacgtccttctattttgcttggaatctataacttttttttttcaaatatctcaacactaaataaggctctttaaaggatctgacttccgtaggagtcaagaatattatgattgctaatgctttcatcagtctttcttatattttcttgatgtaagcttcatatccttagaccattcttttgtatgatttctgtgtatattgtttgtcatcctttactctgattttattgaaagattcattcagatctaaaatatgttgttgaatagaatatggttggatgatgaatgttcaattgtggagctaagaattcgattgatgatcttcatttgtctatcctatttgggaacttgactctaaatggattctcttggtgttctatagacgtgctttgagaaaactactgaggagctacgaat

SEQ ID NO: 85402 - DNA, 470 bp, Citrus clementina
  Intron number 1 from transcript clementine0.9_010187m (loc us clementine0.9_010187m.g) derived from phytozome v7.0 (c hr-ID scaffold_3; pos 7896763 to 7897232 reverse strand)
cacaataaggtatatttttcgatcttaatttttgggtttttttcccaattgcgacttgtattttccggttaggtgatagattaaattggaaaaatgttaggtgtggtgtgaagattaaatttgaacctagggcttgtggattttgaatacaaagaaggggaattaaaacttctttatgttagttactgtcgcaataattttaatgttagttactatcgcaattaaagagtaggtaagattattgaggagattaggatgtctggattgaatcttttgaaatttacatatttaatgacatgacacttatatacacacgtttttttttttttcatttttgtgaagtctatgatattacattctgttttgttgccaatgactgattaatgctataaatgagttggaaatatgttggttctaacattattttctggcctctgatcaggttctttcggtcgttgggcttctgcaag

SEQ ID NO: 85403 - DNA, 463 bp, Citrus clementina
  Intron number 1 from transcript clementine0.9_022980m (loc us clementine0.9_022117m.g) derived from phytozome v7.0 (c hr-ID scaffold_2; pos 7584506 to 7584968 reverse strand)
cggatactgcgcagctcagctcagctcagctcagagccaatgggtactctcccttcatctgtgtaatattaagagtcttttcgttcaactagaaaacaatggagccattaacataatgatttggagtttcaaatttttccttcgggttttgcttttaatgagcttttcgtgtttatcgcatgatctgcgtggttgtacgctttcgtctgttagatcattttattgcagtaataaatgaacgaagccattaacaagttttactggtgttttctgaaatccattttgcacttaatttttttatttattttacaaagtggatgctttccgactcaaaacattttaggttggaagaataatgttcttgtagtctttgatgcaaaattggtataatgctggggtttgtttttccaaatttttaatgggattaatttaaaacaggggcttacacgttcgtgtcggagct

SEQ ID NO: 85404 - DNA, 593 bp, Citrus clementina
  Intron number 1 from transcript clementine0.9_023933m (loc us clementine0.9_023933m.g) derived from phytozome v7.0 (c hr-ID scaffold_4; pos 3065847 to 3066439 reverse strand)
tcggggctggccttgctcctcgtttttgatccaaggtaaatgtatccctcacattttgaatcatttttatttggatattaaacaattttatttaaaatgcgaccaaatttgttaaaaataaaaaataaaaaaattagggtatgtttgttattaaggtgaagtgggtttaattgactgttacttaagaataaaatcactaggtatcatgtatcagttgtggcgataaccaaccgtcttttgccatcaaacagtggcattttggtctagtagatggcccgtctatgaagtattctagttattggggttgacgagggtcttgagtttgtttgatggtattaagtaatttgttcatggtgctgggatttgctagcatcacgtggaattattagaaaatcctgaatgaatgcgtatgttatgtattagctgatgtcataaaacaaactcaggttcaaagacaagtacatcttgacatatgaatgttacagaagagcttactctgcaatcgcttggcttgttataacagcgtgtgtttaataattttttcggtttatacatatgaagactatttttgatcctttgtttttcacctgcag

SEQ ID NO: 85405 - DNA, 389 bp, Citrus clementina
  Intron number 1 from transcript clementine0.9_016276m (loc us clementine0.9_016276m.g) derived from phytozome v7.0 (c hr-ID scaffold_3; pos 5456117 to 5456505 reverse strand)
ggaatgtgagagattcatatttttcttctttgcttgatcaatcagagtctttatgaatgtagtttatattgtttgatctagtagtgactttaggttcaacgttgtacaatttagaaattttattgtattggtattgacaatatgatgtatcatcaaatttagtttataataattgtttggttttgtatatttgacaagaattgattttagcacgacatatttattcattcattcactggttgccttcattttcagttttttattctagttctattgtgagacggtgatgaacatctgtttatctctatctatattattgtcaaatatccatggatatttggttatgaagtcctgaaatagctgtttataagcttcattagaatattacg

SEQ ID NO: 85406 - DNA, 696 bp, Citrus clementina
  Intron number 1 from transcript clementine0.9_016965m (loc us clementine0.9_014258m.g) derived from phytozome v7.0 (c hr-ID scaffold_3; pos 3179181 to 3179876)
tttgttaattcttggcgttatctcctcccaggtacgtgtgctagctttcttttcttttttttcacgttgaattgaatcctttacttagttgtttatgcatctatctttctctttttcttcgccttttgacctgtttaagtatggagagaatctggatcagatttcgattttatgcgaaacttgttcatctgatttgattgtatcctctatgttgtgggaatccgaaagttattattattattattgttgtggttgttttattattattattattattattattattatttctttaattgctataaacacacggagagtgtatgccaagttcagacataatacagggaaaggtttgaataaaaagatgaggttgctgatgagtacacttaaagcagatcggatgatttagttgtatgttatagtatagtcaattagattacagatgaaatttcaacaactaacacagttttttttttttttttttactaatgggaactgtgtagcatgctggtggagtttatcataagttatggaaccaaccaaactgattatggatccaattttgtgtttgacttgctttgcggttctggttattactatgttttgaatttaaatggttatatatatcatccgaagtaattggatgtggtgttgtttgcagacttttgcagagggagtggtttccaagctcaagct

SEQ ID NO: 85407 - DNA, 451 bp, Citrus clementina
  Intron number 2 from transcript clementine0.9_017124m (loc us clementine0.9_017124m.g) derived from phytozome v7.0 (c hr-ID scaffold_7; pos 2205361 to 2205811 reverse strand)
aaaggtttgcatttgactttagtcatgacatcaatttcagaaaacataaaaataaaaagggcacaaaaaaaaaaaaatttctatctgtctatcttcttcttgggtcccatgatcccttccactctatcacaacctactaattgtgctataaaagctattttgtgagtctttcgtagttgggcccaggttcacaattgaaaattattagttgtatacatttgcagtgttttttaattttgatgttatatggcaaaaattaaaaaaagtgctaaacaatagtgaatgttttaaatttgcactgtgcagacgacctcactgtaacttgctccaatatatctctcgataaaacctattgttattggatatattatcataattttttggctcaatattttttctaattctgatgtgaacaggtgtttcatcgttcaacatagattttgcagcgaag

SEQ ID NO: 85408 - DNA, 952 bp, Citrus clementina
  Intron number 1 from transcript clementine0.9_005916m (loc us clementine0.9_004439m.g) derived from phytozome v7.0 (c hr-ID scaffold_7; pos 5715687 to 5716638 reverse strand)
ttagataccaagaagccgaggagattcttgagaaggtaccttttctgtttattgcgacactgctatctagtttgtgtgcagtttccacactattcacagtgattccgctatgtgttcaattgctcactaatatatatatatatatatatctattagaaatggttcgctctggaattttaaagtgctagaactttcggaaaaatgcatgaaccgtgcgttttaagcactctaaattttaaacctttaaaacaccacgattttaaaattttcccgatttttcccccactttactaaaaaaactcaaatatatatatatatatatataaaagtttctggtaaaaaattttaaagtacgggaaagtcaagaaagattttaaaagcttacagctttaagccttttaaccatgcggttttaaagatttctcgtactttaaaatttatggctagaatatttctaatatatatatacaaattgttataattagtttaatagtggtttttgggtgcatataattttgtttgttagcttgaattgagttcagtgtagactatggaaatagcttgaaaagaaattgtttaggtaattagatgcattaagctagcttgaagaagataagatgagagcttggtgagggttaaggaaggatttcaattgtagagtggttgcaagaattaccttctgtcttcagtttctaatttgattataaattaaagggtatgtatagcatttcttcatttatgttggaatgatggggttgtaactttttagaatttgggattttcttgtaaaatgactttcattttggaataatttgaatggagaaacctgttttgaaatatttcccattattgagtttacggtttgttgaaatatttggacattattgccgatgataattaaataatgattgtgtgtgactgtatatgaagtgtatagattattggccagagg

SEQ ID NO: 85409 - DNA, 731 bp, Citrus clementina
  Intron number 4 from transcript clementine0.9_002428m (loc us clementine0.9_002428m.g) derived from phytozome v7.0 (c hr-ID scaffold_7; pos 5609283 to 5610013)
tgttcagaggaacctcaattttaattctcttaacagtaagtagttgcaaacttcaactacgtattattcaattgtctgtaaattttctgcatttaagtctcggaatggggtgagaaacttatctttttctagttggaatatagcatcacaggataaggaacatatcaaatgattgtgaacgttgtgatccataaccttgtaggcatttcatcccttgttctgaaagatccaattccaacacccatggtggttcggttttgagataaactaatactagcaaacagacaagggtttatttggatgtatgtagagggttcaagtctaggtagtggcttcgattctgtagggagtttttatctgtcttgaattttaatcaatgcactgtggttatagttttaatctctagcctttttcagacaaagcgctaaagttttacattgaatacatattgattatgactcaaatcaaggatcttcttttgttcaaaaggtagaagagcgaaaaaatggttgatgtgatctgttgagagagcctttcggacttcttccccagcaaaatatttctcattaatattctctatgttctcttctttaacatttttctttgaaattttccccccccccccccccccccccccatctaaagcttattatgtttccaatgaacattttttgtgaacctttttgttctgttttgttgctgttactcttgcaggtgagacatttcatagc

SEQ ID NO: 85410 - DNA, 486 bp, Citrus clementina
  Intron number 1 from transcript clementine0.9_027065m (loc us clementine0.9_027065m.g) derived from phytozome v7.0 (c hr-ID scaffold_4; pos 1496524 to 1497009)
gttgctgcactgtatgaactctctctctctctgtcgctctcgttttctcttgctttctgtttggttacttagaaaaaaaaaataaaagttttttttttcttcaaggaacgaagctcgatcttttcacattttttttagtgacctgacagatttgaactaatcgcttgtcacattttctttttcagaaattctttttttttttttttttgttattctctatttggctgcggagaaaaagaagaaacctttctgatcaaattcagctaatttttttctttaattttcttggcaaccaaactgtgacaatttgatcagcagcgttagttctgattgccatgaaactgttggtcttttctcttgtaggcttcttgcataaatggataatttatggtttgaaaaataatgagttatttgattgttataattagactaattggttctgtttttgcaggtggagttttgcatctgtttgctactcactattct

SEQ ID NO: 85411 - DNA, 492 bp, Citrus clementina
  Intron number 5 from transcript clementine0.9_014845m (loc us clementine0.9_014845m.g) derived from phytozome v7.0 (c hr-ID scaffold_3; pos 7278968 to 7279459)
atcaaggctgtattaaggtggttttcttccccagtagctgctatgaaactggtttcttcctgtttctttctctttgaaagccgtaacagtgttcaggaaagtattgtcataagtatagtgtctagcaaataaatttcctgcaaacatagttcaatcagctatttacatgattgaagtctacttccaatgacatttggttttctccaatggctttttgcttattggctttgaggttctttaattatcttcttacttttgtgatctttggtgaatgtaaaatcatttctaattacattttatcattaaatgatatctaaagttcattgtttttatttgaaaatattaacatttgtttttttttatttgtctatttgtttttgaggatatttaatcactgtgctgaatctgtttgaattattaatttacttttaagggttcaattttttattcaacccacttatctttttgtttgatttttactgcattggaggt

SEQ ID NO: 85412 - DNA, 1026 bp, Citrus clementina
  Intron number 2 from transcript clementine0.9_024576m (loc us clementine0.9_024172m.g) derived from phytozome v7.0 (c hr-ID scaffold_4; pos 2106113 to 2107138)
agggtcaagcatttcaagtcttggctaatcctaatgtatgaatcaacccccaagccttccacatgtataatgccagatatatttggtttgactatggtcaaagatcttgtaggtatgtgattgatgaccagtcagttgagtggctcatgttagtacaatccctgtgtctagacattttttcagttcatttagatataactgcaaaccatctatctgaggagcataccggtattagataagggtgagcacgcatctgttcacttcagtttttaacaataatttgaaacaaaccataaggatcagtcctgtttggctagaattcaaaatcaaaaagcaaaacgctttggttatagagaagctttcccttttaaactaaaaggacctcttccgaggggcatattgttaggtgaattatcccttttctgcactttaatgtcactttcttgcgagtacttaaatgattacttagcgacttagttatgagcccccataattttgggggaccgcttaatgtgttgtaattcattgagtgctcttaaaccttccttgtagatattgtctagagagtagagaaccttacataagattttttgtgagtgcttattgttagccctataccttctgagtttgaatattgtatctctatttattaagtggctctcgtgtttccagccgccaaaatcctataagcctgttgacggctcaggggaatgcttaactgagagattatcctctttcttaggaaactatatcctgatcactgcttatgttgcatctgtgcgtatattttgtgatcacatccttcctttactatctgttggagattcaactcgcactttttggttaagatcatttcaccaccttggcacttaatttgcttgcagccaatgggaggaaattgattccctgcttcatgtatttttagcattgtatggaaataaaattgtcttttgtgctaaatcacagtcttattaatatgaatgtgcacccgtcttttcttcttcatacagatatctcctaggacaa

SEQ ID NO: 85413 - DNA, 719 bp, Citrus clementina
  Intron number 1 from transcript clementine0.9_009393m (loc us clementine0.9_009383m.g) derived from phytozome v7.0 (c hr-ID scaffold_2; pos 5440549 to 5441267)
ctgtttatacactactcaatgtcagtaactgctatttatgcatatgttcataaatatagtgtgttgttgtgtctagtgagaaacttaaagtttgaattctaatgcattgattctataactatctgcacaaagaatagagcagttttattttattttattttttttaggtagctctttgtagtcggaatttgactaaaaatgaatattagtgtgggtgtgtatatatatagagagagagagaaagcctgaaagcataaaagatatttagagctttatgaagagataatttgctgaagcaatatgttaacaggatcagaaatttatgtgtatgaagtttttggatttttgggaaagtatctggtggaatcattgtgtgtgagcagaaattagtgggggaatagttaaatgattaaagggttggttgaggataatttatttaatggatttttgggtaaattttttggtgaattgtggggagtttttaagacttctgactagaatttagctatttcaatgttgttttcctgccacttgtgacttagtgatttattttgtatgatggattttactatttgtgtgtgacatggctgtggactaatttaattattatacaaataaatttatgctctgtgagatttctctaatttggaacttctgatttgtaaagtttaatttgtatgtcagacaattgtgcctagtgtactgcagttatctgcaat

SEQ ID NO: 85414 - DNA, 793 bp, Citrus clementina
  Intron number 4 from transcript clementine0.9_007787m (loc us clementine0.9_003473m.g) derived from phytozome v7.0 (c hr-ID scaffold_31; pos 514704 to 515496 reverse strand)
atactcagaggagggagaaaatttcctttatacaggtaaaggatcaactttgtactgtttatactagctgctgcattttatgtatgttaagagaatttgccagactcgagcatcacttttgtcaagtgccaataatcacttgccacaatagcttatttgctacacttgttgaaattttatggaagttttgacttctgtcctttagttatatctgtatgtatgagaggatttgcttatatgcctagaaggtcatgttgatctgcaataccaatgattgtagttgattctaaacagcatttatgtcaccattatacattactagactatgggtacatttgcttatcatgaaattcttccctgctgttatgattgagttgaaatcattcacatgtttttctttaaaattagatcaaaaggaaatgtcctttgcagattgtataggaatgaaggattgtgggttttagatgatcatttgttattgaattagctttgaattttgagaggcctgagctgttcagaaaattttgaaatgtatttgcacaaaagtatattccaagtagctgttcctttttaaatgcttccgcaaaggctatttgtgagagtgctttactcgaagcattttataattgaaagctaaaactagtgggctaattccactcttttttatgaaatcgttactattatgatatacattatcatcttgagatgtttgaagtattttagtagaaacataatggctattgatctttgttgtacagtaaagttgcggaagctggtcctctcaaagctgttg

SEQ ID NO: 85415 - DNA, 579 bp, Citrus clementina
  Intron number 1 from transcript clementine0.9_012008m (loc us clementine0.9_012008m.g) derived from phytozome v7.0 (c hr-ID scaffold_3; pos 2050600 to 2051178)
tcgctaaggttttgtaatgactctactccacctaaattttcatttcattttttctttatttaacttattcattgctaattttgctctgttatatcgaaatttttcttccctttaattgtcattttcattattttttattattgttagtattattactacttttgagaatcgtattgtggatagatgttaattattgtttctctctatctcaagaatagaatccaaatgttgtgtcattattctcagtccttgaaaagctatgattctttcagagaatgaaagaaaaggaagcaaaaagattgaaaaattaaattttctttatttagctacttttcacgattcttttactaattattataaatattttaaacgtgggctaaagtcgcccaattattttctaaatttgagttatgcttgttgcatggatcctctatctcttctccagtttaacttttttcagaaatcctagtcttcacattgcttcatcttttgagatttcatgatgaagctaaaaagctaatagatgtcctgccttcatcttcagacaaggttgcaagcccaggctgctggcgtccctta

SEQ ID NO: 85416 - DNA, 596 bp, Citrus clementina
  Intron number 2 from transcript clementine0.9_012008m (loc us clementine0.9_012008m.g) derived from phytozome v7.0 (c hr-ID scaffold_3; pos 2051194 to 2051789)
tcgtacagcatcttttgaaagtaacgtatgtgagctgccctttttgggattctttactttgcattctacactatccgaaatggtatcttaagaggaaagaaaatgcttgaaacattgatattagagaaagtggggtatcttctctgtacatgaatagccatatcaagaaaaaaatcttcgtgtcctgatatcaaaatgacttatattgagcacacataacagtcttaccaaaactgagtggtattttacattatgaaatttcatcaattgctattgtggtctaagctctggccaccgtctaacttctgtaggtactaaatgtattaagtgttagataacttgttgagagaatgaatccaaatgttttaaaaatgcatgtcatctgttttgcttccctctggttttcccccttggtttgcttttgttaaatttgtctcctcctctccttcagttagtattttgagagggttggaatgacaaatttgatagatgaattctcttttctgttatgatcgttatgcatagacattactattcttactgctctatgttatatgatcttgtgatgagtactgtctttcaaattgtttctgcag

SEQ ID NO: 85417 - DNA, 642 bp, Citrus clementina
  Intron number 2 from transcript clementine0.9_020402m (loc us clementine0.9_020402m.g) derived from phytozome v7.0 (c hr-ID scaffold_7; pos 6271852 to 6272493 reverse strand)
aagaagtactctaatcgtccgcaattgaaatgtatccttatatttttatggacatgcgatgaacatttttgtttaaaaaaaaagcttttagaatagagatgctttctggggaaatcactgagaagcacacttattatcgattgcttctttagaaagcattttaaaaagaaaaaagaaaaaaaaactggaaaattgctatcaaaatatggcttgagattgaattttgtaataaatgctccagaataaaagtgctttctgtgaaagcacctaagatcacatttgttatcaagtgcttctctagaaggcagcttttaactagaaaagtagctattaagtatatgtttggtattaaggtgcggtggttttaaatccatagctattgcgcaataaaattactaattgtcaagtacaagtgagtgtgatgcattctgttatattttagctacgacactttcaaaattaagcagaagcatgacaagtatagcatacctgagtgttagtaattggagcttatatataactcatagttgttgggttttgttttcttttcaagaagacagtatataagtttttgaaaaatatgctgtaataagactttcatgttgttgcggtagtttcctcaacgatttattagatattaaa

SEQ ID NO: 85418 - DNA, 658 bp, Citrus clementina
  Intron number 2 from transcript clementine0.9_025643m (loc us clementine0.9_023726m.g) derived from phytozome v7.0 (c hr-ID scaffold_2; pos 1952783 to 1953440 reverse strand)
gttggttaacaaaatcaaaggttggctcaaaaacttgaatctagctatcctactgtagtgattgttgctgctataagcatgaatcctagcatatgaagtggaagtttgtggaggaatcaagaaagtgttgctgttattgtgcagtggattatttattctgtgctataaactgcactcatgctctttagtttcttttctgaagtagatgccacacatagtgttctaagaagattaatatcacatgtttagaatgactgttctatcgtgaaagcaggcctaatatgattttccatcctgcgacttttactggcttgagttttgaaggcatcagtttcagaagttaactggagaatcatcactggagttacaaagacttgatgtcctacagttttgagtgaaagaaaatgaaattctgctgcaaggaaagaaaacagtctgctctgggacccgttttgtccggagagtttctttttaacctttttcctgcgtttttgcttatgtgtgcttgttatgtgtatttacttcaaatttgagtttcttcattgctagctcatctttcaaactgttgttttaatgtgggccactggatctgtcattgagatttgttcatttcttacactcaaaaatcagttttaacagtatcgttgtttcaggaaaa

SEQ ID NO: 85419 - DNA, 858 bp, Citrus clementina; identical to SEQ ID NO: 82293
  Intron number 1 from transcript clementine0.9_025643m (loc us clementine0.9_023726m.g) derived from phytozome v7.0 (c hr-ID scaffold_2; pos 1953444 to 1954301 reverse strand)

SEQ ID NO: 85420 - DNA, 822 bp, Citrus clementina
  Intron number 1 from transcript clementine0.9_018431m (loc us clementine0.9_018431m.g) derived from phytozome v7.0 (c hr-ID scaffold_7; pos 4527291 to 4528112)
tcaatagagttagttcaggttgaagtgtcttttcattttcagctgtttcttaatacacactgtttctggttttgatgttttggattggactgattgctgactctgttgaattttgtgttttttggttttgttttgagtggcttggtgatgggctcctctctgcgcatgctattgctttgatctgatgcatctgatgttgttttgctgtctattttttttcttttttaatatttgaattttggtggtttgctgaattgggagtttgaagctttgagtgtgttaattatttgttgaatttggtctatgaaacttccttcatagcttttatggtttgtttcatatgttaatgggtggtgcctagaagttatgttggagatctggctcctagtttggggagctcaagttgaattgtttcctaataattttactatctatttttttcatatttaatgaaaataaatgctactatgtgcatttaaatttaaattttgcatggtcgaacatgaatgttgcataaaatatatatataaatattttgggagactagctcagattacttccttgatacgaactctgtgaagtagtccctcgtgctgcatgattttcaggtttaatagagtgatttttgttgtttggttctttagtgcttgccgagtgaagtacaatgtagaaacacagacacttttgtgtaacatctcttatgagttttatgcgtttacgctattgaattatacatcacagttgtatttattgataccaaaagtttttatattttgaccttcttctgtcactccttacatatagataaatctaaatctcgga

SEQ ID NO: 85421 - DNA, 927 bp, Citrus clementina; identical to SEQ ID NO: 79213
  Intron number 3 from transcript clementine0.9_001558m (loc us clementine0.9_001558m.g) derived from phytozome v7.0 (c hr-ID scaffold_4; pos 2824841 to 2825767)

SEQ ID NO: 85422 - DNA, 855 bp, Citrus clementina
  Intron number 1 from transcript clementine0.9_018568m (loc us clementine0.9_013352m.g) derived from phytozome v7.0 (c hr-ID scaffold_10; pos 2005915 to 2006769 reverse strand)
gttcgcttcttgttggttgacataacagtaattgtgtaattctcttcattttattgacagatgcagatggattttttgcaatcgtgggactttcttacatgtaatatttgtctcctgattgttgtgtttcgatctgtagatgatcattaatgtacagataaacgataaaaagttgttgaacatgtgatcatgtcctgtttctgcttggattctttttgcttttttcggtttgatgtgatcaagtttacttgtgtattgcatcgtttgatgtgttttatgatatgggtttgtctcaaaattggattcttctctaatgagtttgtattgaacaagggtgcagattgttttctccccagttttaaatttgttgattttgcttgtttggttcattttgatcgggtcaatttgacttttttcattgctgtgtgttataatgagtttacgtgaacaggggtgtctcttttgatgtgggaattcttttctttctttgtttcttttacaagtagaatatcctttaacagaagtctagtattcttctctccaaagtttccttattttggtgtcccttcaattttaaattcctctttttgattcatattttgataatatctaccagttctgtaactccttttaaggtttctggtttccttatttgtctcttttttttcgctcctcttctttctctatgatctgaatttgattcttttcactttggccatggcaactgattgatctgataaaaaaatcttttatttgcttcatattttatgtgcacatcctttcatgacataacgtttttcatctgtgtttctatctgtaggtttgagacttgaagtctgctgatccttccgaaat

SEQ ID NO: 85423 - DNA, 847 bp, Citrus clementina
  Intron number 1 from transcript clementine0.9_002752m (loc us clementine0.9_002752m.g) derived from phytozome v7.0 (c hr-ID scaffold_4; pos 3921302 to 3922148)
ccaacaatttgtttgcataggaaaattacgacaaggtactttgcattttgcttaaatacaaaaaaaaacgctcttatgctttttttttttttggaaaaaaaaaaatgtggtgagaagatccgtttatgatttatctctctcttaaaaagtatgcattctgcaatcttgatttagtaactaaaaattagttatttacaccgagaaaataattgtttttttaatgagaaacaaactttccatttaaaagggagtaatttttttcaatgagaaataataaactttccatctaaaagtcaaattgtaatgtcgagaatttaatagagagatttgaatattatttcatgagtacgtttttttttttaagagataaaataattttattttttttattatttacttttttttgtctcgctgttctcatgcggaaaagatattacgtgtttaaatttgaacaagattcccctgagagaaaaagttgttctattaaaactagggagaaaaaaagagagagagagagagagaaaaaaaccaacaactataaattaaaaaaaaattggaaaaacaaaaagaatcgaactttattgcacacgacaaaatacgtgctgccatgagaccagtgaggtgtgacgtttaagagagcacgacttaaactgaaacggaaaactgaagctgaaagtctgaaactccaggtggaaatctgtaattgtagcacttttcgttttcagttgtagaatccaactcgctctcaaactccatctctttcgacttcaattcaatttaattccgccttctaatcttttataatctctctgtacaatggtaaataaataaatataatcatccacag

SEQ ID NO: 85424 - DNA, 467 bp, Citrus clementina
  Intron number 3 from transcript clementine0.9_002752m (loc us clementine0.9_002752m.g) derived from phytozome v7.0 (c hr-ID scaffold_4; pos 3922824 to 3923290)
cgggaatattgtcgtttcggactttggttattaaggtacgtttgtttatattattcatacttaattggttgataagccatgctttaaggcggtatcgtgattgtttatgtaaatggtgagggatacatgttggttactgcttgctttttcatgttagctttcagaagggcttcgtgagtatgttaatttggatagagttgtaggcttcaaaattactcagtcactactaactctggtatctcagtctcttctctgattttcttttgatggtagtttttatacattaataggattctttgttttatctgaccaaacttgctgaaagtctttggatattctattctacactaggataaatgtttcatgtaccttttaagttaagtttattgttttctaaagtaaaggtatctttcatgtttgttcaatgtgcagataattggaagcatttctgctgtttcatcttctct

SEQ ID NO: 85425 - DNA, 947 bp, Citrus clementina
  Intron number 3 from transcript clementine0.9_027277m (loc us clementine0.9_027282m.g) derived from phytozome v7.0 (c hr-ID scaffold_4; pos 2539500 to 2540446 reverse strand)
atcattaggtagtactcctattttcacttgtagtttttgacgattagttataccattatatagctagctcgatatctgtgagtgtgaacagcttttatatgtcaagatattttgtatatcactatctgtgtatggagcttttactgctttagttgcttattgatgcttaaatccataactttctttcatttcaaaataatgaaccataacaccaactgtgtttgatccttctgctataaagcacggactatgtattggttgtcctccttaggtgtttttttctaatggtaggagctaggattttggcatcactcaatgaggaaattttagagagaaaaaggcatcttgtatgtgctgttaaatcattgtgttatcacacttgattaaatatattctcatttttctgaaattttgctttagatatgaagtagaatacttcaacactgatttttcctttttatttaaaaaaaaaaaagaagtactaaggtacatgaccccttccgaagttggccagtttggagtataatacttactatttcatggattctagtttcattgttaaggtcttttggtggaagtagaccattaatggaattatttttttgccttgtcacccccttcctctgttcctttttctttcttctttgatattgtgatttggaaaacgtgaactgtaagtagtcactcagttatttagtatgttctcatcttttgctgatttcttgcacttgcttacggtgaagagtggctttcaattcttggtcaacattatgcatttcatattactgccttcttgtagatggtacataagtgagctagataatgaactgacagagaagtgattctaagttgttctcatatatcaaatgttggccgaaatcaagaaaaatgattattttgtgttgattgcaggtgtcctgttcttttggtggattctcatttctcag

SEQ ID NO: 85426 - DNA, 585 bp, Citrus clementina
  Intron number 1 from transcript clementine0.9_005321m (loc us clementine0.9_005321m.g) derived from phytozome v7.0 (c hr-ID scaffold_141; pos 194373 to 194957)
tgtccggggagcctctgcctcctctcattcacaaggtaaaaacagctctttaagattgattttgttttgtgttacataattggagttaaggttatgtttgggattgcaggtgctagttagttcaactggtaaatgactgggatttaaacttggcttactataatggtgcttataaaaaatttaataataaaataaattgaggtatggtggaatggaatcactagctattaagtatatcttggtcggtgtggtttattctaaatctatgcaaccaaagggaccattgattagagactaaatcatcttttcttccaaatctatgcagccaaatggaaccttaattacagaatgaaaacatatgcataaacattttagtgttattttgtgatgtagtaagctgctactattattatttttctgtttttcatttgatatgagtaaggatcagacagattgtattacttatgccatgtaaacgtgagtgatttcatattcttgctctgttttttgtagaatcaaattagttatttgtatcagttagctggagctggtgcttatgttgcattgggattttaggttaaatat

SEQ ID NO: 85427 - DNA, 939 bp, Citrus clementina
  Intron number 1 from transcript clementine0.9_003775m (loc us clementine0.9_003041m.g) derived from phytozome v7.0 (c hr-ID scaffold_4; pos 986571 to 987509)
ttctacatctccaaatcattactatctgatctcaggtattcttttatcgtgcgatttcttcatcctttttcttgctgattgttttctggttttaagcttaaggtgtccgctttctgccttttttacctttctttcttccttggtctgaaaaaaccctagcagctgggactcttgttttttgtttttttcttttcttttttaacgctatctgatgttgattatatttgttttttctgcaaatggctgtttctatttatgtgatttaagcctcatggaattttgcaatttggcaattgtgattttagtcactgctttccgtttccaactttgcgagttatagattaaaaaaaaatgaaaattttgtctggtcatccgttcagtggtttcccaatctcaggtccattcgtgtgcttattttgtgatggattcttaatcctttcacatttatatcaaagcttttgcttgtgatttcaacttcagctcctgtatctaatttacccctcagttgatttttagttatggcataaaatcaagttttattttggaagagttgcgatccccatatactattttgttgatatcaaagctaggaatttggccattacaaattcaaacatctatttttgaagggcttgggtcaaggtcaaatggcttacctatttcttggatgctggaagaagaagatcattatcttcttcaaacatgcataatctagctttttacatgttgagaagcaaaaatgtattctttttggagtatcacatactgcatcattcttgattttaaaattttacatcagtttctcgttgccatgattttgtagtattttcttatcaatgcatatatagctattcaagcacaagaaggtgactcttttagtagtattttctttctgtgctttttttttttttaattaggtatctgaacggtcagcagaga

SEQ ID NO: 85428 - DNA, 855 bp, Citrus clementina
  Intron number 1 from transcript clementine0.9_020650m (loc us clementine0.9_020650m.g) derived from phytozome v7.0 (c hr-ID scaffold_3; pos 6622800 to 6623654)
cgtgccactgatccaccagccaagcctccagctaagtaagtcctttctttttatattttcacttgtttctgaatccagtttcttatgctctatatatggtactgcatgattaatcatggcatcatgggttagggttaggttaagcaagcttagagttagcctgtgtgcgtcattgtatgtcagaagtcagaagagaggaatttttatattatcatcgcttcatattttgtccagcttgagctcacaaatagatctcgaagataattacatattataaaatgaaaaattgatatcaaagcccaaaaagagttgcagaaacacaagcctccgtattaatcttctacttctacatgtcatttgtatttttgtaattagggctaagctcatcatgatttattgagctagctaagagatgattgatataattctctctctatctttctcctttttctttctttttatctttttattttgtcctctcctatcaataatttcagaattagctagaaacttacaatcttatttttcccaaaacctccttcaaatttatcaaaattttatcgtccactgcacaagctatgcaaacaaaatctcctggcatacacagtgctgacaaaaatttcatggcgaagcaaaaatcaggccacgtatttaggcacatgaattctcaattaattccccgtttaaacttcgtctcatacaccttgttttcttaatttctttactcttatataaaataacttctttaattcacagttgaatgtttaaacaaattaataaaggtgaataatattgcatagagtggaatttcaattttcaggacacaagttgtaggttggccaccagtccgatcgt

SEQ ID NO: 85429 - DNA, 662 bp, Citrus clementina
  Intron number 1 from transcript clementine0.9_012747m (loc us clementine0.9_012755m.g) derived from phytozome v7.0 (c hr-ID scaffold_10; pos 2463104 to 2463765 reverse strand)
cttcgcatttgtcgcctcaaacctcctatattctggtaattctcgactcgttatccttcatttttgcttgtctggttttcagatctctcgatggatagctcgataggtgtttgctttagattctatctttttttggttacagacattatttgcatagttcttgaatttaagatacccttatgctttgttagttgttatgccaacgcaaaatttgtcaaactttctactttctatgcataagtgggaggtttaaatctgtttattgaatcatgtattgatttcagatctgttcattgaatttctacgaggtactgtgtctgcgtttatggctttcttgttttattctcttgctctcttcgtttattgatgctgaatttatatagcttatataatgaaataaaatgataggtttgtttcactgtttttgtatgtcattttagtgtttagtgcgtagatggtgttttaaggtgccggtatatgatatctataatcaaatttatttcttcgaggaaatttgaatctgttggaggaattgcttttatgttgagaccaagatgattgtttttttttttctattgctttgaaaatcaaatttttgggtagaaattgaattgtcatttctttctgttatgcaactaattcagaaacttggccgcattgaa

SEQ ID NO: 85430 - DNA, 546 bp, Citrus clementina
  Intron number 1 from transcript clementine0.9_006734m (loc us clementine0.9_005110m.g) derived from phytozome v7.0 (c hr-ID scaffold_2; pos 2311716 to 2312261)
atcgatatctgtgattccatcaattctcatcagtggtaattctgcttgaaaaacagctttaacttttcgtttaatcttagggtttcaatttataaaaagctaattgataataatttttgttttggggattataggtagaatatggagtaattttattttcaccaattttttcttttctgttaatttacaagttactgttttatgcggttgacttaagtttgtaagttaggtttcctgattttactcaacataaagatatctcttcgcgtgttcttaatcagtttgagaatttagatgatgaaattgagatgaaatttttttttttttctggagtgagaacaaaaaatatatatatattttgtgtataaagatttcttttcttttattttcttttttctttttcaatatgaagctttacggtgaagaatttttattttttttggggggggtgggggggtgttaaggaagtgtttttatttgtttcaaaagaatgaaaataatttttttttaatggattatctgttgaattgatcaggcaggcgaaag

SEQ ID NO: 85431 - DNA, 743 bp, Citrus clementina
  Intron number 3 from transcript clementine0.9_006734m (loc us clementine0.9_005110m.g) derived from phytozome v7.0 (c hr-ID scaffold_2; pos 2312629 to 2313371)
gttaaaattgtgaagaagaaggtaaccattcttttgcttttaaaagtatttcagcatgagatgcaaggcagttattattctagtatttaagcttttgttgcatgtttgatccccttctgatagtaatttttccaattgtttatcaattataaagaattttactgtttagatgataatttaacttgtaaactgctagtggtggtttatgcggttggtaacatcctacaactaaattcattgacgaacttcagtttctgataattttgaagtacactttgaatagctttctgtatatcaggcccactagtttttctttcttttgcttttctctatgacttgtctgccaagagattaatatggcttatgagagagattgatattgcttttaagaaaaaataaaatttctctctctctgtaatagctgctgtgttccttacttatgcataaccagtgcactgatgagagcaccctgtcatgtccatgtagggatagtaactttaagtttagtttacttgaactgggagaataggtacgctacctgaagaatgacatgatctgggtgagtgccatgagaaattcgtgggatataatgagaaaatctttgaatctgtttcttggactgttatggtaataaattcccttctgttctttttatggcatcttttgtctcttacagtgttcaacgtctatttaggccttctgcctcaactaaaacatttatctcattggttttgcagccagat

SEQ ID NO: 85432 - DNA, 687 bp, Citrus clementina
  Intron number 1 from transcript clementine0.9_011954m (loc us clementine0.9_011954m.g) derived from phytozome v7.0 (c hr-ID scaffold_7; pos 3861418 to 3862104 reverse strand)
tggtgagtctttttttttttgccctttatttgtgattgttttgttagttattgtgtgatttgatgttaatgttttaggatgcaaattgaggctcagtccctgtaaatttatgcggctaatatgtgtaggaatctatgtaataagattgtaaaagtcaagaaatgcggattttgtggttttagaagttaaaaccaaaaattgtgctaccggttgatgaatttaagtaccaaatagtggattttggaagtttctagtgttggttggggttgtacatgtttacttaattcttgttagaaggttatttatatattgtatatctgcatttggagagttttacgatttttggggttttttatgacattcatggagttcagtttgaattactcttgattcttgcaaggtgctttagaatttcttctacaattcactgggtggctggtctctacacttttttttttttttattattgcaaaagcagggtcgtaggaggatggtttgtatacggatgttctatgattattaaaactccattgatcaggcgaaacctgcattggcacagttgttctcttttctgtgttgtcaaagaactcagtgctagttctgttattttctgtggtcttaattaaccgggttccattgttgggtatttcaggggttataaacgctttttcaagagaactttgctgg

SEQ ID NO: 85433 - DNA, 814 bp, Citrus clementina
  Intron number 1 from transcript clementine0.9_001878m (loc us clementine0.9_001816m.g) derived from phytozome v7.0 (c hr-ID scaffold_2; pos 6622385 to 6623198)
ctggaggtcagcctgttgaatgatactattttcttttttttaaaaaaaaaactggagatctttccgattcataatttaatacgcttagtgttttcagattaggtcgagtttggatgtctaatgaaacttgagtttccctgtgcatttggcttttaaatgcaattgaatagttaaatagcatttcttggataagcatgccaatgatatttactacgagaaaaatgttatgcgtcggtttaccataggcatatatgagagacacacaaggctgaaacatctctgtttctacatgcttgttgctgatttgaaaatgagcttgtggaattagaagagttcaggattgctacagtgcgaaactgaggattctagttttataattgaatattcaaggtttttttttttttgggttaagttttgtggttgtatactcgtattttcaatcatattatcacaaagatggctagaacaaaaacaaggacacggcgtctttagattttgatttcgttatattttcaatcatttttcctttgggactttgatgatgtgaagatgttaaaacatgttgggaactttttgtacaattgaaaattgtttatcatatcaatatgcctgtcagttgggaatattaggtaagtagtaaagtttgttgtttaataataaaactgatcaaccatattctaatagaatagatcaccgggaagttttcaatgtcatgttttcaatatatatggtgtctattctatattttgttcatttggtgttgttaatcttttatgtagttcctgggagagttagggtggctgtaagattgcga

SEQ ID NO: 85434 - DNA, 870 bp, Citrus clementina
  Intron number 1 from transcript clementine0.9_010666m (loc us clementine0.9_010666m.g) derived from phytozome v7.0 (c hr-ID scaffold_2; pos 5868979 to 5869848 reverse strand)
tcaagtacgtgatcctcggtggcggtgtctctgctgtgagttattcatcgattatgtcttttttttttcgtttaattctgtctttaatatttttttattctgttcctctatatgaatttgattctttttttaattaatttttatcatcgaagttaacttgaaataagtgtctgattcaggttttatgcagatctatttttgtaattgttatttttgttgttaaatttattatgcgtcaattactagcatgattacagtggttgactacttttggtattggccgcgttttgaatgttgatacggtgaaactcttaagaagatgaaaaggcaaaagccgtaaaagtttgaaacgtttactcgttataataatttcatagcaagctagatgaagtaatggataattgctcagctcggttcagttttgtcaagaaatgtcggattcttttccttgtctttcaattttgtttttccccaaaaaaaagaaaaagaaaaagaaaaaaagatttcgtgaaaagtgtgttttgtttatatatcatctcaattgatgaatgcagaatttttttatattaactcttttcattggcatcaaattgattctgtgtctcatgtaagataaaattgattctgtttattgtgtgaaattccttttgtcaagaacttcaacattataagtaatgattattaatgtaggcatgaatttttcagcagttggagtattttgttttgttttgcataggtctattataaaataatatcaatagcaaggcagctatctatttatttagaaagatgcttcttatgatttcagtttttagatataattatattcttctccttacccgaagattttctcctttactttatagggat

SEQ ID NO: 85435 - DNA, 505 bp, Citrus clementina
  Intron number 1 from transcript clementine0.9_029664m (loc us clementine0.9_029664m.g) derived from phytozome v7.0 (c hr-ID scaffold_7; pos 5580315 to 5580819)
gattccatacgttgaaaggtacggatacagaatcgtgatgcttcaaaacgccgcgttttttattgaatgatcgtggaaatgaagttttttgtgtgagaaattgcgtagcatttgttgtttgaattggttaatgtgaatcgatagtgatgtcgacaattttggggaggaaattttggactaaagacaaaaattaatattcctgatgtgctaaagaactattgtagagcgagagaagtactctgaatttcaatttaagataatctgggtttgtcagtatgcttactggcatgaattgtttaggatgacaaagggaagcaagttctcttgaattgtcaatttaagttaattttgtgttttggagtatgtagtttctggctgctttttcttagaatggttggttgggttttccaaatgtttgtctggcagtgcttatgttttatttcttcttgtttttagggaatttgttaattgattttgttggtttgctgtttggtgacagatttgg

SEQ ID NO: 85436 - DNA, 565 bp, Citrus clementina
  Intron number 2 from transcript clementine0.9_018342m (loc us clementine0.9_018345m.g) derived from phytozome v7.0 (c hr-ID scaffold_4; pos 1887377 to 1887941 reverse strand)
ctttttgaagcttgtatgttactcttttatccacattgcattcttttatccacattgcattcaataacaacactttgttttgtttgtgcatcctaaagtattaaaggatttagaaaatgtgaattgctagatgtgacattgttgttgctaaagaagaaattagtaaagcatgaggcatttgatgtttttgagttctgtcagtctgtctgtttgtttattttctgatttcatcccggtttgtttagcattgtttataatgctttttttttgttttattagattccgaaaaccttattctctatagtagttcattttactattacctttggagtttactttgagtggatctgatcctttctccttctgatttgctgtattgttatcaaatagacatgatgatgttcaagttcagatggtaaatggagatagaaatttatggataagtacttcatattttaaagtctgccaaaatgctgtttgttttgcatccaagattcctatagactttctaactctagattggtgataatttacgttagggaaaattcgaggagtctatcaagga

SEQ ID NO: 85437 - DNA, 351 bp, Citrus clementina; identical to SEQ ID NO: 82120
  Intron number 2 from transcript clementine0.9_013807m (loc us clementine0.9_007955m.g) derived from phytozome v7.0 (c hr-ID scaffold_3; pos 4731508 to 4731858)

SEQ ID NO: 85438 - DNA, 906 bp, Citrus clementina; identical to SEQ ID NO: 81844
  Intron number 1 from transcript clementine0.9_017093m (loc us clementine0.9_017093m.g) derived from phytozome v7.0 (c hr-ID scaffold_3; pos 4711165 to 4712070)

SEQ ID NO: 85439 - DNA, 672 bp, Citrus clementina
  Intron number 3 from transcript clementine0.9_033862m (loc us clementine0.9_033862m.g) derived from phytozome v7.0 (c hr-ID scaffold_119; pos 214418 to 215089 reverse strand)
atacctaaggtgtgtttgtgtacatatattcatcattttattgttaaaccaatggcatctattggaactcctgcaagctatacaagatttgctttagactcttaaatctattcaattttgcgaatagatggtttcaagttacgcatagctccaaaaacaatctttaagtggcgttaaatgtgtgactctgtataggttgagttcattaaccacagggcttcatataattgattgaattgagttaagtatatatgcacagattcaattctgaatgcggcggatatcaagaattgacacttttggttgattttggattgttggtctaatgtgtttgcttcaacttgaagcttcttgctataggctgatgcatttgcttcagttttatttatttattttttttgcttagtagcatgtttctacttatatgtccttcaattgctatatcgcataagctttggcgatcctcacatcaagattggatgcaatcacatttgcccagaacactcaaatctttggcaatggatgttgctttgatggttttctttgagctacctaccatattaccatagattcaaccttggaaatggacttccaaattggataagccatcttaatcttctacaatatttcttatgatggaagcactaatcaattaatttgtttttgcagttc

SEQ ID NO: 85440 - DNA, 749 bp, Citrus clementina; identical to SEQ ID NO: 77964
  Intron number 1 from transcript clementine0.9_015321m (loc us clementine0.9_015304m.g) derived from phytozome v7.0 (c hr-ID scaffold_2; pos 7663571 to 7664319 reverse strand)

SEQ ID NO: 85441 - DNA, 806 bp, Citrus clementina
  Intron number 2 from transcript clementine0.9_014836m (loc us clementine0.9_014836m.g) derived from phytozome v7.0 (c hr-ID scaffold_4; pos 1705938 to 1706743 reverse strand)
ttgatattcatccatcacgaaagcatacttgtctggtaagatgctgcacgcttctttaaattctaatatctgagaagttgggtacacatctagttggtgttattgaagcttttgacttggtttcctccctgttttgctcatgttatacctttatgacttggcatttcagtagttagaattttgctgctagtgtgcctttctatttctgttcttacttcttagcttctatattgtttagtaagcatctgagtgaagtcaataatgaaaaatgagatatgcggcatatgccttttggtcaactatagccctctaccttcattcaaaagcatttgatggcagtttttttccttagtgcttagctctactatggctgtgttagatttaaactagtaatgtttgtggacttggtgtaactctgctgtgtttggctattggcttcatggtgaagtaataaattattgactttcttatgtgacagaacaatggttaaagcttgtgccatattgtattaatttaattgtgaaatgaggcttgaatgataacttgatcttcctgattgtaatcataattattcatacaatttatttatttatttttgaaaccattctgtgcaaagcttaatggcttgtgctttggtgacactgaaacttttatatagattatgaatcactttgcagtctataaaacttggattagctttcttattgtggcaaaccatgtgaggtaacactgtttgcatgaattttaagtttagttctaattttcttcaactcgtaggctggaggctcttctggtacggtatttgc

SEQ ID NO: 85442 - DNA, 952 bp, Citrus clementina
  Intron number 2 from transcript clementine0.9_025414m (loc us clementine0.9_025414m.g) derived from phytozome v7.0 (c hr-ID scaffold_3; pos 3653092 to 3654043 reverse strand)
aggatttgtacctgctacagattggtgctaaaaaggtgagcggattcttttaatttatatttgtcttcactcttcgcttccaattttattttgtaactcaggagtgaatgggatttgagataagaggagtaatcgcttatgcatatataaatattgatcttcatatgtgggtatgagagacgggcacacttctgatttctttttcatttatgctttctgtgtaacaagtactagttgttcggttttttaaccttatattttattttatttcatttcttgctgtgtgttagttcaactagatctgatgctaattggatacacttgcaagttattcaactcacaaacacaataaaaaggaacaattagatcagttaaactttagcagcatataaacattttgtccatgatgtcttagtttttaaatctcaaagcaaaagtaagtctagtgatcatgtttgaaaccgtatatgtgtatccgggtgtgacactgctacttagagaatggaagaaaacattcacacgtacaagcatgctggggcaatgattgaatatttccttctgggaattagaatttcataatttggctaccaacacattttaccttgtcattgtctctaagtttcttctaagtagttacttcctgaagtcttgctgtgtgtgagttatcgccgcctgactatgctaatggaattgctgattggctaccctaatggaaaattggaagaaaataaggtaaggatggatcatatttgaaaaattagaagttgtttcaaactcaaaagctattgagacgaggctagtttattacaactaacatatcctttggttgaattgattatgaattatgtaagcttgatatggtattacttggtcagccttgttgtcttgaacacttgatgatatatgagcttctttgagttctttctcacatgtaatatgttgcagcttggcg

SEQ ID NO: 85443 - DNA, 494 bp, Citrus clementina
  Intron number 1 from transcript clementine0.9_005044m (loc us clementine0.9_005044m.g) derived from phytozome v7.0 (c hr-ID scaffold_58; pos 92909 to 93402)
gcgcctgcttcttgtgttctttgccatttcatcaagtttgtttatcaattatccttttctctcatttctttcttctttctttttttttaaagttcaatattctgtaaggatgactttgtaggcaaattccatatccaccctccgtgaagttgaaggaccatctattaatttgctgactttttggaattaaatttaccatttatctttttctttttttaagtggtttttgcttttggaccttggttactattagccgcttcacttatgacctggttgaaatcctgaaaaagacattcaatgattgtgatttagtttcttttattgttatttttaatgtgggtttatagctatatatataaatcctgattttagtttgatttgtttcttttctcctgatttattatggtgattttattcaactaagtaagagatggtcatcttgttttgtttgcaattcagttctaggcctcgtattcaaagacaagtgcttagtt

SEQ ID NO: 85444 - DNA, 359 bp, Citrus clementina
  Intron number 1 from transcript clementine0.9_020547m (loc us clementine0.9_020547m.g) derived from phytozome v7.0 (c hr-ID scaffold_3; pos 4751939 to 4752297)
gagaaaggcgtcaggagaggaggtagacaaatttggtaacaagcatgtaactcttgagtttcttgtcagctcagtgatcatcgacggggtctgttttaagttatcgagaaatatccgagaaattgacttttctttttcttttctttttttctccgtgtcaatttgtcctttaaatacgtctcaactagctcgggccgttattatttttatttcacatgaaacagagagacagagccattgagatagatagaccctatagttagcagcataatcatgattcattagtttttgataaacactaagacatcattttcttgcgtttgattttatttttcattatagttttacagtttcattgt

SEQ ID NO: 85445 - DNA, 362 bp, Citrus clementina
  Intron number 3 from transcript clementine0.9_022110m (loc us clementine0.9_017893m.g) derived from phytozome v7.0 (c hr-ID scaffold_4; pos 5225639 to 5226000 reverse strand)
tcactccacaggttcttggagaagagaaaagacaggtaggcatgcagagactaatgtatataattgcaaaatcaaatttagaaattctttttgcatcattcttttaagtatgttttgctgcagatgtacccaagtgttgaattagttatgaatcaccaaggtccacttgagtttgaaactttgaattttgctttttccaagtattattacatgtatgcaaatcaagtagatgttcttgtcttataagttggaatctactgtatagttaaataatagggaaacgtttctttggaatgattgatttgtgatgttctgtgattacatcttttacaggattgttgcaagagcaccgtaccaagtga

SEQ ID NO: 85446 - DNA, 765 bp, Citrus clementina
  Intron number 1 from transcript clementine0.9_022110m (loc us clementine0.9_017893m.g) derived from phytozome v7.0 (c hr-ID scaffold_4; pos 5226759 to 5227523 reverse strand)
tagcctcgggatatcaagcaacattgaagctagtaaagtgttcaattatatatttgtttggctgctgagaaagtcaaaaagaaaattaaattcattcttgtcatcatatatatgttcttctgggttgccttcttatttgggagaaaaaccaattacgctttttctagcttaagctctaatacggattaccttgacgcttagatctgtttatgtaaatgattgtaatcccgtttgtgaattatagcatgtgctttttataatttgtaattcttatcttgtctttggaatctccccactcccagatccaaactaatctcatctcattttctgtaattgacatattcctcctgtttaaccattcaacggtcaatagaacatgttccctatttcctcggactcccctcaaactactccaattttattttattttattttttcatttttaaaatttcccttaattcaagagacagacggcagccccatgtgctcaagggctgttccatacttctgttctattcatttattttatgaataataataaaaaatcagtttatagaatctctatttttggggataacaacccggtcctcgatctggttcccttttcaaatttacccacgtgagcttttagtttcattataaggtaacaatcatgctgctcgaatgtataatttgtgttggagggaagattgagacaaaatgatgcgagtgatttatcgaaattttgcaggggtacccgagatcccgcggcggccagcagctaca

SEQ ID NO: 85447 - DNA, 446 bp, Citrus clementina
  Intron number 1 from transcript clementine0.9_013689m (loc us clementine0.9_010637m.g) derived from phytozome v7.0 (c hr-ID scaffold_3; pos 8706142 to 8706587 reverse strand)
tggtcagtagtcacaacattaattttttcccttcttttttttcccgtcttttctttagattttgtctgcttttcttcaagtgaaaaaaaaaaaaaattcataatacgatgaccaaagtctttctcttttaatacaacttatgtgttgacttaataatgtatgtgccaccacgggacattttgaagaaatttggattctgtatgtataatcttctttacatgtttttttttttctttcttgttttgaaatttaggagataggtgtaacctaacattgggaatttttcagttttgatctggctttgtataagtagtacacgctgcagtttctttttttactttattgaggattgttttgtgtggatttagtgaactaagttggtatttcttttcttttttcttttttcttttttggttaggggctacaagcgtttttttaggcgggct

SEQ ID NO: 85448 - DNA, 591 bp, Citrus clementina
  Intron number 1 from transcript clementine0.9_003661m (loc us clementine0.9_002116m.g) derived from phytozome v7.0 (c hr-ID scaffold_4; pos 7135822 to 7136412)
cttaccctccacgtcaccggaacacgaacaacaaggtataaatcaaattcgcgtagctcatcgtattattatatttcttatcttttgtccattggcgctgtattgatatttaaaaacaaaaaaattttagtgctttaattgttatcgatattttgaatttgtaatttacagttagctgcataactaatctgctagtttaattggcatttactttatgtgcttatggaatatctcattagttaaaactcttatactacttgaaagcattagaagttatgcaaactgatgagggatgaccatgtgatgtgtcatgtcatgtaatttaaactcgggcattctatgggttgttagtttgatgtgtatagtatgatggtgtggcatgtgtcgaatgtttatttgcattaatcttccaaggttgcaggaagaaatgtagtttcaaacagtttcgtcattcagagaaacaagtaaggattatttctcaaccccggcttttccttaagtttttgtagtgctgttgatgctgggtactagtaatggtccgatatgagcttggttattaatcctcttttcttttatttccagatttagata

SEQ ID NO: 85449 - DNA, 772 bp, Citrus clementina; identical to SEQ ID NO: 82329
  Intron number 4 from transcript clementine0.9_024522m (loc us clementine0.9_024522m.g) derived from phytozome v7.0 (c hr-ID scaffold_3; pos 5396903 to 5397674 reverse strand)

SEQ ID NO: 85450 - DNA, 170 bp, Citrus clementina
  Intron number 1 from transcript clementine0.9_029142m (loc us clementine0.9_029142m.g) derived from phytozome v7.0 (c hr-ID scaffold_3; pos 1274220 to 1274389)
gcgcttgcctcgccgccgcttctgttcttggcaaggtctttcttttcttttcttttctttttatcaatcattccctctctactctcgaaagtttgtttaaactaaacaattttgttttctgttttttttgggggggaaccggctggtctttcaaattagggttctggtgg

SEQ ID NO: 85451 - DNA, 1004 bp, Citrus clementina
  Intron number 1 from transcript clementine0.9_011337m (loc us clementine0.9_011337m.g) derived from phytozome v7.0 (c hr-ID scaffold_14; pos 634538 to 635541 reverse strand)
taatctggtaatattatttcagtttttcttaattttctacttgattttactcattttacttgcagatgagtagattttattttattttattttttgtttttctattcatcatgggtttgttgtgtccatagaaactgaattattatatctgttactcttagtgagaaattttacttgaaaaagatgagttgggtcaattttattaacttggttttctgggttcgttgagctcttggctgaattggttctttttgttcattgtaatatgaaatcctagtaattatagataaagcattgtgggtttccttctgattattcataatcgtttgtgtttgattatttgcaccgctaatattaaattggaaaaaaaaaaaactaaaggtgcgtttgtaattatcgcttttacttggcagctattgcttaccaaacttctcgcaagcttatgcttctctgctagtgatttcattcttaaactagtgtaactgggaaagtttttgtattcaattgctgtaaatattatgataagtaataaattatgatattgctgaaacaaatacattgagaggaatcagaacatttggaagagtaaaacaattgtcaatttgacgcgccgaaatctgaattcataaaaagcaaacttaactgtgacgtcactgaaagagtcactattgacctgaaatgtaaaacaagcctacgtagatttagatttgattttaagtaacttttcaaataagataacacggtctgtctatgtatttatgatatgtttcattatggtgatagtttcttacagctgatttatgattctcataggtaaatttgtcattatttatggtctagtccattacgtgtactccttcatgttatctcatcagaggttgaaatagcggatatgattggttgctctatctctttctccgtatttctttactttgttaataaaaatcccatccggaaactttaatatcactattttgatctttagatttgttagcaaaggcaaa

SEQ ID NO: 85452 - DNA, 564 bp, Citrus clementina; identical to SEQ ID NO: 78154
  Intron number 4 from transcript clementine0.9_020488m (loc us clementine0.9_020488m.g) derived from phytozome v7.0 (c hr-ID scaffold_24; pos 2587605 to 2588168 reverse strand)

SEQ ID NO: 85453 - DNA, 551 bp, Citrus clementina
  Intron number 1 from transcript clementine0.9_000289m (loc us clementine0.9_000289m.g) derived from phytozome v7.0 (c hr-ID scaffold_2; pos 2174269 to 2174819 reverse strand)
gtcggcgtgttgcgccagctcggtgacctcgccgagtgagtttcagcttctgatttacaaattcggcttcgtctgagctcgaattctgatttttaagcttaatgccaacttgctagagtctgattttttttttcaattttactaatattaaacttgcgttttgaatttgataattagagttagattcagattttatattacattgaatagatgattttgcttctgccatcttctaggtccatgcggattcaggattctttcgatgttgatatttatttatttatttttttcaattagattaatcaatttttttttattggtaaaattcagagaagattttggataacagaaggtctaactgacggttgaatttaatgtatgaatttttaaattgtggctcaatagcatttcattataatggattgttgtctgtgaattttcgttcacgaattgtttagcagagctagcatgagaaatttgataatttatttgtttgtttctctttgtttgtggttgccataggtttgctgctgagatattccacgacttgc

SEQ ID NO: 85454 - DNA, 912 bp, Citrus clementina; identical to SEQ ID NO: 78610
  Intron number 1 from transcript clementine0.9_010066m (loc us clementine0.9_007821m.g) derived from phytozome v7.0 (c hr-ID scaffold_58; pos 151785 to 152696)

SEQ ID NO: 85455 - DNA, 626 bp, Citrus clementina
  Intron number 1 from transcript clementine0.9_003785m (loc us clementine0.9_003411m.g) derived from phytozome v7.0 (c hr-ID scaffold_24; pos 2069765 to 2070390)
tgtgttccccaagtcaactcatcaactgggtctgagtaagtatctcttgatcaagatgttttgttttttcactacgtgattagctacatgtatatttatttttccgattacatttcaatttttttttcataactttccttatctcttttagtatatttattactgctatttggttactgagattgagttcggaaattcgttacaagctttattatttatgtttttgagatcacattgagtttgacctgagttttgattatctagtttcgtttagttttgataaattagtttcaagttgaattgaagctttactctcttataggaagaaattcaaagaccaacagtttataaattgcgtcacttatgtcctttgaaattcaaatttatttcaatattcaaattcttgactactgaatttcatcattgaaaaaaggggtggggaaaaattaaaggtgaaaaatattcttcactctcgacctcacaatttatacccaccaaagcacaaacttagaatgatccctttgttctctttgtgcaaaattgttgagtctctcaaatatatataagagtgcctggatttgaactatattcttcgtttgtttgttcgttgttgtagcatttgaaag

SEQ ID NO: 85456 - DNA, 443 bp, Citrus clementina
  Intron number 1 from transcript clementine0.9_012966m (loc us clementine0.9_012966m.g) derived from phytozome v7.0 (c hr-ID scaffold_10; pos 4730776 to 4731218 reverse strand)
cctactctccccagctgtttcaggttttattcttttccgttaatttgctgttgttttgggatgccgtttctgcattctgaaattaattaaaggaagaaacttttttttttcaaatttttgctgcattcaaataaaatgattttatggaatggccgaaacatcgagatgtgcttcatactctttttattccttgcttttgctactgctatgcagtcatatatgaaaatttgttacttagctatgtctcttgtattatagttctttagttagtaattttttgaaattttgctcaatttggtgctcgaagtggtagaaagaggaattgccatgaatatcacattatctgtgtgtgggagggatgtacttgttttctgtattatccatccaatgttttgtttatctgattacctttttatttttttttgtacaaagtgaacgagaag

SEQ ID NO: 85457 - DNA, 308 bp, Citrus clementina; identical to SEQ ID NO: 80443
  Intron number 1 from transcript clementine0.9_021525m (loc us clementine0.9_021525m.g) derived from phytozome v7.0 (c hr-ID scaffold_3; pos 7258138 to 7258445)

SEQ ID NO: 85458 - DNA, 669 bp, Citrus clementina
  Intron number 1 from transcript clementine0.9_034943m (loc us clementine0.9_034943m.g) derived from phytozome v7.0 (c hr-ID scaffold_4; pos 3747687 to 3748355 reverse strand)
actcattcaacgccgatcactacttgaatctcctggtgcgccgctctatattatttattaattccataatcatgattatgactaaactattcatataatattgacaccagtgcagtatttactaacaaggatatgtttgagattcagattccgtgccttttaatagacagctaaaatcactgacggtcgagtataaatgagaggatagtgtattaattaattcgtttaaccaatcttgttatgccacatcaggagtttcctgattttattattattttataaagatattaatcaattagaaaaagttggtttctattagaagaagcacaacattcacaaacatatccaaaatttggcttaaattgctcatgatagtgtgtttgattaagggatttaattatctatgctagataattcttgccggtttgtatctacctttattttcactatgcttgtgttacaaggaagaagtgataatgcattcagattcatccaccaagatagatttgagtggtgggtttacttgaaacttgaatgtggtagtagtagactagttgtaataccaattctcttttaagaaaaggttgaatatcagaaagtttttaatcctccatacatgtcttgaatggagtagatacacaagtcaagcttggaggggcttctgcaaag

SEQ ID NO: 85459 - DNA, 772 bp, Citrus clementina
  Intron number 1 from transcript clementine0.9_023383m (loc us clementine0.9_023383m.g) derived from phytozome v7.0 (c hr-ID scaffold_10; pos 867092 to 867863 reverse strand)
cggccatcgcactgtcgctcacactcacacagctggtaagttcctctcctctcgcagctttgcttcctcctttctcatctcgttcaacattttaatgaatggtgtgctcatttacctgataatgataatctagtaactaatttattcataaatgtggccaatctgttcttttcagttgtctctacatcagaatatttgttacttttttttttgtatttctgtttttcagttgatttaggtttttttttttttttgtgttttgttttggatctatagtgctttttgctgtctcagacgagagagattctggatttgcgccatttgtgcctctttggaattatttacatattatattatattattactcaagttgtggtggtgctctgtgtcagttctcttgaaaagctataatcctatctagttcttaatgttaaagacctttctattggaacgttaatgccgatatattattatagcatgcattttgattgcaatttacagccatgattattgtctatcgattcttgtgctacgcatgaaacttaacatacaacacttgtaaataaatgtaagaataaattatcctacacatgggattttttaagctctgttttctgatactattagtctgctaattctcacattaccgttatcagttactacttaatttgctgtatctaattgtttttttctttcctcttttctttccccttatatatgcttgatgattcttcatttattaggtcacttgtgtaaatcgaacttcaacaaa

SEQ ID NO: 85460 - DNA, 839 bp, Citrus clementina; identical to SEQ ID NO: 82054
  Intron number 2 from transcript clementine0.9_000985m (loc us clementine0.9_000859m.g) derived from phytozome v7.0 (c hr-ID scaffold_3; pos 5306737 to 5307575)

SEQ ID NO: 85461 - DNA, 851 bp, Citrus clementina; identical to SEQ ID NO: 77879
  Intron number 3 from transcript clementine0.9_028870m (loc us clementine0.9_028870m.g) derived from phytozome v7.0 (c hr-ID scaffold_3; pos 6668676 to 6669526 reverse strand)

SEQ ID NO: 85462 - DNA, 610 bp, Citrus clementina; identical to SEQ ID NO: 79503
  Intron number 4 from transcript clementine0.9_023557m (loc us clementine0.9_020212m.g) derived from phytozome v7.0 (c hr-ID scaffold_4; pos 6312601 to 6313210 reverse strand)

SEQ ID NO: 85463 - DNA, 543 bp, Citrus clementina
  Intron number 3 from transcript clementine0.9_032942m (loc us clementine0.9_032942m.g) derived from phytozome v7.0 (c hr-ID scaffold_24; pos 1587336 to 1587878)
ggttggctccgtgcaactggtaatggtaataaggatagttctaatggtcgtcaggggcggagccagcataggaccaggtggggcacatgccccagctagctttcaaaattttttttgatggttttcttaaaaaaatatattttatttattatttatcaaaatgccccacgtaacttgaaagtgcccacataattttaaaaacatttcacgttgcccctaacttaaatgtctaattctaaataatttgattaactattataatatcataaaaatcaataaagacaaatgagagaacctttatcaaatgaaattcattaaaaaattaattaaaataagtaaaatcttagctttccgctttctctcgtctcttccatagttccatgaaataaagtgtggtgggtggactccatagcagattaggcgatttgcagtgctccctgatcgtcaccatgcgcgtgatgttttttaattctaattttttatttcattattttttctattttaaaattgctaattttattatatagcttaaatttgaagttc

SEQ ID NO: 85464 - DNA, 658 bp, Citrus clementina
  Intron number 3 from transcript clementine0.9_014802m (loc us clementine0.9_006043m.g) derived from phytozome v7.0 (c hr-ID scaffold_3; pos 1058540 to 1059197)
gggtctagtccctggcattgacttttgtaaccgtatggtggaaaagtttgccaatattattattgaatgccaattcttatatttacttttaacttcatacaagttttctgtatgttatttcaaaactttaccatagttgacatggtttacaatgtcctctgacatgcaccagtagcatgcagcacatatatcaatctccctgtcttcttactacatatgacggccttgcatcttgtccatgcattcctgacaccgagttaaaagttaaaaggtttttactttatcaatttgtttctgtttgatcaatatcttaaacaaatctcacgaatcatgttgaagcatggcaattgcctgatgttaacttttttggggatgtctaagaaaaaatttccttataattatgttcatggacgtcgctaacttttataaaattacttgaggttcctgaaattatacatttctggtgcaagttcaaagaactcatatagaaaactgttttgagtttccaattaaaatcaaattgcttcctctttttcttttcttcttcttctatactcacatacctgtgaagttatttgtatttaagaagagaactagatttaaagctcacacattttcactgttggcatggctgtttagatttgaaggcagcagcaac

SEQ ID NO: 85465 - DNA, 681 bp, Citrus clementina
  Intron number 1 from transcript clementine0.9_021866m (loc us clementine0.9_021866m.g) derived from phytozome v7.0 (c hr-ID scaffold_7; pos 71838 to 72518)
caatctttactagtaagatcaatcgcctgtttcgttgtcttcttcccttgttctttgctgtttctttttgtctttgtgattggatcgtttggtttcggaattctgatcgtcgttttactgcctctgtttggttgccgagaatgtttggggaaaggaaaataatatgttcagtaatttgacggtttttgttgtctgtgttcaaaagtagatgtagacaactcaattagggttgtgacaggcgtttgctaattgatggaaaaaatgctctagtaggtcatctactaattcacacataagtgaactgattttggatgatttctgatcacgagtatgtaaaatcattctattgctgaaattctcgtgcagaagaatttgaaaaaattaatccacgcttattctatagttatatatatcagggaatgggggaataattaaagaaagaaagaaattgtgactttatttgtagccagtttgtgtaatactactcataactaaatgcagtatgaatattagcatatttgaatgatgaataacccgtggtttaagaatatttcttgttgctgcaatcaaagagatggatgattgcaaactgttggatgaaaattacacttctatgtttgacttaatatttgatatatgagctttgcatgcttttgcagctaccgaacaaactactttatc

SEQ ID NO: 85466 - DNA, 797 bp, Citrus clementina
  Intron number 1 from transcript clementine0.9_014468m (loc us clementine0.9_014454m.g) derived from phytozome v7.0 (c hr-ID scaffold_3; pos 1066544 to 1067340 reverse strand)
aacgcttcggtgtgctgctcgggcaattgaggtaattttggcgcggcccctttcatctctgttaataattcacgtcttaatttctgaagttaattaaattcgatgtgccattttttttttatttcttttgagaattttgtaaagatattcaaatttgaccggagagactgagatttgagaaacaataatactacacattttaaattttttattctaaaaaattattccaaatgatttgttgtcatatgcataaatgaagatattttataatattgccaatagctttcaaaaacaaaaacaaaaaaacgcatttatcaaaacataataaataaataaatatatatatatatatctcgaccactaaagtccagatcagctgcggacagcactacgcatgaaactaaatcaaccttagagaattgtcatcaacttcactaaccagtaaccacacagccactaaattctttgatttgattttgatacaagtacacaaaaagaaccatgcactcgaccttctcgtaaaaacaacccacccataaaataaaaatactctctctctctctctctctctctctctcaattctcattttcccgaaaatgaaaattccgagaatatttgcattcgcatagaaaatcacctcctcttaattatattttctcattgtccctgtaaatttgccatgcacaagcttttagttttttttttttttttaaaggagttgttaacgtgaccaaaccgataatctaagttgcatataatagcagtgttgatcaagctcaaagtttcattttttaaa

SEQ ID NO: 85467 - DNA, 936 bp, Citrus clementina; identical to SEQ ID NO: 82573
  Intron number 2 from transcript clementine0.9_019142m (loc us clementine0.9_019142m.g) derived from phytozome v7.0 (c hr-ID scaffold_3; pos 4843490 to 4844425 reverse strand)

SEQ ID NO: 85468 - DNA, 538 bp, Citrus clementina
  Intron number 1 from transcript clementine0.9_012903m (loc us clementine0.9_012521m.g) derived from phytozome v7.0 (c hr-ID scaffold_3; pos 3125765 to 3126302 reverse strand)
ttcagctgagaagcccgacctcatcgttttcactggtacccttttttccttttctccctctttttcccgtttcctttgattaaaatttaaaccaaaaaaaaaaaaaaattgtttgattcgatttctataatttttgtactggttaccgttaattaggatttttggccaattgaaaaccccggtatttctcattatttttttattacaattctagctaaattataattaacttaaactgttgcatgaacttattgatacttattactcaataaaaattatgccgaagtttcccaaacaagaagaagaagtggttaaagagtaactctcgctattttgtcagtcattctatccagctgctaatgtaaatccacaaggttaactttgaagattgggatttaatgaagcaaaatccaccaatgatactgtcacaatacttaatagtgacgtcggttgcctaatattggttgtttctgtacccaatatcactttttgaagttttttttttctcatacaacaggtgataatatctttggatttg

SEQ ID NO: 85469 - DNA, 834 bp, Citrus clementina; identical to SEQ ID NO: 78211
  Intron number 1 from transcript clementine0.9_000967m (loc us clementine0.9_000967m.g) derived from phytozome v7.0 (c hr-ID scaffold_3; pos 6324982 to 6325815 reverse strand)

SEQ ID NO: 85470 - DNA, 833 bp, Citrus clementina
  Intron number 1 from transcript clementine0.9_008372m (loc us clementine0.9_008372m.g) derived from phytozome v7.0 (c hr-ID scaffold_4; pos 5242900 to 5243732 reverse strand)
ctgagattctagctattgaggtcagtgtgactgttttattattattcttattatatgtgttggattggaaatgattaattggcattgcgccatttcgtttaggattttttatagtaatgagatcatggctctctggaattccagtaatttatataaaggttgatgtggattcgttttagttgtgcaattctggcgttctgtttcttttttgggaaatattattttgttgatagaatggatggtttcttattctttggcaattgtaagcttgtattatattatgatttagatggtggctatatactgccttgtcaacttgctcaatccttgtttataacattcattctgattagatcatattagctcttctcaacataattagttggaagttggctgatttcgctctgattccttgttgcaatcatttcctcaagttcatcatacatcaacagtgtgctatctgtgtgaatgtgcgttgcgagatgttaagactttgatctactaggaagtaggaactgtattctttatatagttaaatttcgctgttggtttcctcaatttttaagtcataaaaatcttctttctaaatagtttgcattgttgtatactgctatttatttcctttcttgattgaaatattttcctatgcatatctagtttaacaaactgtcatcactattgaaattttgacattatagttgtggaagtagatctagtttttcaaacttctttacctcaacgatttcatttattattttacctctttcaatctctaatcatcgaaagatattggttatattggatctctcattcttatgtaatattttaacaga

SEQ ID NO: 85471 - DNA, 486 bp, Citrus clementina
  Intron number 1 from transcript clementine0.9_024805m (loc us clementine0.9_024790m.g) derived from phytozome v7.0 (c hr-ID scaffold_2; pos 9202931 to 9203416)
ggtctttgagattctagcttcttctctaaaattcggtaagtatagtccattttgttccattgtcattgagattttaaacattttaattattctttgcttcactttttcaagctaagaggaatggcctctgcattttctgaaatttcaaagcttagctggttatttaacatcatgtattgatgaaaaacaattttgccaatcacttaattgctcaacgacgcatcaacatttatctaaacctaaaatttggtggtttttatttttttattttatttttcattttttccctgtttgtgtcttcataatcaggattttctccaatgaattttgatttggacaagtaaaattttattgacagaaggaattacaaagcttggaatgaatcacattttaattatcatacagctcttattataatgttgacaatgctcttatgcattttcattttcagggcatcaacaaattacaaaagttaaaagtttgctt

SEQ ID NO: 85472 - DNA, 348 bp, Citrus clementina
  Intron number 3 from transcript clementine0.9_019067m (loc us clementine0.9_019067m.g) derived from phytozome v7.0 (c hr-ID scaffold_3; pos 308768 to 309115 reverse strand)
tggtgccattggcttaggatctttcttattgaaaagtatgttaccaattaagattgtttatcattttcctccttttcttttgaacttgttttatctacgatattgatacctaatcttccgtgtgtgtattggttttgcttacttagttcatttatgtttgtaaggtgtaatatacgtggcagttgcacatttgtaaatttatatatgtcgagatttgcatatatttaagaaaacaattcctcattagaacttctatttacgctatattttttatttttctatcaacttttgaactaattcaaataatatgcaggaccaaggcatttcttgtactacaacaccttgcgc

SEQ ID NO: 85473 - DNA, 782 bp, Citrus clementina
  Intron number 1 from transcript clementine0.9_020516m (loc us clementine0.9_020516m.g) derived from phytozome v7.0 (c hr-ID scaffold_2; pos 3747690 to 3748471 reverse strand)
attggcgcttcttgttcatttcttccttcacggaggtaacaaaaaattttctttccatttcaaaagccgagaaagtgtcacagcattgctgaattaattttttttttcccctgctttgcatattggagaaactataaaatgtttagtgcaagcattagaaactcaattgccttgttttcttctcagttactaagtgtcaagaacaggtttcatgaagtaagcacaaaatgtaaaatttagattaaaatctaagcgggattgcaatttgtatgagttgataatgattggtctctttgaatatttgtgtatgctgtttgctcatcaacgttgaacaaatatttttggaaatttaattttttcaggcctaccttattatgctttatgcaactctgattctgtgactctgcttaatttgttgctctttcaatgggttgatattattttctattgaaattgtttttgacctttcatttggttgcttagaaaatggggagaaagagagtatatgaaaatctatcttgtactttgtttaagttagcctctaaaaaaggaagttcaagctcaaaaaatatatgtttatcttttcaaaagttacattttgtgttcagtttctaaaatatggtcatttgactaagatagacagtctgctgtgatgatgttggtaacatatttatatatattgcttagagactttataactcatctgctgggaaactaaagttgaatggattaagaatgtgtttacagcaaattgcggacaacttggttgcaatttgaaactc

SEQ ID NO: 85474 - DNA, 630 bp, Citrus clementina
  Intron number 5 from transcript clementine0.9_021682m (loc us clementine0.9_021660m.g) derived from phytozome v7.0 (c hr-ID scaffold_85; pos 173073 to 173702)
cttctgatcttaagagaaaagctatcaattatcaggtcaatttcaaatttgcttttctttcttcttttagttatcatctctcttttggtctatttcgctttgcatcggtaaacaaagattatcagactcttgttatagcttcagttgcacatggtagtgacatgactaaatccatggaatttaatgctaagtttcgttgcaaatatgtcaactttgctggtttgtcctatttattagttcaatcatgcatcaataatgtgcctctcaatttttagagaagaaaaggtagaagtttttcaaaatatatgtaccctctatagagcgtctgcaaatgtaaatcatattagtgcccatacagataactttctattgcatgtttcagacaccacctataaccgtagagttcgcaatgcacaacgtaacagagataaagaatcctaattttcctgttctgggcatgcaataaactatccattttccactgcattaatgttttggttgtggaacgtaccgcatccattctcctatgcaattttatcaaaagtgtgtgtcagatttggagaccaatgcatttccttttgtgcccaatttgcaggctgcaaatattgtttcctcgagcatacagcctct

SEQ ID NO: 85475 - DNA, 570 bp, Citrus clementina
  Intron number 2 from transcript clementine0.9_025060m (loc us clementine0.9_024673m.g) derived from phytozome v7.0 (c hr-ID scaffold_4; pos 5618173 to 5618742 reverse strand)
cctacagaaggaccctcctgcttcttgtagcgctggttctttctttatctccttctcaatcttatttgtttttctattttcatttgtcattgaagactatatactcatagagttgaattatctacccactaatcactcccatgatggagaggcttaaagtttttaagataccaggtgaaacggaactttatttcttggttccaattccaattctcttcttgcagcactggttctttcttcatctccatctcagcatgttttcttatttttttctattttatttgtcattgaagatagatatatatatatatatatgtattcatgaagttaacttgacttatcaacccactaatctctcacatgatgagaggaataaaactttgaagatattaggtgaaatggaattttatttcttggttccaaatccgcttgcttttctaattatctaaacttttttgcctttaagtccatcacagctttgaattaatcttttggaactttgtaattttgagtgctgcctattttgcaggccctgttgctgatgacatgttccattggcaagcaacaatt

SEQ ID NO: 85476 - DNA, 980 bp, Citrus clementina
  Intron number 1 from transcript clementine0.9_025060m (loc us clementine0.9_024673m.g) derived from phytozome v7.0 (c hr-ID scaffold_4; pos 5618778 to 5619757 reverse strand)
aaataacaccagacccaaactctcaggccacaaaggtaaagctccgatttttaatttttaattttttttttaaatttctcaattatttcattaatttttaaaattccccaataatcacgccttcgtccctgattttggtttgaatttataaataaaggttgttgcttcaaatctgtcggtacaatttttgtactttttagaattagggttagggtttgtgatcgtgttttcgattctgtttgcttttaagatataaccctcgaagtacggcactgtttctctgatgggtaaacttatttattattattgttatcattgcggtgcatataatattttaatctggcactgcttgttgtttgattgtttatttttattaaggttttatttaaaaagatattttttgtatttattatttttttggtactgtctatagatctggagggtatattttatttgtccttttagaggtggtaataattggttgttttatgttttatgtttttttcaattatttttttggtgactgagaaatcaagggaaaaaagaatttttgtgaataatttcttgtgaatgttaatgggtgttgattaattgggggatttatgtattagaagggttttaaaaattgaaactactgaaacctaatttcttctgtgacatgtttggcagtgaatagggtaatggttttgaaactagcagttatgatacttttaattattttgagcaaaataattgctgcttgtttgtgttggattgaaatattgtcacctcggcaaaataattactgcttgtttgtgttggattgaaatattgtcacctcgtgttcatatttttgacattcacatttcaccatatcgggcaactatttttgttagtgttatttttgtttaggtctagataggattgggaaatacatttgtagtcgaactgaattgtgttattcttttggatgtcgttgcagtttgttgagaaattcccag

SEQ ID NO: 85477 - DNA, 608 bp, Citrus clementina; identical to SEQ ID NO: 79590
  Intron number 1 from transcript clementine0.9_003706m (loc us clementine0.9_003706m.g) derived from phytozome v7.0 (c hr-ID scaffold_31; pos 165121 to 165728 reverse strand)

SEQ ID NO: 85478 - DNA, 358 bp, Citrus clementina; identical to SEQ ID NO: 80693
  Intron number 2 from transcript clementine0.9_003954m (loc us clementine0.9_003954m.g) derived from phytozome v7.0 (c hr-ID scaffold_2; pos 4863337 to 4863694 reverse strand)

SEQ ID NO: 85479 - DNA, 698 bp, Citrus clementina
  Intron number 1 from transcript clementine0.9_011401m (loc us clementine0.9_011302m.g) derived from phytozome v7.0 (c hr-ID scaffold_85; pos 804717 to 805414)
cgcttctgatttcaaatacttttccaggtaatttaatctttttttcctttcttgctttctggaatattctaagatcttaatctagatttgtttcctcatttcggcattttaaaaaatttgcttttttttttctcttacggtttagggttctcaaaatcatatacgatgctgttttactgccacatttgtaattcggccatttttctttttccttttttttttgtgagtgttgaaaaggaaaaaagtgatattttcctttctgggtattgctggattttggccccagaaaaaaaactgtaattccgtctctttgcgtgtatatatgtataggtatcttctacattaccatcttattggctttctgggtgacgaaaatgggtagcttaactttcttataattgagttatgctatgtgggtttgttgtggtgattaaatactgatggcagtgtctaatgagatgatgagggaactctatctatgcgaaaatgcatggtgtatttcgtgtttaaagatttttatgcaagttttattgtattacgttgttttattaatattactgtctcccaatatttgagttcttgtgtttatcgaatgatagaaaagagtttaccctgatttatggttttgattgagatgtaatggatatttttatttgattataggttgggaagtcaaaacttgaccttggtgcctgcaa

SEQ ID NO: 85480 - DNA, 722 bp, Citrus clementina
  Intron number 1 from transcript clementine0.9_028898m (loc us clementine0.9_028898m.g) derived from phytozome v7.0 (c hr-ID scaffold_31; pos 1840964 to 1841685 reverse strand)
agagaccgatcagcaaccgacaacgaatcggactggtgagtgacgcgagagaaccgggctgacgaatccgagagaaaccaagcagaagtggttggtcggtgacaagctgatgattccggccagtgagctaacgggaaagaagaaaacgagtgatgaatcaggccagtgagctgatgaatccggccagaaagtgacgaatccgtccggtgaggcggtgactgatgcgcgagagagagggagggccgacgacgcgatgaaagcaggggagggagatgtgatggaagcttctggtttgtgcgacagagagagagagtttaggtttttagggattttttttttaatttttcactatttatatttttatctgaagtgagggtatttttgaaataataaaaaatttatgggagtagaatgggagatgccgggaataagagtctgattcccaaatcccttggaatcaagttctcattttttattcccgaattattatgggtctacaaaagtaattcccattctcctccttattttactcagtaaaaacaagaatcgttccaattccgagtctcattcctgaatccgacaaataaacgcggcctaagaatataatgttattattacgttgcttactctaggacggttgttcttttgaatattttgattagtttcttcattctttttggacgaaaggactcacaatcacaaaaacaacagaggagctgtgt

SEQ ID NO: 85481 - DNA, 625 bp, Citrus clementina
  Intron number 1 from transcript clementine0.9_016348m (loc us clementine0.9_016360m.g) derived from phytozome v7.0 (c hr-ID scaffold_2; pos 4287669 to 4288293)
cagtgcaagcctctctccgaaccacaggttccttccaattaacgctcgcaatttcaattaatctgatcagccaatatttgattgattatcagaaacttgaaaaatctttgttgagtatcaggagttagaaaatgaaattatccatttcttgtacaaaaatggaagtattaagtataaaaaaatacgaataaaggtccttgcaattaggtattattggatttagggtttatagcggacggatacttcagatctcaatcattgatctgttttaggtatttgtattggcaaaagaacaagatttgtatgagttgctattttttgtcgtgatataacaatgatggcttgaggataattcgcaaagaaggaaacagtgaatcacatcttgtaatttcagtgtttttgcttaattctggaagcttgaaaactaaagtgtttgtgaaatatcaacatttaaatgggaactaatatttaccaacaatgtatccactatccttgcaatgctataaagggacctatcttgtgttatgttgtcaaagtgtgttgtcagtctcgcaattcataatgcagctgaggtggattagtaatcatatttgatttgatttactgttctgtaggttaaagcatt

SEQ ID NO: 85482 - DNA, 410 bp, Citrus clementina
  Intron number 2 from transcript clementine0.9_024726m (loc us clementine0.9_024726m.g) derived from phytozome v7.0 (c hr-ID scaffold_4; pos 2618096 to 2618505)
gctgtaagtgacaccaaaattaaattgcaaacttttttttgttaattattttagttttcattgtattgtggtaaatttattttcttgtttgattatttgcctatatagacaagtaacttttgtatttcgtaagagtattcgtgataaatttttgagggtttagtttttttttttgttcgtatatgtttttataatattacttttgtacctgcacaaataaacatcactaaagaaaaagaaaagaaaaaaaaactgaactaaatttggttgcgtaaacttatcgaatgctactgcattatttgatggaatttgctgtaagatataattgacattgtgttttcaacttaattgctatgatttatgtgaatattgcagacgataccggttaacccgaaacctttcttgaataa

SEQ ID NO: 85483 - DNA, 486 bp, Citrus clementina
  Intron number 2 from transcript clementine0.9_019565m (loc us clementine0.9_019538m.g) derived from phytozome v7.0 (c hr-ID scaffold_4; pos 5174212 to 5174697 reverse strand)
tggtcgttaaagccgctgcagtcgtggctcccaaggtaattttatcctttaataaaagcagcattgataattctaaaatttacttattttttcgaatgtctggcctcatgtttttagtgcttgatgaattgatgcattatcgatttttcatgaatttttgggagatgattttttaatacattttgatttgtttttaactgaaggcacttccatgactaatttggctctaaaacccactgataaattggtttgtatttcactttaaatgagtcttgcatttgtttctttagtctggtagtgtgcattatatttttgttctgactgtgcgtgttatattttcaattccgtgtgaatgttgcacatctatctcttctgttaatgttagtaaatgatcagatgatttgagcttgtttgcttgtcattcaattattttgatcttatggctgtgcagtacacttcaattaaacctttgggtgatagagtgct

SEQ ID NO: 85484 - DNA, 311 bp, Citrus clementina
  Intron number 1 from transcript clementine0.9_009866m (loc us clementine0.9_009866m.g) derived from phytozome v7.0 (c hr-ID scaffold_7; pos 5265602 to 5265912)
gggagctgtcatttccaacagtgtaagtgcattagtgtgtatttattttgcttaccatataattattttaagagtcaaataaaaattaacttatgggtttagttatttttttttttggtgtcattcatatataattaatgcttcatggtatacattctttgcacaaaagctgtttaagtttttgtggtgcttctcttcgtcttcttcttcttctcctgctcctcctcctcctcctcctcctcctcttctttctttctttctttttctcttttgcagtttggtgtttttggcttctcactgttctcttcttg

SEQ ID NO: 85485 - DNA, 1061 bp, Citrus clementina
  Intron number 3 from transcript clementine0.9_019917m (loc us clementine0.9_019917m.g) derived from phytozome v7.0 (c hr-ID scaffold_2; pos 6910617 to 6911677)
gagcttgagtttgaaattgcaaggctgaggccaaggttagttcatttgtttgatttatcgttatattaaaacaacgaaatgtttttagaaatgcatgcaacttgattgacattttgcctcttccaaagtgtattaatagatgatggagtacaattcggttaaatgcgtctttcgattataatcatatgtaaatcctttttgtttcttcatttgtctatgctttaggcagaataatttatattttgatgagaatgaacggagtgtgaaagctttagtagagctctaactccttcattcgctgatagaaaatgaatttccttgacttttctgtacttgtaaagattatctactttttgaagtttgatgatgagaaacgatgagttccaactgcttggtcattcttcctttctacctcaccggggcactataccctagtgcgtaccctgggagactgggactttgattaccatttgtgccaccgtcctcattgacttccacagttccagattacaaagcttacttcctggctttggactaccccctttgacagttggagaaaaggaagagaaaaaattaacacttgtgccatgttgggtttgaagaaatggagccaaacaatggaattgaaatacaccctcttttgctctcatttctctctcccgctctcctctcagtctcttcttttccaaccaaacatgggcttaatgtaagctttaagaatctgacaggcataagtttttttattcattacatttatatccaccgtttttattttgaatattacgtaaatgtaaaccaaacccctccctgtactgatgtgagcagaatttaaatcccaaacctcatgtagttcgccaggaaatcttgtcggtcaaaccaactggcaccacttttatatccacctcatttggactgttgttttcttagacaatttaatctcttgattaatgagatattttttacttcaaaatccctaacttgaagttttgccttcaataataccatggtaacccatacaatttgcagattgaaccaggaatttttctcacatctcaaatttg

SEQ ID NO: 85486 - DNA, 783 bp, Citrus clementina
  Intron number 2 from transcript clementine0.9_013406m (loc us clementine0.9_013406m.g) derived from phytozome v7.0 (c hr-ID scaffold_113; pos 424909 to 425691)
agcagagaacaagagaagctttgagaaaccccaaggtgaagtcatgtaagattcagcagttttgcaaattctcatacttttttagtggaagaatggttgatatagtaattaaaagagttcgtacttgtggcagaatcatggttatttttgcatcgtccttattgttgtaattggcatccatgtctagaaattccagtagaaattttactgtgtaaaatggctgacaaacaatagcaaaccttttttggtggccatttcaattttgtgtattctttgttgttgtctttactcaattgcggatactgaacttttgacttgtgggacaataaaaaactaatcatcaataacaatctattaacatgtaaaagaaaattttgttctaagaacatttcaaataatcagtttcattttgccaatcataagtaccattttattcaagtacatccggaccctggagatcacataacctaccagaaattagaacttaaaactttatacaaaatttctaaactttacctttttttgagttgtacattttaagtttgtggtatgcccgattgatccccattactaattcccaaatgaagcaattagaaagtcaagcttaagatcactatatctctgatagacctaattccccagcttaatattcaagtgcatagtggatcctcccttgttatttatcttctcaatggagatttcactgtcttttatctttacttttctctctgaaattcttgttttcacctttttcgttttaacaaatttcaggtccggaagaag

SEQ ID NO: 85487 - DNA, 646 bp, Citrus clementina; identical to SEQ ID NO: 83537
  Intron number 1 from transcript clementine0.9_027694m (loc us clementine0.9_027694m.g) derived from phytozome v7.0 (c hr-ID scaffold_3; pos 1495454 to 1496099 reverse strand)

SEQ ID NO: 85488 - DNA, 324 bp, Citrus clementina
  Intron number 4 from transcript clementine0.9_025741m (loc us clementine0.9_025741m.g) derived from phytozome v7.0 (c hr-ID scaffold_31; pos 2605977 to 2606300)
aggtggcacacttaaaccatgtaagatgctttgttggaaacaaaatttttaattttattatttcttatcacctacatactgttgatgaaagtttactcattgagttttttttttcttaatttttctttcatgctctaattaactttattatttgaaatatcaaataattagatttataagtataacaacaagttttttttttttcaatttatgccttaatacaaattaattccatgaccaatggattaaatttcaactatttaattaataaaattcttttttttcttccttcatttactaacaaagctttatgtataggaccaa

SEQ ID NO: 85489 - DNA, 852 bp, Citrus clementina
  Intron number 1 from transcript clementine0.9_000291m (loc us clementine0.9_000291m.g) derived from phytozome v7.0 (c hr-ID scaffold_3; pos 4769978 to 4770829 reverse strand)
agcttctgtttctggttcgggcttcattcatttaggtaaggtaattcgtaaatttgagagatgcctgcacttttggcttttggcttccacttttccaagctggtattcagtcaaaagtttttctcttttgctccccttttctgcgaggcttgttttatgtcgtcttttgtttttgctgatttgatttgcatgattcaacttttctcttttcaaaaaaaaggaaataaaagggcagcatgattgaactcgtgatctctgattttcttttcaatatgcacatggtcaggattttttatttacatattattattattattattatttgcttctatattttgaggaggattcctgcttctttgaagttgaacaatcttttattatttaaacaaataaaaggaaaaaaaaactagtaataatatcagtgaaaagtttggcagtagcttttctggctgcactttcacgtgattttaaacaagaccgtaaaaatgccaaagggtcaaggtcaatagtcaaaactcagaaggtactccggcatcccagtgcaagttagttgcagctggcagtgcagaaggagatttgatatctcctttgctctcgccattactttgcttatgatattttcttttttttaaaaaaaaaatcattatcactttcctttttattataattattagttgttcgaatttaatgctcgtaacttgcaatcatattggcgcactgtgcttttctggttcttgattgattttcgtttcctttctgctagaatcttttgcttgtttctctaaaagctctttttcttttgctaatatattttcagggagtgagatatatatataagcacatagaaggatt

SEQ ID NO: 85490 - DNA, 308 bp, Citrus clementina; identical to SEQ ID NO: 79696
  Intron number 2 from transcript clementine0.9_025638m (loc us clementine0.9_021488m.g) derived from phytozome v7.0 (c hr-ID scaffold_58; pos 1374922 to 1375229 reverse strand)

SEQ ID NO: 85491 - DNA, 834 bp, Citrus clementina
  Intron number 1 from transcript clementine0.9_026427m (loc us clementine0.9_026427m.g) derived from phytozome v7.0 (c hr-ID scaffold_7; pos 4906925 to 4907758)
gcatctcgctctccattagcaggtctgtttacagaactcttttttttctctctctctctctctttgggtcttctttgaaatgataattttatcttgtttcttgttctacgttgtgtcgcttgatctcatcatcattgaatccttagctgtttatatttgtttcttgatcaatctaaacatttctagtgacattttagaagagatcaagtcatctcccaaatgtttttctttttttttttttccttcttaacttaacaaacaaacgaattcgaaaaaaaaaaaacaaacgtagcctttctgtaaactcgccatgtgattttgatcgactttcgtatgtgaaaaataaatttttttaaaatgatcggattcatcgagggttagaacataaaaatcatgaatacgaggggccaaaaagtaaactaacattgggacggtcttaattgggctaaatattattttgcacccttatctttccttaatattatacaggaccttgtatatttgttcctccgcaaatactttggaaaggcgaaatcgcttaattttgttttaaacgcattcttgagacgcattaattcaataacctaaagcatttgcagattgattattagcgcttttagtaacacctcggtttgcacaagctagctagatcatatgattctgtttcaccatgtgaattataaaaactctttaaagtaatctttttctttgttatataattctcatttctttcacttatgattaatgatttctttctttctttctttctttctttctttctttttttcttttaataagaataattaataatttcttaaatggacaggagaggat

SEQ ID NO: 85492 - DNA, 786 bp, Citrus clementina
  Intron number 7 from transcript clementine0.9_025755m (loc us clementine0.9_025751m.g) derived from phytozome v7.0 (c hr-ID scaffold_58; pos 538600 to 539385)
ggtatgcatctgttagctgactcctgaaaatgtttttttgcttattcacatgggtcatttgacagtaataggcaattctttgaacttttcgtgtgtccacaagtgtttgttaatagaaaatgtcttgttgattatttatgtgatatatagttaccgtgctttaagtttgcatctccttgctttttccttttgctaatgcatgacattggaccgtgtgaaaactaagtcttaagcacctgctaaaagttgactgatagtggtttgatattgatttatacttgctgtatccttaattaaattctccttatatccaggcttggatctgcctacttataatttatacggctgactgacattagaagttagttaaattacattaaagtttattatagcagtacagaggcctaagttgaattcctgtctcaaaattcttgatttctcttagtcctgcagtgcaaaatatttgtatattgtgggcctgtcgagggaatctgggttatcaaaaaatatgaaaaaaaaaattataatctattcattagatgactctcattggcaatttcacttgttcttgtgcttcatttatgcaaagttacactatttcttcatgtttccaactttgtgacaaacacatcattcctattattgtgacgcataacaagatcacaaacagaattttcatttcttacggatttttaatctgaagttatattttctttctttctccatcatcttacctgatgatactctttagtttaatctgtttatattaatctcacaggccacagc

SEQ ID NO: 85493 - DNA, 1057 bp, Citrus clementina
  Intron number 2 from transcript clementine0.9_026720m (loc us clementine0.9_026677m.g) derived from phytozome v7.0 (c hr-ID scaffold_3; pos 8350246 to 8351302 reverse strand)
tccacaagaagcactattgttgcagcaggtactttactttgcatgttcttgtcatgctgggatgaggctactcatgtcaaatgtcttttacgagtggatgccgagcttttgcttgatcataaagttgtttaactttcaaaacaaaatttgttcaatgggtgaagggagtccaaagcacttttcttttggctacatagtcataatgttgatttatttatttatttttgaattggtgtgtgtgattaaatatgcaatgggattgaacctttgactctgctaatgttactacttttatgaaacagcgatcagtattgttaaataggccataggcattctgaaattcattggttacttaaatttctcaactattagaatgaggctcaagtttagattctcttatataaataataattgattatttctgaataagaaaatggtggatgtaaaagtttgttagagatttagagtttacttgtgacaaatgttacatgcagtgaacactaatgggtggattcaatgacattggccttggtttccaaccaaaagattggatattcaaatccttgaggttgacctacttttgatattatatctgatatttttttgtaggatctgaagcattcccagttccaaacccagtgcaggcattgggaagggaattttggatgaaaaaaaaatgttaaatgcagtaaattgtggactctttcattagaaagagtattttaagtgattttaaccatattgatagaaaggctagtgaatttggagaaggtctggtattcttttatcccatttcaataaataaagcaaccagactttagttttgtttttacaataatttcaaagcctatagatctagatctagcaatagttgatattattaatttggcttttagagatttgcttgtgttctccaaaacctttagtcggaagttaatgcagtcttccgagttttataatacctatgatcaagatttgatttattcatgtgcttaatgaatttgtaaaattttgttttttaggacataaaagaggcaaaggagtacctggagcgaaa

SEQ ID NO: 85494 - DNA, 718 bp, Citrus clementina
  Intron number 3 from transcript clementine0.9_002896m (loc us clementine0.9_002896m.g) derived from phytozome v7.0 (c hr-ID scaffold_10; pos 1004588 to 1005305 reverse strand)
gcttgagctttccacggccaaggagcatcacaagtgtaagatccttgtcttttccctggttgttttgattacttgtagttcgctgagacaagtgaaacgaatagacaaatcaatgtttgagagcataaggcttgctgcaacatagtcttctgaggtgtttttccccgctgtattatttctaacagaatctcgtttagttggaacttctggcagagagttatttttgtttcctagtgctgcctaatttacagacttttatgtttttagctgctatcaaagttttccaaacttactgacttcattttgtagcttcctcaaccacccacagaaaagagtacatatatatacttgaaagattacaggtgttcgtgggagttactatctagtttgcagttttatgagtttagtgggtgggtgtcagttttatcacctccgtactggtttctcaaattttttgcaatccttaaaaagcctatgataaaactttattattcattttcgccatgttctttcccttcatcaattccctaaaattgcatatttcatccactgaagggtttatttgaggagtatatgacattctacagagccaaaaccagttatcgcaaatgataagctaaatttgtttctataactgctgcagtcattgtgtattaaagtatgcttaagatgggaaggataatgtataaaatttctgaaaagttcaataattttgcag

SEQ ID NO: 85495 - DNA, 552 bp, Citrus clementina; identical to SEQ ID NO: 77819
  Intron number 3 from transcript clementine0.9_004707m (loc us clementine0.9_004707m.g) derived from phytozome v7.0 (c hr-ID scaffold_3; pos 5875217 to 5875768)

SEQ ID NO: 85496 - DNA, 977 bp, Citrus clementina
  Intron number 2 from transcript clementine0.9_021143m (loc us clementine0.9_021128m.g) derived from phytozome v7.0 (c hr-ID scaffold_3; pos 738416 to 739392 reverse strand)
atcctcactcgcgattactccaaaatctgtaaactgtaagcgcgccttcatcaatatctctttcgttcgttttattaatttcatcttgttttcgtgtcttatatgcattcagtcttattagtgattaaggtcgagtttgctaaaattttgcttcgagcttcagttattagggttttaccgatgcctgccttggcccagtttttaggattatatatgcaaaagatgtgggaaattattgaaatctgcatttttgataattatatagtcaatttcatcaaagaatcatatcgtggataaataactcagaggcacattatctcaggcatatgattcttaatttgtgaggtagttttagattcaatatattgagctatgagatggactgcattctataaattcaaatattataggctgtgagtttagagggtatggcttctggcagatgttggatgtctgttccacgtttgaagtaatccagcagtttgatgacctggtgaagaattgatgtgttcactttgacttgtgttttggcttatagactaattgcaatgtggagtttccataattccttggcttgtattatgagtagactattggataccgatcctaggcttttaggtatgagaggaaaactgcaattgaacaacattttgattttctaggaagccaaagcacaagtcaaagcagacaaatcaattcttccctaggtcatcaaactgctagttgcttcaaaactcatatgggagctaaaagaaggaaatttatttatttcatgtattcaacctttattttgcttataatgtttggctctcgtgctgcactgtgtttgttgacttagggttggcatcccttattcttttgtttctcatgttgttggaaactttacggttggcgagaggttgttggcaaaacattttcatctaagtctgaataatgggttctttcttttatattttaacctcttgcagggcagacaa

SEQ ID NO: 85497 - DNA, 693 bp, Citrus clementina; identical to SEQ ID NO: 82091
  Intron number 1 from transcript clementine0.9_028971m (loc us clementine0.9_028971m.g) derived from phytozome v7.0 (c hr-ID scaffold_3; pos 3771790 to 3772482 reverse strand)

SEQ ID NO: 85498 - DNA, 591 bp, Citrus clementina
  Intron number 4 from transcript clementine0.9_013461m (loc us clementine0.9_013461m.g) derived from phytozome v7.0 (c hr-ID scaffold_2; pos 6154660 to 6155250 reverse strand)
agctgctatcgacaacttttatattcagtgttcttgtaagatatactgttacatcttttgctacttgaatttatttttattttcttgcatatggttctgttttgcagtggttgaatgaacgaatctacttcttgcactttaaattaacaaacgtctcttctggttactttagaggcttgtagaaaaatggtttccacaaaaagtatttgaaataaaattttcacatccgtgctcatctgctttttagttgatcacagagtcaaacctttttgactaaccagattatctaatgcaatatagaactgtcactttctgctttcaaattacagggtttttcgttttttcagtaatatttgttttggtggtaaattgatttccatttcatacttcagtacaagctcaatattgtgggcacaaaattaagttctgattgcaattgtattggtcatatagctgagcaccgtactaatatcatcaatcacctccttagttgttagcgcccaatttattattggcttattaactcaaattattttctgatttgctcttccattttcccttctgcttcatgccaggtaacatcggcactct

SEQ ID NO: 85499 - DNA, 734 bp, Citrus clementina
  Intron number 1 from transcript clementine0.9_012762m (loc us clementine0.9_012762m.g) derived from phytozome v7.0 (c hr-ID scaffold_4; pos 6070575 to 6071308)
caggggaagcaggtgccatttcaatgaaaccctcagttacataatcttcgaagtttcaagaatttttttcttatttaattatagttactactattattatttttattattttggcactggatttttattctcttcatatgtggtgttcagttatggcttcagtgatggacatataattttctattttttataattactttggtagttggttacttggttctatatgtgtattgtgtggtattagttataaattatccaattaaaggtttttgtgaagcaaatggtatgttggtgcagtcttttctgggatcttgtttccctgttattttattttattttctaatttcccttgagtataaatgtataatttacctattacctagttttcgttttgaatttctaccattaagaaaaatttctgtgttttcaaatatgccagcacggctgctccttacctagatcagaaatcccattacaccacattgcatgttgaacattacatggaagattttttaacttttgttagagacatttattcagaaattgtttgttcttttaatgtgaatgacaactttgaaatttcttcctgtatgtaaatcaagacatggaaaaagtaacattcagttgctagttttctttgttgtccatgacttgattttgttcttgaactttctttatcctcattgtctgaattatcaggacgagcactggaagaaatcagaggtgcgctctat

SEQ ID NO: 85500 - DNA, 491 bp, Citrus clementina; identical to SEQ ID NO: 82678
  Intron number 2 from transcript clementine0.9_005570m (loc us clementine0.9_005570m.g) derived from phytozome v7.0 (c hr-ID scaffold_3; pos 8294953 to 8295443 reverse strand)

SEQ ID NO: 85501 - DNA, 547 bp, Citrus clementina; identical to SEQ ID NO: 83728
  Intron number 1 from transcript clementine0.9_012618m (loc us clementine0.9_007193m.g) derived from phytozome v7.0 (c hr-ID scaffold_24; pos 3251528 to 3252074)

SEQ ID NO: 85502 - DNA, 618 bp, Citrus clementina
  Intron number 1 from transcript clementine0.9_032140m (loc us clementine0.9_032140m.g) derived from phytozome v7.0 (c hr-ID scaffold_24; pos 2556780 to 2557397 reverse strand)
agatcgaacgagagcatatcaaagccatactcttggtaagcacatcaaatcgcattcttcaagtaaattaaatttgccccgctatgtataaaatctggctacgcctaggacactggattttcgtacaattaagtaattctttaatcccataaccaacataagtttcaagagaaccgatgatttctagactcttgctgcacatattttgaataatttttccccctgcttgaggggacccattataagctcttagattaagtctaaaacgaaaaggtatttttattttagctacaaaattatccgattcacgtttctttcgaaggagaattaattgtcaaattttgggtcatctatttttttatcagtttcttggatgttctacgtactttattaacaaaccgatatttcctcttcatatgagataatagaaccagaatccatcttcgtgttggctttcacatgagtaaatacagacatgtgattcatacataatatcagaattgatcttgaccagtaaacatgaatagcaaaatacatatgacagaagatcatctgcatgagtcatttttaaccctaaacatctgcttcatttatttatggtttcctcaatttcaggac

SEQ ID NO: 85503 - DNA, 999 bp, Citrus clementina
  Intron number 2 from transcript clementine0.9_010381m (loc us clementine0.9_010028m.g) derived from phytozome v7.0 (c hr-ID scaffold_7; pos 6419449 to 6420447 reverse strand)
aggtaatttccattttttaaaaatttatgtttctgttaattttcctctaaagtgtgagcattagtttattattattattactaataagatgatttgcaaaattgtgggagttgatatgaccttatcccctttttctttccccttctgatgagcttgcaaagctgttttggattcctttcccttaatcatggcctaccccccaaccccaagaacagattccagattcaaagcaaactctagcactgctgtgctgtctctcaacctttctctctctttttttttttttttttgggatctattcttaatttcttctttcaatttgattctatctacaatttttcattggatcaatggaatcgccctgatgggattctttccaaccattggatcattggacttgttcacaaaagtctgctgagtgaacaataaataattcacattgttggttcacgtgacatggaccagtgatttctcttgaatggattctatgcagaaattaaatccaaatacccaacggccaatgattctctgacacccacccaatattaaaaaccaaagaaattggttctggttggcgttggttggaataacgccggtgattactgaattgaatatgaaccccacctccaattatctttcgttgtgggatccactgtgcattctttggtttatgcatcgagtcagacaagaaatttatgttgcatcaattctgactcacaattttatttttatttttatcaattctggcgaacgcttgctttgtgtgggtggggaatggaaatggatggtgatctgtaatgaatttctgagtaggttttgatcacctgagccgtcagtttgcattgcgtgtatggcactttgtttgactaattttagccaataattaaaatgacctttatgtgtgtatgacaaacaattagtggtatgcaatgaaattgatattttttcgatttgctgccaaaaaaattgcaggtcttggctagcaaaagcaagatttac

SEQ ID NO: 85504 - DNA, 631 bp, Citrus clementina
  Intron number 1 from transcript clementine0.9_010381m (loc us clementine0.9_010028m.g) derived from phytozome v7.0 (c hr-ID scaffold_7; pos 6420474 to 6421104 reverse strand)
agaacaggatcatccacctcaagatcactgatcaggtttttccttcctttatccttttgttttattgttttccttttttttcttcttttttttttttcaaaaaaaaacaacaacaacaacgacaacaattcttttaattctcttctcattctcatgggttctttctctgggttgtttattcatatcatatggcttatgcctgcctgctgcctgcaaataatgataataatatcaatagattctgctttcttcttcatctgggtatcgttttattcgctattcacatgggttttttttttttttttttcaagtcaactttggctgcaacctaacttggttgttactgaatcttgattcattcatgattctgtaatgttttcggttctgttttgcctgcaaagttaagtatttgattttttttcaacaacgggaggtggacgtgcagtggattgaatgtcaaaatggctaatgattttgctttgtctcttcttaaatcaactttcaaggaggccaacgttctgactccattcttattcgtccattatcttctcatctcttacacttttctctgcttcattatttgttaattttgccagattaagagagagatcgccaccttgaagcttctcaa

SEQ ID NO: 85505 - DNA, 540 bp, Citrus clementina
  Intron number 1 from transcript clementine0.9_012018m (loc us clementine0.9_008023m.g) derived from phytozome v7.0 (c hr-ID scaffold_4; pos 6686556 to 6687095 reverse strand)
atgtgagttgttcccccccccccccccccccccccccccaaaaaaaaaaaacaatatttcttttttttccctcctttttgctgtggatagcattagaagtttgcgttttcttattaacatttttgcagtactttctttctttaattttgattgctgatgttctatttgaggtttttgaatgtcccctttgcttaggttgctactaaaattgacaattaaccacaaaggtttgaactttctgtttgatgtcgtttctctgtcaatagcttgcttcaattgagttaatttggttatatgatgctcagttaagagcaaattagcctttcattatttatttttattattttaaaattaaccagtggttgctctattattggaaaagtgaattgctcttcttaccgttgtgttacattaaggttcagtagtttagctttggattcaattttcccaatggctagtcatgatgctgtctctattaattttgaacttaagcttcgtttgatattgtggtattttggttttaagcagaaccactgtgga

SEQ ID NO: 85506 - DNA, 851 bp, Citrus clementina
  Intron number 1 from transcript clementine0.9_021352m (loc us clementine0.9_021352m.g) derived from phytozome v7.0 (c hr-ID scaffold_3; pos 742168 to 743018)
tccttatatctctgcttggcattctcagttaccaggtcatttctctattctcttctatttctccactaaacaattttgttttcgcatatatattacaaggacaatactagctcaagctcctacttctagaactcaagttacaaaaacctagatgcttgcaccaactaattttaccaaaatggccatcgatcgtcaccaactgctaatttaccgctcttctttctttctttctttctccagaatatcagccactaattttctgtaattcgaactttatatttgtcgatgatttgctaccgcgtgtacataaccagcatcgtcgttccggcatgcaatagaaactttgttgttttactgaagtcaatttcctagaatttaataagctttgtaaattccttaaattagagagaatttgttgaaatatgcaatttaatttgtacaagctggttttcaaaaatgaaaaataaatataaatatgaattcggtaatctctgacgattttttatctttgtttttatttgtttcctttatacctggcctgctgctaatcaccagcatcgtgttctggcgtgcggcagatactttgttgttttactgaattttttttaaaatttaataagactttgtaaattcattaaattcgagggacttgattgaaatatgccatatagtttatataatcttttctttcttaatttttattttattttattcggtaatctatgataatatatatgggagccgtttaatgtattaatttaattttgacctagtacaaaccagaaggcatatttattcagagcagttattaatggcagtgatctcacattctgatggtttagttgcagttg

SEQ ID NO: 85507 - DNA, 232 bp, Citrus clementina; identical to SEQ ID NO: 82666
  Intron number 2 from transcript clementine0.9_015903m (loc us clementine0.9_013355m.g) derived from phytozome v7.0 (c hr-ID scaffold_3; pos 1190177 to 1190408)

SEQ ID NO: 85508 - DNA, 920 bp, Citrus clementina
  Intron number 1 from transcript clementine0.9_005606m (loc us clementine0.9_002346m.g) derived from phytozome v7.0 (c hr-ID scaffold_10; pos 1018398 to 1019317 reverse strand)
tggagatagctggtgcatttggtgaccactctaaggtcattcactttttcaattatcagttctttgtttaatgatttaatttcactgaaggcttcttgtttgttagagttgacattttctgccaaaaaaaaattatttttcattattcttgattttgtgtcttataagtgttgttatttaattctgatggattttctgaaaccggagccaattttcatctgggattttggaactgaacttttagttctttaaagaagaacacgagttattagaatgtaaggttgaattggactccaacaatactggacagaaagtgcaccgatttgaccagcatcaccctgctttctgtttttttggaagttgactattttccttaagatgtttatatttgtgcatatttgaggtttgagagttcccaaaacatgtgagagtggttggtacttggtagtgcgaataagagtgctcaatccagcttggtatggcagaacttcttgagttctcaactttgtgtaaagggcatcaaattttagtaaatgcttgattgttttataactaaaacagcagcagtggctttgttatgaagcaccattagcaatccggatgtagagagcaaacactgtgtagagagcaaacactgcgttccaatcacaaaaattagaattttagagttgtgtggattgatgcatggatgaagtagtttatgacatcttcacttaatttccacccatgccataattgacaatctctgtcaagaatacacaacatacaggctgttaaaaagatggaaagcttctcgtgtattcaatgctcctatgcgcgtgcatctgttgttttgctaagcccaataatgaaagaatttacatgtcagataaatgtacaatctcagctcttactaaactactttactttaatgagtcagg

SEQ ID NO: 85509 - DNA, 496 bp, Citrus clementina
  Intron number 1 from transcript clementine0.9_025291m (loc us clementine0.9_025291m.g) derived from phytozome v7.0 (c hr-ID scaffold_3; pos 8114815 to 8115310)
gcaaacagtttaaggccggcgacacactcagtaccataccatcacccattataccttttttttttttttcagttattatcttcctcctctttattttagttactatactattttttaaacaataatttaatgggtgacattatgttgtatgacattgacacgtaatgttattgtttaattatttcataacttcaacaccatttatgaaagaaataatataaaactaattaaaattttagccctttttaatgagatttttatgttcttgtcccctttgatttgaagttctttttcttttgctcaatcatgtttgtaatttcttgagtatgcccccttggtccattgaaccaaactcctagatccgccactgaatttatagttcatagaaacaaaccaagagtgcaattgcctgctgcaatttttttttttttttggggtcattattccttcacagtaatattgtgatttaattactatctgcatgcagttttcaact

SEQ ID NO: 85510 - DNA, 600 bp, Citrus clementina
  Intron number 4 from transcript clementine0.9_013945m (loc us clementine0.9_013945m.g) derived from phytozome v7.0 (c hr-ID scaffold_7; pos 3039836 to 3040435)
ataaggaataccagcagaacaaacctacagatattgtaagtgttcactctttaatattgcttttgtgcaatgcatcagtttattcatacctaatcaattccaatttcacaatgcatgtatgtatatgtgaagaataggattgtagctcagggaagagactgcgagtttagcatttggaaatgaccttattgactctattttaacttattctattgttatattctggttggaggtgatgaggtttgatttgtcttactgatccaaaacaattattacatattcactagtttgtacaaccatagaggatacttgtaaccaatttcatttgttccggtagctaccattctaattttattattgttgggtgctgcatctaattacagtcttagctgtggtactcaaattttttgaatcacttttctcttgtttttgttctggaaatgaagggtatcattgtttttgttgattaaggattacagctgtaagtaatttaaaacacttcagcaatgttcatgggttctgattgaagatgactgttgttttaccgatctacatgtatttgcaggtttgtaaatactttttagaagctgtggagaagaa

SEQ ID NO: 85511 - DNA, 690 bp, Citrus clementina
  Intron number 2 from transcript clementine0.9_004806m (loc us clementine0.9_004806m.g) derived from phytozome v7.0 (c hr-ID scaffold_7; pos 5235688 to 5236377 reverse strand)
aagaagaagtcctacttcaaaaaccgaaggcgggggtaggtcactttctgcactgcctctgtttttagtaggtggtcacagtctgaatgcattttgttttgaattaacttcttgaagttgattagctttttcgtaggtgtatatggtggtttgaaattttggacatagagttgaatgtatttttagaaatactagggattggtgacactaataccagctaatttcaactgaaattttggacatagagttgactgtatttttagaaagactggggattggtgtgaataatacctgttaatttcaattcagaatttatgattctgtgttaccaaacttagtactaggaatgttctatactaagcatgggtaagtgataaaggaatcttgatattttatttacttcaatgttgtgttgaaatactgttgtcaactgttcccttgatatgattgcactaaaagaagctgcatgtttgtatggcttccaatttctactaaaagaagctgcatgtttgtatggcttccaatttcttagtaattcctttttattctatttaccttggattatctagggagcctgaattggcaaactttgttttatttgattttgaagattactagagtgatgtttttttaatgttcaccataatgattgcagcttctgaagcccgctttcacaattatacgggatag

SEQ ID NO: 85512 - DNA, 576 bp, Citrus clementina
  Intron number 3 from transcript clementine0.9_019334m (loc us clementine0.9_019334m.g) derived from phytozome v7.0 (c hr-ID scaffold_4; pos 1908652 to 1909227 reverse strand)
acattgcggaaggtgattaaatctctctcactcccactacattcccttcttccctctttttttaacatggttaggaactgctccactcaaggaaatatctggtttcataatggcattatgagaccctaatcattttcattgaaagtgatgtgagatcgttagagtgcatgccactttagaacttttggtagctcctattactacaactcatggttttctgacttattgtacttagaattttaaataggagaatttgaggccttgtagaaagtacatgttacaccgttaatatcctagaagcttttgatttggttttggttgtagtgcaaatggtttggatttatgatttagaaatacttttgttctaatttaacctgtttactggtttagctatactaacccaatttttgggtgtaatgagtacttgttaaaatccatgatttgcatcggtgatgacgcagactttggttattgtgtgtgttgttctttaattttttttctcaacttgagttttgagttggtttctgacattcttatttgcataaatagctattgttggggacattaccccttcag

SEQ ID NO: 85513 - DNA, 815 bp, Citrus clementina
  Intron number 1 from transcript clementine0.9_029021m (loc us clementine0.9_029021m.g) derived from phytozome v7.0 (c hr-ID scaffold_3; pos 2107351 to 2108165)
cgatcaaagaggctcagctccaactattactatcagtacgatgtacaggacaccagctctttagctgttaccagaggtaattcatcgtcttctataatgagcacgtttagtgaatttgtgggcagcaagttgtcgaagaggaaagacaagcaaaagctgtcgaaaaatgtactctccagcttgtgttatagatttgctttcccgaaaaaataggagcccgagaaatgaaacagcaggtaattgctttaacttacttatatattctcaaatcagtgtgtcatacctctatatttggtgaacatgatcataattctaatgttatcgttaaatgtgatcttgatcggtgctcggtctgaagtatattttgattaatgatgatttgctttggattgaccttttcctattcttgtgatgtgcaggcatgccattacggcacagcggcctggcttcagtggaaagagccaactcatctgggcaagcaagtaaatcatatgcgaattttttttttttgctaattattaatcactttcagtgacttttagaaattaaattataaacaatttgtaagaggaatcaagactttcaaagttgttaaatcgaattgccgagtggagtagctgttttacattatgagaaaataatgtcgctcatgatgagtcaaatataaatattatcaatctggacatattcatctagatttcttttcctttctcttttttattgttcccgaaaaatttcaccatttcgctgctggcgaacattgaggcaaaaactgttaaatactcgctcagtgttaacgcggctcgcaataattc

SEQ ID NO: 85514 - DNA, 609 bp, Citrus clementina; identical to SEQ ID NO: 77886
  Intron number 1 from transcript clementine0.9_024916m (loc us clementine0.9_024916m.g) derived from phytozome v7.0 (c hr-ID scaffold_3; pos 6156662 to 6157270)

SEQ ID NO: 85515 - DNA, 328 bp, Citrus clementina
  Intron number 2 from transcript clementine0.9_011796m (loc us clementine0.9_011796m.g) derived from phytozome v7.0 (c hr-ID scaffold_10; pos 1279501 to 1279828 reverse strand)
atacccaggtacattcatgttattaaataatttttgtttaggaaaaaaacagttgttttgaccataccaatgacactgacaggaaggtaattatttgcttaatggggaacatcaaagtttgggtttatataatcatgggtggggtcacataaccaaccagggtcttcatgaatgattttaacccgtgccgctatcaaattatgattttttgttcttttttcttaaattattttttcatggattagatttttgggaaatttgtttcttcctacttttcgtaacttgttccttcttcttgtgttctgttgttatcatcaggctttcctga

SEQ ID NO: 85516 - DNA, 907 bp, Citrus clementina; identical to SEQ ID NO: 80238
  Intron number 3 from transcript clementine0.9_021643m (loc us clementine0.9_021643m.g) derived from phytozome v7.0 (c hr-ID scaffold_31; pos 290012 to 290918 reverse strand)

SEQ ID NO: 85517 - DNA, 892 bp, Citrus clementina
  Intron number 4 from transcript clementine0.9_020948m (loc us clementine0.9_016163m.g) derived from phytozome v7.0 (c hr-ID scaffold_10; pos 3450478 to 3451369)
ttcctagagattggtaagtttatgactttaaatatatcacatagatttcaatcctcgtgttcactttgcatgcttaacgaccgtttttggattttacagctaaatggttatttctgatttgcaaacatggtattggtaatattatcatgggattagaaattcacatcttagttgaagttgtgtcttagaagctgagtttgcatcaacttcttttttcttgaattattgttcatcaaaatagcttcatttcagcagcaatactgaagttgactttatttctcaagactgacaaatatttgatcattctactattactgttatggcaacatccgtgcgaatatatagttttttttttcttaagaattagtaattgaaagtgaaaaggggggaccctttgtcggctcatagtgacaaatcatttcatcccttccagtttgcttatggttatatcaggacacgggtcctgatattcagttttgctcatcttgaaatatcaaatatgaccataggcaaatatagaggaaagaggagatttgagtttgggaagcagctactgttaatcctttgataagaccattctgattatgattcttggagagaaataaagaagatataagataacatggcatagccattctgttcaattatctcattatgatgttgcttccactgctttgaattgacttgagcttgttgggttaattaatgttgcctgtaaaaataactttcatacctttttatcttttaaattggtctctggtagtgcatcatgttgagtctccttaaagtctttattgtatggcaatatgtatttgaaacttctctttatacttgagcgaatgttctgcttgcttcaggtagtacagaagaatactggaagagacaggacgct

SEQ ID NO: 85518 - DNA, 454 bp, Citrus clementina
  Intron number 1 from transcript clementine0.9_024687m (loc us clementine0.9_022253m.g) derived from phytozome v7.0 (c hr-ID scaffold_3; pos 1635966 to 1636419 reverse strand)
tcttcttcttcttctctctctgtgttccccaagaggtgaagcttttttcagcttatcgtatcttcaatggaatctctctagattaattatttacttattaattaatttcacgtcatagtctctccaattttgtctgattagagcctagggtttatttttattgttgcatgaattgtggttctctcgctcttgttttggcgttgctggactatatgatgaattctgttttgttgtttttttattttaattttaatttttgtttattatttatggtttagctgtggattccattaattttgctgtttgaattgttcccactcatgttctcgatcagtacgcgtaaagtttagcatgtctagggtataaattgagtgactttgctttgttcatgtttggcaaagaatgattttttttttttttttttttgccccttgatgtcaaataacaggaaata

SEQ ID NO: 85519 - DNA, 697 bp, Citrus clementina
  Intron number 2 from transcript clementine0.9_013659m (loc us clementine0.9_013659m.g) derived from phytozome v7.0 (c hr-ID scaffold_3; pos 692095 to 692791 reverse strand)
tctcgcatattgattttataatcgcatcggatcgggtaattctttctggcgctttctcattttctgttattttatgtacagccaagcattcctaacaacatatatagtgtgtggagctactaattagaatcctaaaacgtagcatgcagatagtatacattatagctaaatcagtttttagtgatagtttgttccagagttatgtccatggcgattttctcacaggaataaggaattaacgcgtaaaaagatgttattaatatatacggaaactgaaatttgatcattgcgttttccactttcttctccatatacagtattctcaccatcattcagaccgagcatcattattgaagttagatttcctgaacatttacttgatccttttccagtatctaccatggcagtttgatggtttttttttttttcccggttcgagtgttcgcttaagttttataatactgagtaattcagcatgtacatttaagttgtagctgcagtatatattgattttaactctatctattatttgtgtaattcattttaatttgcttccctcgttagttctgaacatgctgatttccttgatatcctttttatatttaaagcttaagttgttggttttattactctccttaataggtttttttttcccccttttttgacctttttattataggaaatagcttataaaaca

SEQ ID NO: 85520 - DNA, 743 bp, Citrus clementina
  Intron number 1 from transcript clementine0.9_013293m (loc us clementine0.9_013224m.g) derived from phytozome v7.0 (c hr-ID scaffold_7; pos 5822648 to 5823390)
ctacgtttgtgatcacttgtttccacactttcaaggtcagcgtttagtttattttcgaatattgtggcaattgggagaggaaaaaaaaatgattgcttagctatgttagtagttttgtttgtagtgatcctattttgtggtttttgattagccacgtttgtaaggttgtcaaagttttgattttgattttgatttcgatttgggtgacatgtgcgagtttggattgcgaagctcttacagttgagactccacgcactgcttatttattgcatgatcacattgcttgcttttcttaactgacgatgtcaaattttgagttctgaaaatgccatttgtaccatgaaaattctcaagaggagaaacccaatatgatgcaattgttttgatggcaaaatcaaattattggattcagagataccgttttggttccttggttaattttatgttgagataacaaggaagtacttctctagtaatttgcaaacaatgctttaaagaattgggtcagttgtaaaaactagaatttggttgaaattagcggttttgatactttgaacacctttcagtgtattggatgattttttttttttaatccttcgtttttagttgatattttgtcttgaatcttctgggtttttttatttgaactttggaggaggaactcttcttatgttggcttgcttaggctttgtgtttatgcagcaatagcagctgagacccagggagttgtaactagagaaacc

SEQ ID NO: 85521 - DNA, 701 bp, Citrus clementina
  Intron number 2 from transcript clementine0.9_025100m (loc us clementine0.9_025100m.g) derived from phytozome v7.0 (c hr-ID scaffold_3; pos 6501027 to 6501727 reverse strand)
ggccaatttccaggtcatctcgtgccggtatccaggtactcaaatatcacccttgagtaacttaaaacttcgcagcatttcttttatttattatttttttatacaactaagttttaatcattacttgcggattagtttgtgtctatgatggttatttatctagaattttgcttgctaggtcaaaagaataatggacagtagcaagtgggcacttgtaatttgatcttagttgagcatgttggtttgtgttgcaaatagaactgtcggtattttgtcttactcaatgttaaatttctaaatttattgtagacagaagtgtaaaactaacatggggatgttcgcttgtatgtatcagatttattagtggttaatgggatgcctctgtttgtgtgtgtgtttacttgatttgttatagtttttgttacctgagttactgccatttttagtatttaagttagcattttcagtattttgagttactatttctggcaagtatttggaaactaaatgtagtgagcactgtattatacagctcaccttgtgctagctgttgttatgttatataacataagttataccagttgatgtctgcttggtgaagatatttataccttttcagcatttgagtttagattttcttacagtttctgttttgtatgggattagtttcctgtgggtcgcattcaccgccacctcaagtc

SEQ ID NO: 85522 - DNA, 1023 bp, Citrus clementina
  Intron number 2 from transcript clementine0.9_000059m (loc us clementine0.9_000059m.g) derived from phytozome v7.0 (c hr-ID scaffold_2; pos 7505397 to 7506419 reverse strand)
ggagggaggtagcgtctctagacttacttgttctggtattgttcatttcctactttaattcctaattaagctattagggtgttttctgtttttagaaattggaaaagtattgcttgaagtggtgagttgctgagttaaataaggtgtctttttttcagttattattaataaaaaaaagctgttgtttttggaatattatttgaagttagataactctttctgcgtttgtgggttggattcatttatgggtgataaatgattaccgagctagaggtttctgtgagataatttgctgatattttagagaagttgttatttaactagcctacgaatggttcttgtggcaagtcagtctttttgatagtttagcggagttgacttttgcaaagcttgaatttgggttttttgttaattggggttgaattttaggttctgagaatagataggtacaggtttctgttagttatcaatgctgggatatcgctgtttaactcttaactagttttagggtacatcttaccatattctattgggttctgtcatgcaaaaaatatttatggccttgctctgtgtgctctttcattggaagcatatgcagttgtgctacttttgcattttttattttttgtggatgtagtgagttaacttttgattaaaattgtataatcaagatttctactcttgggtacttgacataggtgaggtgtgttccacaaatcagattcatctatacttattctgacttgcagacatgctgctgatttattgaaaatctaataaattttaattgtttactgacgttcggtggttgaagttatataatttttagctcataagtgtttgttttcatgggaaaagtgtatggctggaaattcatagagcaatttttgtggtttgtactaatattgtagggatggtcttcaaatttggagacttggtccttgcattatttgtgaggtctatctcttgttcttataattttctctctctggtttaccatatgtatgttgtaggcgtacaccc

SEQ ID NO: 85523 - DNA, 692 bp, Citrus clementina
  Intron number 1 from transcript clementine0.9_007373m (loc us clementine0.9_007373m.g) derived from phytozome v7.0 (c hr-ID scaffold_7; pos 3199657 to 3200348)
ttggtgtttctggtaatttttttattatctttttttcaaatttttttttatatttagatttttttaataaaaaatttatgttattgtagagaaaatgatcatcaagttatgatgcataatctggttgtagtttttgaaagtacttttttttttcttttccttaaaaaaacaaagccttttatagaaggtttctggtgactaaaacactctaaaaaaaatttttattaagaatttttggaaattgattgaatataaaaaaaaaatcaataagttcatcctttggttgagcgtaaatctggaaaataaaaaaaaaataatgcaaaggcaagtttctcccgccaaagtggagatcctagcaagcgggagatctttcaacttttcagctgtgaaattactaatatatcgggagtagtaagtcatagcaagagggtatttgtggaatttcgtgcttttgttgcggttgtttgttgctttatcgttgcggttgttggttgctttgtcggtgaagcttggtcgatcgttatgccgttactgcgacggccaataaactctccataccgtctcaatgatcttgctaacttgcgccacgaaaaagtaaaaaaaaaaaaaaccagatagaaagaatttatagtttaaatctcaggaactaatttaaaattaattttgaatttgatgcagggggagtgacggcg

SEQ ID NO: 85524 - DNA, 950 bp, Citrus clementina
  Intron number 2 from transcript clementine0.9_003622m (loc us clementine0.9_003286m.g) derived from phytozome v7.0 (c hr-ID scaffold_7; pos 3271691 to 3272640)
gaagcgcttttgctcttggacttcttgctgtaaaggttgttttagcaattattctatttgcttagttaagcttggcttggagtctcattttattgatagtgattattttactcatgcatgttattattattttgaattgttctaattttactctttctggaaatagctataataataagctgctattggtttcattttagaataattagactaaatcccacagtatgcatgctatgatagttgttttgtcgcgattactataataattggtaaggctatatatttttggtgaaactaagaaatgtaaacaattcttggaaggcaagtgaagattagatgttaagcactacaaactattataatgtcgaaagtggtgtgctttatggttgtaagtttatgttaggattgaatggctgtattgaattattttactttagattttaaaggatttataatttaaagaatttacaatgttattgaatgggactaataaaagaaatttagaaacgccacctaaagaaatgaacaggatttcttttgagattcttatgacatgcttaatttttttttctctcccttttttttcaagaaattattttatccaagattcatcaccttgttcttgaaactatgtcctaaaaagattttttatcaatgttctagcattaagaagttgcttttgaaatttcaagggaaagtagaaaggtactattttgctggcatttatttttcttgattccaataagtcttagttgtatagcattgtcaattttattgttattgtttctgttgcatgactaataacaattcttgctatacttgcaaataaaatggcattgaagcatttaaaactgtaaaatagatattctattatgtatgagtactgaacctgtgaattttttatggattttgttggtaacagccagagcatcagcaactcatagttgata

SEQ ID NO: 85525 - DNA, 573 bp, Citrus clementina
  Intron number 2 from transcript clementine0.9_012432m (loc us clementine0.9_012432m.g) derived from phytozome v7.0 (c hr-ID scaffold_3; pos 6468343 to 6468915 reverse strand)
cttggcataacagtcagtggtcagtgactgggaaggtaaagacatgttgtctctcgttatttgaccttgtgtgcagtctggtattaccagttggttgtagttatatttacctctatttcatttaattgtttatttataattcttctttcagtttaccttatgaacacggctgtggttttcttttcatgtttcgcatcactgcttaattaaaagacttgattgttgcctaattaaaagacctgattttttgttctgacaaaaatcaaatgacatctaccttcttgagtttgtggaggaggattatgtgtataactgcagcgttactaatctcttagcaagttaagagtcataaatgaaaaccagagtactttaattattattcacaaaatcttcagttttggtggtagtttttggcaatttaggtttatcgggattatgtcaatagaactacagcgttagttttgttttctttatatagtcattcaagctgatttccagagcttttcaagtttctgatgatgtatgcctttgctttcaggttgctcaagataaacagttcaccaccaaaaacga

SEQ ID NO: 85526 - DNA, 597 bp, Citrus clementina
  Intron number 1 from transcript clementine0.9_016067m (loc us clementine0.9_016053m.g) derived from phytozome v7.0 (c hr-ID scaffold_2; pos 3486544 to 3487140)
ggccacgctcgctcccttgaacaagccaagaaatcgtgagtatttttcgcctttcaatttatcattaattattgttttattaaaaaaaaatttattttattgcgtttcacttttgttcttcagttactttttattttgttcatgtgcctttttttttgatctagtgttataagaagcgaaacaaagcatctcttatagaaattaactttttcccgttttgtccttattttgatctgtgtatgtttccgtgtactgcttcttttgcgtttattttgttgaatatgttaatttttttttttttcatttgtgttcgtattttggtgattctattagttatgtgattcatttttctggtttcattcgttttgatgtgctatatcgtttcgtaaggatttgtgttacaaaaatagtgattacattggtaatgattcatgtgtgagtgaaaaattatttctgtttaggaggaatcctgttttgaattttgttcaaagtgttatttttatttgtttacattctatttgtgttcaaagtgttatttatttatttatttatttttggcattgtatttaggtttccaaacacctacctccttgtcgg

SEQ ID NO: 85527 - DNA, 671 bp, Citrus clementina
  Intron number 1 from transcript clementine0.9_009522m (loc us clementine0.9_009522m.g) derived from phytozome v7.0 (c hr-ID scaffold_3; pos 9005802 to 9006472 reverse strand)
gaagctagtatgtgatttttcggatttttgtttatgggtatgcatgctctatgaaattgtgtgatgatgttttgatgtaaagcttctgtttttagttgtctggagattctgttggacttgaattttgatgtcatttagtgttgtgcttttgggtgttgcttggtttccaaatttgtttgatattttttatgggttatttggttggctgttttgctattaccattgttgtgttaaaaaggcaatcaggacaattggaagcggtggattatctgcattatttgaaaatttttagtggttcaattttatggatattttgagctttttgtttaatacttgttgtagttaggggagaaaattttgaatttttggcttgtacgattgcttagtttattttgttttattgtatagttctgatacaaacagcacggaaacataaagcgtcctttttatcttcctccacttttgattcatagttgcctcagttaccaataatttgcttctggaaacataaatttttttataatttgttcattgttagatccatagcatcgcttttagagtgggtagggtgaacagaaaggttgaagagacttcactatatgtgtattgaacttttattttcttaatcacagaatctggaaacttctggtttttatgcttcaggaaacagt

SEQ ID NO: 85528 - DNA, 801 bp, Citrus clementina
  Intron number 1 from transcript clementine0.9_031815m (loc us clementine0.9_031815m.g) derived from phytozome v7.0 (c hr-ID scaffold_2; pos 8032382 to 8033182)
aggtggatctcaagagagatcacccaactcgaaaggtaaagaatttaacctttccaaaaatatattaatcgtttgcctccacatgttgcaaaatctatcaaaactcttatgccctttaaaaacaaatattctaagtttcaactttcttttatctcttactattttataaatagaaagttttatttgaccaattgtgagattttacagcacatctcgggtaaaatcgtagatacacaaaaacagtttttttttttttaaattaaaaaagcagagtttaatgtttcaactaataagctcattattgccatttgtattaagtaattaattattaagccttgatcttgttaaaatgaaaaaattactcttttagtattagattttcaccgacagtatttcgcttaatatcaaaactatttaatcattaccatttgtcggggacccatttccggaaaattaaaaaaaaatgtttgtattttttgtaatgatgaagaagataaggatctgtgttattatcccataatctacatatcttcatatacatctcagaaatcagttttaggtctggaataaaattcccaggattaatatttacggaggagtttatagttataaattatttgtttaatattttgcagcaataatgtaaaggtccatttagaatgttataaactcatcccggactacaatcgctaattttaatttcggattgaaaaaatttcgtatatcctagttccttgtataactagatgataaatttgtaatacagcttacgccagagcaaacctttgtcattgtcaattt

SEQ ID NO: 85529 - DNA, 762 bp, Citrus clementina; identical to SEQ ID NO: 82210
  Intron number 2 from transcript clementine0.9_013698m (loc us clementine0.9_013698m.g) derived from phytozome v7.0 (c hr-ID scaffold_3; pos 1034234 to 1034995 reverse strand)

SEQ ID NO: 85530 - DNA, 863 bp, Citrus clementina
  Intron number 1 from transcript clementine0.9_000249m (loc us clementine0.9_000249m.g) derived from phytozome v7.0 (c hr-ID scaffold_7; pos 4630586 to 4631448)
acaacattgaccctgatactgatctctcttacattgtaagagtttattttgtttttctgtttcattctagttattttttttaattaacataatctggaaatataaaatttgaattttcagaaatcatgctattgtgtaatcaaattaagacttaatggtaatcaagttaaataatgtcttctttatgcaatgtattggttcaaagctgttaacattctttagtggattagttgagtaaacttagtcatcgtaaaaacatttgttgtctggttgattatgagctttttggtttttgaaaattgagacttctgtttccttgcaactgagactataatgctgactgagactacaatcctgaattgcttgctttaggatggaaaattatttgaagaatggagtttaaaattttttgttcctgctcaatacgttatctggcattgttcttaatgtgttggaaaaaaggttggggataagggagaacacagcgcagataaatgttcctttctgaaatattgatacagaattattagctttccaatgaacttatatggtctatgggctagagtttgaaagtcaattgacctccgctgcagctagactatcatttactcttcatatgattcaattgtttaattgacatcagaaactggtttgccagaatgagttgatgaatataataactgaaagtatgtgagattccttggggtgcacataccttctacagtagtacttgataggcttgtttattacttcttgttcctcaagctggttgcatcacattttctaattgacttttattcaaatgtttctgattcaataaacaaaatggcacttgtaaatgtttcatttatgttgcttgaagg

SEQ ID NO: 85531 - DNA, 788 bp, Citrus clementina
  Intron number 2 from transcript clementine0.9_010726m (loc us clementine0.9_010180m.g) derived from phytozome v7.0 (c hr-ID scaffold_10; pos 1802130 to 1802917 reverse strand)
cctgtttgcgcttggagagaatttaacttctcgctgtaattacacttgatcattatttttgatgagttctttttttttgttttttttaaagtatcttgctaatatttgcttctgctttatgtggatgaagtagggaataccgtattttaaatgcataataatgatatctttctatttttttttattttttttatctttttcaatattttctttctttacttgagtgaattgtgaggatttttagggtctcaaaagcttctcttatgtgtagtacagtataggcagaagctttaaagaaaattgaggctcagaatattaactgtttacattaaccgttgtggatttgggaattttttttaaaaaatttttatttggaattaggttatcttcagcagtggcattaattctctgccatgtgctaaaaatataatctctctccctcttgtatatccacctcgtttccatataagaaaaaaaatatttataataatatttccttataaatcttattgctaataaaataaaacgtatcttgtcctttcccatggtttagttgctgttgagtttttttttttttaattactttattatcagtgtctttatttactgggtttcaatatatggaaaacctttattttcaagttatttgaattataaaaaaaaagatttgcttatttatttgaatttttgattaatcatttattaattttccaagagttacttattctcattttattgccctcttgcttgcagataaaatcctcagaaaaattggtgaaggttggttt

SEQ ID NO: 85532 - DNA, 516 bp, Citrus clementina
  Intron number 1 from transcript clementine0.9_010726m (loc us clementine0.9_010180m.g) derived from phytozome v7.0 (c hr-ID scaffold_10; pos 1803058 to 1803573 reverse strand)
gattagcttgggaaaaccctcaagctcactctaaggtacattttatttttttaaagaaaaaaatgatttgaatagttattgaggatctgtttgtttccttaggataaaataaaattaattttttctttccgcaaaggcatatgaattggacctttgtttataattgaaagatttgaatggcttgtttagatcaaaatttctttttttttttttaactgtatctgtattagtagtatattgtttatcccttgtgcttggaaaagacaaatgtttaatgttggttatttaatagtctgatcttgcaaaaatgaccaagaatttctctgtgttgatcatgttacttgacgtgactttagaatttgtcaaattgtatatgtcttccactttattagtattatatccttaaaaattgggggaagattttggaagtgaataaatgtggaggtgggcagagtttatgatttctttgtgtatagtgtagtatgaatgaatggctgtgtgtaggctcagtcagga

SEQ ID NO: 85533 - DNA, 390 bp, Citrus clementina; identical to SEQ ID NO: 80431
  Intron number 3 from transcript clementine0.9_016186m (loc us clementine0.9_016186m.g) derived from phytozome v7.0 (c hr-ID scaffold_7; pos 5992304 to 5992693 reverse strand)

SEQ ID NO: 85534 - DNA, 853 bp, Citrus clementina
  Intron number 1 from transcript clementine0.9_010977m (loc us clementine0.9_010977m.g) derived from phytozome v7.0 (c hr-ID scaffold_2; pos 5732271 to 5733123)
aagtagcagggcttccgcaattacactggaggaaagttatttcattattattaactcatgcatgcgttaaaacgagaacctaaaaccatctgtgcttttgatagaaaaccaattaaatatagaaatttatgttaagctttttctttaacctatgggccatcatataaaattagtgcccacattttttctccccctctctcatttttattcttttcctctcttcccatttatttaaatcaaatatatacttaactccaaactaatttctaaataatctctcaaacgtcaaattcatatatatatatatatataattaattaattaccatgcaagatgcacatctcaactcattcattctaaaaataaaatgcatctcttattttgtatgtatttattctaaagctactaattttattgataattacaatgaataaaagtgtaccaacataaaatttactaaattattgtgctaatttattctacacattttcaaacaaatggatccaactgtttttttttatttatttttcagaaactactaattatctgagtcctaaaaacgtcttcatcgctagcgctataccttgacccgatgatcctgacagattaatcaccggtagtacaatcaattaataaaattactgctttttagttcgcgaaaacagaaaaaattgaaactataatcaatcgccagcaatcaagctctgatgggacacttcctcttttccataaagtgaagtcactctcaccagccccgagcccaacatccctgaacggtagccacatattacagaaatggacttttctaacagttaacgaacaataaagtattatattagaaactcaataaata

SEQ ID NO: 85535 - DNA, 654 bp, Citrus clementina
  Intron number 1 from transcript clementine0.9_021187m (loc us clementine0.9_021112m.g) derived from phytozome v7.0 (c hr-ID scaffold_4; pos 1162230 to 1162883)
ctcgttccggtacgtcaacccaccttttttattgttattttttgtgattttttttttttaaaaatttgactctgtttgattcccgtgaaagcgcgggaagaaaataatattagacaatgcttgcaacgaaagtttgaaactttaagcaatacattatcaattttttttttaactgagaaaattaagttcaaaaggtcaattttttgttttgttttttagtcataaagtttttcttttccgggtgttattagaacttgaaattccattatattaggtattaatgtaatcagttatgaactgtgattagggagtggatagctgtgcttttttcttttcaagaggatgttttggtttcacgtttctggttttgatttatgcttttctcatgatttagctaattccccaatttaaaattgctgctattagtgcttgttacttgtaaggttccgttatatatatatataggcaatgtggtgattccgcaacagggagtgtggggtgggagacttttgaattatttaaagacaataggattttttttggatgtgcactgaattttcctttgttttgtcacgttctaaccatgtggtatttgtttctcccacatctggtaaagcaggaaaagctaaagcgaaggagatagagaactttttt

SEQ ID NO: 85536 - DNA, 415 bp, Citrus clementina
  Intron number 2 from transcript clementine0.9_021187m (loc us clementine0.9_021112m.g) derived from phytozome v7.0 (c hr-ID scaffold_4; pos 1162900 to 1163314)
gaggaataatcgagtaagcatatactgtctaaatttttcatgttgccgacagtttcattcatttattattatatcttgcttgtatgatgtgtgatttcattccacctagttttatttctttttaactctctatattctctatcttatccaccaacagggcctcttcctcaccccccccccccccccccaattactataatataagttaattatatgtttattaaaaagaaaaacagctatctttttcattggttgatatatgtggttgtcaattttgatgtggatggtagtttactgaaatcttattgatgcacaaatggatttggattgagttacatataatgaagcacgtatttttcttgtatagtttgttgatgttttattttttatttttatgtctgcttgagcagcccag

SEQ ID NO: 85537 - DNA, 692 bp, Citrus clementina
  Intron number 1 from transcript clementine0.9_021113m (loc us clementine0.9_021149m.g) derived from phytozome v7.0 (c hr-ID scaffold_4; pos 5995401 to 5996092 reverse strand)
atcaattcaaattttgttcctgctttcccaaaaaggtaacagataattctgtaatcggtttgttttcccgagaaaatccgagagaaaataattttcttttttctttgcgatttctcggcggccaattcgagttcaggttgttgctagatctattgattagttttccggatttggttaatagattttgaatcttaatctcttttaattgggacttgaactcgaattgcatgattggatcttagattgtttaattttgccatctaatgctctaaagttttgatttttattatgattgattgcagatagatggggtgcttgtgtaaagtttgtattttattttatagcgatgagttgattgttgtatgatgttttatttcatacaaaaactttgaaagttttgatattttggaaacttcttatttgtagtgttatgttttgctaattgaatatgtaaatactaaaattcattgctgtaagatttgagttgttgttgcatcattaagaaaactgttgctgttgctgttgctgttgttaatgctggtgtttgagactgtatgtcatgactgaaacatttagaattatgttttcatattatattgcttctgtgtatctttgctgctgatggaatattgcttttgattatgattgtgaatacagatattgattggcaggtataacaacttttgggagtt

SEQ ID NO: 85538 - DNA, 527 bp, Citrus clementina
  Intron number 2 from transcript clementine0.9_016782m (loc us clementine0.9_016782m.g) derived from phytozome v7.0 (c hr-ID scaffold_41; pos 1287329 to 1287855 reverse strand)
ttcacagatcccccgccaccaaaaacaacctaagggtacttactgatcttcgatcatcctcttcaattgatgcttaagggtaaaatggtcattgaacatcacggtgcaacttgttaaaaattaaataaattttaaattacctatatttttaaaaaactgtaaattacttttatatttagtgaaaagataagtaaaaaatatagtgagttaataattattttttgattttcttaataaaaatatcggtaaaaattaaagttttcaaaagtaaatggaataatttaaagataattaattaaataaaaaaatcaactcttaaaaaatattagccacctttttggaacaaaagcgtgaggcatcttatgcgaacccggtggcccacgaataagcataatgcagcacattgtatatcgaatgatgggggcattgccttgcatcattttgtaagaaatatcaacaaccctttgtgttaattgctgactaacaattgttactattttgatgatgcagcttgacgattgggtatt

SEQ ID NO: 85539 - DNA, 237 bp, Citrus clementina
  Intron number 1 from transcript clementine0.9_007806m (loc us clementine0.9_005260m.g) derived from phytozome v7.0 (c hr-ID scaffold_10; pos 3072902 to 3073138 reverse strand)
ggagagtccgaggctgctcagaagtggctcgaacggtcagttttctcttcagattaaatgcgttttgcatactatggtacttataataataataatgcacatgtgttttgactggtttgggcctctagcttttccttttggtttctgatgtcgtctcacaccatcgagtacacaggcgagtgcttagatgttagttttactatgtaatgcattatccttgactttattttaaccagg

SEQ ID NO: 85540 - DNA, 376 bp, Citrus clementina
  Intron number 4 from transcript clementine0.9_016896m (loc us clementine0.9_016885m.g) derived from phytozome v7.0 (c hr-ID scaffold_10; pos 2053208 to 2053583 reverse strand)
actgccatttcttgacggctctacggaagtatcatgtataagtttcatgttcgtcttcttacgctaattgatggtctgaaagtttatttttattaaccttgattaaaaggacatattccacatttttatgcacggaaattaatatttaaagagtcaatttctgtgtaccaaaaaataaaaaataaaataaaatttcattttgttcttttcatattctgtatccatgaagttttagaaatttcttttggctgtggaatcatcttttgaatgttttttattcacgtatttgtcagctcttctgttattgactggatttagctgttccattgctctgaatagtctttattttccccgtgtgtacagttgattttgagct

SEQ ID NO: 85541 - DNA, 132 bp, Citrus clementina
  Intron number 1 from transcript clementine0.9_016896m (loc us clementine0.9_016885m.g) derived from phytozome v7.0 (c hr-ID scaffold_10; pos 2054100 to 2054231 reverse strand)
agtatgtttgaattattgtattttatttttcttcatattgtgtagtcttgcttctcggttaatttgtttgttcaaaattttgatacattttgtttaggagcaaagtttattggccttcataacgctggaaaa

SEQ ID NO: 85542 - DNA, 553 bp, Citrus clementina; identical to SEQ ID NO: 82467
  Intron number 4 from transcript clementine0.9_004408m (loc us clementine0.9_003984m.g) derived from phytozome v7.0 (c hr-ID scaffold_3; pos 733730 to 734282 reverse strand)

SEQ ID NO: 85543 - DNA, 840 bp, Citrus clementina
  Intron number 1 from transcript clementine0.9_024554m (loc us clementine0.9_024554m.g) derived from phytozome v7.0 (c hr-ID scaffold_7; pos 1911389 to 1912228)
atcttgctgctgtacttgagtacctcgcagctgaggtagttcttttggtgttgttttatgccgcatgcaactttacattttgaactttattttgagttgatttatattaaattgcaaaaataaatttggatgcttttttatgattatttgtcttagggctctgtttggttggtgagaaatgatagtgcttggatctttgggacattttcaagcttaaatgtgaaatttctaattttttccagcattattagcgtttttgtgtgatttgtaatatatgtattttgcttcttgttagatcctttgtgttcttgcaatttggtcaattaatctgctataattttaaggaaattaaaggaaaggattagaaattgagagtctgactgtctgtgattaggaagcacaacatttacttggctgcaaatgttacacttgccgattttgcgattttatttcattagcaattatgatttcatttcattagcaattgtgatttaaacttaccttacttggcctcaaacaaacttctcatccgatagtgtttagtgcaaattaatgtcatattttgttcaaattctaaatctaagtttgtttactagaatacttcagctattctgctttcaaaattaagttgaagcaaggtaatttctgaatgtcagacagcatccaaattatatttagtaaccccagcttttgaatttgaaccaaaaaatgattaatacctgtcttttctctgacgttgcttgtctgtagatgggaagaactatggttcataattgtgtgatttatttggtaataatttgttgggctgaatctgtgtttaggttcttgagttggctggta

SEQ ID NO: 85544 - DNA, 400 bp, Citrus clementina
  Intron number 1 from transcript clementine0.9_014953m (loc us clementine0.9_014956m.g) derived from phytozome v7.0 (c hr-ID scaffold_4; pos 3423667 to 3424066)
atcatttgacatctgtgtacgtagctccttgcattttgctttttaacaaacggctctgatctcatcatccactcagatctccctctttttcttcttctgcactccccgaagtttgtttgattcatcgcctctgatctttgttctcctgcagagctgattttttttgcgtaagcattttcttttcttatttgttatttttttaaaattttatgaattctatggaaatttttaaatttatttgctgatccaaagcataactgattgttattttacgcggatgaattctaatatctaatatattatccgtcgtgatgcgaacggcgttgtattgttagttctgattattaatttttttgaactttcagatcatttgtttttcactggtaacgtctttatttca

SEQ ID NO: 85545 - DNA, 463 bp, Citrus clementina
  Intron number 1 from transcript clementine0.9_025701m (loc us clementine0.9_025701m.g) derived from phytozome v7.0 (c hr-ID scaffold_4; pos 1229490 to 1229952 reverse strand)
gagcccagtttgtcaatcattgccgcgcttcttgggtatttcttttcttcttcttttttttttttttggctttttccactcgttcctactttattagtattattccaattgatgcttgattctgtaatgagtcttatgggttaattgcatttaggctttgcaatttttataaatttatacaaatctataggagagttatgtgaattgttgaattccaagggagttatttcataaagtttggatttttgtatttgattttgaatatcaggtagggcattatcccttcatgccaatgaagcggttgatattgtccctatcttatgagataagcttcattaaattagcagtatttttcttctgatttgctaattagttgggacggagtagtgatttaatttagtttattggttgttaatttatgtggacaggtgaagcattttgatagattgtactgcaagaacaa

SEQ ID NO: 85546 - DNA, 343 bp, Citrus clementina
  Intron number 3 from transcript clementine0.9_000685m (loc us clementine0.9_000685m.g) derived from phytozome v7.0 (c hr-ID scaffold_85; pos 871804 to 872146)
tttctggattggctgtcaagtatactacttttggaagttatatttggtgtttttttactttgtttgattcatttgtgtcactttaatgcattctaaggcctttcaggggaaaaggaaaaaaaaaaaaaaatttggcatgagaacctcaaatgttgtttacttacagcactttagtggttgttttgttttgctatgtccaagtggaaaaaaataaaggagaaagaagaggaaaaagagttgctaccctgataaagctgttatcccttgtgttgtctatttttatgtcatgtcttaatgtggtattgcagtcttgctccattggtgaaaaaggtgagtgagccac

SEQ ID NO: 85547 - DNA, 370 bp, Citrus clementina; identical to SEQ ID NO: 83343
  Intron number 1 from transcript clementine0.9_003505m (loc us clementine0.9_003505m.g) derived from phytozome v7.0 (c hr-ID scaffold_4; pos 1137116 to 1137485)

SEQ ID NO: 85548 - DNA, 930 bp, Citrus clementina
  Intron number 1 from transcript clementine0.9_011474m (loc us clementine0.9_007418m.g) derived from phytozome v7.0 (c hr-ID scaffold_4; pos 5460883 to 5461812)
gcagtggaacgactgctgttacgctagttaagcaggtaatttttcttactgcatcataattgttttcttataatttcagtttttagaggtcaatattttcttatattttactgttggaaattggtaatatgtatatattttgtggagcaacttcaaatattcagtttctaattgttgtaatattttcaatagcttgtgaacatgttagtgatttgtgtcttttgggtgaacaacttagttctgcacatcttttatctaaaattgtcattgtgtgcatgtttcaaatgggtacagtccataaagctttctgcaaatgcttatcatggtttattttcttctattttctcttcactcttaatctaacatggtttatagacgtttgatacacgaagaagtgaattctatgtatcttattttaaatctggtcaaacatgtctttggtgtgcaatattattcatcgacttatttttctctttctaaactttaaatctgttgaatgacaaataaataatgtttaacatactagtctaaccagaaggatggcagcagcaaaaatagaaagctactaaaatttttcttttaggttttgggcttaggtatataattgaaattatgtgctgtagctgtttttaggtgattatgatcaaaatttcaaacaaattttcttccacaaaccctcatattttaggtagtttattggcttgatgaaaatttgctagatcaggactgggaagtacttcattatttatagcagtcacatttactggagttctgattggggtacgtaattttgataaaatgtctcttgatagttgtatagatgtcttaaactgacaatttttatttgtgattatgttaaatctggagataacatcattatccatcttatgaaaattttgactctgcagggtcctgatattgtaattggaa

SEQ ID NO: 85549 - DNA, 339 bp, Citrus clementina
  Intron number 4 from transcript clementine0.9_012250m (loc us clementine0.9_011943m.g) derived from phytozome v7.0 (c hr-ID scaffold_3; pos 1337206 to 1337544)
ggatttgtgaggcttcaaatttaaataatggttgtcatggaatttaaatttttttctccagatcattcttatgttagttgattgttgtcttctgagtaacttatgttctatctgctccacttcttctttcttctttttttttaatgcttgccaatgttttaaattgtaccacttaaatctttatggctaattttattttctttcttatgatgtttgaatatgttttttatgatagagctttggcattttttttttttttgggtgtctacgttttattgtaataagattgacatgagaggctgatttactcaaagaatttacaagagtatatacttgcag

SEQ ID NO: 85550 - DNA, 326 bp, Citrus clementina
  Intron number 4 from transcript clementine0.9_035243m (loc us clementine0.9_035243m.g) derived from phytozome v7.0 (c hr-ID scaffold_4; pos 7236505 to 7236830)
aacaagcttggcacaggtattaaagggacaataaaatatataataaaacttttgtttcatgtgatttggagttgaaaaaaagctctggagcttgactaattatagcttttgtaaggatgttcaaaactcttgatattctttatttttattagtgagttgatactgtggtgagatggttgaggacactaaatgtatcatttttcctataacattcttaagtcaaaatataggatatgatgcttctcttgttgatgattattttttttccctgccccttctttttctcttctttggattatagattgatataccttcgagtcacaggc

SEQ ID NO: 85551 - DNA, 954 bp, Citrus clementina
  Intron number 2 from transcript clementine0.9_025362m (loc us clementine0.9_025362m.g) derived from phytozome v7.0 (c hr-ID scaffold_2; pos 1229027 to 1229980 reverse strand)
acattatatctaaggtttattttatttgatttgagtccaaaaattttttccccttatagttagcagctttttgtgttgtgatattggtataggcgatggtgtgttttgagcaagagtcattgatcataaataaaagaacacactttgtaactattagatataaaaatattatgagagaagcatgatccgttgttgtttatgtttcctttctaagagagatagccgagttcaatcactgtatttgtttgtttctttagatcaaattctttattcaatgaagtgtcaaattattattattatttttttataatgtcctgagttttatgatcctttcacggcagtattgatttatattattaaacccatagaatccagagttatcttaggcatttgatgcttatggttttctgttagggttaatttgttactgatagtatttttatccttttctgtttattcttatatatgcatatatgcttatttttcaaacattcaattttaatgatggtgtttttaactgtgcaaaattgaaaactgtaaggggtgggcttacttttggagaatgctttagtaattctacccagcactaaagttacaagggtggattgattgatgaataaagattagtaccttttattgtgaagatgttgctgaacatatatccctatctcagttttcaacaaaacaagtcttgccgagctcatatgattttcatggttatgaacaatggcaaaagtcagtgatttcgaatagattgatgtcttcccattgctttgccatgtaaattatccctttgccattgttatgtttttagtgttatttgaatggtcttactcctaaggattgattggcaatgtttagaaattctaacccttttttcaattaaaatttagtggcaacaatctgaagttctacatgtgtttttgcttgtgttccagtcttttcattgcaggc

SEQ ID NO: 85552 - DNA, 253 bp, Citrus clementina
  Intron number 1 from transcript clementine0.9_010791m (loc us clementine0.9_010791m.g) derived from phytozome v7.0 (c hr-ID scaffold_4; pos 6378768 to 6379020 reverse strand)
gaatcaacagcctctccgaagccactggctgtgaggtaagttctgttctcgatcttttcctctcttcaagcttcaattttttatccttgtttcatttcaagctttgattttttttttttttgccttttctaatgctattgtaatattgttgatttctgtttttaatgtagccactgatttttacttttgatgtttggttggcttgtgggttgttttagattcttggaaagtgcgagtttttgaatccaggggg

SEQ ID NO: 85553 - DNA, 721 bp, Citrus clementina
  Intron number 1 from transcript clementine0.9_005891m (loc us clementine0.9_005891m.g) derived from phytozome v7.0 (c hr-ID scaffold_2; pos 1726003 to 1726723)
caatcgccaaaggtattttcacgcccgccgccgctgttagtatctcactaatatccaatctcgacacgagttaacagtcgcgcatatctttatgatttatttttgcagacaaaggcggcaatagcatttcatctggaactgtcgtaatcattgttgtttctacgagtactgtcatcattgcacttgttgctttgatcacttgtgtctttctacgaaggaggaagaagaagcagaagcagaatctcagaaaaggttagttaattatgtgttttttcccctgttattaaaaggtaaaattttacatatgctacaaccaataaaacgacttccaccgaagcaaagaaactaatatgctgtcattagaagttgcccgttgtgttcttctttaataaagattttttttgaaattgttattaattttgtacaaatctatatgctaacttatcactattttgaagccgatgaaatcaatactgtggaatccttgcaatttgacttcagcaccatcagagatgcaacaaataacttctccacagataataagcttggacaaggtggatttggtgctgtttacaaggtacttgaaccattacatgaacgtcgaaaataatactgatcgttagtgcaaatcatttggcaattaccctgttttttttttttttttttttttggtaaaatgatttcagggaaggctttcacacggacaggaaatagcagtaaa

SEQ ID NO: 85554 - DNA, 508 bp, Citrus clementina; identical to SEQ ID NO: 78294
  Intron number 3 from transcript clementine0.9_004759m (loc us clementine0.9_004750m.g) derived from phytozome v7.0 (c hr-ID scaffold_4; pos 2370622 to 2371129)

SEQ ID NO: 85555 - DNA, 363 bp, Citrus clementina
  Intron number 2 from transcript clementine0.9_022021m (loc us clementine0.9_015770m.g) derived from phytozome v7.0 (c hr-ID scaffold_2; pos 7851502 to 7851864 reverse strand)
ttcctaaagtgttctgtgctggagctgatttgaaggtactgttattaataatttttttgatttatttgtttttgctgagcaaatagaatcgaagcaacttgtgtcttaattaggatgctttaacaataggtcaaaggaaaaatggagtttagttgtgataattggaatttgcagtgtagacaagtctttattctgtcaacaattagttgttgagtggcagctcaaggctcgtgatctggtcattataatttttttttttaatttcatatttttgtcttcgcttaaggattgtatgaatattatggctgacatacacatgcttaactgttgttgccttggtgggatttgcaggaacgcaggcaa

SEQ ID NO: 85556 - DNA, 782 bp, Citrus clementina
  Intron number 1 from transcript clementine0.9_023576m (loc us clementine0.9_023576m.g) derived from phytozome v7.0 (c hr-ID scaffold_3; pos 8624611 to 8625392 reverse strand)
ccaacggctctgtttcgccctctgcttgtggtggagtctgtcacttctcttttatttacttttaatgttccattttttttttcaaattcaatttactcatttataaactgcaaatctattgtttactagccgtttatttattattctaaaaacaaatttattgattttatgaaatgcggtgtactctgatcttgaagttcttgttctgctaattttatgttttgagttccattaacattaatatgatatactaattctgtgttgtttaggataaaagcacattgtgaaaatttaatttagagccacattaatgtgattagcaattcatctattacctttataaaggcaagccggttgagttctttattaatactgtactaatgataggcagatgttttattaatatgtttgtttctttttattgtttcctctttccccttgtatgggttggatggaggggtccatgtaaaagtattaattactttttttttttttttaatcttccaattggaaagttttgtgaacaaaatatgagaggttttcttaagtatgaatctcccagctgcctgatttatttgctcgggatgcaattgcttgctcattcttgtgactgcatttgtttctcattgttgtggtggtcttagttttgcatgattgaatagattgaagtagtttatgccttttctttagcttgagattatattcttctttaaaataatttcgttgcagtaacacatcttaaaacatacttttattgcagtctgagtcaagttcaactggaa

SEQ ID NO: 85557 - DNA, 584 bp, Citrus clementina
  Intron number 1 from transcript clementine0.9_006257m (loc us clementine0.9_006257m.g) derived from phytozome v7.0 (c hr-ID scaffold_2; pos 2204638 to 2205221 reverse strand)
atcaatctttaggtaagtgggttttagtgtaaagttttattttttgttttctcaattactttgtttctcaaattgccattaagcttcagaggtaataaattgtgtaaaagctttcagctttcacgctctggatatatgagtgcttgtgtacgctcttttttttttttttagtttataattttgccttgcggtggcttggatcatatacttgactgaattcatttgtgttttaaagtataatggttgttgcgtttatcaccaaaagtcctaaccatgtcttattgatgattaagtttctacctttctctgtttacagattttcatcattttcacaatactagtcttgcttttaatttcaaggaccaaaatgctcttaagttccaactggatttgtcttttgatatcaaagacttgtaccttgtcaataaatcaccctttaatttgttgcgtctgttgtttgttcttttggaaaggtcttcagaaagttaagctcctgtggtggtggcagtaacatgatttttggaatttgagtggagaattttctggaacccaagaaactgaagagaacgttaacattgaggtaa

SEQ ID NO: 85558 - DNA, 665 bp, Citrus clementina
  Intron number 2 from transcript clementine0.9_017299m (loc us clementine0.9_017258m.g) derived from phytozome v7.0 (c hr-ID scaffold_3; pos 1124805 to 1125469 reverse strand)
agatactggactcacatttcaactgaggaatctaggtgagattgttataatagctatgtaattctgcactgtgttgcccccggagctgtttgaaattagtagtggtcaattgcttcgctggtgcttttaatatcattcgtggtcattttgcaatgtattgacactgaattatccattggaatttagcattttgtcgctctacgtttcctctactatcagattgtgtctcaatttcgtgtgcagtgtacagactccatttggcctttcataatatttgcggagttgattctttttctgctatatctttcagttatggagtgctcagaaattggtttttcagcaacattcaatctgattgatgcttttaagctgagttaacacattcatattttgatgtgcgtttactcactgctagtaattagattacaatgatacagttggccacctgctaagtttacaccatttttcttatttctaggaactttgatttattcacattcattcaaatattttgtccaaacgaaacatagatttattgcgttgtttatgctttatagtggtctccttttctcccactgcctgatgaatgaagcaatttgtttgggacctgtccctttctttgcatgttaggttccaatcagtggcgtatcttcaacaaatctggt

SEQ ID NO: 85559 - DNA, 332 bp, Citrus clementina
  Intron number 1 from transcript clementine0.9_017299m (loc us clementine0.9_017258m.g) derived from phytozome v7.0 (c hr-ID scaffold_3; pos 1125551 to 1125882 reverse strand)
gtggcaataaggtttgtttatttccatttattttctttgtttttcgacattataaaaaatctgtgattgggtttccgtacagaaatgttttgatgcatccgtcaaaccataatcgtttgatcctcgataatcttcaaacttggttgctgtttttgataataatacatcttggtcagatcatgacaagttttctccgaaatttggaaaattttatatttctcattcacaagctctagcaagtgtatgttatctttttgcaaagaacctttgaattggtgcagatgtttactgtgtatagggggattcaaagtgattttggttatgtacaggag

SEQ ID NO: 85560 - DNA, 527 bp, Citrus clementina
  Intron number 2 from transcript clementine0.9_025685m (loc us clementine0.9_025685m.g) derived from phytozome v7.0 (c hr-ID scaffold_7; pos 6311174 to 6311700 reverse strand)
aagctatcgttgccaaatacccagatcgagttccggtatgtttgtttacactgtttatttcttctgtttataattaatgatgcaccaaccgtacgtacgtaattgaaaatggaaacggggccctcaatcctgaatgcttgcccataggctgctccaataccgagcattcacttttcttgcaggaatatcttttcttttctaaaagtatttttcgataacatactatgagttttggattgtttcccattttataatttttttatgttttagatataattccaaaatttcagtgccttttcaacacctaaagttttaaatagaatgaggtaggcttgcaatttactctatgctcctcgagggagatttttatgctttgaacaagaaaataatgccgccgtctataattggctaactgattctcttctcgacactttgatgattgtttgttgcatcttattgggattctttcttattgtttttgattttctacaggtgattattgaaaaatattcaagaacagacctgcc

SEQ ID NO: 85561 - DNA, 822 bp, Citrus clementina
  Intron number 1 from transcript clementine0.9_020134m (loc us clementine0.9_013769m.g) derived from phytozome v7.0 (c hr-ID scaffold_3; pos 8721475 to 8722296)
gaaatgtatgttggcatttttgtaatatttgtttagagtttttgatgcttgtgattttaattatacatatgcctagttgcatctgcttgatgattatttgatacagtaagacttattattagatttagcgcgtgccgttgttggaattatatttctgctgtgttacggtagtatggaatcataagttcatagttttagaatgggattgtgcggatgaaggaattacatttgtttatttattttgaccaagaagaagaccaccttcagttcgtacaattctagttcaatggcagtattatcgaatcccatgtttcaaatcttatagtttttatcccttattatttggattaattttgcctaattggtaggcaaattttgttcgtctaatacagcttatattttacatctgctacgtggtagaatagagtctataaccactatgttttgcatctaccatagggctgtttagcttgccgttagccatatcttccagttcttatgactaccattatatagctgcttacttttcctgagttatagctttgactctctattgtattttctccattcaactagccattgttgggcactttgggtgatgtttttgatctttctttccattcttcccacatcacggggtttatgaaacattatggtaataactgattgctttgaattggtctagtgtgtaaaacattttcatttacttggatatttaagaaataattattgtttgtttctgtggacatttgttagaaattgtcttagttgatgtttgcttgaataggtgaacttttgaccacaaaagaagcaaggcggcgg

SEQ ID NO: 85562 - DNA, 656 bp, Citrus clementina
  Intron number 1 from transcript clementine0.9_007230m (loc us clementine0.9_007230m.g) derived from phytozome v7.0 (c hr-ID scaffold_3; pos 6387146 to 6387801)
agtttaagaaaaggtcagccatcgttacttcttgtgtattatacagacgatatggttttaacgattattgacaaattccttattatggtattattatggtatctagtgtagcacattttgatttaattttgtatttatgtaattttgtatttatgcaacattgccacccctctctttttttttaaatatgattttttaatattttattttagatatgagagttgggaagatccagaggtcccaaaattccattatggttctcattattctagtgctggaattgtcctcttttatcttcttcgtttgccaccattcagtgctgagaatcagaagcttcagggtggtcagtttgatcatgctgatcgcctttttaatagtgttggagatacttggttaagtgcatctggaaaaggcaacacatctgatgtgaaggaactgattccagaattcttctacatgcctgagtttttggaaaatagattcaactttgacttgggagagaaacaatcaggggagaaggtttgttgagattacaatttttcactttttgactaatttcagttcctttgatgatttaccacagaagttgttgtatatgtatcatacagaatgtacaataatgtaattatgttttgtcggatttttttaggttggtg

SEQ ID NO: 85563 - DNA, 650 bp, Citrus clementina
  Intron number 1 from transcript clementine0.9_016286m (loc us clementine0.9_016286m.g) derived from phytozome v7.0 (c hr-ID scaffold_2; pos 5685887 to 5686536)
tcatctcgcttatcttctctgctctcatcctccccgtaagtttttttccctgaaatttgtccatacagttcttgttattatcatcgactggatattgagttgcaaagaagcagcgcatgatcagcggtggcacttttgtaattttcacttttcaaacttattatgctgagtttacattagctataaatgtagcttgtcttagtgtgtattcgtgagttcttgggatttcaaatagctagaagcaattttgctgcttttttttggggtgggggggtggagggtttggaaattcagaacagttcttctagaagataggtgcttaataagaatgagcttctggggctaaaattctttttctcaaaagtgcttgttacagaagtactccaagttgtgactctttgatatatgctttggtttcgcaattccatttctgttttgtggatatcttgcatcagtttggcatcatttttcagtgtgatgcttcaaatatgattattttttctttaaaagggaaagaaataagtctctgttaattgtgctctaatgtgcttgttatctgctgcctttttttttttttcccccgcttgttgtctgaagctgacagtttcaaaatattttgtaatgatagataagaagctgggagacatcaa

SEQ ID NO: 85564 - DNA, 538 bp, Citrus clementina
  Intron number 2 from transcript clementine0.9_032599m (loc us clementine0.9_032599m.g) derived from phytozome v7.0 (c hr-ID scaffold_41; pos 408414 to 408951 reverse strand)
gcaaaagtctgttgctgggatcatcacagagagaggtattttcaaagcgtgccataattgaaaataatatgaatgtaccggaactgttagctgttgttggatgttttgatttatattcctttcgagttctcttactttttttctttttccttcagtgagttatttgtacttcttttgttagatgtctgccttcaatagtcgcaatcttattgatcctggctttggctgtagcaattgaacatttatctgtttaaattatggtgcataggcagaatgatgtgaagagtgaaaattctattactattgagtttctgattgaattagctaatttttctttgcaacttttgactttagcttcttgactttctcgttcacatctctgtgtgctcggtttccttggtttaaggaatgtaatgatgtgcttactggtttcaatggtgctgtgcaatgcctttggcttattaattttttttccatttttctttgttacaattaaattccagattatctcaggaagatcatagtgcagggaagatca

SEQ ID NO: 85565 - DNA, 433 bp, Citrus clementina
  Intron number 1 from transcript clementine0.9_010491m (loc us clementine0.9_010484m.g) derived from phytozome v7.0 (c hr-ID scaffold_7; pos 5421954 to 5422386)
aaggtactattcaagcttcttttgttatgtcttgtaatttcatttgtgtgttcttagaatgtttttttcccttcattaggggtttttttattgcatgtagttgactttgaatgttcttcttttgtgattcttcagtgtttgatatgattttgctgttggtttgttgtagaaatgacaataaaatgaaatttattagatttggtcttattttcaaatctattttattctgttttcaagtatcctatgttagctaattttaaagttactttgaaagtttctgcttgtttcggtaatcagtcggtgatttgatttgttcatatgtggatcaagagagttcttttgtaggcctgtactttctgtagatttaaagttgtgtaatcaagtaaccgtatgaattgttgattaagcttaacatggggttttcagttacaaa

SEQ ID NO: 85566 - DNA, 921 bp, Citrus clementina
  Intron number 4 from transcript clementine0.9_018983m (loc us clementine0.9_018983m.g) derived from phytozome v7.0 (c hr-ID scaffold_10; pos 2938936 to 2939856 reverse strand)
atccaaggaggagactttgataaaggcaatgtatgagctttcacacacatttagatacttcagtgtcttgttcattgtttagtgtaactattgcagctatttgcttctttaagaatttatttatgaactaattaattgaattgagaagtcacatgcttctctggctaggttaccacatggagctattaatggcttcatagcaagatttattttattttattttttttagcagtgtaagagacatgctgcctttgttctcttccttttgcaaattttgaattatctgcaatgaaaaggcggcaagagttagttatgaatgtagaaacctttaaaaaggacagctgttgttgctcccctttgtattacactctcattgaaagctactaccagatttacttggtatctggacagatctcagcttgaatagatctcttatctggtgtgaagtgtatgacaagctaaatatagcagcacgagcaggatctgttagctttgcttcaagttgactctgtagggccaaaacagaaagaacagaaagaaatgttgttgtgttaaataactattgaaaacatctgttgttgtgttttaagctcatcttttgatgttctcaatagatttgttaggacctggagctttttctttctgtccagctgtttccgggtcctcaaagccttatcaatttccccatcctatgagtggcaatataattgatctatatgcctacagatatgtttatggtttatcaactctaagcatgttttaaacctgcacaacttctatttttttgccttcagttcagtcactttattagattaaatagttgtcagatatgcttgatttggcatattgttcgactaaattttatttacttaacctctttttgtagggaactggaggtaaaagtatatacggccgtacatt

SEQ ID NO: 85567 - DNA, 468 bp, Citrus clementina
  Intron number 3 from transcript clementine0.9_018662m (loc us clementine0.9_015082m.g) derived from phytozome v7.0 (c hr-ID scaffold_2; pos 3155981 to 3156448 reverse strand)
cctcaagttaggggattctattcttgacttgcaaggtatattacttcttttcatctactacatatgtcaatgtaaattaagtcattattgagctttgcaaaataaatgaaatgaaaacaaaacattggctccctgcttcaaactgtaggtgaaatgagccattcccaaattttataagaataaacttcaggagctttggataaatgtctgattgacattcttttaactgtcatcttatctaaaagctaggtggcaaactttgtcactaagtttaagtaattatgttctaaagatgttgtatataagatttttgacttaaggtggcaattgtttatagttacttggcatcaacttaaaacttttggactttttctggttttgatgatgcactttgatttctgtatttgtctgcttctgataagttttcatccagttaatcttgggaagtatcattctgcaaaagtcgat

SEQ ID NO: 85568 - DNA, 722 bp, Citrus clementina
  Intron number 3 from transcript clementine0.9_025008m (loc us clementine0.9_024992m.g) derived from phytozome v7.0 (c hr-ID scaffold_2; pos 2776208 to 2776929 reverse strand)
tcagaagctagtagggaagggaagatagtaagttatctgttaccttattttcaggccagagaaagagcatttagcatatgctgtctgggattttgatgatcatgttgaatggcctgctttggtttgttttgaccagaatgttttatgttttgttgagtattcaaatcctataatgtgccaacaaatctggcctctataaatcacaagaatgaagcattaaggcgtaggcttctttgatattttgaggttggcacccttgctcaaaatttcacatttgagaatcaaagatttacagcaaatataagtccttatttaaaaatgtcaaatgtcatgtttgacgtttgcatcacagaatagccggtatcaactatgaagctgggaataatcgctaatatcttcaatgaatgaatttaggtcaagtataatgagttctgttctaaaattcttttaatattgcattttgtggattcacgaaaagaaagttgagtacattatgcttcatcactgttgccttttatgttttccttatctgaatagattgcttcttggtgtcgctagatatttgctagaatttttttccacctcttacagacagaatactcaatcctggcttgtagttatagttcaattaagactgattagtgaagtttaatttgacttatctgatgagtcttctttcataaatatatgattgaacaggtgattgcgaacttcagcgcaac

SEQ ID NO: 85569 - DNA, 438 bp, Citrus clementina
  Intron number 3 from transcript clementine0.9_012226m (loc us clementine0.9_012226m.g) derived from phytozome v7.0 (c hr-ID scaffold_3; pos 8669910 to 8670347)
tgctccgtcaagttttcggccctggcgctgaaaaggtttctctatctgtatttcttatttttatgcaataagaaattatgggtttgtgagatttttttttttctgggagaggtgaaaggaacaatttttttttttttcagttcaagatgactaatttactgataattgatgatttgacaagtgggtttaaatcctgtttgtttacagtaaaaacatcatgaaagaaaataaatttaatgttaaaaaagaaaatttatacatggatttgaccacaaaattacaacttatatagaaaggggatttgatttcttctatttttttgagtttttgtgatttttacctgtaactacactacgtgttgttgttttatgaatttctagtgtgagaactccaagaaaattttgtattttgattgcaggtgaaagtggaaaacaagac

SEQ ID NO: 85570 - DNA, 845 bp, Citrus clementina
  Intron number 2 from transcript clementine0.9_018366m (loc us clementine0.9_015222m.g) derived from phytozome v7.0 (c hr-ID scaffold_3; pos 4678693 to 4679537)
gctcgtttccggaatgtaagtggaattccttgtatctgatttgcttacttgataagatgaaaaattatgattgtactattcctcgagttgattgtattttttatttttttcttagcaactaaatgaattaagatgattgttaattttgttgggaatgtttcttattacaatctcaattataacagagtaagaagaagggatttgtgaagtcatttgtgaagaagaagcagccgactgtggatcacatcaccggtgataagattccaaagagttttgtgttttcaagaggaaagttgcctggtcctctcaggcagcttgaaatggatttaagaaagttgatgcttccacacactgctctcaaccttaaggtatagtttatttggaatacctatggttttgctttatgatgatgacattatgtgaatttctaaaggtttgtatacttttttggtcattctttgatcaactttgataaaagttgatgcagtaccaggataactgggaattacagcacatattcgagaaatctgaattagagagtctattagggtaaacaatatgttgaaagttgagtcagtggtgtggaaaattttgaagaaaaaccttgtgggatcgttaattatcttggatgcctgattcttagaacccacgacattcagttatatacttggtcagtcataggctacaagtatagaaagcagtgtcataacagtcactaattaattttcctgcatgaactctatttagttctaatctgtatgttattttttctgaataaaatgtttcttattctttgttgtatgtttgcaggagaagaaacggaataatctcaaggactttctgaa

SEQ ID NO: 85571 - DNA, 647 bp, Citrus clementina
  Intron number 2 from transcript clementine0.9_023757m (loc us clementine0.9_019621m.g) derived from phytozome v7.0 (c hr-ID scaffold_7; pos 4389508 to 4390154 reverse strand)
tgcccgtaactactactgctttagcttttagtttatcgtgccaatgttttttatgttttatcttgaatggtgataaagcccagttcgaggattttttttttttaacaatttcatttcaatggttttatggaacatgaatatggttgagaatatgtagcatggaagttgagctcacatcaagtttttatggttatattgctaaaagtttttctttatctgggcttgggtgcttggtcttatcgcttcatagaagctattctggttcactacttgaagatacacacatgcttatctgcgaatgttaaagctcctttccttttcctatgttttgcaatctataaattatgaggtatcatggctttgttgttacacctctggcccttggggtaaaggcttagtcatccgccgtggctaggttgcaaaaatgaaatggattgtagatccacaaatgggtccccaacagatcattgtttgcccacttgagaatgctacatctgcaggggctcaaacatttatattgaccagcattatttgattgtgagaagaagttataattttgcataattgctgaagttaatcattagacagtgcttgctacatcttgatttaattaatgatgttggaacattatgatttgcagcctgagt

SEQ ID NO: 85572 - DNA, 551 bp, Citrus clementina; identical to SEQ ID NO: 80199
  Intron number 2 from transcript clementine0.9_013512m (loc us clementine0.9_013512m.g) derived from phytozome v7.0 (c hr-ID scaffold_2; pos 3057964 to 3058514 reverse strand)

SEQ ID NO: 85573 - DNA, 850 bp, Citrus clementina
  Intron number 2 from transcript clementine0.9_010820m (loc us clementine0.9_010820m.g) derived from phytozome v7.0 (c hr-ID scaffold_24; pos 356082 to 356931 reverse strand)
gttggtgaagttgttttcaatacatctttgactgggtgagattattttttatttttactttatttgctgggtttaattaacttctattgtttgtcgctgaagtggtttgaggctgtgtaaaaaaattatttgaaaatgtttttttgcagcaaattattcaacccattttgaatacacttttcttctttagctttggtggaaatttttcttttttcttattcaggagtttgtaaatttgataacttggggaaagtctaagaagcaatttaagagtctggaattatggcacatttggtacttgttattatcatactatattaaacagttaaagagagtgtcacaacagtatggtactttggttgtgtctagattttctgaatatgacatcatattaggtgttagtaagaagccgtagttggcaggatttcttatgaattaacagggtacctgatttgtggtgctgtcatgccattattttgtcccttttgatcggtcctatgtcatagatttagcgcctgtcaatataggagcttttgattcttgtgatatggaattacactagttgattgagagctttcgctgttaggttatgttataagtcagtagctcaatgaatgccatatttactggttaacaacagtttgtttctggttggtaatggatccatttacagtgaaaatatttgtccaatggcagaaaaatttaatatcttcaccaaagagaatatgaaaattaacatggttaacttccagaagagttgacgagctctagaaattcatgcgtagagtctgattcgttgttgctgtttgcttattttgcaggtatcaggaaattctgacagaccctagtt

SEQ ID NO: 85574 - DNA, 737 bp, Citrus clementina
  Intron number 2 from transcript clementine0.9_004085m (loc us clementine0.9_004085m.g) derived from phytozome v7.0 (c hr-ID scaffold_85; pos 966849 to 967585)
cctctggaggtccccgtacaggtttgcttcaatatttgcgatttattgatgattcattagtgtcaaatgatgtactgttcattggcgtctttttgtattggttgtattaatttcaaattagagatggaatctgactgaggcaaacgggttacagggttaatgtttgtttgcacctgatgtagtctatgacttgcaccatggcttatgtaactacaattcttctgcagtttcttaattgttgcagttaattgtgtttggtttttctcaagagcagttctttgattctgagagcatgcttttatcataatcttttcaatatagaagctagaagattcttttgggtactcagcacacagtatcagatgattcgcatttgtttttcttagatatgatagttattattattctttttgaacttttgaatcctaaccggaccaatattgtgtgacagtgcactttaactcttatgaatttagggttttgaacttttgctttgattttgatctgtacccaatttcaaggtggctggtaaatgaacgaattataaaatccttgataataaggtatattttgttggggactgggatggtaattttgtcttcatgtcatcacagtgtgttgtattttatgatctcattgatatgtttgggcggtttgtgttttgctcactttcttcctgtcccagctttaattgtctgcttactttgtcctttgtgttcactttatagggggatcca

SEQ ID NO: 85575 - DNA, 863 bp, Citrus clementina
  Intron number 2 from transcript clementine0.9_023001m (loc us clementine0.9_022939m.g) derived from phytozome v7.0 (c hr-ID scaffold_2; pos 1250008 to 1250870)
cggaaagcgaagcttgtttctacggttctgcctttgtaagcctgtgccagtgtgcctgtctttttttttttttttttttgggaatgttttagcatagaaaattgagatgattacaaatttacgagtgcgtttgtttatttgattttattttattacaatttttgaagttctaactacttttcttttctcaactactaatattgcatattaattaggctatttattcatattcactttattatgttattcatgtttatggcgaattatgcagagtttttcagttgctagttgattaagtttcttccttgcagtaataataaagttttgaccaatgaaatttaatttccatcggtgtagttgtatgagaagtaatatccaaacaaattatgtgcacaaattgacattacgtgaagtgatgtttagagtgaaaataaaaaagtcaatggaatcaatgagaatagagactgtatttaactctttcattcatatcatgccatatcggtatgtatggatgagcttttactgatagcttctatgtatggtatttgcacacacacacacacacacacacacacacacattcccattatatttgcataatgttccctttacattttccttgctgctttgccttttgactttgttgaggttaatgtttgtttcattagtgctttctcttacgtgtatgtatgttgtacgtgtatattgtgtattgatcggtatcattggaattttaagcttggctgcttgaacaaagcttttcactggaagctattgtatcgactttttaacttatgtaaatttttgtgtattggtaactcattttttgagtttttcttcatgcagaaaattgtctagttacc

SEQ ID NO: 85576 - DNA, 326 bp, Citrus clementina; identical to SEQ ID NO: 81069
  Intron number 3 from transcript clementine0.9_023001m (loc us clementine0.9_022939m.g) derived from phytozome v7.0 (c hr-ID scaffold_2; pos 1250932 to 1251257)

SEQ ID NO: 85577 - DNA, 419 bp, Citrus clementina
  Intron number 4 from transcript clementine0.9_025009m (loc us clementine0.9_023281m.g) derived from phytozome v7.0 (c hr-ID scaffold_3; pos 9053300 to 9053718)
caggagttgctgaggtttcaattgctgacagggtaaatggattaataaacaaaaacttccgcagtgtgcactgtcggctgtatgaaattagattggttttattttttcaccaaatcatttagaggcatgacttacaactatatttatgttatctgctattttgagtggtagttgacctcgttttactttcgaatattcttcatgagccttgcatattgtgcagcggactcttcttaaatatcctgctaaattttcagtataatttacaaatgctatacagataagaatgcaattgttttgttttctttgatgtgagctgccatagaaattcttctctcagctagttgcttgtttttccttgtattccctctcttgcaattgtagattcctctgaccgggcaacactcaatattggggag

SEQ ID NO: 85578 - DNA, 568 bp, Citrus clementina
  Intron number 3 from transcript clementine0.9_017887m (loc us clementine0.9_017887m.g) derived from phytozome v7.0 (c hr-ID scaffold_2; pos 3972344 to 3972911)
ctgtaagtatattacatttccttcatttttgctgttcttatatattgttttctgtacaggctgcttgcattaaactgtagttggcatgattttcctttcggtttctctcttaagtaacaagtataacgtaatgaacttgagaaaattttgaaggatgagacaatgattgtttaaaaattacaatttgtgtttgaaagcacctgtattccaccgtaagctctttcattatgaatgaattttaatattagaattaccagctcttaaaaattgacaaaacttggttcttcatttgaagataattttcatgaatgttgatcccaacgaaagcaataattgccatatatgctaaaactctcgttaacctgacagaattgatcaaaatttggagcgagtgggatttgattctgatacttcttttttgccagtccctctttattttgcatatccaaaggttttccatgtcacatgttctttttcttatttttcttttctgtgaaaattttggactggcctccattttgatgttttgtcagtttgctacttgtttagacagctgtttcttttgttc

SEQ ID NO: 85579 - DNA, 731 bp, Citrus clementina
  Intron number 2 from transcript clementine0.9_001743m (loc us clementine0.9_001743m.g) derived from phytozome v7.0 (c hr-ID scaffold_2; pos 3368556 to 3369286 reverse strand)
gcaagactgtgtctgtgaatcagtttcaggtgagttgtttaaattccataatttatgaagttatttatgctgatgtgttaattttgagtaataatgctatttttaatgtttctgctgcggatgaagcttgattcagttcaggatttgatttgttcgatggggaaggtccattggataattttggtttgctcccaatgacatgttggaataatgaaccattagcttaatatttcacagaatcactaagagttatgactgtgatggtagctttgaaatgcattcttcttatgggtaaatgacttagttactagtccttggatttattaccagtaaaaggatatcatttctaagatattcaatttatagactttgctttcgaatttccctgcttgttttgtgtagcttccttgaaatgaatgtaaaatgttccgttttagttaccttattcgttttctacacttgatataaattgttttgtgatataggtgtgcatatactcttggtattgttttggctttatcatacatgttgctgtttttatttctctgtcaaccttcattgtacatggtattatgtgaaaatgagtttgactgctcattattcccatagcattatctttttcccactccatcggtgctctatatacaatatttctgtgccacttgttatgttcctgcatatctaattagttcttaatgctagttgatatttgacaattttgcaggttaagg

SEQ ID NO: 85580 - DNA, 974 bp, Citrus clementina
  Intron number 2 from transcript clementine0.9_002902m (loc us clementine0.9_002902m.g) derived from phytozome v7.0 (c hr-ID scaffold_3; pos 4965043 to 4966016)
gctgatcgtcttacgtgccaacgacaacggtgacggtaatatttattttttctttaattatgtgtgtatatactactgttaactaaattcggcttcggccaaaacctatttttatccaatttagggtgcgtttggatgcatttgataaacactaatcgttatatcttgaaagttatattgatatgattttttacttgtataatgaaaaatcgattatatctttaatgatcttatcaaaattatcatttaaaatttatattttactatatattattaacttatattttataattatattttttttttcagatgcagtttaaaaattacagtacctcaatcttaaaaataaaatgaccttaattaatgattctttttattttggagatagtcgctggggtttcttccggtggtgtgccaaactccaaattgtggggcatgtatgacgtataataatattaaactagtatatggtgcaatgaactgaaaatcatctcgggaagaaagaagaaattaacttcatttagtcagcaggtctttatttgtttattggaaattactaggtatcagttttaggacaaaataattaaacaattttgttttttttttgtttttataaaaatgcttgtaatattatgtatattaagtccaaaaagaaaaaaaaaatcccttgcgttcatgcatcgactaaattcccgaatgatcccgatggtggtgacgaaaagggatcaatatttcttgtgagttgtgaaagaaaagtaaaagactaaagagtagtgggtcatcttatcccaagactttaccgtaaactaatttatttacatatgtgcggtcaagcaagtgtgcggtcatctaagtcaaattaattttaatttatttgtggcttcaatcaatggggatagcgtctgtctagccaatagtgaataaaataacatgtataaaatttcaggaggaacgtttgctctttattcattgat

SEQ ID NO: 85581 - DNA, 916 bp, Citrus clementina
  Intron number 3 from transcript clementine0.9_023985m (loc us clementine0.9_023985m.g) derived from phytozome v7.0 (c hr-ID scaffold_7; pos 4616072 to 4616987 reverse strand)
ccaaagacactgtattttcgagtaagcgggtttttaaaaaaatatattgcttgtcctcgtaagaaaatgtttggttatgtagttattttcttggtattttaaccatatgagataactgaataaaggaaaacatgtaaaaataaaaaatggaagatcgattttaaaatttctttttttttggtttttcgttttcatggttatgaaaagattggtgaaactactgatacggactaaaatttgcaatagcatgccaaagttgtaagctttgaatagttttaagttattggctggggtttttcttcaaaatgcttgatacaattagtagtgatcttgttggggagagcttgtagttggaatgatgcctcactgttgttttaactttatttttggcatttgtttcattggcattcagcgcatataggaaatatttctattatttttgcttcctgaaattgatattttgaaaaagctaaggatctctctctccactccaaattaaatcctggacagcccgttttcatttttatttatatttatatgagagtggtggattgatgtcatgctagtgagacatgaaaacttaagtaattagctgattttcttgcccttagaatttggtacctttaaattagtctggcaaattaaaaaaaataaattccggagacatcattagcaaccattggatggatattcctcattagctttttcagttagttaattttcagaaaatcctggcatgtcatccctgtccggacaaagcaccatattagtaagtgatgcatatcagtggtttgatttctttatctgtatgtatgcaaaatatatgcgttgttagtgtgctggacgggttcctgattaatttgaacccccttatatatcaggtgggtcttcaaattcaggtagaatcattcgacat

SEQ ID NO: 85582 - DNA, 574 bp, Citrus clementina
  Intron number 1 from transcript clementine0.9_016160m (loc us clementine0.9_016160m.g) derived from phytozome v7.0 (c hr-ID scaffold_2; pos 4759496 to 4760069)
aagccttagctttacttctctttttctactgtcaagtgagtactttctctactttgtttttgtgtttttgtttttgtttccaactgattccagttttgtcagaatatttattatctcttcagtcttcactccagttctcttgttgtcttacttcttttcttcacagtttgatctcttgtatattcagctgatgcaatctttttgtttctcaaatgggttgttcctgactttctgttttctttccatttttatcttatttttttcagcattaatctaattgagttgccgaaaataatgatgatattttgatcttggtataatatatttttttgtcttggtacttaaaagtttcttctttctagttctatccatttttttcttccaacagacgtgtctgtaaatcttactagatcaaaaagatatgttggattgtattatgatgggatgaccaaaatcttcaaagaaaatttccccatattcttgtgattgaaatttctctaataattggtggtaattttaattatgactttgagttgcaggcttagattcaagatactgaaaggcagcagtcaca

SEQ ID NO: 85583 - DNA, 668 bp, Citrus clementina; identical to SEQ ID NO: 81440
  Intron number 4 from transcript clementine0.9_012121m (loc us clementine0.9_012121m.g) derived from phytozome v7.0 (c hr-ID scaffold_4; pos 915374 to 916041 reverse strand)

SEQ ID NO: 85584 - DNA, 741 bp, Citrus clementina; identical to SEQ ID NO: 80117
  Intron number 3 from transcript clementine0.9_021305m (loc us clementine0.9_021305m.g) derived from phytozome v7.0 (c hr-ID scaffold_4; pos 6087672 to 6088412)

SEQ ID NO: 85585 - DNA, 850 bp, Citrus clementina
  Intron number 4 from transcript clementine0.9_019427m (loc us clementine0.9_010601m.g) derived from phytozome v7.0 (c hr-ID scaffold_2; pos 3138208 to 3139057 reverse strand)
cctcaagttaggggattctattcttgacttgcaaggtatattacttcttttcatctactacatatgtcaatgtaaattaagtcattattgagctttgcaaaataaatgaaatgaaaacaaaacattggctccctgcttcaaactgtaggtgaaatgagccgtccccaaattttataagaataaacttcaggagctttggataaatgtctgattgacattcttttaactgtcatcttataggatatttaagtttcttgatgtaggaagcatatggaaaaaatgtattagaaattatggtttttgtatataatactttttatacctttcattaataatatttcagattattctgctttgggtgtatctttgttattaatttgacgttttctctctttgagagctatttttccttgtgtatttgagacgtatgctagaacgacatttatcatcgcttctgcagtgtgtcctttctactataagttaccccataactgctgggtcaagaatttaggaattcttgctcggaactggtaaagagcattgaccatgcaccctgagattgcaagtactatatcctgtcgtttgtgttgatctttctccataatcttttttatctaaaagctaggtggtaaactttgtcactaagtttaagtaattatgttctaaagatgttgtataaaagatttttgacttaaggtggcaattgtttatagttacttggcatcaacttaaaacttttggactttttctggttttggtataaatgatgcactttgatttctgtatttgtctgcttctgataagttttcatccagttaatcttgggaagtatcattctgcaaaagtcgat

SEQ ID NO: 85586 - DNA, 652 bp, Citrus clementina
  Intron number 1 from transcript clementine0.9_024646m (loc us clementine0.9_024646m.g) derived from phytozome v7.0 (c hr-ID scaffold_14; pos 4139297 to 4139948)
tcttctcacaaactgaagctgccgtttattttcctgtaagaatattttcttgtttagtctttgatctttcccttttatgttgtatgctttttttcccccccgctgtttgatggtatatgattatcgtcagttgatgcatgtgctaatcaaaaacttgttccttggtttgcttgattcttaaaactacatcatttgattcttggattttattaggatgattattatgtgtattgagttgtgaaattgtccattggaacttgattaagcaaagaatctctgctggtagttagtgaaatggagagcataatcttcttccattgagaaaaaagatggaagaatgttcactgacattataatcatatttctaatattctcattatttgttttttggtgcgtactacttggtttaactcgtaaaatctttttgggtagtacagtaagatttggagttcaaacctcgcccttaaagggtgtttgattagtcctcatgaatatattggttcttttgaaagctgattagcttttactctgaggccaattcttttgatgctgtggagaagtgtgcttgattccatctatgaattattttctagtgcgttttttgttttttttttaataatttcaacctttggttttgggttcaggtatagaa

SEQ ID NO: 85587 - DNA, 442 bp, Citrus clementina; identical to SEQ ID NO: 78169
  Intron number 1 from transcript clementine0.9_022590m (loc us clementine0.9_016117m.g) derived from phytozome v7.0 (c hr-ID scaffold_3; pos 6867157 to 6867598)

SEQ ID NO: 85588 - DNA, 928 bp, Citrus clementina
  Intron number 1 from transcript clementine0.9_005905m (loc us clementine0.9_004583m.g) derived from phytozome v7.0 (c hr-ID scaffold_3; pos 6448141 to 6449068)
tgagttaaaccggtcggatcttggcaaagtcgcaggtaaactcggcactcttcttcgtttacgttttacttatgcagctcgcttgttttcaacttttacggaatttaagctttcaagttctacaattcatttctgttctttggaaactgtgacatttcctttggaatatgtgaaatttcgaacgaatttgttatgattgaagcttcttgtacggaaaaagagcttgaatgaaaattagggtttagggttttgtggagtctgttacaattagacagttgaaaatgctgtcaaaatagttaaagattataggtgcatgtttcgacgctgaaatggacaaattactattgaatgtttgaagcatcggtctttactgaaacatactttcttttgatgcctcgagctttgtttacgccttaaggttccgcacctcctttttgcattcgtggtaggtaatccaaatttgttagtaggagaataaaattcttaatataactggtctgccgcaagttgaatgaaactactagctagttaggtccaattttgcatgattcaatctacgctgataagtttctgcactcactctggatacaatgaatgtgcatacaccataacagatcaaccttatgcataaacctaaacgagatttcatttatataatgctttgacaggatatttgcagactttgacttttcatttcagcattttggagtgaagagtcatgagtgaaaaaaagaaccctcttgttttcttagatgtatcaattgatggggatcctgtggaaaaaattgttattgaggtaactcattgttcaaaatgttatttactttatttttcagcctttcgttggaaggaaatagcaggtttcagtctgctactaggatgtatattaataatctgttttcttttttggatgattagctttttgctg

SEQ ID NO: 85589 - DNA, 1013 bp, Citrus clementina
  Intron number 2 from transcript clementine0.9_005905m (loc us clementine0.9_004583m.g) derived from phytozome v7.0 (c hr-ID scaffold_3; pos 6449079 to 6450091)
caagactgcagagaattttagggcactctgtactggtaattcatttttattttattttattttataatgacactgtacagtaaatgttgattttatatgaaataattagttctactatatatttcatgctgttgcgcgattcagtaatgtccatctgctgtctaattcccatgtggtgttgacaggttgcaacgagcatgcatattttcatcatctttgttctcaatttggttggttgttagattgttttgtagtaaaatgaagtatatgcacagttgctgctggtctttgcttatatcatgaagctttacttgaaatgagaccagaggctgcactttttatgcatttcactatcatctatgctaagactcacacaactgtagaaaatccctgattccaaagcctgccacatctacaccacaccccccccccccaaaaaaaaaaaaaaccaaaaaaaaaaaaaccaaaaaaaaaaaaaaatgatctgtaaatttgattacctcaatgccaaagatgtcttcagatgaagctattcatgtgcatggaatctgtttgtgaaacatgcctttttttttcctcacctactgaagacttgtttggtttctcaaagcttgttccctaataattggccaaatacatcttcaatgatgtggataattagtaaaatgatgatttttaaagtggactagaatggaaaacagaaatatttgctatcttttgatgtccttatattgttttggtgtgaagatatcaagtttctcatcaatttgtcatatctcttactctggtgaacaaatcttttttcatatttgtgatattattttttgttgtattgatgtggggaaactatttgcttggattagtaaaatacaattgaattaacttacttctgctagtagttggtgtgttaaagcactgttgattggttgtacaagattgtggtaaacattgatgggtttgtgatttgatccgtcataggagagaagggcattggaaagtcaaccggcaaacct

SEQ ID NO: 85590 - DNA, 962 bp, Citrus clementina
  Intron number 3 from transcript clementine0.9_001071m (loc us clementine0.9_001071m.g) derived from phytozome v7.0 (c hr-ID scaffold_7; pos 4538857 to 4539818 reverse strand)
gatcaatctgcatctcagaagaaggcaaaaggaaggtatgcctcgaggttatttaaagagttttatggtttgctttatctctatttgtccatgccatatttccttaggctgcagtacatttgttgaagatttttgaatctctaggttataggtcaattatcatcactgagagcaacacatttggaacccttctagctgatgagagtagacatttctcattgagcatatgaatgaatctgtcttggagagctgtgagatccagaagcttctttctggatttaaatttggttctttaggtgaaaaaaaagaatttgaaaaattggaaaattatgaaccatgctcccatagttatgccttttattttaaagtagtaatattgactagattgctatttagactattatatttttgttgatttgtgttctttatctatatagactattggctgaacttaaatgtatagccatgacttgttttttatttttatttatatgttttttgatagattagttgtgacatgttgagtgaatactcttgccttattatttaactccatttcccgttgtctcttattttgcctgcaatgtggccaaaattgtatggtgctgctgtttccattgcatgagactgaattaaggagatcttggggtgggatttttctaatacaaaatttttgcgtgtcctcaatgttcaagctactatgtttactattctttataaacaagcacaaccaatattgttgtttacagagtaattactctagagctaagtccaacatgatttaaggacgtaaaatatgtgaaatgggtcgttaattgaaatttttgtgtgtcttaacctttgtaaaacatgaggttgctttaattcagtcacatctgttttactttgttgtgttatgcatttaaatgtctatctctgtattcaattatgctttttctgtgctattggatataggggacgcc

SEQ ID NO: 85591 - DNA, 684 bp, Citrus clementina
  Intron number 1 from transcript clementine0.9_007772m (loc us clementine0.9_007772m.g) derived from phytozome v7.0 (c hr-ID scaffold_7; pos 4982147 to 4982830)
cgtcgtcgtttcgctccgtttataaaattagcagcgtgagttttggtaactcttaaaattgattgagctcagttatttgagtttattattgtttcgcgcctattattttgttactcaatgatctaatttccgcttaatgtttgatttattttcttcttaattatagttgtagtctgtagttactgttagattgttagttgatggagaatacatatatataaaaaaattcgtcaaccccaatgctttgagagagagctgcacaaatatttgttttgtagttactttatgaacaaagggttgttggttctaattttaaccaagaaggccaaattcaaattttggctctatgtaagaaatgtcatctgtcaatacattccaattgatgaaattctcacaaaacggtaagaaaagtataagaaggagataatttagcttcttatgtattattggacttgtgtcatgcatttagtgaagtgaatgattcggtggtttttcattgggtttatgctcctgaatcaaaatataactgcatgtgtatgtagtgtctatgtggttgtttggcgaaatagtgtagaatttctgttctgggacaatatttttatagttgtgaaaattttgttctcgtatatattattttcaaatctctcctgtccttttttttttttgtctatcttttagttggaa

SEQ ID NO: 85592 - DNA, 1001 bp, Citrus clementina
  Intron number 2 from transcript clementine0.9_000283m (loc us clementine0.9_000285m.g) derived from phytozome v7.0 (c hr-ID scaffold_4; pos 4564608 to 4565608)
atatttatgtgagttaattgaatggaaatgtgactgattaaacatgtgtatgtgtgtgcctgggcctgcgcacgtgtttagttgtgcttatttaattgacaagttttgcttgcatttggtttatattcggcgaatggagtgttggaattatagctaagatatgaattcttagaatctcaagtaatgattgtgtgagcaccaattttgattatgatgctgttttagtgatttgagttgtacctattagttaatgttgtaagaagtggtgctttactctttttcagaactcaaattgaaagtttatatccatgttaggcatgccaagctggactttttgcataaaattaaaggctcgtaataattatggtgatctgcggattaggaaatggacagcggaaagctgaacgtattgtgaagaggttctttttaacagttttgcctctgataagtatgctatcaattgcgtcattatggcttggttcgcttaaaccctttttttcttttgtcatgctcagttgaataaaagctcgtgctgctgtctttgttccccccccccccccccctcgatattgaattgcccttggtcattcaattaagcagggtgtaggcgtgttatcttagggccaactaagtggttaagatgtgaatgggttggtacggtctttaggctgaaaccttacccacttcaaagataatatttcagatttatttgttgttctgtattgcaatttcattaataattttagcgtttaatttcgtttttttcatgtccgttaactagtcaggaagtcaatggaacactatgcagactattattgccctttagaatgcttgatttacatgggatagttgtttgttaaaaaaaatctctcacttttaatctctgagacttcatgaattttctaagtgccatttctgaagattgatgtcagtacaaaatgtgttcctttttggtgtctttggtagacgtacaccggaagcattttgatagccgtcaatcc

SEQ ID NO: 85593 - DNA, 719 bp, Citrus clementina
  Intron number 1 from transcript clementine0.9_003042m (loc us clementine0.9_003042m.g) derived from phytozome v7.0 (c hr-ID scaffold_3; pos 8850609 to 8851327)
gactctcaatttctctgctcttctttctctgtttggtacggttcccattttcgttatgtcttctctgcagtagcgtttttacgccgttaatcatgaataagcattgaacatggttttgatttccgaacttttggatctaaaaaacaaaaataaattattttgtaaaaaactcactaatactcaactaaaatctggtcattttctaaaaaagaattaactttaaaagaattttgaacttgatttcattttctaatggactggtgagtgactgttagtgttagatctagtgtttggctgccgtgattttgctagatctgaacgtgaatcaatcagatctgtaattaatcttttccgaaaaacaatttgaactctacttgtgttactgtttttgaatctatttttagattcttcttttcagaatctatttgtagaattttttgttttaatccttcaaaaatgactgaaagtacataattgttcatgtgattacagaaagaaaaaaatcatctcaaactcttggattattatcagcttgtttcaactggttttttatttttttataaaaaaattaatttaagattttatgctctgataagtgttcttgatttcatttgatttgagcagtaatagcaatgacccatccatttgaatgaatattttcttgatttaatgaaagtgactgattttcgattcattgatgacgtgattatgacagtaaa

SEQ ID NO: 85594 - DNA, 353 bp, Citrus clementina
  Intron number 1 from transcript clementine0.9_006437m (loc us clementine0.9_006437m.g) derived from phytozome v7.0 (c hr-ID scaffold_3; pos 6905115 to 6905467 reverse strand)
tggacgatctgtgaaacgattctttcacaacatctgtaagcactcgtacttactccaatctattcttttgttttctttttagtttattttctgtttttaataattccatacattttagcaattctattgtttgacttcatttgagctatcaaagttcttttccgaaactaagtggaaggctttctgtatatcatgaattcaaaaattcttgctctaaattatgtatagatgctgttcagatgttatggcactgctgatgtttgaaatgataagctcgtagaattttgttgaagtcaatttcatattttttgtggaaatgcttagttttcatttattattgtttgttccagatt

SEQ ID NO: 85595 - DNA, 859 bp, Citrus clementina
  Intron number 2 from transcript clementine0.9_024592m (loc us clementine0.9_021747m.g) derived from phytozome v7.0 (c hr-ID scaffold_3; pos 2753048 to 2753906 reverse strand)
cacccaccaacatcaccacagagcagattcaaaaggtagaatctcttctctctttgtttgtttatttgcttctcacaaaataaacatatatctcgtgtgtgatattagtgagctggaggagttgcttttggtgatttggttgaagtgatagtcttgttaaacatgactctctattaaagaaagtgggtgctctgaacttgttgcttagccaattttgtcaatccaatttagtggaaaatattgatattaaacaaacttttataatcttcataagcgattagtggtttgagtatagaagaatatctggttatttgattatgctggtaaattgccttttcgctatatgcaagttcttctctgtgtataacattttgttagtgacttacctggatttggctgtgcttatggtgagttaaaaaaaggaaaaagaagatttggaggatcaatttaaagatttatgatttcagtggctgatcggtctagataaccaactattttgcaaactattcttgaaagaaggaatgtagttaatgttgtcatagagtgtttaattttatgtgtcacaattgctggctattattggcgtattcccttttgtcgtgtacttatgtgtgccatatcatataggatggtgtctggtgatgaatggcagtatttagtatgggataaagaacacaataaatgtatttgcacttgtttgtttttttttttcaccctgcgggtgtgtgattttcccatacgacatttttctgtgcaccaatgtcacaaatttagaagtccgggcagcctccaaaatctgtttggcagctgttacagcggcatctgattatatggattctgttgttaaaggtcttcaacg

SEQ ID NO: 85596 - DNA, 719 bp, Citrus clementina
  Intron number 2 from transcript clementine0.9_023251m (loc us clementine0.9_023251m.g) derived from phytozome v7.0 (c hr-ID scaffold_7; pos 4425628 to 4426346 reverse strand)
gctgaggattttcgaagcctggtaagttcatttctctgtatttttcttttttttccctttttcatgttttagtagttagcgtagtcatttttgagagtttgatctcctttggggtgtaggacaagaagcacttgtaggtaataatccatggaaaatattgttagtgtacaccgaatcgttatgtcatttggaaattgcaattttacttctgattgataaacttcttgttgaaaggctaaaaggtttctcatcccgtgatccagtgttaacatatgtggttgagtaatgattaattgtccacttttttagggatttgtgatttatattctggtgtttttcttggctctgtccatcaaaaaataaaccacaaaaatagaatataatcctcacttattttcaaagacttaaaaacaatatacttatgatgctttaccttttgtttcaagtctcaatgatcttgaagtctagttacgtaattactttgtggagcatatgctaccttttaaacatatatatcaccactctgttcggtttaatatgtgttttggtgcacctatccatgcgtgattaatgtggtacattactgagtgtgcttatatctgagagcgtatgcaaaatggtatgttttttaaccttggcaactttaaaattccactcatccatgctcctattgtgtttatacagatctctgaatttaatctagagggcttcattgtagg

SEQ ID NO: 85597 - DNA, 592 bp, Citrus clementina
  Intron number 1 from transcript clementine0.9_023013m (loc us clementine0.9_023013m.g) derived from phytozome v7.0 (c hr-ID scaffold_3; pos 2196858 to 2197449 reverse strand)
ccctggtcaagcacatcagagctcctgttcatctcgtaaataaactttctgtttaccttccgatcaattctttcagtttcttttactggcttaactgacaccgtttgatttggttgactttgttgcatggcctctttattctgaattagagacagatctgaataataattggaaattgaattgtgatttggttcagtttactacatccgacaagtctgcttcgctttttctcaattatggaatttcaaatggtgtatttgcaggcttctcaaaaaaaaaaaaaaacggtgtattgtcagggattttttaaattttattttgaacttgataaactttcttctgatgaagtttactgaaaatttcacgtatcttttttccgcttggttaccaagaaaatgcatgaccgaaaagcctttttttttactaaaaaattttcatcatttaccagcatgttacgaattaaaagaataaacaaaagttaagtcacttttttctaagatcgccttctattttaaacctttgatattttgttcggtttttttgtttttttattttgtttttgtggactaatagtgtggttaattgatcaggt

SEQ ID NO: 85598 - DNA, 801 bp, Citrus clementina
  Intron number 2 from transcript clementine0.9_022005m (loc us clementine0.9_022005m.g) derived from phytozome v7.0 (c hr-ID scaffold_58; pos 1376269 to 1377069)
atagctcagatcaggtatccctttggtctccattcataacatcgctggagttgtgttgctcttctgtcgtttgtttcaagtttcccaatgtagtagcagtttatttttggtttgcatttgaggaaaaactaatttctccccctctctctctctatatatattatcaatatgtttttatggagtatatgcaatgcaaatgatatattaaagtgaatatgtgtaatttgaatgttaattttcttgtccaacatcatcaagttatcagactgaattctacaggctagtgcttgatatctatgggttgccaacctctggttaagcttgaacttggcttgtctgtgagcaagttatactgaatggagtgttctgtcgagtctaatttgaactgtttaggtcactagactctctattgtgcatgttagaagaaataaataatgccctaggagagtgtaaatagaaaaacttttgactaaactagaatgtctcaaatatatttgggtcatcaaagaacaatagttctatttttggctttggaaaaactgtaatttttatggttacaatttgctttaattgatttgctttgatgcaaagtgcttggtcatctttactttggggagatatttgatgaatattaaattatgcatgcagaatcttatttcagctgaatatgcatttcccttttcattagtgtaaaattttacataatatatttggatctaaacatttgtgattgcattgggtgttaatacatttacccatatgttttcctttatgcttattgttgttttgtatgcaagatct

SEQ ID NO: 85599 - DNA, 893 bp, Citrus clementina
  Intron number 1 from transcript clementine0.9_006563m (loc us clementine0.9_006076m.g) derived from phytozome v7.0 (c hr-ID scaffold_10; pos 1085495 to 1086387)
gaaggaggcttgctggagctgtgccggtttgtttggtaagacttcaaagcttatttgtttatttattcgatttggttttctgttaagggagtgaggaagtacaaaaactgaagaaacggatagaaaattttctcctctctctctctctctctctctcttttgaagttctcttataatgtgttatacagtatgtaaactttcgttgtttgttcttaaatgttttgtggtcaaaatattgatagcttttaatttactgtttaattagtttataattaaacagcataaagtttggtctattagtttacttggtgcctacgaggtgtgagggagcatagggcttgctctttgggagctttaagcagtgcattttaggtttgtacttttatttcactagccatttctgataacaccaatgatgtaatcaatgtaatgtgtatctattatttgataaagagttgtaattgtaattgatgactaggatttagcttgtgctttgggtatgagggaggattgtatttctccaattagacttactgttagttctcattcaggctattctctgagaatactcttcattttgggattgtgagatgttgattgtctcgtaacctttagcatttacagttcatattatacatgcatacatatatatgcgtgtatacacacacacacactcttgtatacttgtttcatggagttttgcccctcaaaacaaattgtatgtaaattaaattattcccagcatccgggttcagtcaggtacttgatatcttggagcactttgctaaatgttagaaaaaggtctagcaggtgaaatcatatttgatatgttattcatgaaaacaataaatgctaagcatgattcattgcacttctgattgggcaggatattg

SEQ ID NO: 85600 - DNA, 658 bp, Citrus clementina
  Intron number 3 from transcript clementine0.9_005254m (loc us clementine0.9_002686m.g) derived from phytozome v7.0 (c hr-ID scaffold_4; pos 1567370 to 1568027 reverse strand)
tcttctaaccaaggggtaggtatatttgtacactgcttgtgttgcttcatatattttatttgtttatcttatcgcttgcatccctgagtggttgcattagcttttatacaaatgacggtctgtgtatattttgcatcattcttggaccgtggtgatataatgttaataaatatttgaactgtctcgacaaaaatatgataaacatggagctgaactctcctgaaatgattttgcctgctgctcatatgattgcctaatgaaaatctttaacacattgaaggttccattgagtatcctacggaatttgtctgcctgcatgtcataatttgctgggtttgattgttgagttgttggttcaatgacatgagtattgaaagatatatatatgatgtgctgtagggattatggattttgtgtgaagtagtgggaaaattccgttgtaaagtctcttatatttatggtcaaaattactgctaaatttaaagccgagctatgctaacagactcgataaaggaatttgtgcctgttctgtagtgttatagcttatgtggatttcttctgttgtgcgtgcgtggatgctgtttgattctaatttcagccaactgtgtttgctttttgaacagggaggtccagctccggctttaatcaaggctgaggt

SEQ ID NO: 85601 - DNA, 957 bp, Citrus clementina
  Intron number 1 from transcript clementine0.9_005254m (loc us clementine0.9_002686m.g) derived from phytozome v7.0 (c hr-ID scaffold_4; pos 1568704 to 1569660 reverse strand)
gcggcgcccctccttcagcggtagtagtttttctccatctcctgatttggatctggattttgttttctgtgtttatgaatgatgttttcatgtggatttgtttttgtttctattggtttggtttgttttcgaagaaagttggatctttgattgattgttgtgctgttatatattcgctaagctgatataattattgggttggttttgttttcttattcaattctgcgtgtcttgttataatgagattacgtgggaaatatggttctctagttcaaattttattccagtttacttgtattattagcattatgtatttatttgatcctttagttttaattctatgtttttctcttttctggtagttgattatcatataatagtcctaattcttggcggggcactaaacactttgtgtatctgctgtaaatatggacggaaaagaatatgtaggctttaggtgggcattctgtgagtttgaggttgcccacaaaggacctatgcacattgtttgtttgaagattggtaattttattggaggtgtgtgaatgatgagaggaaaatatttctcaacctctatagggtgaatcttctgaattcataactttttttttccttgttcgtggaattatattctggtctgctgacccatgaccactttgagtcctttgtccaaatatattgaaccctgtagctttggcttatattagttgagtatagtttctagttctttaaacagaatgaaaacagtcatacttatgaattttaggtagtttatattagctgtaatttacaaccataaattttaggtagcttgtatagctgtttgctacttggtgtttgttgttaggtcttttctctatcccttgtgttttcttgcccgttgaaggttcttgactcattcattaattgcttgttgttgtagactggagactcacggtttgagggtcgcgagcgggt

SEQ ID NO: 85602 - DNA, 722 bp, Citrus clementina
  Intron number 2 from transcript clementine0.9_025845m (loc us clementine0.9_025845m.g) derived from phytozome v7.0 (c hr-ID scaffold_4; pos 3125881 to 3126602)
ttgaggtaatctactgacttgttatattctgatttttgtttaaacttttgaaaaaatccggtcatggtgtgaatttaaagcatttcataagctgtcaagactggcagctgtcgtccttgcgcctcaatccatgttaatcacaagaaaatcaaattcgcattcaatttttcttttaagttgaatttgatagcagagttggaatattaatgacaaagaaactagaatttgatatttaagcatttcataagcttatttggattgatcctcacatttgctcactagtggtgagtcttgtttcttatgctttatactaggcacaatatttagaattactagtcatacataagtagcttgcatatatggcttgtaccaatcttttttccctttctttctttcttttccttttttttttggaatttttctttatttcataaacattgtgcatgatattttcataatggtaaaacttactttttttttaaaaaaaaaaacctcattttctacaacttgttttatagctctctcagttttacagatagagagtggctttccattttctattagttgctgaatgaaaatatattgagaaattccctaatggatttctggagattcaattgattttctacagtccacttttggttctagtttgttgcaatatgtgcacttttaccatctaacatgtttaccatttttggtccagcgctcattcttcgggttta

SEQ ID NO: 85603 - DNA, 836 bp, Citrus clementina
  Intron number 1 from transcript clementine0.9_019030m (loc us clementine0.9_019030m.g) derived from phytozome v7.0 (c hr-ID scaffold_4; pos 1482933 to 1483768)
aagagttgttaaaggtattgccttcttgtttgatatgatcagatctgttttctttttctcaaaatttttatgttgatttgctttgcttgattttttttttttcacggttctcttgatttggtggtttttatgtatgattgttggatgtcaatttaaaaaaaaaaagaattgttgctttggttcttttgttctggtttgtaaagtggtgagatcaggtcaaagctaaccttaaaaatggactttttatttccttttgtgcttgtatgtgtattttgttggcggtgttctatgtttttgtgaagttcccatgttattattttgtttgtggtgttctttgtttttgttaagttacatgtcatttggtttatttgttgggaagaaccgagggaataaacaagcttaattaatcagttaaattaggttgattaagcatccaaaaaataaagatgtattaaatctatgtgattctttgagtgagcatcattttttttaatattaaaaaaaaggaaagaaagaaaggttttgagacctcatggatttgatgttctatctatttgttgagtcttctccttctttgcagttcacctgaaaattcacatagtttgtttggtttaatctcttaacttttgatatcatatttgtcaaaaaaaaaaaaactctattgaatccttggagttttatttttcctttccttttttttttttagtttggtttttcaatcagcttttataacatgtttgtagaaattatacttgcatgatttgcaatttgtattcggaactttgttattttttaggtagtgatcgatgatttaaactattaattttttgcaggaa

SEQ ID NO: 85604 - DNA, 582 bp, Citrus clementina
  Intron number 1 from transcript clementine0.9_023148m (loc us clementine0.9_023148m.g) derived from phytozome v7.0 (c hr-ID scaffold_24; pos 3593709 to 3594290 reverse strand)
tacaggtatgtttcttccatcagtcttccaagaaaagaatatagattttttccatcaacacgattctttttttcttgacgctttggggatcttgaagatattttcttgtttgctttctgaaagattttactttgataaatttgaagatctttagttcatcagtgtttatattatagatgctggaacgttacagcttatcgaatttgttttgttaatatatgtcaaggtttctgtagaacagtttttcagctagtgaattgtatttgaacttttaaaatatgtaacctgtaatttgagaaattgtaacgaaaaagtttggagaactggaacttcacaacacgtaaaatttcaccttttattttttatttttttcagcttcaaaatctatataaaaactatggatgtttatttgtgattcagttcttagcttgatgattctgaaatctgcagcccttttttgtttattataatatatcttatttttagcgagacttattaatgaggctggtagcatattttaatggggttttatttatttattgcgcaggggggacacggccttttgtagtttcgagtgcagag

SEQ ID NO: 85605 - DNA, 310 bp, Citrus clementina
  Intron number 5 from transcript clementine0.9_018552m (loc us clementine0.9_018552m.g) derived from phytozome v7.0 (c hr-ID scaffold_3; pos 7191517 to 7191826 reverse strand)
ccaagctggaacctagtgttggacacgaagagcttgtgagtggttccgatgtaattctgctggtgttgcttgttcacttttctgatcttttgatagtttgtttagtatgttactaacccataatcatcacttggatgctatatattgtcatatataacttcttttctttttctttttttactgtgtattttaattctcttttgatgttatcttttcactttgattatttatagcatttagaacgattcttacaatttttattctcttttctgcagtgttcactcttatcaattgtggggaaagtgaagga

SEQ ID NO: 85606 - DNA, 707 bp, Citrus clementina; identical to SEQ ID NO: 82183
  Intron number 2 from transcript clementine0.9_022592m (loc us clementine0.9_014016m.g) derived from phytozome v7.0 (c hr-ID scaffold_3; pos 1750860 to 1751566 reverse strand)

SEQ ID NO: 85607 - DNA, 828 bp, Citrus clementina
  Intron number 1 from transcript clementine0.9_008116m (loc us clementine0.9_002530m.g) derived from phytozome v7.0 (c hr-ID scaffold_4; pos 3031337 to 3032164 reverse strand)
tgttactgaagcttttccttgattcgttttagcgtgtgagttaaactatgttgctttggctttttttttttttttttttttttttcccttttttgtttgtttgaagtgatgatcttctttactggctgaaatgtgaatgggaccgttgttattctttacttggatcgttgattaaagcagcttttttttttttttcaaatttttggtttattttatatgctgccatatgattttgccgattgaagatttgaacttgaaggagttttttatgaatgaatcatatagcatttatttatttatacatgtgtcacttgctcattgttgttgttgctaataaaaagtgcttctcgttggtgatcaaaagtgctttcatctctcggattcatacttgaacaatcagtttgttcttctaaaatcagcgtgtatctgctgtgctgttcgttcaagtatgtatccagcaatctgatcgtcttccaagttttttttaattattattattattgtttattttattttacctgtaaaagaatggatggattagtctgttatttagttggtatggattttgacgagttcaggtgtgaaatgataattttttttcccttgtataatttttattaatttttaaactcagaaatctctcctgggatgcagtgggtttgagattcaatttttagtttaaaatattaactttagtcaaactttaagcttaagtaatcagctgtattattgatatggtcattttcattgtatactgggttccaattaactgtttgttattgcaatggaacagatcttttgggctgcttagattggcgcttgatcagc

SEQ ID NO: 85608 - DNA, 688 bp, Citrus clementina; identical to SEQ ID NO: 80065
  Intron number 1 from transcript clementine0.9_030626m (loc us clementine0.9_030626m.g) derived from phytozome v7.0 (c hr-ID scaffold_2; pos 3147617 to 3148304 reverse strand)

SEQ ID NO: 85609 - DNA, 872 bp, Citrus clementina
  Intron number 1 from transcript clementine0.9_011579m (loc us clementine0.9_011579m.g) derived from phytozome v7.0 (c hr-ID scaffold_4; pos 4112301 to 4113172 reverse strand)
aacaagcttccacctttcatcatcatcactatcaggtttgcctaacttcctttattttctttttctttttaacaatcgcctttgtgtttaattttatatcgctgttcaaaattttgaatctttcattattagacatcctaacgcttaatcaaacttaagattattattattattattatttggctatgggttttagtagatgaacgttcgatttcatctatggcggtttggttcgtagattcagtttttgcttacttgcacgagatgcctagataattgatagggctgtatgacgtttgtaatcttgtcgaaatatgcagtgacgttttatcgcttgtgtttgtccgatgaattcattttgtggggttatatatgttattaaccgcagagctttttgttttcggtaattgaagtgttatggatttgtgtcgacagaactgaagaagtatttagtaggagttaatttttttgggctagggctgagtttcctcttttatgctcttcgttgtggataattgaagccagtgcgtttttgtatagatgataagattgcttacaagtttacagtgtgaggatttgtctccttttatctgcatatttctcagaggtttctgctagaattccagtgtctgttttattgcattttctctcccctgttgggttttattttaataactttaaatttaagagaactgaactttgcttagtagctttattaggctaaatcactttagcggagggttgcagttttgtttccatgcaattttggtgcatcgatttttcattttgaatttcagtatggttactgttgtttttgtcacttggaactcattacaggtagttacaatttttttttttttaaattttcctca

SEQ ID NO: 85610 - DNA, 555 bp, Citrus clementina
  Intron number 1 from transcript clementine0.9_022455m (loc us clementine0.9_022455m.g) derived from phytozome v7.0 (c hr-ID scaffold_2; pos 4466832 to 4467386 reverse strand)
gcgcttcgttttgccagccttaagtaccagttcaggtagtgtaacccccaagtaccagttcaggtagtgtaactaccaaacaaaaaataaatagataaataactagaatattaatcgctagaagaaggccttgaacctacgaccttgtggttaacagccacacgctctaaccaactgagctactccagcgagttcgagtaattctttaatgtttttttttgtatgatagaatcgttggctattggctacaccgatttgcttaattaacttgtaacatgctccaaaatgttctttaattccatgaaaatcatttggttttattaacagttctccggaatggatgagtggtagacagtgcactaatcaccatagttagacagtgttgtccagtcctcaaacccacatttttgaaatgtgcattaaatggtaaatgaatgtctgcatcacatgagatcaaaatttgttagtatgctatagctttcagtatgtgtttgctagttcaaatcataaaatttgcattagatctctaaagcggttttgatttgatagcatttt

SEQ ID NO: 85611 - DNA, 870 bp, Citrus clementina
  Intron number 2 from transcript clementine0.9_004132m (loc us clementine0.9_004132m.g) derived from phytozome v7.0 (c hr-ID scaffold_14; pos 893152 to 894021 reverse strand)
caagaggaaggcttcacatttcacaggtaaccaatttccaattaactcttttttttcccttaaaataaatattattttcatttccagggctaatgcttctttgtgctgattcctgtctctgttaatttgttgagtatatatgatttttataagttttctttaatgggtttcgatagaactattgtttaaataacattttttaaatgaaattctttttttttggggggggtttctatttattgtattttgactccaatcaagattgaatcttgatcgaacaagttgctgatgataggaaaaaacgaagaagtagaaatcactaaaacaatcctaaccgaagtgaagaacatagtttatacaaagagagaagacacttggatttacaaggttcagttcacagagtacctacatccatggctgaaaacagcttttagcttgacctttaattattggtgattaatacagaatgaattaacatgttccagtgaacaaagcattcctacacaagtttccttaataatgaccagatttacaagaaaatccacacataagatacactggtgaccagcttaaaattgtaactaactttaacagctctggtggcccccttcatttgcttaatcaccaaatgccacataggcttaaataaccatcaataacagaattttaagccaaacttgatcttcgcactcctttaccaagtggattcaccatcttcgtttgtgttttggttcttttttcttataggtgttctggagttaaatggctgagtttttagttctgagaaatggtttgtggtaaaatggctaataattttgctttatgtttaactcaggcaacacttgggatcggtactgcccccaagaaaag

SEQ ID NO: 85612 - DNA, 249 bp, Citrus clementina
  Intron number 2 from transcript clementine0.9_022193m (loc us clementine0.9_018701m.g) derived from phytozome v7.0 (c hr-ID scaffold_3; pos 1564293 to 1564541)
catatagtaagctcttcgttttttatctcatttcaattttcttttctcatatgcctctgcctgaaaacggaaatgctgttctattacgcctggactttgtttatttggttgatattttaattttatgcataagaatggatgtttgattggggccaaaaaaataataataataaataaataaataggctctgttgaagctaattagtacttcattttttttgtagctgcgacctgtggtggaaacaggat

SEQ ID NO: 85613 - DNA, 1002 bp, Citrus clementina
  Intron number 1 from transcript clementine0.9_019679m (loc us clementine0.9_012725m.g) derived from phytozome v7.0 (c hr-ID scaffold_2; pos 4639152 to 4640153)
gaggtaaattaaaaatttaatctttcaattctaacaatcaaatagtttattttttaattgaattttcaaatacagttatgattttttttccctgtatttgattattgagatcgaattcttatctgggcttaatttatatccatcaaatgtttcagcttgaatttatttttgcttaattgttatttggcttgttctgtcttaatttacatggcttgttctctgaaagtctacagctgaatttgataattttttcccctcttttccccttgttttgggctgtgattgagatggaaaaaaatgtgaccactttttgtttcaacaattttatgatttgatagatgaaatgagcatgttataatgcactctgggtaatttcaatgcatttagcataaatttagatgtaaaaaaaatctctattgagcaacaaatagctatgaaagtaaagagaaagaaccgtgtatggtctgatgtgggaatcagaattacaactaaactcttatgtactacccagataattaaattcagtcgatggtgttttatgtattgctgaatttcattgagcatttgctgatacctgaatcatggcaactccaggaattgtttttcccattagattaaatttgtttttggggaagcttttagttttattttttgttgaaaccattacatttgtttgtttatggtcaatgagctctgtggagtcattaagaaataattgctgccaatctaactgaggaatcatgtgactaattgagctacctggtgttacaaatttctgtccttgggttcaagttaatgcaatggaagttaacttatcaatttagaaactaaagtagttatctcttgagtcttgagatttgattgtcctttcttatcgattgggattgtctgtattgaaagattatatatttgttttactgtgatcattgattttcttgaaagaatgttcaattcccatgcagtgtcttagttgagttatttccgattttgcaggttttaggg

SEQ ID NO: 85614 - DNA, 933 bp, Citrus clementina
  Intron number 1 from transcript clementine0.9_018718m (loc us clementine0.9_018718m.g) derived from phytozome v7.0 (c hr-ID scaffold_4; pos 4753250 to 4754182)
ctgcccttgttggaggtaaattttattttattttgttttgtttatttatgggatcttttctgtttgtcaaatgactaatatggtgaacaaaagttaaatgaatttggattttgtttataaaagcaccaagtgttgatactacagtctgtggttagcatagaccttactttatgatgctacacgtaagttgagttgagttgagccaaatacactttagcttactgaactgtaacactatgcttgaaaagagcttaggcaaaggggagtgattatttgatcctttggttgtgttacttttcctcgtttgctttcactaaatggcttaacgccagcagcaaagagaaaccatcctatgtttattttattattttgttgttttatcatgaaatggtatatgtatgttagtccaagtttttttttttctgtttaagtcaaagagaaaaatgtgtttctttgccttcagtggcctttttctttgcaatctcttatacatacttgttgaaggattaaattttgtgagtctggaatgctgatacatcttttctccaactgtatgtctaataatcatctaaacctgacttgataaagagaaatgaatatcccccgtatttttttttctcttttctcccaatttccggttgattctacttctcttctgataaacaaagtgttaggcctgtaaatgtttttccgtcttttatgcgttttgtctaaatgcaaggctttttggtagttcttgggtggtaaactattgatcttgaacatattggtaagatatgtttaactttagtttttttgtgaattctttggtatggttgaatctattttaccgttttgtagtatacttgtctggaccttgattataagtgcaacttctttgctagctggcattccatctaattattattaatattgttggcagtgggtggtctt

SEQ ID NO: 85615 - DNA, 579 bp, Citrus clementina
  Intron number 3 from transcript clementine0.9_017445m (loc us clementine0.9_017445m.g) derived from phytozome v7.0 (c hr-ID scaffold_7; pos 4344703 to 4345281)
aagaaggtgatttattcaaatctgaactagttattatccttctgttgtttcagttgaagattctcttttaaaacacaagaccatattttggacaatagaaaaaaaatttaaaaaaaggatgaagataagacaagataaaaaatgaggttatggtgatattgaccagttagcatgagtagcaagttgggacattgtattttgaattttcatagtttatcctatcaagtagtttgctcctcctaaaaagtggaagaagaagaaatcagcacatgattttaatggttttgtttagattcttatcatggtcagaatcctttagaaatcaaatcatgacaattttatccaaacatggagccttagagagttgccctttggactctgtcaatgctttgcctgcagtaggaaatctagagatcaagtcttgtgatgatctcttgcttcagtaactttgtgttgtccgtatttctgctgccaatgcagctgctgcatttcagatttctgatagtggttcttttttatctttgcaatttgttcgacattcagttttttttaattgcttgataatcccctttttcagat

SEQ ID NO: 85616 - DNA, 874 bp, Citrus clementina
  Intron number 1 from transcript clementine0.9_005808m (loc us clementine0.9_005808m.g) derived from phytozome v7.0 (c hr-ID scaffold_7; pos 4395417 to 4396290 reverse strand)
ggtcaaaaaatttcaaagcttgatacccttttaaggtaaagctttttttttttttgttcacagatcaagtttagattttgtttaactgggtgttgtctataagttgattctgtatctgggtatttattatggagctaggccgaatggtttttggattaaagttgagattttgggacccttttggggtttattgaatctgaaccgagttgtggattgtaaattgttgctataggcgatctgatcgagtgtggtttttgtatataataatttaaaatgaggctctgtgaataacttttattgaccttcaattcagtatgtgcagtaaatactgtgtcggttcaattcattgggttgttggttaaatgtgtatggatggatagatagagcttgataaatgagctgatttaaagactatcatatgtttcgcaccttcatttacttctttttcttggttatttaatagattattctttctttctcaacaattttattgcctgatttgttgacatgttaattcattattcatgattttactatggactggcctgaaatggagaatctctcattttaaggtcaagtgctctcttaagatactatatagtatcgtcgtgttaattcattattcatgattttactcaattgaaactgttttgccttgccatgttaagcatatgattgtaatgagctagttactgtagcgggagtattgccattctccggtttcttgttgggttgcttgagtagttaattagaatttgaaatatgacgctttgagttgctattatacagttcctagatggatgtctagtttttttctgcagaaaattcaaacttctgtggttgggatagttgactccttgttcttctctaaaag

SEQ ID NO: 85617 - DNA, 247 bp, Citrus clementina
  Intron number 1 from transcript clementine0.9_007439m (loc us clementine0.9_007439m.g) derived from phytozome v7.0 (c hr-ID scaffold_7; pos 4820162 to 4820408)
ggcctttaaagaaaccagaggaagaacaggtagaggtgagctcttttggcttgacgtagtttaaaatctgatatgcccgttgatttgttggtttttgctttttctattcaaagaactttaacccctttggaataatgttgaagctgtctcttctgaaatgctatgtgctcccttgttttctgttattgaaactgtcattaattgattttcaggaattacctcacgaaccttttatccctcttacaaa

SEQ ID NO: 85618 - DNA, 845 bp, Citrus clementina; identical to SEQ ID NO: 81972
  Intron number 3 from transcript clementine0.9_009474m (loc us clementine0.9_009474m.g) derived from phytozome v7.0 (c hr-ID scaffold_3; pos 1214478 to 1215322 reverse strand)

SEQ ID NO: 85619 - DNA, 658 bp, Citrus clementina; identical to SEQ ID NO: 85418
  Intron number 2 from transcript clementine0.9_023726m (loc us clementine0.9_023726m.g) derived from phytozome v7.0 (c hr-ID scaffold_2; pos 1952783 to 1953440 reverse strand)

SEQ ID NO: 85620 - DNA, 946 bp, Citrus clementina
  Intron number 2 from transcript clementine0.9_013486m (loc us clementine0.9_013486m.g) derived from phytozome v7.0 (c hr-ID scaffold_24; pos 2117218 to 2118163 reverse strand)
acaaagctacagcgcatcatcttggcttgctcaaggtacatgaatttttctgttgaattgcaaagtgtggtgcaatggaaaatttcaatcagatcctcttaggtttttgaatttccactcacccccaatttagtgaagtatccccccttattacttaaaaattccccttttattacttaaaatattgattcttttatcattcatgaaaataataatttgaaaaccttcagataaatccccactcttttcacagcttgtgataagcttgtaaataatttgtaaacgttaaaaaataacgtatgtttaatcatgctcgttgcctgcatagagtgagttgtttgtgaagttttatatctcaaatatttccttttcttatataagcaatgaaaattgctccagtattttaggggaatatattccacttttatgttctgatttggaagagtatagtgtgtggccaatttagaagggatattatcttttactatcaatttagttttagcacctttgtttgcttcactaatgtatcttatgacttatttttagaaccaatccttccctacattaaataattttgaaataggaataagattatacctcataactggatgccagaggaaagtctatttggcatgatcaacgtattgaatttgatgttatagttgacttttgatgatcaccttgttagaggctaatgtgagactggttttctttatattcagttgaagaactgtgaaaacataatttttcaaatgtgatagttaacatgataactattggttatgtattagaaatgatctaacctttctgagtcccagcctcatttgatcatcattcacactcacctcttgctgtttcattataattttatattttgacgatgctatatgtgattatttttgtgtttttaggctaaacttgcaaagctacgaagggaacttcttac

SEQ ID NO: 85621 - DNA, 1037 bp, Citrus clementina
  Intron number 1 from transcript clementine0.9_009948m (loc us clementine0.9_009948m.g) derived from phytozome v7.0 (c hr-ID scaffold_7; pos 3465185 to 3466221 reverse strand)
gcaaccaaaatattgcaatttgccaaggtatgctgacctttccctttcaattttttccccctcacaagctttttagtaatcaaattgaaagttgtcttttagtcatttgaagaccaatgatttatactcaaataagtataatgaatatgtgatggagttgaatttttcataagctagagatatgaactgttggaaacatgaggcctgttagtactgtatatgacgtttttctgcattttctcaagaaccaaacgggcagggtatcatatttgggattttattattgttgttattattggtttaattgtttgtctgtgtctattagtttggcttattttgaatgtctttgtagaagtaattgtcaagcctttgtaatttgtggcatttgaaaattacatcttttcggtattgcatacccccagtcaaaaacagacaaaatttgaatttcatagccaagttggcgtgaatgcttgatcgtgatttctcttgtcttttttcctctggtttcctcttttaacttcttcttaatcacacgtttccctgttcgtgtcctagttttggttggtttcctctgttgagaaacctcactcctgacctttctcaaaaaaaaaaaaaaaaaaaaaaaaatcaattgtgaactttaggactgtgatcccaggcatttaatcaaacaagaaaaaaaacttttttcttttctaaatattgaaattcttttgctggtaatattttctgtcagttaactgcctaggatttgtgtttttatttaacttggttacctactgcagtaaatgaaaagataacatgtggaccctagttaatttataattttatgcgtgattggttgtgtgaggtattcatagtgttgttctgtctctgtgtcatcaatggcttaatttttccccaacagtgattgtaactatcggtcttgatttatggttttgctttattttcaactttcagcatttcatttcccaattatcattttttccttttgtgggttttttgccactgttgaaaatagattcgatccaaaattg

SEQ ID NO: 85622 - DNA, 759 bp, Citrus clementina
  Intron number 1 from transcript clementine0.9_014838m (loc us clementine0.9_014838m.g) derived from phytozome v7.0 (c hr-ID scaffold_10; pos 3794404 to 3795162)
ggttggactgagtttgctacgacggcccctcacaggtaatcaactaagaatatgcagcataatgcatgcatacacgttaatgcattcagatcccaccctctaattactctttgggaagaaaccatgcaattgcatgccagtatctgatttttaagattttctaaaaaaggaaatcaataaaatgaaatatgtgtgtgtagatacaaacatacgcttgtgtttgtagggcctcgtacttaccgttaataaaatttgaacacggtaggtataatagtaataaacttgtattgattttaatctgtatgtcctcaggtttttaatgatatcagcatcagcattaattgaccggactatgttttgacctactgcagacatcctctattgaattgaactctacgaactcgcttttaatctgagctctcctaaacttttaacaattaatcttatgccacttatcttttaatgttaatatatgattaaaatttaattaattttattttttaatttatttaccgttagttacatgagaaaattttgtttaaaaaaagaagggtctgagaattttagatctctccctaaaaccacattgacatgctttagccttttcttatcatcattgtcaattttattttgagaatttcgtcgaaaaacaaactggcttcggaaaatagcactaaaaagggtctaaatctctagtgttttattgaaaaattcagttaacttattatttggaatttatttggttagggcaagggaaat

SEQ ID NO: 85623 - DNA, 551 bp, Citrus clementina
  Intron number 2 from transcript clementine0.9_016648m (loc us clementine0.9_016680m.g) derived from phytozome v7.0 (c hr-ID scaffold_31; pos 1017873 to 1018423 reverse strand)
taccctccaatttaccaggtattttctttctgtgtatcgaaacacaaaacgagaagaacagtagaagttttccttgtgtttaagcatcttttacttccttttttctttgtcaaaatagataaataaataaagcttcttaaattgggacttgagggattttagcattaaattgacataggaagcaatgccatatgaagtgaaacaattcaaatatgttaattattcaagaaattgatttcagttaattgtcagaagttagtgaatcagactgtagagattcttgagtgcattagtcattttatggaaatgtttgttcatcttataatatgattcatcatttagccttgtagatatagatgcatttcctgaaaagatgatactccttttactgttattgtgtgttatagtgaacgaattggttccatttcccaatcttgcccaatttccaaagttaacgaattaagaacattcatcataattgtaacacaatactatttaaattgatcttcttgtattgataaattctctcattttctatgaacagtgtccaa

SEQ ID NO: 85624 - DNA, 806 bp, Citrus clementina
  Intron number 1 from transcript clementine0.9_016648m (loc us clementine0.9_016680m.g) derived from phytozome v7.0 (c hr-ID scaffold_31; pos 1018705 to 1019510 reverse strand)
atttgcggagccagcttttcaggaaatttctccacgttagtagctttcctttttgttgttgtctttgttttttgttttttcatttttgggtcctaaatggagaaataattgagtcccaaagttttcattaattgaaatgattgaatcttcaatcgtttcttagctgcatttctcatctgggtttgtttcttaaggtgggtttaaagctttgttccactttttctttgattcttttcttgatttctcatctgggtattgaatcttttgccgaattttgttcttttttgactattttttgctcttaatatgaatactggctctaactttcatctcggtaatttttttttttttttttgtttattgacttggctgcatctacacttcactgatgcttgtgagagtataaataagtcaaagctttattgcttcgtctgatgtttgatactatttttgtttcatatcaattggtgttcattgaatagagattttgtatgagatgaattttgattcaaatatttgtagtgaaaaggcaatatatgccgtagtacttactatccacacttcttgtcaaattcaattgcttgtcttctgatcaagtcgattgtataatatatcttacggttatgcaataaatcatggaggccgtatggattgtgactatacttgtatagaggaccatacgcaagtttgacaaatttctggaccatgaaaaattgtcaccattcatagtatctccgtcatttgataatgtccttttccaacttttctcaggcaaaaccagctaaaaagaaagaaagtggtatcat

SEQ ID NO: 85625 - DNA, 935 bp, Citrus clementina
  Intron number 1 from transcript clementine0.9_004758m (loc us clementine0.9_001947m.g) derived from phytozome v7.0 (c hr-ID scaffold_31; pos 1691251 to 1692185 reverse strand)
aaagtaagtactgcgaatagatatgataatcaaacttttattatcctttaatttcttcctcatttcaaggatcctaaattacatagttctaaacttgcttaataacatgcttaataacatttttacacttctaaacttggaaaacatgcttaataacatttttacttcccatgttctaatagaggttggcattggtcgaattgtgtcaatccaacccaactcgtatatagtgcgggttgaaaaagtctagcccaacataactggttatattttttttaacccaacctgcaaaagtataagttaggaggggttggattggacttttgaaaaaagttcactttcatagtctaatttaacactttataaaaataaaacgttacaaaaataaataaattaattaaaaaaatataaaaacacaaatataaaattccttaaaaccaatccaatattcaaagtctaacaaataaattattagtttataattaaggaaaaaaaagtccaaaaattcaaagtcttgtttaacataaaatattaaagtctaaataccaatagtcaatataagtttaattaattgagagagttttattatattttcatatttatatttttgttttttgttcatatatatatatatttatttatttatttatatttatgatgaatacaatttggcaggttgagttgaaattgttcaacccaacctgcaagcagtataggatgggaatttaacaatccactccaacccgtttcttttaccaacttaacccaaaccgccaaaaatcatgcgggtggggtgggtttcacagcttggtgcccacccctagttttaaaacattttaaactacatattttctaatattctaagaataaacttttttaatagttctactttctttttccacattctctttcagataaacccacaattagtggta

SEQ ID NO: 85626 - DNA, 403 bp, Citrus clementina
  Intron number 1 from transcript clementine0.9_012858m (loc us clementine0.9_012858m.g) derived from phytozome v7.0 (c hr-ID scaffold_4; pos 6134444 to 6134846)
ctcctattcatgtaataattctcctccgcccttttcgttttttttttttggaactttccaaggttcaagttttgtatgtttccatgtgcatttcttactgacctatttacgtgcctcttcatgtttctgaacaacagagtaaattctgttagtttttgtttgagctattgcaaagtttgaaactttcaagctcgatgcaacatgaatgcttttgttgatgtatttatcacttacactagttttttaactcgtataaacttcaaatggtttgtttcataatgccggtttccgtttctcttaatttcttcttcatttgttaccataagagtaaggttctggcttttgtgtttaattcgtttcttaacttgtttgaatttatgatcttcatttttgtagacagaga

SEQ ID NO: 85627 - DNA, 560 bp, Citrus clementina
  Intron number 1 from transcript clementine0.9_001654m (loc us clementine0.9_001654m.g) derived from phytozome v7.0 (c hr-ID scaffold_4; pos 1367532 to 1368091)
ctgaactcagctttggcactacgtttcgtagaattgtgagttgttagctccataaagcttggattttccttctgctgaaactgttgtttcctctctgttatatagtcatatttgttgatttctttttctattttcgtttgtttaatttgatatcttgatgtttaagacgtgctaaaaactctgtttggcttgtgttttgtctaattttgtttgttaaaacactcaatggatgaaagttctctatgatcttgattattagtatacgttttgattacactacagtttggtttctgttacttagttgatctctttacttatggaagctgaaataccgtttcgaattccgtgttcttgttgagaacatccttttgggatttgattctgctgtacttttggttgaaacttgtctaaattgtttacgaagatattattgagttttaagttgtagttgcttgatcgtaggacattgaatttacactgaagttatccaaaagtaactgtgatgatggtgtgtatgacttacagggtgctggtcttgaaaatcttggaaatacttgttt

SEQ ID NO: 85628 - DNA, 833 bp, Citrus clementina
  Intron number 2 from transcript clementine0.9_001654m (loc us clementine0.9_001654m.g) derived from phytozome v7.0 (c hr-ID scaffold_4; pos 1368137 to 1368969)
agcatacttgcagagtggcaaacatcaaagttcttgtaagtagctttcttctgctccacttcatttcatctattactcctctcaatatgcgcaataaaattatacagacatgcattttttacatcaaaattgtatgtataggtgcatttgaatttgttatgtttgtgtcttgagaatgaatttggatttgttattgagctcttatggatgttttgtagctcaatactcttcaaggacctaaaaggttcagtggttttggtaatgtctcaatgaaaaagattttatttgtagatacaaacaattaagtgtatgaagaaggtttatatgatcatgttcaataatgtagccattcaactcatcatttgaacacataggaatagttctgttcggttgtttatgtaatgtcacaatgagtaagcttttgatgtattgatacaatcaattagaataaaagaaggattagatgattgtgatctataagatagcaattggacttctccttttcgtgggtgccaccttgtgtagccggtaaaatctctttgggttgaaaacaagagatttggggtttcaacccacacaaatgggtgggaggaggatttggttgccattaggcaaataataataataataataataatttattattattattattattatcatttaaaaaaaaaaaagctcctcttggatatatagtcattctgatttggtcgtttatttttattttattgtgcctttacttatcctatgcactaattgtaaatgatataattattcttttctgatcctctttcattgatttataaaggtcatattgctgggttctgcgcctt

SEQ ID NO: 85629 - DNA, 816 bp, Citrus clementina
  Intron number 1 from transcript clementine0.9_008662m (loc us clementine0.9_008662m.g) derived from phytozome v7.0 (c hr-ID scaffold_7; pos 575622 to 576437)
atcgacatacaacccacttggccccagagctaccggtatgtctatatttctgttatcagccttgtcagtgatctataatggtatgttttaggaacctgttactgaatcatttgattgctcaattagtcacatcccacatcactatcgaaggaaggcccttgggttcccttaactatgtagaacacaaacttgcgagggatgttacatatggcatcaaggtggcttgaccctaacattttgctattggaattgtaaaacaaaggggcgaaattgaagtttctgccattggtgaactgaatccatggtcacggagtggccttttggttttctcggctttattgtgcctagtcatatgaaatgcatcttcaattggtcaaaggtgtcatgggtctcaggtgctccagtgaatgctagcaggcttaaacatcacatcaggacttgtgtttctattgcactgatggcagaatttccttaataactgataatcatagcagtgaatcaaatgtagtttgtcaaagatcggtatagaagaagaataaatagaataagttactattcgcttgacctctgtctgttgaatgtatgtatgcaggcaatcaatggacatttattcaactgtcacctctccttcgcttggtttccttaaaccgtcaagtctgtcagcattaagcggttccatgtcttccttatacaagagaagtcaacctgcttcttatttggaatcttccctcagtaaaccactcatttctgatttagaaaaagaagaagtgctttcccctagagtccattggaacgtaccttcccgttcaagattat

SEQ ID NO: 85630 - DNA, 823 bp, Citrus clementina
  Intron number 2 from transcript clementine0.9_004028m (loc us clementine0.9_004028m.g) derived from phytozome v7.0 (c hr-ID scaffold_2; pos 7043899 to 7044721 reverse strand)
gttctgctctagatcctagtacgtcctctcctcgttctttttgtttacttatatttattttattttcttcttctgaactctttatctttattggctgcctgctaccgtatgtcaactttggttcatccgattaactttccaagaaacttgcccgtggttggactaattcaaattggatacaacgagctttaagccgacttaatttcctaatcttcataagtgtccccaatcctttacttaattgtttaaaagggtcatctgcttaatgaatgaaacgtgtaggctgagaatctggaacagctggattgaatacaaacatgtattgtaagaattttgaactttgtacattaatttattcattataactcgcgcacttgtcgctgaacttgaccatatgctagggaacgtgactggtcggctggtacaaatcatccagacaatcaatctagtaagcaatgcttaaaattttttgaaagattgctggttttcgagatctacagcacaacaaatgccaaatttaaaaaaaaaaaaaaaaaaggaggttcaatgattggcaacaaaatcaactataagttttctttattaaatatcaggacagttggcaaaaattgaagattttgtctagatcctccaagctaattggcttgtgacaggtgaccacttggtgtttcatacagcaacagcattccaaacattaattagcaggaattgtattgtcaagtgatttggttaactcatttgcaatctcaacaaagtgtgaaaaaaagaaaaactttaacctcattaacctgcaaaatgttacaggtccagtgttttacaaagg

SEQ ID NO: 85631 - DNA, 563 bp, Citrus clementina
  Intron number 1 from transcript clementine0.9_004028m (loc us clementine0.9_004028m.g) derived from phytozome v7.0 (c hr-ID scaffold_2; pos 7044707 to 7045269 reverse strand)
agtaccgcccacattctcatcttctctttcttacgtatagttttctgattttttttttcttctttttctttttcagttatttttaaataaaaagtttttttttttttttcaaaaagtcatatttcttttgtgaatgtccctgcgcgaacattaagatttcagaaaaaaagaaaatgcctcggtccactttatttatttagttttggttttatgacctgttgtgcgaatcctgtttattttaattaaagaaactaataaaagttaaaacctttagtttggaacatttaattgtgtcaaaaaaacgtaagcataaaagctcgtgttacgtgtgtgacttgttcgattatttaaagtcgtgttcgtcgaagcaaaagttttgaatgatcaccggaacttggaaggaccttttcgtccgtgatgtgacaaaccaaataattgtggtcttattctttcaatgcgcattaacacctcaatcttatctctgtactgacttttgtttcattttgatgctatgattatgatgctttaacgctggattgtggatggttctgctctagatccta

SEQ ID NO: 85632 - DNA, 655 bp, Citrus clementina
  Intron number 2 from transcript clementine0.9_030709m (loc us clementine0.9_030709m.g) derived from phytozome v7.0 (c hr-ID scaffold_2; pos 4691703 to 4692357)
ctgcccgccctagggttatcatataaaaagggtctgcaaccttatttgcaagactgttgatgagtttaataaaatatctttttgatgattcggttgtttgctatttcttgcttctgttttgcatcttcaacttttttggtcatagaaactataggattttcaaaacaatggtgtaattttcatctgtttgctatacagtgcttcatttaactcgaagctcaactttatacttgtaggagtagcagaaaagcccagcccgtgggataaaatatggataatggctcatataatataaagcccatgtatcatgggcctggtctggttaagggcctcttagagcccggacccaggctttatatgtataatgcatatgtttttttgtttaaagaaaaaaagctttatgacatataaaaacaaaaaattaaaattgaaaaaaaaactaaaaaatcaaaaaaaaaaaaaaaagtagccgaaacctgaatccctaaaattctcccctcactcagccgctctcattgctctctacctctctcccacgaatcacactcacccacccataccaagtgaagcaatcaagcaacaaaaagcagccgccggcagccacattcattaactcacagcgaaccggcgattacagccaccatcgttcatctat

SEQ ID NO: 85633 - DNA, 935 bp, Citrus clementina
  Intron number 1 from transcript clementine0.9_003503m (loc us clementine0.9_003503m.g) derived from phytozome v7.0 (c hr-ID scaffold_3; pos 3951252 to 3952186)
tcggtgctcacagtttcggataccaccggtaatcttatatcttcatacgttttaccattttttttttttataagagctttaccattttgttatttcgcctaaattgagctattgcactgttttgtaatgttggtttggaagctaagaaattgcaggagacaaaaaagtgattagaatcggtagctaaaaaaactggaatttgaggtttgctaaattatggtagttactattagaatataaaattttgaattcttagtttgtagaatttcagagttaggaacataacttattgcgctttctaataatttctcagcaattaggatttcttgatttaattgtttgagctgcggagcatttgctgggtatgtctgagtgtcttcctcgcagaagttttagaatcttttaccttgctttcttggttctgtttttattttgatatttaatcataggtgtgttgaggctgtcgatctactgagttttgatagtaattaaggtttatattacctattgtctctcaatttgtttgtttgcagagaaatgtcagtagaataaatgaaattaaaacttcaggtagcatgtttcatccctattattttagaaagcaaattaattttagttcagatgattaatgcaagctcttatactttttttttttttcattttctaggccccgtaaactgatacatgcacacacatgaaaacttgtggcaaaacaattaatgtgatggttcactcttgttgggttaaaagacgtatgcatgcatacctggacttgaactgtgtttgtttaattattgtaacatgttcttgataatataaaaagtctgattaatgttgctctattttcgcgaaattctatttgtgttggtcaattgaatattttccaaatattgattgcaggattattgaaaaaggcccaatatttgttgccagaa

SEQ ID NO: 85634 - DNA, 926 bp, Citrus clementina
  Intron number 1 from transcript clementine0.9_012471m (loc us clementine0.9_012471m.g) derived from phytozome v7.0 (c hr-ID scaffold_7; pos 1402958 to 1403883 reverse strand)
tcacaaggtatttattggtttttattttgctaaatgatgatttatttattttttgaattgtgattttatgatagtattatggttgtaaaaatgtacatagtgaaaggatattttgaaatggccttttaaggtatgtttctaattgttgtatttttggtaaattttgaatgcacatactgaagtgttctatgaacacccgattttacttgatagctaatgtttagcaactattcatcaacttatagtcatcggtagacaactgtgattatatttctcatctctgtggattaaaagtcacaagcaaaccttaatcccaaagatgcccttagtttcatgggttctgtgatattttattcgggtggaggtgatccttgattccatggtaaatgtccattctctttcctatcgaaaacaaaactggcatgttgttgtttgagatgctggaaattgggaagaatatttcatagctttcagaatggcttgaatgtcagtgtgaaatacatgctgtgtaagttacaaatggaattgggtgggaacttttctaaagcatatggtgtaagtaggagactgaggacatagatatttttatcccacttattgaaggactctttgtggtattaacttcactaatattaagaaaggaacagattccaaaagtattttagcacctgatgactataatacctttacccgtttaagtgtgtttatatgcagttggagcggggaaattgaagtatatattgactacaggaatgtgaactaacattcctctaacggagtagtatagtgtttgattgactttagtattaagaagttcattgtgtttaatttgcctacttttgctgtgatcttatcagttgttctgacttattattttgctttttgattcagatattctgcacattttctcgtacttgcctaagtat

SEQ ID NO: 85635 - DNA, 601 bp, Citrus clementina; identical to SEQ ID NO: 81711
  Intron number 1 from transcript clementine0.9_007016m (loc us clementine0.9_007016m.g) derived from phytozome v7.0 (c hr-ID scaffold_3; pos 1511146 to 1511746)

SEQ ID NO: 85636 - DNA, 625 bp, Citrus clementina
  Intron number 1 from transcript clementine0.9_010669m (loc us clementine0.9_010669m.g) derived from phytozome v7.0 (c hr-ID scaffold_2; pos 8272407 to 8273031 reverse strand)
caaaggcctctctctgtgagtgcttttgctaattcccagaacggttttattgcttgaaattgctttatcggctgtttaatgaaaagttacaatttctgttatgtgaggcattgttttttcttgatttgtgatgtaaagttaattttttttctgtgtaaattgaccaacgaaaagcatgctcggcttctagatcattgaatttgatttggaaaataatgaattgggatattggattgaacatgagaaagtggaccacttagacttactatggccattatattggaaatatgattgtcatggaacatttttacacctattatgttttgacctgtacattttcggtgaatcggttatgatgttactatatatgaattcaattggctgtttgtcattcatgttgtagtctgaagttttggcttccttttttccttttttctttggcatacatgtttgatttactggtttaaatgtcttgagagatgaagattttctattttgaaggaatgactttgataatgtagaaagcatgtgataatattttatttataatacataaattgcaaatgagtactagttccgagatcgtgagtttcctgtttcacaacttttgttagatactctttgg

SEQ ID NO: 85637 - DNA, 370 bp, Citrus clementina
  Intron number 3 from transcript clementine0.9_002882m (loc us clementine0.9_001378m.g) derived from phytozome v7.0 (c hr-ID scaffold_3; pos 2552417 to 2552786 reverse strand)
ggtttcagagcttctaaagagtggaaaagaggcaagttatcggttggcaattttattctttggattgaaaatgtaatatcaaaaagaaaatggatgtatttcatatatttttgtcatctcttggcctctgattgtccttgtttccttattatgatgtcttgctctatgaaaattactttcatattttgtctctatcagaaaactgttgattgcctctgagatggaacttgtaccttttggcaaagaaactagaaaattttttccccttttttattagtcgttatatggatttcttacaacaagattatagaacttttatcctgtgctcacagttcaattgttggcatttgttctttgtagatgagtttgt

SEQ ID NO: 85638 - DNA, 445 bp, Citrus clementina
  Intron number 3 from transcript clementine0.9_017534m (loc us clementine0.9_015130m.g) derived from phytozome v7.0 (c hr-ID scaffold_3; pos 6188640 to 6189084 reverse strand)
gatctgaatacaggtgagtccagcctgcttagtgaagtcatgtgatgcagcgcatcatcatggcataagcaatgtggtgcagcttcattggtttttgatatcattagaatctagttgttcaccagttgaaagcactggttttttaatttttatttctgttgcccttttcacttgagctttttatgctgtaaatgtgtaaatattaatgaaatattttgtgtaattcatggtcatatgggcaggaatgataatttcatttcctatcctatataattttccgatttctgtagcacgaatcacagacgaaacccccagttgaatctgctagcatctgctgtggtttgatgtccttaatgtgattgcacttcattagcttaatggacagtttagtaatcatctgctttcttcgttgtcgttgttctctctcctatttacagtggaaatt

SEQ ID NO: 85639 - DNA, 710 bp, Citrus clementina
  Intron number 1 from transcript clementine0.9_003295m (loc us clementine0.9_003295m.g) derived from phytozome v7.0 (c hr-ID scaffold_4; pos 6838529 to 6839238)
agaaactggacgtgaaaatcttgtattttaaactggtatgttttttttcttcttctgggttctctttggtttcaagttttctttgatggttttgtttcatattttgatacagaagattaaagagcttgtattttacaatacaataattttgtttttatttgtttttgtgggttttgaagtttgtttcttgtgttatttatagctgttggtttgatctttcgtttagtaatttgattgagttttgtgttttcattggtggtttacttatttgatagcattctgttttattaaaatactttaagaggactagtttctttttcatttcgtttctgggttcttcttggttttatatttattttttaatttgatcgatgttttctgatttttttttcttttgtggtaaattagcaagaaaggattagttggttatatatttaatttttgtggtttatatttactatgagtcttattgggttctttgtctcattgtatttgtctgattttttgcatttggtttagtgttattgttaatgcaagctaagccacataaactggtggcctcagagtggttttttttccttctttgttcttctttataagaaataaaatttgttgtgggatctgaatttgggttgctgatagtgtggtattggtttctggaatttgaatttgaagattcttgttggactcttgacaattcagtgtcattc

SEQ ID NO: 85640 - DNA, 774 bp, Citrus clementina
  Intron number 1 from transcript clementine0.9_001410m (loc us clementine0.9_001410m.g) derived from phytozome v7.0 (c hr-ID scaffold_3; pos 7826721 to 7827494)
gactctactctctctagttccgcgtcatcctaaaggtaccgttttttttgcagtgtttcagtcttaaactgcaaatcgaatcttgaagatttgcttttcttctgctgtatttgcaggtttttttttaaaatacagagttacacttttcgcttcggtgcactctattttttaaaaaagaaacttttaatttgcatttttgcaataacttcgaactttttgttgaaattatagcttttttatcagcttttttatcagctttttgatagtgattttacagtttttttttatttgaatagaaaaatgcaggtgccggttttatttcgatcagtgcaatttcaataaacgaagtaattttggtgtaattgagagagctattagaatataatatatatatatatatatattttgatgtgatgcatcatctgagaatgtctcttgaattttcaccctcactgattcagctattcgtctctctttaaaatattcctcttttcttgttttccttttcactcaaatcaaggcctttttgttttgagttgattgtcttattatttgcactgaacttacagcttatgtttgaagtgctatattagttgttcgcttggcatctgtgtgtcctacggttctgaaagttttggcgttttactcagttttggttagcttcaagtcgagagttttggttaattttaagtaaattttagtacttctaaactgaacttccttgttttgattttctctttgttaattagtatgactgtcaatgtaggtgtcgaa

SEQ ID NO: 85641 - DNA, 587 bp, Citrus clementina
  Intron number 2 from transcript clementine0.9_001410m (loc us clementine0.9_001410m.g) derived from phytozome v7.0 (c hr-ID scaffold_3; pos 7827628 to 7828214)
agccccatcgtggtgacttccttttccatgaatatatattttttctgtaatttttttattaaaattttaattaccatgagcaatgctttcctagctctcgatataaacatttgcttcttgatccttcgtaacttctctggttttatgtgagagggttcaatttattggtggcatattttggagagtcattttgttcaacccattaagtttctattttaaaattaaaattgtaacatgtcattacactcagcttttagtacattagtggaagtatttagtttatttctgattatttgtcactaaaattttgtatgggtttgatgttgactgctctgtacagttattaccctgctttctctctctctctatcacacacacactctaccctcgtctttacagctccacaagtgagagatggagatttaaaaatagtgtcttctgacattaaaccttttcttccaactcttcttatcctgttttcagaaattgtgctggttacttatctcatgtatcttctgctgtgtattcttaaattattattttgatctagacttatttgacatggagttagttgattggcaggtgct

SEQ ID NO: 85642 - DNA, 234 bp, Citrus clementina
  Intron number 2 from transcript clementine0.9_024456m (loc us clementine0.9_024178m.g) derived from phytozome v7.0 (c hr-ID scaffold_2; pos 185951 to 186184)
gaacaccaaacccactactcctggtacgtatgccagttcttataattcgtgcatgccaatgctaaattatgtttgaatccttatataatttggaaaatgctctgttatacgctcttgcattttgataatttcttctaacatgttgaagtgatttttctttttttcttttttgggttatattgattaaaatgtttttttggggggcttaagttctcttactttcctttccaggtg

SEQ ID NO: 85643 - DNA, 353 bp, Citrus clementina
  Intron number 1 from transcript clementine0.9_012156m (loc us clementine0.9_012156m.g) derived from phytozome v7.0 (c hr-ID scaffold_2; pos 1579887 to 1580239)
actattcactcatccaaacatcaaggttcgagttgttaatttttcttttttgtaattttattttgtgtttatttcttcaatttttgattcgaaatttcatttccattagctgcctttatatcttgattctcgatgagatatgattgaatcgtaggtgaaaattaaacgatgattacgccatttgaacgaagaaaaattatacgcgattgagagaatgattagcgttagttgtttgttcagcttatcaactctcttagcaatttttttccctctaattgtcattaactctttattaggtgtataattacttagcttttgatttgatcaagtactcgactccaatgtgtttgcag

SEQ ID NO: 85644 - DNA, 777 bp, Citrus clementina
  Intron number 4 from transcript clementine0.9_015422m (loc us clementine0.9_013070m.g) derived from phytozome v7.0 (c hr-ID scaffold_7; pos 3367122 to 3367898 reverse strand)
agtgggcaccatttcgagaaggtattctttttacttcatttattttttttcctttcactcatttattgttttttctttcacaaagattgtcttagttcatttgctttatattagtcgtactgactcttttcttctgtctagttgaggctcaaatctgtttatttgaatcaggacagcttgatgagtgcggacatttagatttaataattagaggatccactttttattggtgcattttggatatgttctatcagcatgtagagaagatctaggatcattgataaggagagagatactcataataaggcaacaacacactatgttgaagacttggttcccaagaaatggtgcgcgtgaaaataaatgctattctattcataccacagttcttgatggtttcagatttgggtagattatcttcaatcactgttaggaatatgtagtgggaagcagaaatttcaaatggataagcttaagatgtggggatgctttaacgaagtaatcacattttccctctttcttcttgttttgggatttcattaattttgtgagaaagggtatctggaatgtggaagtacaaactcaatcaatttccatggttagctatgagagtaattgcagccattgaacttgcatgatgtcttctttttgcccctctgaaacctttaaccttgtcttgcaattgagttcttttttggcatttttagtgcctcaatctacagtttcactgacttcttatatgttgtgatgacttggtaggtgtgacatttaaagaaa

SEQ ID NO: 85645 - DNA, 707 bp, Citrus clementina
  Intron number 2 from transcript clementine0.9_014187m (loc us clementine0.9_014187m.g) derived from phytozome v7.0 (c hr-ID scaffold_2; pos 7553030 to 7553736 reverse strand)
tcttctattccaggaggtacctatgttgatttatttctctattttacttgaagcatgcgtttcattttttaaacaagacaattggtttgattgatttagaatttaatttcgtctggaacttagtgttgtatgtatatgttgatttgttttcttaatggtagtggctggagattgattttatgtggactggtttttgctctcagtgctatgaattgttacttaaaaatagcaattggagggctatttgtacatgttgggttttatcatttggcttactattttctataggcgttgaagtgaaaagaaatttgtttaatctgtaaaaatttcttctcatgtattgatgccatctgttttcacaattacagggttttctgttaacttgctgtcattgcaatgtctagggtgcaattcttaataggacgggctttttgagcaatgaaaaaaatgtgtatgtgagtgcattttgctgcctaagtaagtttcaatcagatatctatgagtcaaccagcaagttttgtataattgattttcatgttatgtggaattgtcaaaaaggcgataatggcttggatcctataagcagtaatctgttaggtgctcaatgtagtttgtagctataagttacaacacaatggaatgcaatccttatatatcacaaatgatctttatgtaaatgacagtgagtttatttttgatcccattaa

SEQ ID NO: 85646 - DNA, 434 bp, Citrus clementina; identical to SEQ ID NO: 79437
  Intron number 1 from transcript clementine0.9_020293m (loc us clementine0.9_019072m.g) derived from phytozome v7.0 (c hr-ID scaffold_7; pos 1431960 to 1432393)

SEQ ID NO: 85647 - DNA, 760 bp, Citrus clementina
  Intron number 2 from transcript clementine0.9_004491m (loc us clementine0.9_004491m.g) derived from phytozome v7.0 (c hr-ID scaffold_4; pos 6607000 to 6607759)
gaaggtatattatttaattgtttatgtttaattttatcgtcagaagtcatccatttcaatattgcagcaatacaagagagatatgtaaatggaataggagatgttggcccaaattttcctctatcaatgtttgtataagtatcacatgattgtcgatgatttagtagtccactagaacaatttatatattgacattttgtttttggtggttttgcggagcaaactgtttgattttatttactagtgtttgtgtatcatttgcagttttctcagtcccataacacttttaggtttcaaaattagacatagtgtagtagtgttgtgtgatatgctgcttagtttctggtgttgtgagctaagtgtaggttggagcaagtacgaatatatcaagtagtgtatgatttatttgctttatatgttaaatttgaatgaggacttcatgctgcttaaaattttagaccgcaataatgaaggaatgcattattcatttgctttctccgttaaattcaactgagaaattcatgctgcatacaatttttgactgtaataatgcttgagctgatattttctgttaaaagttaaaagcaatttgaattctaaactgtaggacccatttcaatgtaggaaattaaaatatgaaagaactcatgtgtgacttttgtgtatagataacgagtgtttcttcagattatattcaaattttcctttttgtcattgaatgttattctgtttcaggtgcgtgaattggcggaaaaagagg

SEQ ID NO: 85648 - DNA, 756 bp, Citrus clementina
  Intron number 3 from transcript clementine0.9_021974m (loc us clementine0.9_021926m.g) derived from phytozome v7.0 (c hr-ID scaffold_3; pos 9092783 to 9093538 reverse strand)
tgcagaagatcgaactgagaatatacgtagggttggtaagtgtgtttttgtagataaattaacctttggttggagtttaggttaggtgaattcaaaagtttaattgtataaagtgattatttatcaccaacatggcataaaactgatttgaacttgtatgaagaacatatgtgtctgtttgcttgtgtatagaggatggaaacttatatggatgactccaatcacctgattgattttgttgcttgcagattcatatgatttactgttcccaatgattatgtttaagtctttgacactgatttgggaagtctattgattttaattttgttcactattagacttatagtacttcttgcatgtcataattttctatttcattttcttttttcgttttccctgtaatttaatcaattttaaatgcactagatgccacatgctttgtctgcatatttgtctctgggcatagtctgaaggtacttttgccaacacaaaggcacaaagttgatttagggaatgcccatggagcgcgcttctaagtgcatgcttttccatatatcacaaaattttaacatatcaaaacttaatgatttccaaaacaaatgcagaagaacagtgagagtgagactagagttttgggctatcttttcgagagcattaggtgtgccttctacattgtttgtgtgcaacttatttagtttcagttggttcttaattattagttttctgttataggggaagtagcaaagctttttgcgg

SEQ ID NO: 85649 - DNA, 481 bp, Citrus clementina; identical to SEQ ID NO: 79522
  Intron number 1 from transcript clementine0.9_021974m (loc us clementine0.9_021926m.g) derived from phytozome v7.0 (c hr-ID scaffold_3; pos 9094043 to 9094523 reverse strand)

SEQ ID NO: 85650 - DNA, 523 bp, Citrus clementina
  Intron number 1 from transcript clementine0.9_020008m (loc us clementine0.9_020008m.g) derived from phytozome v7.0 (c hr-ID scaffold_4; pos 5437876 to 5438398)
ctttggagcaagttttgcctatcaagtaggtccttttttttccctccccccgatttcttcatttttattttgtgatttttatatatatttatttatttttgattgtgtgatttttctttttaagggtaattttattgaatggtaaaggttttgagaactttaaagatggcttttagaaaattgaggatgtttgtttgttggggcttagacattaaaccctgtaattgcagttgctgaaaagctgcacttcagaacattgatttttccatcttaagtgcagatttccatgtattagattgtgatagattgatgcattcttttttaatagatatttaggttgttataactagattattttgactgctgttgatggggggtgtttattctaatttatcaaggtttatattaccgtatccagcccaatttactagttcttgttatacttactttggtgttgttttctatggttctaaacttgcttaaatttttccacatatcaggagaggtatatccagtttttata

SEQ ID NO: 85651 - DNA, 740 bp, Citrus clementina
  Intron number 4 from transcript clementine0.9_016319m (loc us clementine0.9_016319m.g) derived from phytozome v7.0 (c hr-ID scaffold_2; pos 303264 to 304003)
ctctattcacgttcatctttttatcatttttcttggtaagcttcttccaaattttttcattgttttgccttttcagttactgattggtggttgcatttatcagcattgcatttatttttccctttccggatggtacagattttttgtagattaaaaggtgtttttgcttaatgtggaagtcttaagaacccaaatactgcttactatgtacatgtaaatgtgtgacatgcttactggaattgttgctgagcgctgtatttcctattgtctacactagtaataaactttggagtgtggctatgcagtacttcataaaattttcaaattactcaatgtgccacagaaaataaagtgacatcgcataattgctaatcctggatttcccatcaccagtttggtaaatcctttgtggatgggaaataaagcgggattcctgttggtgttttgatttagtatgtatacaatctgcctgtactaaaagattgcttctgtactttctctacaaattttggtttgtttagtttaccagatctttgttgggttggtccgatgattgatttatctgcagtggaaagttgctactttcctttttcttttcttggatgtttaatcttcttaatgtttgatttgtgcatgattgcattagtacaaaatctccttcaagagtttactgtggtctaatatctggcatcttcttttttgcagtggactttccatccttttatcttgaagagcaaaaa

SEQ ID NO: 85652 - DNA, 729 bp, Citrus clementina
  Intron number 2 from transcript clementine0.9_014040m (loc us clementine0.9_009516m.g) derived from phytozome v7.0 (c hr-ID scaffold_10; pos 1103727 to 1104455 reverse strand)
ataacgttcacggaaacatctatctggatccggtattgtcagctccatctctaaattttcgttgtttctgaatcatttgtaaattcgattctcgaatctcttgtatgcgtgcctttgctgtttgttttgttttattgacttgaacattaacatagaaccgattgataaattttggtttaatctgttttacaactttaactgattttgtatgacatttttgagtttgaatttgattttaatattttgatttatgattttcttcttgagtccggatcttctttaagaattgttgacgcaacttaaatttgaaagtgtgaacaaaacttagaaaagaagtaagtgaaaaacagagcagatatggagactttagagatcgtttatctcgtatcatgctatattagttatttttatatggaacgaatgaacatctttgttaaatgttcagtttagtagttgttaatttttgtgacttgtaaatatcctagtagttgctgtgttttgtcactttattgtggagatagctgattggtcatttattgtatgtgaaatagaaaacgtgacgtgtcttttacttaattgtctgatctggacttggctttttgcatttttgatattaccattaggttgttacagatttcttggagatgccatagctataaaattgaacttgcttattgtttttctgtgaatgcagctggctttgcaattcattgacactgaagagtttca

SEQ ID NO: 85653 - DNA, 574 bp, Citrus clementina
  Intron number 1 from transcript clementine0.9_019089m (loc us clementine0.9_015632m.g) derived from phytozome v7.0 (c hr-ID scaffold_2; pos 1949686 to 1950259)
ttgttaaaacccagttgcagtgccaggtgaggactgtgtcaaatgttaatttttgccaattttagcatcaattatattattgtttcagtttctagtggatgccgtttcagttatggtaccaaatttagctcttcaatgctgtaactgacattctgtcttttactgagcccaaaattgaggggaaaaaaacccttatcatctctagggtttcatgcaatagtttattttaactctattcttagtccaaaatatctttctgttaacttaccattagttagatgtcatttgttagtaattcattgaggttaaaaaaaaagatttttcattaaagagaaaattaaaaaaataaatcaaatttgacatataactaaaaatgattttgatctaatcccactaaacaggaaataccgaaaagatgaaaaacttatatttctagcaattgttttgcactcttctctattttttcagcacgacagtcctataaactctagatcaaaatacaaaaaataattataattttcatattcgtataagtatactatctaattgcactatgagcggacttgagcagata

SEQ ID NO: 85654 - DNA, 917 bp, Citrus clementina
  Intron number 1 from transcript clementine0.9_021309m (loc us clementine0.9_021309m.g) derived from phytozome v7.0 (c hr-ID scaffold_3; pos 9057579 to 9058495 reverse strand)
ctcgtgaacttaaagccaatttgcatcctcttaaggttcttataatttcggctattttattgaatgcgttttatggttttcatctgattggattttttttttggttttagttattacaattttttggtgcttgaaatttgttatttttttaaaaaaaattatatttatgctctcaaaaaaaaaaagtttggcatggatcttctccgtaaatagtcaaatggaggcgatgtgagttttcgtgtgtactcgtatgtactgaaattttattaattaaaaaaaaatagttttgatgtaaatttgtaaaaacacgccttatgaaaccttttgaggaattgtagaattttaggttaaagtttgctcttgctcatagtttgtgataatgtatgcactgaaattttagtaattaaaaaacatagttttttatttaaatttgtgtaaacaaaccttatgaaactttttgaggaattgtagaattttaggttaaagttgctcctgctcatagtttgtgataatactcctttttatttttatttttattatttttaaccatgatattgctcttgttgatgctgtgaatgagaactgaaaagttgggatactattattttcattctaaaatgcatcagaggaaggttgttgattggaactcacactgaacattttccttgttgtggttattataaggctataattaccctaaatatttcacatacagtgaagggagaatcttattgacatggcacaagtaaaatgttgccacattttgatctactttttttatggttttcttttttcccgactaaaacgtgtagccctttcttttaaaaattttataattgctatgttataccacttaatttagtttgaaattcctataaacagaacaagtttgtcttttggtacactcgtcgaacacc

SEQ ID NO: 85655 - DNA, 987 bp, Citrus clementina
  Intron number 1 from transcript clementine0.9_023559m (loc us clementine0.9_023559m.g) derived from phytozome v7.0 (c hr-ID scaffold_7; pos 2711862 to 2712848 reverse strand)
gctaattctttcatttctgcttcatattttgatcggtacatttatttactcaaagctaaactcacttgttaaatgaattatcttccttttaggatcaatcaatactaccctttataaataatttgaaccctaattatcttgttacaattattccgtaatttattgagtattattttgaattaagcttttttgttttccgtgaatggtttaaaaaaaaagaaagaaagaaagaaagagctatagtattgaattcttttaagagcaaatgaagcggttctgaaactctagagagaattaatgaccaatagattgaatcaattttctctgtttctttgcttgataactgagagttgttgacaactatgtgtatttgccactccattgtgttttctagtttcttcaatttagggttctatttgtaaattagaagcctgtaaaagtcgatgcagaaatgattcagattaatatgacattgcttcagtaagtttgcttattgagattttaaaatcttgtatctgatattggcgtggtgtgaaagtactgatgaattttcttgattagtttcttgacatttgggatgcaagttttgtcgtctgtttatctttgttaaagcaaaatgtcacaaaagatatgtttcagatggtttcccagtattttactttcatgatcgtattgttttatttgataactttcttgatgcaatgttcttattcgcataacagattttcttatggatgatatcaattactgtatacttggtgaagatttcttctgtgatgtgatatgtgctggagtatgtgtttttattttccttgtctctggagaatgccccatatagtctattttgtcaggatattatctaatacctatcagcattattaagcatcaatctgttgaattatatggttgaaagagtatgaactatttttcttacatcttcaaatctttgacacttctttccaggctttatgtaaaagagggctatat

SEQ ID NO: 85656 - DNA, 675 bp, Citrus clementina; identical to SEQ ID NO: 82424
  Intron number 1 from transcript clementine0.9_026562m (loc us clementine0.9_026562m.g) derived from phytozome v7.0 (c hr-ID scaffold_3; pos 4064452 to 4065126)

SEQ ID NO: 85657 - DNA, 614 bp, Citrus clementina
  Intron number 1 from transcript clementine0.9_032237m (loc us clementine0.9_032237m.g) derived from phytozome v7.0 (c hr-ID scaffold_3; pos 988840 to 989453)
cacagacgtataagtattacagacaggatactgacgtattggcctaagaaatgtcagcttgctgcttctctatgaagttcgatccccgcgccgagtttgctaaagtttctaccccccaggatgtccccttctggtatttctttctgtttctgtgttttgtctcaagactttgattcaatgttaatatttgagggacttgctttctgctaggttatgttcttttcttagatttttattaatttccaccaactttgatcgtttaataattcttgagaatgagatccagtttttgtaataattcaaattcattgtcatgagtctgacttgatgatgttaaattgctcctcagtcctaccaatcaattaagggcgctcgaggttcatatcctcggaaacctttataacattcagatttcagtatcacaactgccctgttttagaattgccaatgactatttcgaatttctttctaaaaaccctgttatgatggcctggaaaaactggattagtatgtcatctcttgttgaaatcaagtcatcttttcttcagaaagtttaacaagcttcctgctgatgaagagggacaaaccccagataaaaaagcacttgttgtctg

SEQ ID NO: 85658 - DNA, 535 bp, Citrus clementina
  Intron number 1 from transcript clementine0.9_006733m (loc us clementine0.9_006733m.g) derived from phytozome v7.0 (c hr-ID scaffold_4; pos 3984457 to 3984991)
tacctttctctttcccttcaacaattcagctccaggtaagccttctgatctcactctgatcatcagagaagtattccttatcactgacagtcatctggttgtctttgtttttctgcttttctgttgttttcgttgatgttatgataggattctggagaaatttgtgttctcttttttattagatcttttgatgataagtcaaagttgctgtttttagtttcgtttcaattcaatattaactcatgtctctcccttcagttctgtttgtatgcttgtacaagacttgtttaaattctgaactctcaagtatgtggcggttacttttttcttttcttttcggtttgttgacttttatggtttcttagtgatgattagatcttaaatgatgtggtatgagctctaaattatgggtttagagttgagggttttaatggatttgatgaaacttttatgagttatacaagtttgaattttgacttcagatggtgaattggatttgcattgtttttgtttatggataagttaacaagggtaa

SEQ ID NO: 85659 - DNA, 750 bp, Citrus clementina
  Intron number 3 from transcript clementine0.9_017998m (loc us clementine0.9_016736m.g) derived from phytozome v7.0 (c hr-ID scaffold_3; pos 8991933 to 8992682)
aaaggtattcagtaaccttgtgcagttttcataatatttattcaagcatgcatgtttccggcaaagatattcttttatttcttccttttttttccccctttcttttgtaagttaaggattataactgtgcttcagcaaaaaggaacaaaattactcacgagaaagctggagcattatgttgtacaaaataactctcaccacatagactataaattgtgttacatgttcatgactagtcccaggttttattgtcttgtggttagagaattcaataaaaatattaaaactaagttactaaatatatcaaacctgttggacttggttggatgcaaattattagcagacagaggcttctgatgaggaaggcctgaagtgtatttaatgattcaatctttgagctgcaagctgtttactggtttctgcaagccattaatgacatttattgatatatgtagagatatatatctgacatttagcgacatatgtagagatatatgtttaacgttctgcatatttgcctgtttaagtggattggtgaattacagaaactttcttccttgtccatgaaactggaatagcctgctcccttgtaggtgaaagtccagaaattatgttatcgtactgtttataaatgtaataaggatttgcctatatctatatatacacacacatttttttttaaatgcctttcatacatttgatttatatttatgatagaattttttattatcgttagcaatcaagaagcga

SEQ ID NO: 85660 - DNA, 697 bp, Citrus clementina
  Intron number 1 from transcript clementine0.9_013552m (loc us clementine0.9_008625m.g) derived from phytozome v7.0 (c hr-ID scaffold_10; pos 2484977 to 2485673)
aagaggttagaatgtttgtctcctataatcctaatttgattattttttcccacccctaatttctgctctttaagtttggtttcggttttgtattatgtagatgtagtttctggtggataataatggcatgtgaatatacgacacttttgtagttttgtttgagataaacaagctttaattctttttgcaataaacattaatcgaacttttttttaacccccttgggaagaaaatatgataacagtctaatgtaacttatggattcaaacctgtctctcaaatggcatttgatttaattacaaaaaaaaggaaatttccagctatctagtaataatttagtgagtgttttgattttgtttgaagtgttttcaaataagtaagagtacttttgtaaaacttttataaatgaaagttctttttagagaagaaacactcaatgtaagttttgaaagtaatttttttttttttttgagttaaagaaaacttttgaagttctatttgaagaagcacatcataggtgttctttcaaagagcttataagccttttttttttttttttgttccctggcataggcagtaccacaagaaaagtgagtattcattttcttcgttgtaaatcatgttataatccttctcttttctcataaggtcctgttaatagtaatactacaactttttggctttgcaggtcctgaat

SEQ ID NO: 85661 - DNA, 442 bp, Citrus clementina
  Intron number 1 from transcript clementine0.9_026476m (loc us clementine0.9_025883m.g) derived from phytozome v7.0 (c hr-ID scaffold_3; pos 1200389 to 1200830)
tggctgcaaaggcctcgaggattctgatttcctcggtacgatccctttgctctatttatacggtcttttgttaattgaccaattatttttgctattcctaggaattagatctattttccgtttacattcataaatatttatttgtatgagaattttttatgatctgatggttttgactttgcgcatctgcagtaatacttacgcagtgattgtatttaagcgataaacattgtaacgatctcatcaaatcacatcgacaaataatactatcaacccttacccctttgtttgtttgttaacacatgtaatcttatatatattgttctaggtgacagaaaatatctttttaattaataatggaatcatctatgattgtatctgttaatgtagttggttatgaatgttcgagttttcttcattctagcaggtagtgtagatccgt

SEQ ID NO: 85662 - DNA, 805 bp, Citrus clementina
  Intron number 2 from transcript clementine0.9_015864m (loc us clementine0.9_011196m.g) derived from phytozome v7.0 (c hr-ID scaffold_3; pos 4176071 to 4176875)
gtggatcaattacttgagagctgacttgaagagaggtaacattactgctgaagaggaagagatcatcattaagttgcatgcatctttgggtaacaggttagtgtgtctgtgtcttagctgctcttactgaaacataacatgcatgtgaaaaatgtgatatcgagaagcacttgtctgtattgggactggggctccttggaagctggaatgtgaagccaagaaatgcatcgttgaattttctctctctctctctctctgctcttacaaattaaaacggtgatgtgtcatgcgccaaaatactttaaaattttctactttctggacagaaattttctttttcagcctgtgagttttctttttcctgccttaaattaagatcactggcaataccatccctcctttttcaaattacgtcagtttcttattacttttcaggcatcactcaatgatatttattgggagttatctttgacgtaactgtttcttttatcgttacgtgtaacttgttgtcattttaaagtacattaatttttcgctattcggccttattatccaatcatttatttttacattattttatctggatgtaaatatctttaattatctggtttcaaaactagttgaatggatactttccgtgggacaggagtaaccttgtagtttaactaaggatgttttcaaagattataacaaatcaaataaacattacatgataaaagttgatggctattaatttacactaagaaaatcaactttaacgctgaccatcgttacgtgctgcaggtggtctttaattgcaagcaat

SEQ ID NO: 85663 - DNA, 709 bp, Citrus clementina
  Intron number 3 from transcript clementine0.9_018280m (loc us clementine0.9_018280m.g) derived from phytozome v7.0 (c hr-ID scaffold_3; pos 129025 to 129733 reverse strand)
atacccttttgaggacttgttgctggtgacccgtaaccttctatctgattaacttagtaaaaaaaaaaaaaaaaaatgattcgtatatgaacttgatgtttaaaatatgactccggttatgttagaactgctctaaggtagagtaccctttcataatgacacaatcaaagttataatgagtgttttactatttatcactttgcatgtgtggctgtgattcgtgctctaccttagagcagctccgaggtagctatatgtatttgtcttctgaaccacacaggatatcccagcataagacaaaaataatatggtttcactttcatgtgatatattaactcttgagttctgtgttattgttgctgctaccatctgcaatgatcagtaacctgagatttgtacccctagcacttataaatggtttgcgctctgggtttacacttcccaagcatttgaaatgatcaataccctggtgtcgggacgttttcgttttctttgaactgaaatgatctccacccagaaaccaagaagaagagagagtaaaaataaatgacatctctctgtttttttgttttatttgctgttataaaagccatagaatctgataggattctttcatgttgcttccgtatgtgatagttgaagttgttggttgtaattctctaatgcaaatgcaggggaaggcgttggggtttcggtttcagcattcttg

SEQ ID NO: 85664 - DNA, 895 bp, Citrus clementina
  Intron number 3 from transcript clementine0.9_024189m (loc us clementine0.9_024189m.g) derived from phytozome v7.0 (c hr-ID scaffold_3; pos 6142857 to 6143751)
ctcaaaaccgagtcattgtcgaggggaaaaatctggtggggaaagttgtttacgactcttgctttgttgcagttattctgtcatgttataattctgtcttggtttcttgtttccaagagaaggggaaagttgtctgcctttgtttaagtttaaggaagcagttctcaggatagtacttgtttgaccccaacagaatcctcctatcaattttggttaaatcgttttttgaaccgttggtttttgctttcattattagactctgaatttataagagtttatattggttagaacctatgagtttatgacatcctgacactgacacacataaattatcacaatagtaactgaagatttgtgttaagtgttagcttgacttatagcatgtttgactaactatattccttgttttgatgctttgcttgtctccgtgattctagtattggtctcattatattgaaacattttattctgtgaagaaattgaacttagaccattgtgtgtttgatgcagtggcctgtacattttaaagcaaacttgtgctgattcttagagacctcgttggtttgaagttctaatctgaacattatccgcaaagtgtatgtttaatgactcaaaagcaagaaaactaaagtagaaatcaacacggtggcatcttctattaagtatgaataaagttattgtgattgtctcttaatctttctggagtctcctttgatgatttagagtttccaatgcatgcttgttcattatttgtttatgtccttgcatttaagtgtgtgttttgtcctgcctccaaaaatctaaatgaatagtttttatcttgtctagtaattcatgactccattgatatggatctgtgtgcaggtaaaaaagcatatcaagggaggagaaggtc

SEQ ID NO: 85665 - DNA, 514 bp, Citrus clementina
  Intron number 1 from transcript clementine0.9_007599m (loc us clementine0.9_007591m.g) derived from phytozome v7.0 (c hr-ID scaffold_31; pos 2256093 to 2256606 reverse strand)
tcatttcacagcttacaaaatctgtggagtttagggtttgtgattttaactcttctgctttaatgggtttgtttttaaattgcctcaaataaaaaaattgataacttttttttttaattttttcaaaaaattctgccataaattccctgtacataacattcaactgtatgtttatataattatttttcttttagcaactccatgtatttaattcgcctgaatgtttatctgtttaacttgtaatcaagtaatgttgattcgtttgaattttactgtacataaacttagttagatttgatatgatttgctggcgaagattatttttcaatcaataaagtatttttgtatcaatatttgacccggttaattggatgaattgtatgacaattcgttaacaaatagtttgcatttcattttgattattcttagtgatctttcacattgaagctgctatgatccggtttaatttgttttaccattgctaatgcttttccaggatcaggtgctatcaagc

SEQ ID NO: 85666 - DNA, 370 bp, Citrus clementina; identical to SEQ ID NO: 81699
  Intron number 1 from transcript clementine0.9_007687m (loc us clementine0.9_003965m.g) derived from phytozome v7.0 (c hr-ID scaffold_3; pos 3001366 to 3001735 reverse strand)

SEQ ID NO: 85667 - DNA, 740 bp, Citrus clementina
  Intron number 2 from transcript clementine0.9_006570m (loc us clementine0.9_006570m.g) derived from phytozome v7.0 (c hr-ID scaffold_3; pos 7229777 to 7230516)
aagaatcttcaggagagaagggagaggtgggtgtatggtggttacttctcatcaccatgatgggatctttgactgactaacttttgacctcgactttaccttctcttgttgctacctctagatggttgtacattttaaagtgtttggtttggaccttagatgatccctaagtatttggtcattctatatccatcattaagaacgtctgtgtgaatgtgttatgggtttcgattctcgtcttggaaatggcatgtttaagaacatgagttgcttatgaaattctgtgtatgatggaataatgtttcttctattacatagaattttagcaattgctgtcaaaatattgctgactttgactgggaatgattaagttggtagagtttgcttttgctaaagtagcttgatcaagttctgggagttattggtaactgctctttattgaatttacattttttgtttatttattgaatttttgtttccccccattagacgtctctggccattgaactctttgtccttgtctaggaaatttaccatttttgctttcaaagccagatgatatgtttggacggtgttttcctaatttcctttgttcagtgacaaatgggtttgtttccttcaattgggctgaaccgtattttctcatgcatagagtttttcatttttcctcaaatattaggctgagaaatttcaaatttttattttgaataggcgaaatatactggaaaaaaagttggctg

SEQ ID NO: 85668 - DNA, 777 bp, Citrus clementina; identical to SEQ ID NO: 79938
  Intron number 1 from transcript clementine0.9_006932m (loc us clementine0.9_003372m.g) derived from phytozome v7.0 (c hr-ID scaffold_14; pos 2469554 to 2470330)

SEQ ID NO: 85669 - DNA, 731 bp, Citrus clementina
  Intron number 5 from transcript clementine0.9_006932m (loc us clementine0.9_003372m.g) derived from phytozome v7.0 (c hr-ID scaffold_14; pos 2471208 to 2471938)
gcttcatcctgcctggtgcaaattggtcctgataggtatatcatgttgactatagttgattggacttttttctatacttttattttcattttagggaatgttcatgcatcttcaagtggttgaaaaagtcatagcttattataagtctaagtttttgaaggtaacaatccataagcaattaataaagaattgcacaatttagagttagagagggtggaaaagatgagaacatgagttcgataggtttgattatgtttcttatctacccagacatattagatgatttagctcggtctgttgacttgtacaataccggagtgtaaaaggttgataaataagggaagatgaagcacttcgtcacccatacatgagcacaagagtaaagttgatgatgcatcttggactgtaaaatttgtactaggaaaatttggaaagagtttatttaagtaaagattgatgatgtgaaacaagtgtgtcaaaatatacatgtgctatatgcattggtttttttttccccccccacttccacacagaattttgttagctttgggaacaagcatatagctggttgagatcatttctcacacttgaaattatttttgaaagctagatgtctactattatgttgtagttatatttaattgtaatcaaaacattgtctcttagtggtagtagattaatgtgtattatttccagggagtatttggttgatttgcttgaggatcctggag

SEQ ID NO: 85670 - DNA, 1014 bp, Citrus clementina
  Intron number 1 from transcript clementine0.9_014416m (loc us clementine0.9_011664m.g) derived from phytozome v7.0 (c hr-ID scaffold_3; pos 1721753 to 1722766 reverse strand)
gcgaaatttcctaagattttcgagtactgatttcggtacgatttatatcatctttttttggttgttcttttctttaatctttgtgaaaagagaggctattttatttttctctgattttttttttatttatcaaagacgtagaaattaggtttagttttagttacggtctgccattaattctttgttaagtatttcgatttaaccgaataatcagtttttcgatccacgatctattgttaaggtaagatatttaccatatttaatttattttctttattatgtgcatgattaaggtctagggtttgacttttgattgagaaaagaggcatgaattgaaacaagaaactttatattctgcatgattatgtcctagggtttttaagatctgaagttaattcctaatagtgatgccatgtttcttgtggaaagatctgaattttttttttgatctttttgttggattttttttttctaaattgatgcatgtagtttaaggtggagaaatggaaattatgcagtgcgttgacttcacgtttacagtcttttgatttgctatgacagtgtatgtgaaataaacaatttttttacctttatgtttcctgaatttgtatttattagaagcctaatgttcccctaaattgccaaaatattgtaagagtttagaaagaattttttttatttaatgtccccttattatgcatctaatttcttcgacttttactcagctaccaactggatggtcggggataaaacttttgccaaattgattttggccttcgtttccatatgataaagctcagaatgataaattaagttttatgtttgactagagctgtttaaatacctgctaacaaatatgtgtaatagtaattttcttattatattatattgtgtaacgatcccccgcctctcccccccccccccctttcccccaaaaaaaacaaaagattatgttgcgatatgatgtctgattgattttctttctttttacttctttgcagcaaatccatcaaa

SEQ ID NO: 85671 - DNA, 1027 bp, Citrus clementina
  Intron number 1 from transcript clementine0.9_014978m (loc us clementine0.9_014978m.g) derived from phytozome v7.0 (c hr-ID scaffold_113; pos 305765 to 306791 reverse strand)
tcggccacatcaacaccagatctgaggtcttttttactttactttcgatttcaattatgattttcctttacatatatatatatatgagagaaataatttttgagtcggtctttgaaaaaaaagttattttttaggaaggaaataagcagtttcgactacttttatgagaaaaattgatgaagagtttttaatttatcagaatgtgattttgcatgatattgttacaggttaattcatactgtttataatccgatacagtaatgaatagataaatggataactgttctgtagaatgaaaaaaattgttatggaaacagttttctgagaacaaaaacagtggaagtgcatcttgtgttagtaatttaaggaaataggacagatttgtgtgttcttagaaatctgtttgttcgaagacactcgaatatttgtgtatcgttctcagctcatgtgttttgaaggaatctgtgaatgcattttgaccatttgtatggaaaatgggttttgaaaacaagacaaaatcgctccttcattttcctctgtctttctacattcaattatagttcattactatatattatgtattatatctcttgggtttgtgctactttcaagtaaatgtagtctcacttgagctagttttgtttgtttttaaatttatcattcttcctattccaacaggccctgacatgagaatttcaatagggggctttcttagtttttgttaaaagtcgctacttttatatttgagttctatactattcagtactttgttaagttgtcatttccttcttcaaattcttttacccctctaggatttgtatagttgtgtatctgtttttttgtcttccctactatttgatgatgtttactctttttctgcctctttgaaattttaatcaggaacttatattagtttatctctgtgttgcctgtgtgtaatcttcatttatcttatattcaaaccttcttttgtaatcttataatttatccctttttgtccctggattttttctaggttgctgggtac

SEQ ID NO: 85672 - DNA, 421 bp, Citrus clementina
  Intron number 1 from transcript clementine0.9_004233m (loc us clementine0.9_004233m.g) derived from phytozome v7.0 (c hr-ID scaffold_3; pos 2449259 to 2449679)
ttcattgagctctcaaggcgggccaggtgagagtattggtttgacgatatatatatatatatatttctgtaatgtatctgtttgtttcccgagaaagttgagataatgaaaatcagagaacttgataattctaaaccttgttacgtgatttgttcctcagccccagctgagtggatcagttggtggcctgcaaaactgtgattttttgggcattaaattataaattctataatgttttggcatcgttttttgttctctaagcaactgaaagacctgcagatgatttcttttttctttctcttttttgggaaaagaagtattttctttttccttgttcgctcgtttttttattattgagttaagttttggagtttgatttggttcaggaagtggtgatctttatagagagttgtggaaggca

SEQ ID NO: 85673 - DNA, 634 bp, Citrus clementina; identical to SEQ ID NO: 80957
  Intron number 1 from transcript clementine0.9_012644m (loc us clementine0.9_005373m.g) derived from phytozome v7.0 (c hr-ID scaffold_4; pos 1322838 to 1323471)

SEQ ID NO: 85674 - DNA, 660 bp, Citrus clementina
  Intron number 2 from transcript clementine0.9_011733m (loc us clementine0.9_011733m.g) derived from phytozome v7.0 (c hr-ID scaffold_4; pos 3169489 to 3170148 reverse strand)
tgaagccgaaaagcctgattttattgctttcaccggtactattatcatgctatataatgcatatgaattatgagtgtatgctcagacgttgaccttttgtttttttctttttcttttacatgatttttttccctgctgtttgtgttcgtgggaaatgcttgcttggaaggctttattgagaaaatttgtaaattttggtcccaatgaatctttgaaaaaactgacacctctaaatgctagcaagtttaggaaattattgctgtttggattgagtttaagacctgattgcatggcactaacaaaataatttctatgttgagtggctgttttgtgcctaatcttccatggcagttgagaaagttactagcagcacgcttgctctgctgggtcttaataagtcaatggatctacgaatatcatgagggtgtgtgtgatgagtcacttaaataagatttgatttctcctttttatcggtcttgcttaatgtaattagattattattattattcttcgtactttctttgctcttaatacttgctgactgcattcacagtaaagctataatgtagtgtgaaagaataatgatacactgtctatacattgcctctatttttcatttcaattaatcaggggataatatatttgggtcaagtacgacgg

SEQ ID NO: 85675 - DNA, 801 bp, Citrus clementina
  Intron number 3 from transcript clementine0.9_017529m (loc us clementine0.9_017529m.g) derived from phytozome v7.0 (c hr-ID scaffold_2; pos 173185 to 173985)
gttcctcaaaaccagcaaggtgatttccctaccgtctggtataatgagtcggttagatatatgctaattgtaactcactctgtatctgtacctgtttgttgtgtctttgttgttacttatatttgagaacaaattactgaaggcaattaaggcatatagtaaagaatgataatattaagtttttttatgtgattgatgaattttcttctagttctttgatctattgcagagaaaatagtatgcttagctggcttggaatatgcagacggtgaccaaatttatatatttttttcatgctcaaactaagttctagattactagatgtcagtggtactattttatatgttttatgggtaccatttaacttattgttggtcaggtgttattattcatagagatgtaggacagatttttctgtccactgtatgtttgtgcattccctcttgattttgtttgattgtgtcaatatgattggaatagatgaaacaactgttggaatgtacttttgaatggtttggaaaagaaataactgttgcttctttctccgccatcagtttagcatttgaatgtggtattattgacaaggttcaacatacatgtaattttgcaatgtggagaattgcgctgaatatggagtaatattggttttgccaaaatttggagctgtcatgcggttttgtttaactttgaaattgcccagagatgcatgacaaggatgccatcttatgaattatcttttcacagaattttgtcttgtgaattgcagctcagaaagaggtgaaggatcaaggctaaacaatc

SEQ ID NO: 85676 - DNA, 689 bp, Citrus clementina; identical to SEQ ID NO: 80878
  Intron number 3 from transcript clementine0.9_016312m (loc us clementine0.9_016312m.g) derived from phytozome v7.0 (c hr-ID scaffold_4; pos 4746527 to 4747215 reverse strand)

SEQ ID NO: 85677 - DNA, 391 bp, Citrus clementina
  Intron number 1 from transcript clementine0.9_013742m (loc us clementine0.9_013734m.g) derived from phytozome v7.0 (c hr-ID scaffold_135; pos 262731 to 263121 reverse strand)
attcgcgcaaacttttgcatatcaacattttcccggtaactgactcttatctcaattgcaccactcattttagtacaatttcaattttcctgtaaattatgttttcgatttagaatctactgccagttgctgaattttaattaaaaaaaattttttttttgtttatttggaataaaatattgattgtggatctgaaatggatattgggggataggtatagatccatgtgggtaaaattgaagcttcatgttcttctaatatttttatattaatggtattatctgtcttgtagcgtgaatttttgcttaaacacgttgttttgattctctttgctttatcctctttatataaatatgtaaagacttgactatgttgcgaatgtttctatcag

SEQ ID NO: 85678 - DNA, 949 bp, Citrus clementina; identical to SEQ ID NO: 81330
  Intron number 1 from transcript clementine0.9_003386m (loc us clementine0.9_003386m.g) derived from phytozome v7.0 (c hr-ID scaffold_4; pos 1436675 to 1437623 reverse strand)

SEQ ID NO: 85679 - DNA, 580 bp, Citrus clementina
  Intron number 5 from transcript clementine0.9_011923m (loc us clementine0.9_011605m.g) derived from phytozome v7.0 (c hr-ID scaffold_3; pos 9110177 to 9110756)
gccactcgccagcagttgtaacgggaaaacccattgtaagtattatatatattgaagataaatctttgcatttgtggttgtgaaatcgttctatgctatggacttggagtagtgatattgcatgtttctactgattggcaggtggttttggagttattcttttcatgattattggaacccgttgttacaagttatgttttgataatttttttgaataattaacaggatgggttgatcgaataattttttatttttttattttttttggatacacaattgttactgatcattggcacctgtcttttaaagtcatttttgaaaattttatgaagaaacagaagaggttgatcaaaggattttttgcccccttccaataatatttgacaaatagctgttacttggtacatatttctttcgttgtatttttaaagaaacagattgacagcgagcatttttttttttttttggtcataactggctcactatggagggagtattttaaatgtaaattttctccttaatttatttaatttgtatattgtttttctaaattaggatcttggcgggtctctaggcagag

SEQ ID NO: 85680 - DNA, 958 bp, Citrus clementina
  Intron number 4 from transcript clementine0.9_012578m (loc us clementine0.9_010389m.g) derived from phytozome v7.0 (c hr-ID scaffold_3; pos 4792635 to 4793592)
tcacccaggtttcgttatgatgcccatccaacatttatttatttattttattttcatgtttatctatgtttaactttggccaaatcatatacttaaaattataaaagttattcatgtgacaacaccttgaagttttagtgggttgagatgaggctgcaaatcacgtacagatgtaattaaatattggattataagttgaggtattcgcgagtaattttatgatgagggaattccttattttaataaagtaatgggtaagctaaaaggagggggaaaaaaaacacacacacactctccaacgctatgtattttatttgtgtactgaaatctatgttttttcacagttttaaagtcgagaacaagctaaaagataaaaaaagaaacataaatttcaatacactacatgacaaaatatatcacattgtagtctgtatttttttttgtcttttagcttatctttggttttaatatggtaaagaacccctaattaaataatctatatatatataatactacattttaactttaaatgtttaccatcagatttagtggatccaaaattaagtcaactttttaactcaaaattttaagctaggggaaacctacgcatatatatacatgttctttcaaatgtactttatacttaactctagaagatgagtacagcttagaaatgcagtagctttctgtgtgcaaatgaaacaaagcaatggtcatgttcttttatggtgaacaagttggtatcacatacccaagctttaagccagtgaatactgttggattttttattcagtgatgttcttaaagttttatgctgtctgtttatgaattgatatcacagcagaaatttattgcttcctttgcgtattcattatagaagcgtttttttctccttattttaataatgtcatgatttattacaggttcactttgtgcctaacaatcaaaataaggttgt

SEQ ID NO: 85681 - DNA, 425 bp, Citrus clementina; identical to SEQ ID NO: 83657
  Intron number 3 from transcript clementine0.9_018385m (loc us clementine0.9_018385m.g) derived from phytozome v7.0 (c hr-ID scaffold_4; pos 2533596 to 2534020 reverse strand)

SEQ ID NO: 85682 - DNA, 457 bp, Citrus clementina
  Intron number 3 from transcript clementine0.9_000548m (loc us clementine0.9_000548m.g) derived from phytozome v7.0 (c hr-ID scaffold_3; pos 1016669 to 1017125)
caacaagtaattaaatagtcttatttattcgttcttaacaagaactttcgtttctatctgtaaacatacgtatcctttttacaagagaaacaaccttttcaaaagctattgtctaattcgatctacggaaattcttgttgtcaagtaatcttctttggttaaacaactgcttttcttgaaaatcaaaccatccagcattttaaacatacttgttttccaatcaattaattaagatacatatacactgtattattattttattattattagtagtagtcgtagcagcagtagtagtttcattatctattaatttacaagttcgtacttctatattatattttattacattatatatgtgaattgcaacatccgatcaagcatgtttgtgttcgatcatctaaattgcgctatttgggtaattacagcaagcttataggggcaagatacttcaagctcg

SEQ ID NO: 85683 - DNA, 633 bp, Citrus clementina; identical to SEQ ID NO: 81772
  Intron number 1 from transcript clementine0.9_015348m (loc us clementine0.9_015348m.g) derived from phytozome v7.0 (c hr-ID scaffold_3; pos 424300 to 424932)

SEQ ID NO: 85684 - DNA, 732 bp, Citrus clementina
  Intron number 1 from transcript clementine0.9_030560m (loc us clementine0.9_030560m.g) derived from phytozome v7.0 (c hr-ID scaffold_10; pos 5909722 to 5910453 reverse strand)
ctgaacttaccacagagcaggttagtgatgtgatttaatctgttgatttgcttgctttattatcgtcaatgattgcacattaccatactataggcatttacattttttatgtgttctgattttgtcagaacgaaccaaatgtgctctttttttttctaattataacattttatctacactcttgtgaaatcaaattatcagctgtctagtacaagtgagtaggtgattgacaaacattagtcaccaatttaaagtgggtacgtaccgaacggtttagttgttgtgctttcagataagcagaagcacaaaaaggcttctttataaaaggaaagcgtgagtaacaagtaaaagatggtttgtagttgtgttcattacaaactgttttctttctgggaacatgaagtattggaagttggcttaatctggtaaatgtatgtgttgttgttactagttagttttagttggtgtttgttcagaaatgaaagtgaaaggaaatggtagattagtcctgctcaataatgctagtgtgtttacttgatgatggctaatgtagccggattctatttgccgctatgtttagtttttcttgacttttgattattgtatttttgttgaaatattgtgtgattttgaaaaaaaaaatgttttcttgttacaacggatttaatttagtcaatctggattttggttaacatcttcttttgttccataggttctgaagagggacatccc

SEQ ID NO: 85685 - DNA, 652 bp, Citrus clementina
  Intron number 1 from transcript clementine0.9_018037m (loc us clementine0.9_014383m.g) derived from phytozome v7.0 (c hr-ID scaffold_2; pos 5548182 to 5548833)
agcagagcgcctcctctcgctcttggaattgcaaggtttcttattttactctttagctcaataaattctctcaaaactctgtgttagtgttacaaattaaatttagaaattaattgcttccattttgactatataaatgcttgtcataactttagctgaattatattatttacgcaatgattatagtagaaattatacaataaactattggatttttatttatttgactatcttcttcatccttttggattttctaaaaacgctgtcttacatgtttgtttttgtctctcataaagcttgttttactatcagttatcaagagcctaatggaattgttgaaacttgctacttatttattttttagactctgtttaggcttagtttagaatctgatttatctatgtgaactaaataaatgattaatctgaattaagctgaatactggtgttagtgtcagtgctgagtgaaaatattttgtttgtttttatgtgattattggacaacatcttttgtttctgaatctaatagtgtctttatgttattaatattgtgttgatcaaaaagggattgcgatatgttagatcttggaattagtcttcgtatgttaagttcgtgttgaaataatgggattccgcaggcagttttggaggaa

SEQ ID NO: 85686 - DNA, 530 bp, Citrus clementina
  Intron number 2 from transcript clementine0.9_018037m (loc us clementine0.9_014383m.g) derived from phytozome v7.0 (c hr-ID scaffold_2; pos 5548950 to 5549479)
tgtcgccactttagaggtattactgtttctatgcttgccatgtgcttctttgtttagttccccccccccccccccccccccccttctcgaactatctaagttatttttggaattgaggttaattttaatctctacctgctgggatatggaatcactagctattaagtataaagtgggtgggtggtggtaaacattagctgccaagtacaaggggtatttactgatcactcaagctatggtactttcaaattaagcaagagaacaatagttacagacttaacctttgtttgcttacctttttttttggatggcactacccatgcctccgtccaaggttcactggcttggcaatgggcattgacttttgcgtgcaatagaaaattatgaatgtatcaatacttcaataatcaattacaactgccaaagtccttcaattttctttttatattttaattaatttattacatacatgatgtttaatattcttctgagattcttctttttgaattttccatttggtgtttagggtc

SEQ ID NO: 85687 - DNA, 686 bp, Citrus clementina
  Intron number 1 from transcript clementine0.9_014549m (loc us clementine0.9_014549m.g) derived from phytozome v7.0 (c hr-ID scaffold_31; pos 1100809 to 1101494 reverse strand)
actgttttgttgatgtaagcaatctctgctctctcatttttcatcttctttactttatcaagctctctgtctatgtacttactgatataacatagtttcaagtatatcaatgaacagtatctttataatttttatggcattaaacaaaatatagagttttcattaagagtttgaatatatcattttaatttcaacaacttccaaaaccatttttatttatcttttttctttctctttacaacaaatttttcctctctaattcgatgtaccgaggaccatgtaattctctgtttataaataaattttaatatggggttttcatgtactagaaatttaaatctagcaaagatttggtacaaaacaggaaataaaatccacctcatggcctcatccctgctgagttcttttaatgatcatgggtccaatattaatggtgtatggttgaaaaaaaatcacacttgttttatattcttccaactgagaaatttaaatcaactggaaatcctagtcttaaaaacatatgtaataataagacaatttaaataagaagagtttgcattatttatataatttttttgaattcctgtccataagataagaaggaatctatgtacttgaaaaagtaataatacaatggactgttaacatagcaagttgttaattaatattattttttcaggggtgtg

SEQ ID NO: 85688 - DNA, 522 bp, Citrus clementina
  Intron number 1 from transcript clementine0.9_008789m (loc us clementine0.9_008789m.g) derived from phytozome v7.0 (c hr-ID scaffold_10; pos 3715482 to 3716003)
ttcaagcattcttcgcaaggttgaatttttctcaggtatgtttgtctttttcgagcatttacaattgtttaatgcatggctttttgtgaatttgtgatctgggtatcccctgttggttgatattttgatctttctgcattttttttattggtttttaattctttaattcattctgctcgttcaggattgtaaaattttaatatttttcttcgatttggataaattctaatatttgtaatgctattgaatcactagggagtatcaaatatatatatatatatatatatatatatatatatatataggccagttagttatggagatatcaagttcttgccattggatctgctagtgctagatgctttgagcagctacgtttcttaatgcaagacttagttataacattgtcttaaaactttcactatatggttcttgaatctgtgtttgtttaagtcaggaattattatcttttattgcaattcatcagaacaggagtcaactaccttttgcaggtgactaaag

SEQ ID NO: 85689 - DNA, 756 bp, Citrus clementina
  Intron number 2 from transcript clementine0.9_024501m (loc us clementine0.9_024503m.g) derived from phytozome v7.0 (c hr-ID scaffold_3; pos 8732234 to 8732989)
atactccctgggacggaggtgggaattttattgtctttttactttatagaaataattttatgcttttgatttcatttttcactcagcttttgcttgttaggtttcgttcattagttttaatgtataattaagcgaaagctttgatgagctgacttttttattttgcctgtaactaagctgattctgtgtatagaacatggttgaattcctatggttcttggcttgtgttgtatttgctgttgtgggtcataacttgtatatattgttacaatttaattaccttgtccatgtttgtgttagtggtttttttttttttttttttccggtttgatgttgagaaaattcgatcacctcttttttttttcttttttttttcttttttttttgtcatcatctttgatcagaaggactgtcaatatgagcagaatgagctatcttgtaaacgatgctttcacgttccaattatgtaaatggtgtttttgatggaattttaattgccgaagtggctttagatcgattgctgcatgatggtggacaatctgctttagtaaataattatacctctgtttctatatcgtgctatccttgctttcagtcgcatttgaggcctaaatactcctacttaacaaaaatgattgcttatgccttatcctttgtctttacagttgaaatatttaggtttttgcatttgtcatctaagcattttcttgaatttcttcaggtacgttcaagttgactctacaattcacagaggat

SEQ ID NO: 85690 - DNA, 365 bp, Citrus clementina
  Intron number 3 from transcript clementine0.9_024444m (loc us clementine0.9_024444m.g) derived from phytozome v7.0 (c hr-ID scaffold_3; pos 8256957 to 8257321)
tattctttcttgggtatgctacaattccctgtattgttggacatattttcttcttaattgtgcattctgatcaaatcatttgaatttggaaccccattggcaaaagagcgttgtttaatgacatttctcttgctttgaataatttattttgtaatagttgttttggctgtttctcttgtcgtccttgactatgcacgaaagtctcgtgacaatgaagattaggcttatgtttagtgttattgtagaaatgtgcatatttgtacgcttgcacgcctaaatctctataaagaaaaatccaaatgtttaattttttttcctgttttaatgcagtgcttatagaggattatacatcctaaactgggttt

SEQ ID NO: 85691 - DNA, 409 bp, Citrus clementina
  Intron number 1 from transcript clementine0.9_015860m (loc us clementine0.9_015860m.g) derived from phytozome v7.0 (c hr-ID scaffold_7; pos 4244923 to 4245331)
tacttagagtgcatttccacgattgttttgttagggtaacaataacacatgtcatcttcatttattattagtcatagcgatttttatagtgataattagaaatttttattcaccctaaagatattttgcaaacattatttgttcttttcaataccagcacgtcagcatattgttacggccgctaaaatttaccttaaacagaaaaattatctaagtgccgtacgggttgctgtgcaaaacactcatctcgtgataatatacatatataaatttgttttaaatgaaagctctggtccgaagagaagtcacattctttttaaatacgaagaaataaaaaacatgtatcacaaatgcatgctttacaagattaataagcttgtgatttgattgattttgtcttagggttgcg

SEQ ID NO: 85692 - DNA, 893 bp, Citrus clementina
  Intron number 1 from transcript clementine0.9_008030m (loc us clementine0.9_008030m.g) derived from phytozome v7.0 (c hr-ID scaffold_2; pos 6106738 to 6107630 reverse strand)
atttctcgagttttgtcaggcagcttaatacttatgtgggtattatttgcagtaaggcagcctttattattggccgctgtcttttctttgtaaatcttgtgttttctctttcttgtttcttgttgtatattattgttttcatttttttttttggttttttttttgtttgtactgttaactgatgtttattctgtaattggatttgatgtacttacagacagaggctgatgttgtaatatatcaggacttgtaatgcaacttgttggacactgaaatggggtgtaaatattgatatcaattgttgtaaacaaattttgtaagggaaaatttatttaattacataactactcatttgaatgcttttgaatttattatctgtcttgcggtttgtacaggttaatttcattgatttgtcatatatatactgaagttatgtatctagtatgaaatagacaagaaataacgatggtttctactttattagctcatgtttagttgaggttttaaacttcttactaccttttccctcaaagcagtgagtaatcgagtgggcagttcagacttgtgcagatagaagttgagtttctggtttaacatttttgttatctggcatgttatgacatctctttacttacccaatgatgaaaatggttttgtgatatacagatcatctttgtggtgcggttctgcttcttatttgcttgataattgatatacagattatcatgtgaatcactccattaattttttatctgacgaacttagatatcatgtgaatcaatacattaatgttttttgtttttgtgaagctttatttcttctggttcattcttgaatctctttgggtactgtattcaggggttccgcaagattgatactgataggtgggaatt

SEQ ID NO: 85693 - DNA, 682 bp, Citrus clementina
  Intron number 3 from transcript clementine0.9_021985m (loc us clementine0.9_021985m.g) derived from phytozome v7.0 (c hr-ID scaffold_3; pos 8287369 to 8288050)
ctgttccagcttctaaaaagaaagatcagcaaaaggcataaattttctgctttcctttttatattagttctctgcattcatttctaagagctgtaaggaagaatcctgttttaggttagattttggccatgtttaggtgagaatttcaagccaatttttcttgaggcgtttctttttttttttgtatttacatgcagtgcacagaagtgtgatatgcttattgtttcctgaagaaacatattagaagcatcacccatttaccttgctaatatagttatgttctctagagctttttatgtgttcttccaatgttgaatgaagtaagcagttcagtattttcccagatatttgaagagaagaatggtaggctaagttatttggactgttggaatgaggcttgatttaagtttgatgtgtcttaaataaattttgagaaatagacagaaggaaaaaaagggttcacatgtctgtttgtatgaaatttaaatagttttttcataaaataggtcgaattaagcatgtcttttcacctcccttgcacctaagtttggactcttcaactgacgtattagcttctcagtgtattatctagatctacagatgtgcacgtattttctgttccttctttttgtctcagaaattctaagcctgcatcttttcattcaggctgagacatccgtgg

SEQ ID NO: 85694 - DNA, 492 bp, Citrus clementina
  Intron number 1 from transcript clementine0.9_002042m (loc us clementine0.9_002042m.g) derived from phytozome v7.0 (c hr-ID scaffold_7; pos 3147661 to 3148152 reverse strand)
cagacccaggtgtgcctttttgtcccattaaaattttattgaattatctaagtgagtactgtaaatgaaggggaagcgagcagacagtcatggcgaatgcatatgtaaagacagatgaattttgaatcaaacaccataaacgcgtcattcttgtactgttcatcaaatggaaaaaaactcatgtgaatcatgtgattgatgatacttaaaatggaaatctttattaatcctctgttcttgttttgcagaataagcataatttgagtaccgtgatcttttatgcatttttcatttttctttcttcctttttgttccctctcattatttctctaatcctggcaagtagatgaagtaacagtacagtctttatagttgttaaagacagttttcacgttggttcttcaagtcttgtagattcaatgcaatagtaaaaaatatactcaggtttatgccactttggttgaagttttgtatcttttatgtgtttagcta

SEQ ID NO: 85695 - DNA, 1028 bp, Citrus clementina
  Intron number 1 from transcript clementine0.9_004946m (loc us clementine0.9_004946m.g) derived from phytozome v7.0 (c hr-ID scaffold_2; pos 7515826 to 7516853 reverse strand)
ctcaagctcaacacaggcgatccaagaggttttgtttctttttctttcttcttcccatttccagaaaaaataaaatctgttattgttgttctgatgacaaatgtaattcgcattcagtgaacttgtagcaattcataaatattctctttcttttatggactttttatgtgtaaattttcattgagtgcaatatcatattcatttgttgcagtagcagtgctttctacctcatttttggtaaccgtaaagattgtatagttttatttttctctctctttttttcatgtaaagaaatttattggaaatggatgatcaattctaaagtggtttcaaattcttgggcatcagtcgttggttgatgtggtatagacaacttgaagctgaatattaattgagtgatgaggagaagagatctggcgagtgtagtgaggtcacactgggaatccatatagctaacttcgaagtttggagagggttcaacgtttactaactggaattaaaacaagatgataggttctgcaagtcatttttttttttaaggacaagttctgtattgtggggggtctgaggtcaattatttggaagaagtgaggttaatcaaatagcttttaaagttatttattggcttaaaatttgtaaagatgggtcacattggattctcaattagattttcatcatctcttccattctctgctttattttgtttgagttgagagttaaataataggaaattctgggtattgatcattaggaagcagggttcgtcagctgtttacatcaaagaaaaactcacctaaggattgatccaatatagccttaaaacaattctgagcaatttttcttgccctttccctgcaacttttccctctacacaagagcttgagtagcttgtctttgttatctaaaatattgcgtatttgttctctagcagcacatagcaattctcagcttatatagttgcatcctttctgacattttgtattttcatttcagtgctgccgaaagaaattcagacatctcaagacgtg

SEQ ID NO: 85696 - DNA, 487 bp, Citrus clementina
  Intron number 4 from transcript clementine0.9_019360m (loc us clementine0.9_019360m.g) derived from phytozome v7.0 (c hr-ID scaffold_7; pos 1749873 to 1750359)
aagacatcaaggtatttttctaatttatttttttctttttaatggaaccgtgtcgttttcctcgtttattttacttggatttgtaagtttgattagttctattagtttaatatgaaagtagtgagtgaggagcataaaccttgtagtgatttgatgatgattggctgagaacgtgataatgcattaatctttcatatgcaatcttagaatttatacagatgattacaacaaaattttttggtagtttgaggtaccagcgagttgaagggataggagagagaaatttgtgaagtaaaatcagtttctttaagctaccttagagagaaggatcttttttgcttttgatttatttattcttacgttttttatgatttctatgttccgtcttcactcttgaagatgattgcatatggagttctgtgtgaaatttgaacttttctttttttctgcaggagcttttttcagaggttggtgaacttaaacggtg

SEQ ID NO: 85697 - DNA, 941 bp, Citrus clementina
  Intron number 1 from transcript clementine0.9_009068m (loc us clementine0.9_009068m.g) derived from phytozome v7.0 (c hr-ID scaffold_4; pos 5589797 to 5590737)
ggtgaaacaactctcggatcgggatatccttaccagtgagtgaattactgtggaaattctgtttggttgcttagaaaatggatgaaagtgaaaattgtgaaattttcactgtttgaggtgctattgggtgaaatagtgtactcagctaagggataaatttcaattcatccctcagatagaatggcaatttttaattcatcccctgtgaaagtcttaatttatctgtttttgttcagaagatgagggcaaataagggcatgttgatggatttcttttctgtctttctagtcgtaattggggataaattgatgttttgacactttttgagggattaattgaagattgtcattctaagtaggggttaaattgaagtttatggaagtagtaatattgatttgattggatcatattaggtagaattttttgggttaatgacgaattttcattaggaaaaaagaatatgatcttttattagttaaggttctgaattggttttagattttttattcatcaatagtgcaaaggtaggtattttggtgcttgatgatagggaaaaaaattaaattttggattttaatcaatgagtattcaatttctaatgcttgattattgatatgtatacactggacagacaggactttaatatggggtagattatcattataattattgatggttgcttaaattgaatcttatggaagttagttgactgttgaagactggacatttgatgactgaacttttgtggtctgttgtgaaaagtgagtaataggatatttttgtgcataaagttgtcatattcatgcctttttttttttttggcgggggcggggagggggggtggggaataactgataagagttgttaatttagttgtgttaacctaatgtccttgtcaaaatgatttttattgcagaactttggtgactggcttatcattc

SEQ ID NO: 85698 - DNA, 253 bp, Citrus clementina
  Intron number 1 from transcript clementine0.9_014547m (loc us clementine0.9_014547m.g) derived from phytozome v7.0 (c hr-ID scaffold_24; pos 3713585 to 3713837)
tgaaaacgattgacgattttctccaaaccttcaaggtcagtaatcagtatcttctaaaacccacaaaaaattttttcgcattcacgtcaagattctagggttctgctattattttatttatatttaaccggtaaattttctgtctgtagttgtagatctaattgtaaggtttatgtttcactcgccgatttttattgcttacttttgaactgtttttttttttttttttggtttctttgtagtgaaattgata

SEQ ID NO: 85699 - DNA, 637 bp, Citrus clementina
  Intron number 1 from transcript clementine0.9_020174m (loc us clementine0.9_020174m.g) derived from phytozome v7.0 (c hr-ID scaffold_2; pos 4945130 to 4945766)
acgatctgtctgcgagaggaggaaagaaagaacacgtaatcgtcaataccttcaagcgtagagctcgtaattttgatgggtatgcacattaatgatttcttaatttttttttttttaattttttgggttttatacttcctgtatctgaattttgctgacatgggtttgttcttaaacttagagattcactgtttgtttgagtattaaaaaacttgggattatttatttatttatttggggattttagggtttcattcagcagtaatgagtcagctcttgattcaccaaagaaacccatatcagaggatttaagtttgaaatcccagttgcccgaactcggaagaacattgaacaagaagagaagctatgtacaattgtatttagaacttggccaatctgattttcttcttcatacatgttccacctgtggattcaagtatgctcgtggtgatgaatctgatgaaaaggttcataagtcatttcacaagaactacacacacgggattcaattcaaggttcatgttaccattcctttgatttctaaatgtgtttcttggtccgtaattttatttgatgattgttttgttcgatcaaattgtttaatatatgttttttttttggggtcagggttggcgta

SEQ ID NO: 85700 - DNA, 927 bp, Citrus clementina
  Intron number 4 from transcript clementine0.9_025152m (loc us clementine0.9_025143m.g) derived from phytozome v7.0 (c hr-ID scaffold_3; pos 6061642 to 6062568)
caaagaagtttgagccaaagtacaggctaattcgggtaagttgatttcttttgtttctgtttgtcgtgggtcatgattgtggagggtggtttctactggtcaatgcttttgttcccgaatgactggtgatttctactggtcagtgcttttgttccagaatttcttaaaacgtcgagcaaaatcttttatgcaattgagagcactaatcaaagctactaatagtaaacattgtatcacttctttattgcacctaagagctggggtgtaggttccttaaatgttgctgctacaatattggtgttacttttccattattagcgtgatgaatgaatctgttgtagcatcacttttaacactcaaatgttgaaagtgagtacaaaccttgtaaatttgcatgtgaatgaattgtatttgaagctagattattatctattgcactcttttaagctacaagttttcagttcagatgatggcagtgtaaaaatttctgaactctgctgactttgatatgatggaataaaaaagtagatttacatggttgggctgttctcaggcttcagtcactgcattgcttttatagctagaaactctgaaagtatgtcttggaaacctcgcaaagatctgttgtttaacccttcttgaagtttaatatgtttatggtttaaaagttgatgctacttccaaggcttggtcatggatgttcttgtgggcctcggatccttgtggttacacatatacacataaactcatattgtctatttataaacactctgtcaagcaaatctgtaaagaaattctatcttcaacgaagagaagttgtcttaatgaaagaagtattctttgaagaagagaattttatttcgcttcatctgatagagatttctttgtctgattcctatttttgtttgtttcgcatctatcggcaga

SEQ ID NO: 85701 - DNA, 326 bp, Citrus clementina
  Intron number 1 from transcript clementine0.9_006986m (loc us clementine0.9_006966m.g) derived from phytozome v7.0 (c hr-ID scaffold_7; pos 2324044 to 2324369)
gagaggcagagcagctcttggttttcaaagccaaggtcagttgataattagtatttattttactaaagtttgaaattttggtttcttttgaccttataagatttcaattcaagcagacatttgaataaaattttcaactttggttcaatttttcaagatttactgttttgaacatttgtttagtatttactatttacattttcttttttttttctttgttttctttcgttgataacaatgattgatgaagaaatggtgctaatatgatgttgattgattaaaggacaagggggtattaatttaatactaaattttgcttgcagaac

SEQ ID NO: 85702 - DNA, 951 bp, Citrus clementina
  Intron number 1 from transcript clementine0.9_022868m (loc us clementine0.9_022840m.g) derived from phytozome v7.0 (c hr-ID scaffold_4; pos 1613027 to 1613977)
cttcaccgtcgttgatcggcggtcagatattaatctgtctcttctttcttcttgctctcgcatattcatttgtacatataaaaatatatgttttacatgtatgtgtgtacggatgcttcgtatatttgatcatacttacaatagcttcatttaacttgagtggttcatgttatcaaatggatctatttcaatattgttaattagctaaagccatgtttctcttttgtgtttaatttttgttttgcctcatcttggaggtggcttgtttaattaataatcaatcttgaaattgcttcttagtgattggtgtaaataaaaagaacatagtgttttttttttccttttaatgtctgtatgtatgatcatatggttgagatttctgaccatagaggtttagtgaaaatttgaagttggcaatgttacgtttcgagtaaatatgaccttatgaaaacatctatccacatggtatccattttgggaaaaggatttaactctgttgttgttagagtgaatatttccttctcgaagttctatattacggttaggaaacatttgtgaatgtgaactttatgttttcaagtgaaagcatttacttggctttgtgataaagatgttaacttacagggttataatatcattatacatggttaaacaatagactctgagtatgatgctctgcgggataagttttgttgtatgctgagtttgttattttcagcatgtactaaaaacccaagaaagacactcatctctgaattaccttatcgagtactgtcctggtggtttattgtgctactgctgtgagccaagacaaaggaaagcaaaatattcagattcatggtggtgatactgcaaaagaaaatttgcattatctgttctctgtttcttgaaagagttcctccattgtggagtttttagctggttgttaaaccgactatttacagtgcagat

SEQ ID NO: 85703 - DNA, 567 bp, Citrus clementina; identical to SEQ ID NO: 81020
  Intron number 3 from transcript clementine0.9_000228m (loc us clementine0.9_000228m.g) derived from phytozome v7.0 (c hr-ID scaffold_4; pos 4652661 to 4653227)

SEQ ID NO: 85704 - DNA, 643 bp, Citrus clementina
  Intron number 1 from transcript clementine0.9_033964m (loc us clementine0.9_033964m.g) derived from phytozome v7.0 (c hr-ID scaffold_4; pos 4001948 to 4002590 reverse strand)
attcctttggatgtaggctttttgtttttttttttgtttgtccgcttaatttattaattaaaccttgtacattgttcttttaatgcattttgattgaatgaagcctgcttgtcacttgacacgacgcataatatgtttgattgggcagttgcattaagttttatttgaccataatgtgttatatttctgttcttccatggtatctagagactcgacatgtagtggcaccacaaaattaagccttgatgtagatttaatgtgtcacgatgttttcatcaggcagtaataatttccatggatcttcgtaggagtaaattagagggagtttaattcaagaatatttgttttgaaattaatttctataggtcagtaggtgaagttccatagatgatgatcataattggctaattaacttttgtattaacttagctaatatgagtattcaccggtgatcattacgtggtctgagctggtcattaccagctaaatgactcacattgtataaggagaaagtttctttgatggactaagctagttcttggagttggagattgcttttttattttgaataattatttcatacatacaatcgtttaaactttgtgcagggagaatcccttttgcatttcttgaagatatccat

SEQ ID NO: 85705 - DNA, 593 bp, Citrus clementina; identical to SEQ ID NO: 81389
  Intron number 1 from transcript clementine0.9_020825m (loc us clementine0.9_020825m.g) derived from phytozome v7.0 (c hr-ID scaffold_4; pos 5621576 to 5622168)

SEQ ID NO: 85706 - DNA, 270 bp, Citrus clementina; identical to SEQ ID NO: 81390
  Intron number 2 from transcript clementine0.9_020825m (loc us clementine0.9_020825m.g) derived from phytozome v7.0 (c hr-ID scaffold_4; pos 5622352 to 5622621)

SEQ ID NO: 85707 - DNA, 633 bp, Citrus clementina; identical to SEQ ID NO: 82123
  Intron number 2 from transcript clementine0.9_032306m (loc us clementine0.9_032306m.g) derived from phytozome v7.0 (c hr-ID scaffold_3; pos 2462933 to 2463565 reverse strand)

SEQ ID NO: 85708 - DNA, 755 bp, Citrus clementina
  Intron number 1 from transcript clementine0.9_032306m (loc us clementine0.9_032306m.g) derived from phytozome v7.0 (c hr-ID scaffold_3; pos 2463585 to 2464339 reverse strand)
ggtgcttttggtatccaatccctgaatgcacttctcaatttttgttccattaattgttatctatctgttaatcgattgatacgttgggcaaatatcagttaaattggggcgaggcgaatatgctagtttttcttctggttacgttacggttattatttgtggccttctcaagtaaaattcccatgttattattcataggtttttgattcctgttgtttattcaatcctgtaagatagtctttttaggtttctacttaatttttttttttttcaccgagtatgcacttcaatttttgatatcttttcatttaccagaaatgctatctttaactagtatgatatagttaagacgaattatgtggaaatgttctacgaaactgtattgttcttctcgtttgagccctatattcaaaagtctagatggagattacattattattatgtatctttcacggctttttatgttgattattaagtaatttcacttatgtttacacctatcgatttaaatttttatgagcagaagatacgttacgtggtgaatgcgttattctttgtctttacagaaaataaaccatgagtgctttctgcagcgcaatgagttggttttttttttttttttccttttgaggaaacaattattcatcttcctggtgagtgattttgaggaaacaattattcatcttcctggtgagtgacaattaactttttttgtgaaaatcccaggcctcttccttccagctgttgtaaggccc

SEQ ID NO: 85709 - DNA, 797 bp, Citrus clementina
  Intron number 2 from transcript clementine0.9_011188m (loc us clementine0.9_011197m.g) derived from phytozome v7.0 (c hr-ID scaffold_3; pos 5602244 to 5603040 reverse strand)
aacatttgcaagggctgtgctcattgacgtgcaaggtttgttgtttattagtgggcactagtatttcaaagataatcacccctctcactgatttctttaatcatcatttgttgaggagaagtttgataaccccatgaattaattaattaatcttgttggagtctttcatatttttctgcagaaaatcttatttgtaggctacaagatttaatcaagggtaggtttaagattatattttcactttggtgctaattgtgtatagaagaacatatgcaagtcaaaagttattttatctctaagatgtctccatgtgctctttatacctcaaatggcatcaaaagtaattattgattttgtaatacccttagcattataaagcccaaatgctgggttaccaaactgctacatgtgtgtgtgttgataataggaaagttaaaaagagtattatgtttgttaaatgcgcaagcagaaattataaaaaataatagaatataaaaataaactctagcagaatcagattaagcagtctgggttgaatgaggaacggctttaaagatttggagaggacagagcaagtgtgattgcttattactacctaaaaatgagccgtatttgttagaatgacatggcatatcatgcccttttttcccattttctttgaaaggaggcgtatcatgctgaaaatcctttttaaccctctcccttctgcatgctctataagttggatagtgcgcgacttatttactgttttgttgtgtgcagacactcaaccagactcagcacgcttcagccttgga

SEQ ID NO: 85710 - DNA, 798 bp, Citrus clementina
  Intron number 1 from transcript clementine0.9_002190m (loc us clementine0.9_002190m.g) derived from phytozome v7.0 (c hr-ID scaffold_31; pos 2448189 to 2448986 reverse strand)
tgagcttcggggtcattttgtaggtaattccagttcgtaattctatatctttgtgtttgagtttaaattgcagttttcccttactgtctatgcaaactgattgtggctttaacaaatttaatgatgtttctgcaaaatgattaactaaattcacttttaagaatttacgtgaatggaatgaaagagagttatagaaggtatcatgaatcaactttacactattcatactactcttttttacatttagtgttactgttattggttgaatattctaattagttctttctgattctagattctttttcccctcttttacatgtctaagcttgggaaagcactttctcctctttgagatgtcaatgggaaaaaggatgaagaaagaaccatctttctaatgtgtattgagcttcttcagcaatataatgctctgattgttatttgaccagttttaggttgattttgaattttatatcttatcttcttcatataaaataccatgcaagaatggtcagttaaatctttctaaccactggagttatgctgtgggttttgtgtggattaggattcttaaagatttacatcttggatcctggaaatgaaatatgcagaattacgttgtaatttagccactaaattatatggacaactttaatttcaacatttctcagctttcacaatgttttgatgcttgacactgcagcaagttaattgggctattcaaatttcagttgatataatttcaatgactaacttgctttttggcttcttaaagggcattacttgagtgcatcagcacac

SEQ ID NO: 85711 - DNA, 367 bp, Citrus clementina
  Intron number 4 from transcript clementine0.9_015338m (loc us clementine0.9_015265m.g) derived from phytozome v7.0 (c hr-ID scaffold_7; pos 4146550 to 4146916)
aggggctactcgaattgctaagccaaccccaagtatacgttttattattgcttatatttacattgtattgagaatggcttttgatgatatgcgaaaacgtaaaacgattagtttttgtgtctttgagattgtgtacctgctaagtaaaatggatgaagcttgcaaaccagtaatggatttcagtgtccagtgctggttagttaaaataggctgtagttgaacattgggtggatgttttaagaacacgcgacactttgcagcaaattggttggttaggtgatgtggtactatttgacatgaaaaatagtaattatttggtaaaaatttatgtaaatcctcattcttttcccttcttttttagaagacg

SEQ ID NO: 85712 - DNA, 624 bp, Citrus clementina
  Intron number 1 from transcript clementine0.9_032831m (loc us clementine0.9_032831m.g) derived from phytozome v7.0 (c hr-ID scaffold_3; pos 2217524 to 2218147)
aggtccgtggtgcatcaactttgccattgaacgtttccttttcaaattgtaatccattatgatgattatgtttatttgctaattgtttttctctgcttaaataggttgatcatttgataaatgagaatcatcttttcaagcgcagcattatactgataaaggcttggtgttattatgaaagccgaatattgggtggtcaccatggactaatatcatcttatgccttggtcacattggttctttacatatttcatgttttcaatggttcttttgctggtccgcttgaggtggctatgtgaacattttctcactattttcatacatttgtacttttagtagtctgatagtttttatctttccactcgtaggtcctttatcgttttctagagttttttagcaagtttgactgggacaacttctgtctaagcctttggggtcctgtacccatcagtttgcttccagatgtaacgggtatagatattttgcttgaaaattctaattttgatcctcgcataagtgatcatcaagcttgatgtttccccttggtctgttttacagcggaacctcctcgaaaagatggtggagtgttacttcttagcaaatcgtttcttgattcttgtaggt

SEQ ID NO: 85713 - DNA, 621 bp, Citrus clementina
  Intron number 1 from transcript clementine0.9_015907m (loc us clementine0.9_015897m.g) derived from phytozome v7.0 (c hr-ID scaffold_31; pos 2094549 to 2095169)
tcgacgttgaagctgccctcagtttgggccgttgatataagaaaatcagaaaaaaaacttcatcaaatgaagtttcaaatcaacgagtaaaataatcaggtaacatgagaatatatattttgccaattgtatatgtatatactgaactatgtggttaaattataatatatgggtagatagcaaaacactacacggtaaaaatagtcgtggcttaaggaggaataggatcctctaaaagtctaaatatttctaaagaagtgtgctaggttggcaacatagcattagctatatctattgagtgggagggggcaaatgaaagcgaaaacaagaaacaagaaacaagaagcgaaaacgaaaacgaaaacgaaaacacataaagcaacaaaccagaatgacagcaaagacaagaagggacaggtggagggtcttttgatactacacaacgcagaacataactactgcaaaaaaaaactatgtaatgaatcagctttaaattttataatacattcactagatttcccacccaacatgtactctttgtttgattaataacactgatgtgctgttttgtgttctttcttgccaggtaagataggggtgttgggagttgggacacgtgtc

SEQ ID NO: 85714 - DNA, 594 bp, Citrus clementina
  Intron number 1 from transcript clementine0.9_011103m (loc us clementine0.9_011103m.g) derived from phytozome v7.0 (c hr-ID scaffold_3; pos 1012848 to 1013441 reverse strand)
ccaccgaaatcggaccaagaggcaaatcaatttgggtattcattttcttctctctctctctctctctctctctctctctctctctctctctctctcagctgagtttgaaggctaattttattcattgggtatttgatgattcgtttactggattaaaatgttactgtcttgaactctaagtggatgataaaggttaaaattaacaatttgttattggtttttctgaaatggatttaggaaagtaagatccaatttccttgctttttgatgtggaggcttatgataagtgttgatagaagtgctttgaaacaactttgatgctgtagaaagtacttaatagttctctcagataagtttcttatttggctgttgcgtatgaactgcatatgcttcatctttatgagagctagtgggactttttgcagttatttatccttgccaagtggtcaaaattgtatctttttgcccagactttaagaattggttagacttctcattttagagttggttataatggacagaacatgcagattctctctttttcagttattatatccacggtcttagttgtgctttgttgttgtgtagggagag

SEQ ID NO: 85715 - DNA, 677 bp, Citrus clementina
  Intron number 1 from transcript clementine0.9_020674m (loc us clementine0.9_020674m.g) derived from phytozome v7.0 (c hr-ID scaffold_7; pos 515841 to 516517)
gtaagcttttgtagctttaaaatagaatagatcatatatttatttggcttttaccaaacatagaattatgcttcttagacacaaaagataagagcttacgcggcctcgtacagcaaagtgagaagcataatcatgccacctcaactcacttaacctttatcttttcaaatgattctgtttaatcatattttttcttcgcatcacatgatattagattacccacataagtttcttaataacaaaagaagaacccattgttaatttaatgaacatgatctaattgataaaaagaaaagaaacccccaattggaagaaatgcatatacgccctacattaggaaagttaaagttgaaagaataacaatattggataaaaataggaacaataaatacataaagaaatcaaaagtgatcaagtggcaacaaccgttactgcaagtttaaaaagctagcggttatctcaacctaaacttgtgcctccatatttggtaactcaagttcccactgagcactactctcttcactactcattttataggcagcattttccaaaaacaattcagaaactcaactgcaacaatggcaacttattcaatcttctccccccttctctttcatctcttgatctccttctccattacaggtactagttggttcaactggtaaaacgtttttgat

SEQ ID NO: 85716 - DNA, 935 bp, Citrus clementina
  Intron number 1 from transcript clementine0.9_032416m (loc us clementine0.9_032416m.g) derived from phytozome v7.0 (c hr-ID scaffold_105; pos 26494 to 27428 reverse strand)
cttgcatctaaatcttggtaataacaaccttcaaggtacgtgccttccacctcgtcttttttaagcttccatttcaatttgcagaacacactttataatatggtgcaataactactgctaaaaactacacaaatcaaaatccgaccctgctctttcgagagggatccgtagcagaagaaagagaaggactgagccataggggcttaattggctgaacagtcttcaaataatttaattttttagctgattattcatgttcgaatggtatgggttaaaaaatttatttacgctttaccggtactcctacttctacaatctacacatgaataaatacttttaaggaaaaaatccagcacccaacagcagatataaaagaacgagatttcagttggtacacactaagctgtaaaaaaatgtttgtggctctgtcattattgtcaaagaaaatggtaacagctagttttcttcatattcatcatatttgttaatctcaaaattgcgatatttgaaaaaccaaagaaaagggtaatagaaataaagaaacttgagaaacaccaagacagcaagtacatttacagaaaacagttaacaaccttgaaattgacaatttcaccaaacttcaggaactccgtatgaacatcctcataaaattcttcataagagcgttcaacttcttcatctgtatactgaaaagaaaggaggcaaaccaaccaagaaaattttttgcgtatattaacatcagaagcataaaatcaaaagaaaagtatgaaagtatagtctgtcaagaatgctttattttgacattggaaaaacaaaatgatatttatcaggaggtgaaacaacttataaaaatactctagcatataacttgaaacttcactatgatagttatcaatttgattagtttctcaatttgcattttgttcttccagata

SEQ ID NO: 85717 - DNA, 688 bp, Citrus clementina
  Intron number 2 from transcript clementine0.9_013411m (loc us clementine0.9_013411m.g) derived from phytozome v7.0 (c hr-ID scaffold_2; pos 3165449 to 3166136 reverse strand)
cttccatcacctgtcaacttcttgtttccacgcaggtgttgtgttactcactctccatatgtatacttagtttgcttgttatgtcatgcatgttaggttctatgttttcaccttgcatctaatatgtttgtgaattacttgatctctcctatcatttgtacaaagattaacccatttaagatggcattccaagaaatatacttagatcgaccatgtgatacagagtttgactatttgattggatatggaagcgggtgtaaatgcggggagttgtatgaaatcaaatgggtaatgagagtgatcttgttgaagttatttttttgatgatgtgggagtgcacttggtagtagtgtgtttggagtttacaggtcttttaagaggtttataatggtcattggacaggtccatctagtatttttcgtagaacaaagatgccaacacgatacaatgcagttggacaaagattttactgcacagtctgacatgctaaatggcctctgtgggaagaaacaatatttcaaagattggcatgttactttatgcaactttattaacattttgcatagactgatagactaattgcatggctagtttgcacctgctggaattttagttattttattttacttagctccttgtgcaaattatttcagcttgtaaggcatcttctaccgctgacaaaacatcc

SEQ ID NO: 85718 - DNA, 679 bp, Citrus clementina
  Intron number 1 from transcript clementine0.9_021931m (loc us clementine0.9_021931m.g) derived from phytozome v7.0 (c hr-ID scaffold_2; pos 4548767 to 4549445 reverse strand)
ttcaggtttatcttctttaaatcctccttttgcatttggttacttttatttttttggttatctttttggatctgtattcaacattgttttttattttgtgttttttttttaatttttacgtaattttttttctggggctcttcattttgagacgcatgtgatttcatgagttcagtatgggagtattttttttcttttttcctttgtagtcttgattgggatttagtgattctggagcggtacgtacaggctttattaaaaaatattgtttggctgcagatttgcaatttgtttgcttaagagttgggtacgaaaaataatttgttttttgcaattcccaaaatatagacgaattgatatgttttgatatgtggtaaaaacttgttttgattaattatgggattcttgcataggattatgtgtttatggataaactggaggaaacagagaaggttctagtggtgttgatatgtttgtgtagtgtattttaaatttgaacaccgcttgtcaattacattttcttagtgatgtgttcttccaaacattcttgagtactttatcatctagcactttcgccaacttgtaaatcttatttctgaaatttctatcttttctgtgttattattggtaattggccttattaacgattttttttttaaattgtatgcactataggtca

SEQ ID NO: 85719 - DNA, 1032 bp, Citrus clementina; identical to SEQ ID NO: 82744
  Intron number 2 from transcript clementine0.9_008614m (loc us clementine0.9_008614m.g) derived from phytozome v7.0 (c hr-ID scaffold_3; pos 3425853 to 3426884)

SEQ ID NO: 85720 - DNA, 545 bp, Citrus clementina
  Intron number 4 from transcript clementine0.9_034320m (loc us clementine0.9_034320m.g) derived from phytozome v7.0 (c hr-ID scaffold_14; pos 921466 to 922010 reverse strand)
ctctatgttatatcattgttatgttgataaattagtatttggggaggacatggaggtaatagcatgtgaaaccagtgtgttttcttcgtcctgttgcatctttgatgtagttgaagcatgggcttcattgtgaactaattgtctggttcttgtggaaaccaattaaatgtgtgtaactggaactccaaattgggtctttttattccatctgctaggtttttttaatatctgcttttgcagttactgcagaatctaatgacacgactcattgttgccctgcatttttttctatttgaaactaagagctagcatcatcttctttttctgttgtcattcaagttttgtttgttttgatgatgataacagttgaaaaacacaaatttagagtattaatacttttactagaatctcataaatctgaaagttgctgactcagtcatgggcttaaacatgttgcagcatactaatagtatatttcttaatcatttccataatctggtgcttttggtttcaaagatcagcttattagttttgctccttaacca

SEQ ID NO: 85721 - DNA, 600 bp, Citrus clementina; identical to SEQ ID NO: 82469
  Intron number 2 from transcript clementine0.9_031731m (loc us clementine0.9_031731m.g) derived from phytozome v7.0 (c hr-ID scaffold_3; pos 2502175 to 2502774)

SEQ ID NO: 85722 - DNA, 731 bp, Citrus clementina
  Intron number 2 from transcript clementine0.9_009925m (loc us clementine0.9_009863m.g) derived from phytozome v7.0 (c hr-ID scaffold_2; pos 5387692 to 5388422)
aattcttgagccacctctttctaatcaccgtttcggtaagttgattaacaattagacctaaattaacacgatttagctctgttaatgatctatctcttcgaggacaaaaaaagattggccaatttggtaacgaattggtttcaaaactcagtgtttctgtacaaaatatttttgcaactagtcggtaacaaatcatgatatttattatactgtaagtagcaaaagaaaaattgtacactttggtctgcatacagatggcccatgaagagtagggtaccatatgcatgcatctaggtattgaattcaatttaatttgtcatgtacacatgaagccccacattttccaattcttaagaatctgcaattcgccaaggttcataagcttaattaataccatatgcagaagagtagttatagattttattaggtggtgtatccagatacggtgggattgaaaaacctcagttttaataaggagtcaaactttgtgggtacagcttccaattttagcatatcttatgactctattcattttctaataatataattgtgtaagggcaggcatctccctccattaatacaaactaagtgtgcatgtggtcataaatgagggtagaggactagatgggatgtggtcgtaaaagtttggagacttaatacaattaactgaattaagtgtgcatgtggtcattaaaagttttatttgtgcaggtttttatcactcggcaata

SEQ ID NO: 85723 - DNA, 856 bp, Citrus clementina
  Intron number 2 from transcript clementine0.9_022658m (loc us clementine0.9_022658m.g) derived from phytozome v7.0 (c hr-ID scaffold_7; pos 5591170 to 5592025 reverse strand)
ctaaggtatttttctttattaattcatttatttactttatctattcgattgcctgtgatgtaatagtagatgccaagtttatgtgatgtagatgaattttttttgtcttgaatttgaaagctgctagcctgcttaagccattggctggtttatgttttgaaatgaatagacatgcttgagttttttttttttttttttaaattctcctgtgtttattgtttgctagcggttatctgattcatgggaggcagacattgatgatgggagtttcgctgataatgccttttttcttgtttgggaggtttctaatagtagctctccatacatgatgttcttttggaaagaattactagctttatgaaagttgttttgtaacaaaagttagctttatttcagttgaattatggttgcttgaaagggttatttatcttattatttggatttggctatgagagttctgggctctgagggttctaagctattaactttctcaactacttgttattcgtagatattgattccttttaattcaatgaattacttgtcttgtttctttgtgtggactctctgttgattccagcaattaacattttttctatgtctggacaattgatagtcatacgaaacacacgtggatcctgaaattacttattcattctccattccatgtcgaatgttggcttggtttgaattgatgtctgaagttcattaatcatttttttgtgtgggttcatcgtggcttccatttaaatgctggcctcagtatttaataccaaatgtatgtctcttgtccttacatcttcgcaaatgactaatgccaccattttcttttctactgccctcgctaaacaggtgg

SEQ ID NO: 85724 - DNA, 638 bp, Citrus clementina; identical to SEQ ID NO: 81983
  Intron number 1 from transcript clementine0.9_000573m (loc us clementine0.9_000573m.g) derived from phytozome v7.0 (c hr-ID scaffold_3; pos 4079047 to 4079684)

SEQ ID NO: 85725 - DNA, 484 bp, Citrus clementina
  Intron number 2 from transcript clementine0.9_011551m (loc us clementine0.9_007988m.g) derived from phytozome v7.0 (c hr-ID scaffold_7; pos 5497261 to 5497744 reverse strand)
gtggatttgtatataatacttcttagatattcaaggtaagaaatgtaaaatattaatgctatagcctctgtttgatttttgattttttgaaaattttatgaatatgtcttatatgttttatactgtgttcaaattatatccaagaagtttgaattttatatcacagttcgaaaacttgttggatcattaatacttggggcaaaattcacatacttaagcttagagttctcatcttctttggacctaccaactccttgtatagagaactgctgaaagactagaatattcttaactctcggtacagaaagtgttggataattaatgcaaaatttttggcaattttttatctggcaacactgtaaagagagcacgtagtgcatggtttaagaaaatgcagatgtctgaacctgataactgttacacaaaacttattcttgatcttttcacagtttggtgtcagaaactataccattccatcgggatt

SEQ ID NO: 85726 - DNA, 475 bp, Citrus clementina
  Intron number 3 from transcript clementine0.9_007414m (loc us clementine0.9_007414m.g) derived from phytozome v7.0 (c hr-ID scaffold_2; pos 3873296 to 3873770)
ataaattctgcagctaatacaaccttacacgaaaggttataaacttataagaccttgatttaatcatagttatatcaaatagaaagtgatatcaactaactagtctagctcttcaacaaactagtgatagatccataagatttttagaaaatctgttttaaatttcaattaaaatttttatttgtcctcaataaaaattgtgatttctttccatcggttttgaataatatatataaacaaataagctcaaaagtatattttcattgtcaaaatatctttaaagaatacgttaaaatttaaaattttttttaaaatacttgagaaaaacctaattgttttacagtaaattaaatttgttcctactgatcttgaaatctgggcaacgacacaatatatattttttaaaaatattgtacgtaattatttagatacataatataagtggcatcatttagtttaatttgaaattgcagat

SEQ ID NO: 85727 - DNA, 336 bp, Citrus clementina
  Intron number 4 from transcript clementine0.9_014529m (loc us clementine0.9_011943m.g) derived from phytozome v7.0 (c hr-ID scaffold_3; pos 1337209 to 1337544)
ggatttgtgaggcttcaaatttaaatagttgtcatggaatttaaatttttttctccagatcattcttatgttagttgattgttgtcttctgagtaacttatgttctatctgctccacttcttctttcttctttttttttaatgcttgccaatgttttaaattgtaccacttaaatctttatggctaattttattttctttcttatgatgtttgaatatgttttttatgatagagctttggcattttttttttttttgggtgtctacgttttattgtaataagattgacatgagaggctgatttactcaaagaatttacaagagtatatacttgcag

SEQ ID NO: 85728 - DNA, 818 bp, Citrus clementina
  Intron number 1 from transcript clementine0.9_018088m (loc us clementine0.9_018088m.g) derived from phytozome v7.0 (c hr-ID scaffold_24; pos 360025 to 360842 reverse strand)
gtgggtttaagaacccttttagcctcacctttcaggtacccttttgattatatcatgagataatgcgggaattaatttcctttttagctgtgattgtgttgttgttgctgagaatatgtgtgtatttatcgcttgatgtcaagttagcacgttaggttaaatgcaatttgatgtaaatggagtgaaattttatgcttttgcctaagctcaggttgtacctaagtggggaatatgaattttgcttaattaacttgatctcatcggggggaatccattgttttgcttaagaatcggatcttgttcacaattgtgagcttttagcacaaataagatatatctgccaaatgactatgaaattggattcttttacatgctagcgtagaaatgacagacagttttttggatgctattttgttttttgaggaagatccgtccctccaaatatgtatatgatggtttcaatttcatctttagcgctagtatagaagaaatgtcaataggtaccttgaaagttaattcattgggatatgggttaattgcctttgtttatgtgcttgcaaagttttagaaatcttctaggtgattttatttaatttcagtaccatccaatttaaagaagatagaagatgttgaaactttcgtagcttatattctttgtttgaagatgatgtattaattatactcccattggcattatgtgtttaagcttctgtttcaaggaggttttcaatgtgtctcatttcttctggttcactccttgatgttgcgtatcttttctggcagccagtaggtttgggaaagattgcatatctaataaa

SEQ ID NO: 85729 - DNA, 761 bp, Citrus clementina
  Intron number 2 from transcript clementine0.9_018999m (loc us clementine0.9_014576m.g) derived from phytozome v7.0 (c hr-ID scaffold_4; pos 1442340 to 1443100 reverse strand)
ctagaaagtcttctacgcattcttctttgtcgcgggtaaatttagattcctcttattttctctgtttctggtaggtatgagtgacagtgtgagagagaaagaatttatgcttttctgggtatccaaacataaattcttgacaaaagaagactttcgtggattaataaaacaataatactgtgcttccagaagcttgtattccaattgacgtggcatcgttattttattatctcactgtcatatggtgaactgtaagagcaccgcctatgtgtcaaatcagttgggatcaactttttaagcattactcataactatatttgtttgacgaaacagcttgtaagctttgtggatgttatttagagagatatgctgcaagtgtttggatgatccggttaaatcttttgtgctgtaaaattcagtagttgattgggtgtttagcttgcaagagcatagattaaattaaattgctatatgccattcaattaaaactaaatcatatgaattgttatattcattcattgcgataagaagaaaagatgaaaaatggaaaaaagcacaataatcaaaagtaatttatttattgtacacgagttatttgtaaatgtttcaaatgattccctattagttgttttggctttctgcccctcctgtgtggttgatgccagtgttgactggagattataggatttgagaatctcctaaggttacttttttcacttcttgcagttgtgcccttataaagggcttgggtgttccgcata

SEQ ID NO: 85730 - DNA, 423 bp, Citrus clementina
  Intron number 4 from transcript clementine0.9_011750m (loc us clementine0.9_010952m.g) derived from phytozome v7.0 (c hr-ID scaffold_41; pos 1300834 to 1301256)
gccaacgacttaatcctcgtctagccctcgggttggtagctaagattttcatagtttccttatgcccttgttcttttaaatgattttgtaaatcatgttgccactgacgtctgacgtgtatacgacgaagtttgataaatggtgacctatgatttccttaccgcgaccaatatgacttgaattggccattttagtttgttagagtccttatctatttcagacggggagaacaattaacaaaatatgggaccatttagattaaaatatgtcttcagaggcagtagtagagtaaccttttatttgattatgtctttttcctttagatacagcatttgaaatagtcaagtagaaatcatgtttacttgaagttgtttccccgtgcatcataattcatactatatctatttatttccttgtttacag

SEQ ID NO: 85731 - DNA, 995 bp, Citrus clementina
  Intron number 1 from transcript clementine0.9_004540m (loc us clementine0.9_004522m.g) derived from phytozome v7.0 (c hr-ID scaffold_7; pos 6020064 to 6021058 reverse strand)
tcgacggttagtgaatgaacttctttttagcatttttggtattatcttcggacctttatattgcaaaacgatgtcgtaatagcttgattaattttagattaagcattataggcttaaacttcctcaggcaccaatcaatgaatttccataagtgatgctaaacgatgtcgtaatagcttgattaattttagattaagcattataggcttaaacttcctcaggcaccaatcaatgaatttccataagtgatgctaaacgatgtcgtaatagcttgattaattttaggttaagcattataggcttaaacttccttaggcaccaatcaatgagtttccatatgtgatgctaagtgatgccgtaatagcttgattaattttagattatagacttaaacttccttaggcatcaatcaattaatttccatgtgtgatgtatcagtaattattggctttattattgcttaaaacgagagatcctttcaaactgtttgtaaagtgattacttgtcttaacatctcatggacttatattagggcctagtgtggaatttgcatccaaactttacatgtataacattttctcatagttggaatgcaactatcatcgatgatgtcataataaagttgataatcactaatacatgatatttgttgactagtgctgcatgggttgagacttggaaacaattaattatcactttacaatgctgtctacagtgctcaacccgactctctattgaaaaaacttaagctgtccccgcattttcattcttatcccacaacttattaagtattatgtaataatcaaaacacttatcttaatgtgtcaacaacagaaaacttggggtataatggaaagtttgaggttttcaacaggcagtggtagggtgctcagaatgttgcatgtcttcttgttttgaaagtggctaagtattttcagtttctgttaatcaaaattttgtttttcttgtcttttgtgacgcagcggaaggggaag

SEQ ID NO: 85732 - DNA, 797 bp, Citrus clementina; identical to SEQ ID NO: 81876
  Intron number 2 from transcript clementine0.9_025364m (loc us clementine0.9_025364m.g) derived from phytozome v7.0 (c hr-ID scaffold_3; pos 4156666 to 4157462)

SEQ ID NO: 85733 - DNA, 716 bp, Citrus clementina
  Intron number 1 from transcript clementine0.9_000138m (loc us clementine0.9_000138m.g) derived from phytozome v7.0 (c hr-ID scaffold_4; pos 6297722 to 6298437)
ccctcctccttggctcttttcctgtcctcccagtaatttcacctcttccgttatctttcttcttcaatccattcaatttgttgctatcgtttcggaattttttaaataatttctgcttaggtttctttattttttcctccaatttatcttcattttttaactttattattataattttgtagtttgtgctccgatttgagtgttaatttgaaaataaaagcaaaatttaagttctttttgcctcttaaaatgagtaatcagtaagctttgggctcttgaaactgagaatttatggttgaagtgtcgagtttcggatgtagaaatatttagggcattgttttggtagtgtttaggaggtgaaattttgcattactttttgttcgattagactgataacttaataggaaaaggattagtcacatataatttaaagtatttacactgaacatagcttgctagtttgaagagtaaataaaattgatgtcactggacccttttactttgttattaaggctttagttgaatttacaacaaatttgaaatttgatgttttctacttttctttgctgatcagtatcgaatttggtaaataataaacaattgtgtcttgaaattttttgattgctgggaattttttataacattggttaatttatagttgttttgttgacgtcatggcagatttgaataaggaggaacttatatcggggctctta

SEQ ID NO: 85734 - DNA, 730 bp, Citrus clementina; identical to SEQ ID NO: 78080
  Intron number 2 from transcript clementine0.9_006646m (loc us clementine0.9_006646m.g) derived from phytozome v7.0 (c hr-ID scaffold_3; pos 6034566 to 6035295)

SEQ ID NO: 85735 - DNA, 595 bp, Citrus clementina
  Intron number 1 from transcript clementine0.9_031555m (loc us clementine0.9_031555m.g) derived from phytozome v7.0 (c hr-ID scaffold_3; pos 1609884 to 1610478 reverse strand)
ttgattcaagcagtgaacaatctattgggcaggtattcgtctgctacaaaattttgcctaatattaatgttgaagtcaattgacagctattatagggttatattctcatgtgtgggtagacaccccatgtttctttgattttctttttctgctagaatgcttgcattaggcacgccacatcatcttcttatgttacataataaactgtaccttagaaaagaaaatcttggtcattaagcatgaaaattttataaacttgccatttctttttgggtgccaactgaagtgtagataatacaaaatgagatgtgtacagataagtctagatacagattctgctttgtgcaataaaactgttaacagtatgtagtaggttttggtttacatgatgaatttttttgactcaattattttggccattaattcatgtttatctcaaatatttctcccatcatgtattgaatgctctgattcgtcactgtgaattgtattatgtgttgaatggtctcatttttcattcaacatgttgaatgaatatatttccgtttgtagacatgagttatatgagatttccatgttttagaaaaatcagaag

SEQ ID NO: 85736 - DNA, 711 bp, Citrus clementina
  Intron number 1 from transcript clementine0.9_001510m (loc us clementine0.9_001509m.g) derived from phytozome v7.0 (c hr-ID scaffold_3; pos 1485472 to 1486182 reverse strand)
ttgctattcttcttgaccattccgagtaacttaaggtatgtattatttttttatttccaaaataattagtttcagaacagatggggttgggaattgtatgaacaaaatttaagcactttgataagttggaaaacagatcatttttaaggcaatgcaaatatgatgatgtacgaagtggatgtgtcgtgtatcgcattctattctggtgttgattgttctgtggtgatctcgtgttgttagcatgttttcatgtttccagtaattctgcttatattttacttacccctctagattctgaaatgattatacctgttggcgattcagcttgaatgagaactctttagtgaacatgcatcctgtcacctcgtgggagcttatgtaaaatagctgaactagaaaaccatacttgtaaccgcaatagtttacatcttctgtgtttctttgcatgcggttcatttttctcttatttttatgatctgatgctgtcatttcagaaccatcaaacgtcctctagtatggtcagaaaatatttttcattgaactttaatgattctcttgctttgtatgcatgcgtgtgaatgagcgaaggagaaagggagggggtgggctgcatcatcgcattattaaaactgcatcctttcatccttttgagttgtttgcagtctcatgtgaattatcttgtccttctctacatcaaatcagtgatcattg

SEQ ID NO: 85737 - DNA, 655 bp, Citrus clementina
  Intron number 1 from transcript clementine0.9_003109m (loc us clementine0.9_003109m.g) derived from phytozome v7.0 (c hr-ID scaffold_58; pos 993345 to 993999 reverse strand)
tctgcgaacgtctctgcgctgagttcccctctgaggtactaataatttcccctaaacacctctctctcttttttttttgaaatttaaattgtgctttgtcggtgataatgaggagaaaaaaacaaaaagaatcttttttgagcttaaactatacattactcttaagtttcatgcccttgttgaacattataattaattgtataacattgatactctgatttgtgaaattatatatattttttcgctaaatttcgattttcggagcttttactgattaggtttagtttttaaatttataattggaattatcaagtttcagtttcatgccgattccgatgtatatttcagtgaatttgaactcatcacagtgtattctgcattcataatgtaagctttaaatgaaacttgtagttattgttcatttttaaaatgatcatttcgggagttcgtagttatgaatttgaacaagctttttgccaatttagagattttgttacttttcttgatttggttcatacagactcaattttagtgaagaatactactttcatttttatttttttttggagtgttttgctttttttttgggggggatgattgctgctttcttttgtttgcaggtgaatttgcaattgttagctacctgctacttgca

SEQ ID NO: 85738 - DNA, 642 bp, Citrus clementina
  Intron number 2 from transcript clementine0.9_002855m (loc us clementine0.9_002855m.g) derived from phytozome v7.0 (c hr-ID scaffold_3; pos 1885568 to 1886209 reverse strand)
cggccttgttaaaggagaaagaggtactctgctgatccttttcttgttttctgtttcaacttagtagtacattacatccaagaatgttgaaaaacattaacaagtgaccaaattttttaaggctgtagttatttccttttttataatgtgtggaagtgaaagtgttcatttgataaataacactctaacaaatggctagttaaaaagcatatcatctaatcttttggatatatcagtctacatctttggcattattgtacatgaggtcatggttatgcactgtaaaccattgattaggttgaccaactattctgcttattagttttttggggagctgaattcttttaaataaagagtattcttccctactttagcttttaactatacctccactatttgttctgtctgtccgtcttgccttttctatttgaagattactaagctggttctgaaactaacatagattccatgcataaagaagaaagttcttctgcttgatttcttagtaataccttttttccccccttctgatcagtcagtagctttaatttcggggtctttgattactgaaattttgatttccctgataccattctccttcctcccataattgtcatttgcaggaacagatttccagattta

SEQ ID NO: 85739 - DNA, 709 bp, Citrus clementina
  Intron number 2 from transcript clementine0.9_032236m (loc us clementine0.9_032236m.g) derived from phytozome v7.0 (c hr-ID scaffold_2; pos 4693718 to 4694426)
tctcaaggcctttatatcagtatctgcagcagttggtaatacttactgttcctctccatttttatatgatactttgtataaatttggaagattttcagatactttgtataaaattgaaagattttcagtaatgcaaggtctgcttttacaatgaaacacaacaagagacccgaaatgtactctgatataaggtgtaaatatatgcaatcttaaagtagattcagtgtcttttcacacatggctggcctgatttaatgcacatgggcgtatttgtaaattaatattcacaaacatcatgtattggaagaaaaataatggtttaccccttcataaaactcttctccgaagttttgaattactcatcaatgcattggctgcaagctttcatcagtacacagtttccagtaatgaaattggctacgcatgtatattgatggagagatgcttcatcgtcactttaatgtatctctaaattgttgatttaaatcatccttccatatggaagacttgtacgttgattttgctggcaaaatgagttgaagtataagttggattttgtaactactgttgtttattaagataatgggtttcatcttcaagatctgaactgcttacattttaatttaatctttctctgggtttaatgtcataattgtctgatcttttatttatagagcatttccagtactaggaagttactggcaaattc

SEQ ID NO: 85740 - DNA, 573 bp, Citrus clementina
  Intron number 2 from transcript clementine0.9_025909m (loc us clementine0.9_024266m.g) derived from phytozome v7.0 (c hr-ID scaffold_2; pos 4214876 to 4215448 reverse strand)
ctatcacttctgttttacacgacgccactgctgtggtcagttccttctcttaatgtttttttgattgaattaataccttttttctctctgtattttctgttgctttatttggtatttgcattagcaatttagttgagatattcgattttaatttaacttaatttattgtatagcatttgattcttggttttacagaagttttattgcatgcgttttgtagtaaaatttcatatttggtaattgtttaatgttgttctagtcgaaatttgcttctgaagataaaacggaagtttaatttcttgctgtttggattgttggaattttgatgtctgaatattattattattattattattagtagtagtattagtagtagtttgggtgattgtagctgttactaatccactttcacaattgttgttggagactcctggatcgctttaatttgattcaatcaaatcaatttaacagtggctcagcttgtggtcaattgttcctttggtccgtgatgtataattctagttgttgtttttttttccccttcccttataggctggctctggctttggtgct

SEQ ID NO: 85741 - DNA, 818 bp, Citrus clementina
  Intron number 1 from transcript clementine0.9_027088m (loc us clementine0.9_026427m.g) derived from phytozome v7.0 (c hr-ID scaffold_7; pos 4906925 to 4907742)
gcatctcgctctccattagcaggtctgtttacagaactcttttttttctctctctctctctctttgggtcttctttgaaatgataattttatcttgtttcttgttctacgttgtgtcgcttgatctcatcatcattgaatccttagctgtttatatttgtttcttgatcaatctaaacatttctagtgacattttagaagagatcaagtcatctcccaaatgtttttctttttttttttttccttcttaacttaacaaacaaacgaattcgaaaaaaaaaaaacaaacgtagcctttctgtaaactcgccatgtgattttgatcgactttcgtatgtgaaaaataaatttttttaaaatgatcggattcatcgagggttagaacataaaaatcatgaatacgaggggccaaaaagtaaactaacattgggacggtcttaattgggctaaatattattttgcacccttatctttccttaatattatacaggaccttgtatatttgttcctccgcaaatactttggaaaggcgaaatcgcttaattttgttttaaacgcattcttgagacgcattaattcaataacctaaagcatttgcagattgattattagcgcttttagtaacacctcggtttgcacaagctagctagatcatatgattctgtttcaccatgtgaattataaaaactctttaaagtaatctttttctttgttatataattctcatttctttcacttatgattaatgatttctttctttctttctttctttctttctttctttttttcttttaataagaataattaataatttcttaa

SEQ ID NO: 85742 - DNA, 710 bp, Citrus clementina
  Intron number 1 from transcript clementine0.9_016275m (loc us clementine0.9_016275m.g) derived from phytozome v7.0 (c hr-ID scaffold_7; pos 5827539 to 5828248 reverse strand)
tcactccggtcacaactcagacgaactcctttcaggtatgctacgtcgtttttgttgaattctcgtttcatgtcttcataattcatgctcatatttatgtccatggagctagaaacagcagcaagattcttttctactcttaaagcactgtcatttttctggggtcaaattataattctggtaaagttacaagagtctgatgaaactgcaatttttcattaatagtgtctaaagatatgaacatttttggagaaaaaaatcatttttatcaggaaaaatcagtttttgtgttccttttttatttatttttattgttggttactttcagaaactgaaaaggggataacttgagctagtaagacacattatagcaacaggtttctgtacaagagaaaagcggtttttttttttttttaatttatattctttgaccgtggatgtttattttatgacttgaattgtgaagttgggtatatgaatcttcaagaaaaggcatgagatgtagtttgatatgctttcattatgtgttctttgcattttcatttataatttagggtcacatttctgacgtttaatttatgatgaatctatcttggaatgtatgcttacccttctatatgttcagtaaaatgtggtgtagtaaacttaaacatttgtctcagtaattgacgtaagtgttcctctccaaatggtggaaaaacagatatcaa

SEQ ID NO: 85743 - DNA, 927 bp, Citrus clementina
  Intron number 3 from transcript clementine0.9_011273m (loc us clementine0.9_011273m.g) derived from phytozome v7.0 (c hr-ID scaffold_4; pos 4604639 to 4605565 reverse strand)
tagacggagaaaattattccagttcaacatctgaggtaaacaacaaaatcctttgctctcatcgtgggttactcttcctctcacacccagtacaccaactatttacaacttatgcatttgttctttagtcttctattagttcatctgcctgcaggcatttgctgtgtcatttgatttattgctgtgtttcaactgctttgccatgctactaccctgaaaaatttccctgtactttatggaatgtatgttggaacttaaacttaaatgcgtagtcttttgcccaattgcaaagctgaagatctaattgcatgggaaagcacacatttatcaattttcaaactttggacgtaaaagttatgagaggcattttatgttgttccacttcaaaatcaaaccatctttttaattatcaaccgttttatgtagtgatgttttagtatttagcatttgtgttctggtagtcaattgatttttgagaaagcgatgtagatagggtgcttaaccattcagaatcagaccatatttctaaattacaacctttggttcctgcaatggttgcacctgaatgcttaaacgtacacattgcaactttgcaagaaaagtgaaaaggggatattaaacacagcttgtattttgatttagaccagctctgtctgttgcttacatagattgttacctgtaggtaaagaatatagtaatggatgaggcagaaaattgtgcagctagtttttgtgtaatacttattttgcacatttttctacttctgggtgtaagtgttattataacatctacaattttgcatgcattttcaagaacttgttgttttacctgtgctgtttgtctcatctttgatagtgttttccattgattcatataactttcacatgttcaggttcttgttggaactggatccagaactataaaaat

SEQ ID NO: 85744 - DNA, 840 bp, Citrus clementina
  Intron number 1 from transcript clementine0.9_011273m (loc us clementine0.9_011273m.g) derived from phytozome v7.0 (c hr-ID scaffold_4; pos 4606420 to 4607259 reverse strand)
gtcctttgttttcttggtagtgggaatttccgggtacgttcctttttttttttttgtggcacttaactttcttgtttggttcttgagaaaattcgtggaaggtcagagaatgtgcttaaaggtgctttcgaaaagaaacactgtttgaaaaattttactttttatttatttttgtacgttctttctgttgccacaaacggagctttaaattgataatttcttttttttttttctcttttataaataatatgattttttaagctgatctcattatatttgaatcaatttagtgcttgctctggttgttcttgaagttaaaaaataatggtaaaatataaaacttagcttctttatttgttcatatattgttaaaataagcaaattttgattttgtgatcgtttatttttgtcattcttgatcttgttgcattgtcttgcatggacgagatatgttgataaaacatcgaatttaagtgttttgcttggaagtcataataattaccgccgtagtgagtttgattatttgatgattttagtttacgtgataattcttttttctggtaaatttaaagcggccaatttcaaatctactattggcttgtattgcagatctttgaattcagtttattgaacttaggagttttttgtttttatatggccaatttaacaatatatgtactcagttcttttcaaagaatcaatttgcttaatacacccaattcttttctcatcagggcaacttaaattgcagttgaggccgttttggtcttctgagtaagtgaaaattttgttatatttcatgcaggtatctatctttgagttggacggtaatacacaatt

SEQ ID NO: 85745 - DNA, 939 bp, Citrus clementina
  Intron number 3 from transcript clementine0.9_034597m (loc us clementine0.9_034597m.g) derived from phytozome v7.0 (c hr-ID scaffold_7; pos 2345375 to 2346313 reverse strand)
ttagtcaagctcttgaaggcataacactctctgtaagttttatttttatttttttcttttttggctccaaaatactatggatattaccagcttgagttgtttatagctatagcctgttgcacaggttagttggcgctagctatagttgaaaaagctgaagaaactcactagtgctactgtctttagctttctttaatatcaagggcattgatattataattttcttgttttttcatttattaagtgttgagtgatcaatgaaagagtggaataagtaagcaattgtggtttcttgtcatttgataggagggtttgttgtgatatactatttgttcttgaatgaaaccatgagccactgcttgagctatataactcttgtgagacacaatgtgcttgactaacatcttgtgcactgtatctgcatgatgacagaagttgattctgctttgatttctttcccatgttgtgacgttttgcattttaaatgtaaagaaacgtgttgcggtatttcatggtggatttaactttccatttcattgcatctttctcatcattttttcactgcgtatttcttgattttgcctctaattgtcatatgtagaatgtttaatcatgtatcactaatgatttcctgtttataactggttgttcttaatctgaaatctgaatatatcctgctgtgtcagtgtaatgtgtaattagtgatttcagtagaactaaggggctttgatgtgttatgactgcttgatcattaacttgaaaagaagccttttctaacttttcctccaaagtgaccttagcattgtgataataagcctagtttacctctgatattagtgtcataattattaagcacttaactgagctttgtatttgctgatccattgagtttaaccgcaggttaactcttttgtatgattcagattcttgaagcaccag

SEQ ID NO: 85746 - DNA, 644 bp, Citrus clementina
  Intron number 3 from transcript clementine0.9_018689m (loc us clementine0.9_018689m.g) derived from phytozome v7.0 (c hr-ID scaffold_7; pos 6393784 to 6394427 reverse strand)
agggagtgtaaaaggtttgctgtttctattatatgttctcacatttgcttacatgtcaaccgtgactgttttctttatcctactgtccgcctcttttagctgctggactaatgtaacttaaaagaggaaaaagatatgagtatacaatgttgcctcagtaaacactttggtgtgcacaaatacattatgaattttgctcccgctcccaaaagtcattatctaggcgcattagatggatcttgggttctagaaactcaactgctgatcaaggaagatatgttggctagtgcatttgagattcagccttttggaaaaaaaaaaaaatagaaattttcttcagatttactgatttagttcaatcactatatagtcttgattcaaaatttagagtttatgtagtcttgattgaaattttagtatttcaccaagaaaaggtggatctttgcagagttaaagagtagaagtttgatgctgtgtcttgcaataatcacttgtggactaattgttacctgcctgaaaggaaataatagaaaattgaaataaagtaacatgagttttcttattgaaatttatcattttcttgcatttgtgggatttgtctgctatacttatgtaaagttaaatgtttcagattaattaaagag

SEQ ID NO: 85747 - DNA, 532 bp, Citrus clementina
  Intron number 2 from transcript clementine0.9_018689m (loc us clementine0.9_018689m.g) derived from phytozome v7.0 (c hr-ID scaffold_7; pos 6394505 to 6395036 reverse strand)
cacggcgaaattcgcgataattttcgagctctctcgtatgtgtttttttttttaatcatttctcatttttttcccctttctcggtttccctttttttttcacctgtattgagcaatcatgggtttaaattagttaacaaaggacattgaattgaataattagggtttacagacaccattagcttttggctttcaattgcaaattaagtgcatttaattgatgtgagttatggccatcttctgttctgaatcaaaagaaaaaaaaaaaagtgtttttccctgaaaatgagctagattacaaacattactggcaatctgtgattataatattggtgagacgtatcaagcaagaagcaaagttaagcttagagagtttcattattataattagattttgggtattcttcaagttgagagatctaaagatagctctcaatatgtaaattccgtttctgcaattgctattttggttcattaataaaatgtatattagtattatggtttccatttgtttgtatctctctgtatcagaa

SEQ ID NO: 85748 - DNA, 476 bp, Citrus clementina; identical to SEQ ID NO: 82004
  Intron number 3 from transcript clementine0.9_029876m (loc us clementine0.9_029876m.g) derived from phytozome v7.0 (c hr-ID scaffold_3; pos 3878636 to 3879111 reverse strand)

SEQ ID NO: 85749 - DNA, 768 bp, Citrus clementina
  Intron number 1 from transcript clementine0.9_004487m (loc us clementine0.9_004487m.g) derived from phytozome v7.0 (c hr-ID scaffold_2; pos 4683133 to 4683900 reverse strand)
agcttcagcttcatgtaagttgattttttttttcattttctttgataatatttgcatatgggttgcatgcacctttctaatagaaccatggacaccatcagtaaaacgttgttttgattagtccttctagtctcaatcgttatatgattatgtatagaaatgatcccgtgggcaacgttgctcggcttattcgcttaaaaaggttaatgtttgttatgaagctctctatttatttatttgtgttttatgagcttatagaaagcttaatacatgctatggagttctttgataattgatagtttgagagctctgtaattgtttgtgctctgagatttggattttgatgggtgttatatgttcaggagagtggtgtaattttcgagaggtttggtggaagagtgttagataatgaactttcaaacgataattgtttatatgctgcaaaagctgagtcaggcgagaacagaatcttataagatttttttttttttgggtaaattaacatgtctaaattaagagaaacagttttccatggtagttattattcttttgctttggtgctatttctggaaaggtagtaattacatggtttatttctaaggataaatgttccatatttttagtttttagcatgaaatatttgtgcctttgtatagtttagtcatgaggacaaccattttcttaggctgttattattcatgcttagtttttgttttccttttgtcacaaaatgttaacatttgttatgttcagatttcaggggattaa

SEQ ID NO: 85750 - DNA, 695 bp, Citrus clementina; identical to SEQ ID NO: 79986
  Intron number 2 from transcript clementine0.9_008989m (loc us clementine0.9_007684m.g) derived from phytozome v7.0 (c hr-ID scaffold_4; pos 5944748 to 5945442 reverse strand)

SEQ ID NO: 85751 - DNA, 706 bp, Citrus clementina
  Intron number 1 from transcript clementine0.9_007418m (loc us clementine0.9_007418m.g) derived from phytozome v7.0 (c hr-ID scaffold_4; pos 5459878 to 5460583)
attgtttgggaggtaagcttcattttctatctctaattaattattttgttcattttcaatgctggtagttttctgttaccaagtaatttgaaagtgatgcttattatttggtaggtttatggtttggtttgatgctattgggaataaaacaaacataggggtagaggccactcggtttcttattttacttgccagtaaatccaaaataaataaataaataaatttctacattgaacctgtacctatagttaactaggccttggaaggttttacagacatggtattattagttcaatagacattatgattggtatagcataaaatttaaaatcttgataatcccaccgggtggggtggtcgggaagcaaatttagagtgagtggtgtattactactacgcactttatcacaatttcagttcggagcacataaaagtttgatttaggcagcgtgattctagagtagcattgtcaggaatgaaggcatggaagagtatccatgtggacccaccctcccaactacagttatgtggttgcaaagacagcatgggttcaattttccttgcactgttactgtgcttctttagtgtgcaatcatgtcattatttctagaggcaaatatttgtctttgacaattttatttgattagttgattggaatgtttgtacaatagaatttcagttcaagtgatacggtattttgtgggat

SEQ ID NO: 85752 - DNA, 765 bp, Citrus clementina
  Intron number 1 from transcript clementine0.9_000450m (loc us clementine0.9_000450m.g) derived from phytozome v7.0 (c hr-ID scaffold_3; pos 5666605 to 5667369)
ccaaagtcaaaggattccccgcttggcctgccacggtatgcaacgcatcatatatctctttttgtttacatgattaatttcaacaaccaaaagattgttctttaagtgattgttagttcaagaatatgcatttagttagggttttcctggtttggtttgagcgtacggtctgggcttgctgggttgatctttattagggattttgttaattgggtgtgcttctcggtctgtattgaagtttaatttcttgcccattgttaattgattcttttcctaactgtaattggtatttgcatgttcttgtgataggacttatattttcagtggactgtttgatcgatataatttttatttgttgggtcagtttttgtggttatttttgagattatttgatgaatcagctttagaactcccaaaccctagtacctaaaaaaaaaaattacagagccatttgtttatatctcattaaaatgagggcttccagaggaatctatttattcttttttctggttaagtcgaaaattgagttaaattctatgggtattttatttttttctctctttatgctattgaaatgcttctggtacccaaaagaagtttattctttagcatgtagtactttcagttttacaaactgaagtcttgaagtcacaattttttacttttttcaaaaattgctttgatttttggttggttgaccattgccttttttttttttttttaatggcaggtaagtgagccggaaaagtggggctattcagcgga

SEQ ID NO: 85753 - DNA, 898 bp, Citrus clementina
  Intron number 1 from transcript clementine0.9_019509m (loc us clementine0.9_019509m.g) derived from phytozome v7.0 (c hr-ID scaffold_3; pos 8051063 to 8051960)
gaaactacatcacttacgccaccactcttcttcaggtactcctcttttctttttttctttttttttcccccttggttcaaatagctatagtctctattattgatgggtttttgataaaaatgttgtgaccattcgatatgagatgttttctaattgctgcagtttagtcattttactttgatggtctctgattgatttttgtaatggttcagtttctttggctgattggtgttttagatttttcttatcatttgctgacccattttgggtgttatataagtgtgttattttgaacggtttttgtggattgttgtgacaacactctgctgaagttaagatgctcctttttttttttttaaatgtattgaagggtttgtctaattctgcttcatttttggaatggatgtgtgatattgtacttgggaactggccttttaagtccgtcagtttgcggatgcatgtgaattgcttgccatttgtttaatatccttcactttgctgcctgcttccttcattgaacttttcctctgtattagtcgcttacacttgttgttgtgtgtcttcagcatcttaggtccttgctttgatatagtcattgctctgcctcagttttcctgttggtttagattcttttgctcaattcatactctggaacctaacacatcaggtggttttttgctttccaaaaaatcattttattagacctgctatatttgatcatgtctgtgctatatgacgaagattgagtgtcgatgcatgcccacagattagttttgtggcctgcattttttttttttctatgatgtgagattgtcattgatttcttctccttttaattagaaactgtcatcttttgcatagtgttaactactttttatgatatttaattaggagaagc

SEQ ID NO: 85754 - DNA, 606 bp, Citrus clementina
  Intron number 1 from transcript clementine0.9_005216m (loc us clementine0.9_005216m.g) derived from phytozome v7.0 (c hr-ID scaffold_2; pos 2496438 to 2497043 reverse strand)
acgtcgaaactgatccttctggtcgctacggacgtgtaagtttttcccttttttttcttcttatttgatggatgattttatttggaaaatttgcttttaaaaataattgtagcagagtcagatattattttacgatcatgttttggaaaacactttctttgtattattctctgcaacgttttgactcgtgcatgatgcagctgaaaagtttgattaaggaatcactttcaagtagaagaagattgaactgccatagtcctgtaaaatgagccctgtggaaattttgatattgctctacctttttcttttttgttctcggtcgattccccaggtcaactcttcgttgcaaattggaaaaaattaaatttattgactttgaattgctacaaatttttttcttttttcatgatttcatgtaggagatgtttattttaattagattattttcttggcacttggctggggcaacacttttgcaatctaattaactccgtccctccctaagactgaagaggcacttttttaattttcttcatgttgctaatcaattttttattcgatgattattttgtatgacagttcagagaaattctaggcaaaggagct

SEQ ID NO: 85755 - DNA, 884 bp, Citrus clementina
  Intron number 1 from transcript clementine0.9_009171m (loc us clementine0.9_009181m.g) derived from phytozome v7.0 (c hr-ID scaffold_3; pos 2466982 to 2467865 reverse strand)
ttttttttcccccttccctcaactcttgttcggttcgttctcttgctctcgttcaattttcttattgtgtttgatgcatgtatcatcatctggtggttggtttttacgctggcttgttgtggtcgcggtagctttatttatttaattatttttggttaactgaattagttattgagtcagatactgtgggtgtgattgctataagattttctaaattacaaaaattaaattggacagattttacataatacgcttgctatcttcggaaaagaattttattgttagttgcaaggcctctgtacttgattcctgtggtttggatttggatgtttggaatgatgatattatgatgatattggttgtgctttgctgctactgtgatgaaattagatcctgaattatctgtgttatgcctgttttggtcatttcttctggggaggtggtgttctgtttcttcaggggtgaaacagagggctgcttggtgtttggttatgataaatgatttgatttaacatatatcataagcctccaaaatacatttgcattactgacgatttttatttgggcttggcaacaacataagttcctcaaagaatttgatggtattttcaacgcaaaagtcttcgttttgggatttcgggatgaatattttgttttaattgctttgctttgctcttgattttcttttgttgctgtggggaagcagtgttgtggtagtgtgaaattatcactgtcttgtgtaacccataatatctattttagcttacgttttagtttggtcgtgttttattgactagaaggagaagcttaacagtttgtgcttcttaattgggatgaatatcttgaggtcatctaaagagtaagaaatgcttcttgacagataa

SEQ ID NO: 85756 - DNA, 987 bp, Citrus clementina
  Intron number 1 from transcript clementine0.9_011502m (loc us clementine0.9_011502m.g) derived from phytozome v7.0 (c hr-ID scaffold_3; pos 7422231 to 7423217 reverse strand)
gccgtcctgtgagtctccctaccatgtctttcgaaattaattatctttttggcttatttaatttgattttttcatgttattttttgaaagccttattctttacttgtcaattgatggtgggatgtcctaggttcttacttcttattgagtttcactatttgattaatcaacggttgatttttactggtggtgggtgattagggtttgcttctgtctcttcaaaatttgtttttgagtttcttttttattggtagtaaaattttaattttggtgacttgccagtgtttagcatgcttaattggtggtcatagtgaggttcttgacttatatgattaacaaatttattttgttgtatttagtatgattttttttttggggggttatgtctgtgtgaattttttactttcataattatggcattgctccgtttgtttcatatttttctttacatgtacttgctctgttttgtttttgaatacttctgcccaaattggtaaatttgttggtttactacttgtcatcttgaaaaataagttttggtgttaaactgtctaataagataatatctgaaatggtcactgttgtaccctcctcctacttttgggttggatttcctaacatttggtatgggtaaaaccattaaggccaacatatcattgcttgagtgcaagttatttgctatcctgattggcctagatattatgattttttttttctattggacaaaatagaaagctgttcataatctggttggttgtttctttatattatttgtttttcctcatttatacgtagttcttcatacagaacaagttgaacaagttgactaatatagtagacctactgttcacgttcatacgcacatgtaaatatatgtagacatgttcatacacacgtaaaaatatgtagacatgtgtatgtttttcagctttaatttactttggctacataggtggaggcaaagagggctctgtcaagagaagaaca

SEQ ID NO: 85757 - DNA, 944 bp, Citrus clementina
  Intron number 6 from transcript clementine0.9_022410m (loc us clementine0.9_020589m.g) derived from phytozome v7.0 (c hr-ID scaffold_3; pos 726205 to 727148 reverse strand)
tgtacgtcatctagaaaacttctgattttatcgggggaaattattagtcacccaccttaaatttaccttattatcaaatatactagaaaagtttgaatttgttcaattttctatcctaaatttgtaatttgtatcaaccatccaccaaaaaacaaaattacggttacaaaataacaattgctttaatttgtgttgacttttgttttgtaattctttaggggtaattatgtctttttggcagatggttgatacaaattgcaaacttcgggtggaaaattgaacaaattcaaacttttgtagtattttttataactttaaaaacttaaggtggataactgataattttaagattatcttttgatcattaaaactaactttagtactgtaacctttttctttgtgtttgatatgcacatgcctgctgatgaaatatttatacaacctacattaatacctgaaagtttcatttgatgataatgtctgaaacatttgtgagatgaaaagtttgccatcaagacaatcgttatgttggttgattttttttctatgcaggaagtcccttcatttatttattatttcttcattttcttatataaaaaaaaatatttgacagaaaagagtggtccttttttttgggggggggatgaaagaaagaaattgtactctgttgcatctgcagatttgactttctaacttaggttaagatcttattctgtggcagaccattaacaaatctgtagctcatattcaaggatgattggatgtttaagcaggagtttaatctgacgagttttgttgaatctgccaataattttgtacgtcatgataattgtatacttaactatgaagtatgattttcaatggtgataatacctcaattgtaatttgtttaactgccaaacacctaaaaccgaaaattaatataggttgtcatttgcaggctg

SEQ ID NO: 85758 - DNA, 731 bp, Citrus clementina
  Intron number 1 from transcript clementine0.9_022879m (loc us clementine0.9_022879m.g) derived from phytozome v7.0 (c hr-ID scaffold_3; pos 4757362 to 4758092 reverse strand)
gcccattgattctggtagcgatctcgaagaagacggtcagttttcccctctctctcaaatgaaatttcaatcttagatttaattacctttattctgtctgcggttgtaatcaattaaacctttgtgttgctgttgagttattgtgtttttacaccaataaatgtttaattccctagttattgaaaatcttgcatatccttctctgttagctgctcaaatgactcaagattgctcgtcttagtgtttggtattaggtgttcactattttgatatgatgatgaattaatttcttttttaaattttacaagtttagtttaattggaaatgcaacgttgttgctggtatgtttgacttgtttgcttgcttgataaatatgatcgtaatttacttgatatttgctaagtcctaattaaatggcattctaagatttgtagcaattccaactgggtattttagaagatgctgagcgcaccagttgttctggtcagttattgaagctgtgtttttggtctatggtaaatcaagtttggttgcttatgcaaatatgtcaaagtgaatatatttattgccttgtttttgtcagcatgagattgagttcttctgttcagttattgagtttctgccggcattgtaaattattggaaccttcttatcattcagagttatatgaaattggacttccaaggttcttctgtgcccgacttcaatgctgtttcttttgttaaaaatag

SEQ ID NO: 85759 - DNA, 761 bp, Citrus clementina
  Intron number 1 from transcript clementine0.9_021744m (loc us clementine0.9_021744m.g) derived from phytozome v7.0 (c hr-ID scaffold_24; pos 3345188 to 3345948 reverse strand)
gcgagcttatcaatgtgagtcttcaataactttctccctttcttttagattttttctctttcattttttctgggttgattgaattatctttgattattttgtccgcacgttttaaaatgggaatttgaagctagaccgccccttctaataactaataatttaagactgtattgtagctagacaatatagtcccaggatgagcattttaaaacatgccaatgtgacataaaatattcaaatgataatattagtgcggagtggctttctttttttgcatttgtgggtgacatattgcattagatttcagaatttggatagttattgatgaaaatactttcactatgaccagttacaaaagaaatatgttgaaaatttggtttttgatattaacaactagaactttaaaagccttttttctgcaatcagctgctgaacatatatatgcacgaacaagttttggaacttgcagtgcaatttgatttctatcccaattcatagtgagcacattcttctgccaattgtcccaaacttttaaaaaatgtttgatagtcattgggaatgccagtgagataaataggtttcttgtgaatattcttttgatagaatttttagcacatcatgaatcatgagtaatacagaatgatctttgaaaccaagtgataaaaactatgagaatacctgttaccgaatattccacaaattttactgatttgtgttcttctttttgcaaatataggttcactacactgcaagatttgctg

SEQ ID NO: 85760 - DNA, 1033 bp, Citrus clementina
  Intron number 1 from transcript clementine0.9_014326m (loc us clementine0.9_014326m.g) derived from phytozome v7.0 (c hr-ID scaffold_14; pos 228171 to 229203 reverse strand)
cagtctttttagttctcctctctttgcaagtaagtaaaatcttagttcatcacatcatctcatagtttgttttcatagttttctttctccaaattgccctcgcattttcctctcaatctcaatttctggtttttttgtttgttgtagagtcgattttctttacctcggtttgtaaattttatcggatgtaatgcataatcatgggtgacccaattaaggtccaggaggggcttcagccccttttgggccattaattttgcttttaaatctaccccacacctcttccaaaagaattaaataaaaaaatttggacacatattttatgtaacaaaagacttatagttcaatgataagagtgctatttgatggttttaaagtcctggtttaaatcccaatagtcacattattttgtttctttttataaatagttttttgaaaattacttagaaaaatgatactttcatgcatttaaaataaaaagtttattactattattatttaaaatttaaaagaaaataatgaaatttgagtttatgagatttgaaatgtattcgtgtgaacattaaaaaaaaccccaaattaaataaaatgttttgaactaatccccctaatttaagtatctgggtccgccactatgcataattgatcgtcgtcatttttttttcaataatttcgtgaaacaagcataattaaattaaattatacatcagcataattaattaattaattaactgatgctctttagattctgtgcttgattatatagcaattcatcatattttattatgattataaatttaactatatggtcggggtctgaatgatttttatttttaatatttttttatgaatttattcatgttcggttggataatatttaaagtaataacaaatataagttttaatggagtgaaattgtatgggtatggtaactaaattttctttcttattgtttaatgataaaaattgaattcaatgtgaaaatggtttgatattgtaaatgcattgcaggtaaattgaattttttttaagg

SEQ ID NO: 85761 - DNA, 729 bp, Citrus clementina
  Intron number 2 from transcript clementine0.9_026350m (loc us clementine0.9_026066m.g) derived from phytozome v7.0 (c hr-ID scaffold_3; pos 4660854 to 4661582)
aggtactcgactccattttcgcgtttctattttcttgtcggttattttgttccttttataatttaacaagttagggtttgttatgtgtgctgcttgttcgccagtgtttttgacttctaatccttgactctttgaatttcttttagtctatctttgcgaggaaagttttttgaatgtatggttattgaataactggggtatttatacgtgtggattgactcgtttttggttcaaattatgctcatgttggggattttacaaaatctgttcattagtctatttgtgggaatcaggggacaaagtaacagttggttctatcagaaattgaagtttgtgtgcgtgcgtgtgtgtgtgtgtgtgtgtgtattagagttggagctttggaatttcagttaagtagaaaaggagctcaaatctttaatatatctcaagacatgataataggtttctaattctttaactgatttacctttgcatgagcactcaatatattcctttttgttagaattttttgtttgacagcagaagtacatcttgcatgcagcactgctatgccctcactgtcctgtccctcatttttttttttggttttgtcctcttagatagtttagtgtatttgtatgcttcactgatttaattgctttgtcggcttgttttgcatcattgtatattgacaatgtgccaactaacattatttctcttcctttttgattcttttgcagtagagca

SEQ ID NO: 85762 - DNA, 620 bp, Citrus clementina; identical to SEQ ID NO: 79120
  Intron number 2 from transcript clementine0.9_012292m (loc us clementine0.9_012292m.g) derived from phytozome v7.0 (c hr-ID scaffold_85; pos 351995 to 352614 reverse strand)

SEQ ID NO: 85763 - DNA, 974 bp, Citrus clementina
  Intron number 2 from transcript clementine0.9_025274m (loc us clementine0.9_023728m.g) derived from phytozome v7.0 (c hr-ID scaffold_3; pos 5680389 to 5681362)
ctagatacaaggctgaatatccaatctttcaaaaggtacactatctggttttttgcctcctgtggctctcaatcttgtcttgtttccaaaataaacatttttcttttgaaggtccttgatatagttatagaattatttgatgactaatcattaaattctttattgggatttgattcttttttttttttttttccctttcccttctgaggatgttctgtttttgttaatgacttgcaaactgtttttttttcttgttctgaagtctgttatttgagtatgtgctaaatgtgttggtaaaacattgttgtttctggtgagcaatgattcactaaaagcccaatgatcaaaccttactctgaagtggggactagaaaaagtctctttgcctttaaagcatatcaaaattttatttgatggaagaacaagtagttggttcataatgaaatccattcaacttttgcatcagagaagaggttctaattatgccaaatcacgagagttacagtagtcatgagttttcaccttgaaacttttggtatgtctactgtcgaaaatgtattatgattttagttgatttcatcttttgttagttacaagttcagcagttagtatttccttctacattgttgacaactaattttctacttcagatctagaaaattgaattctcttattcattctttctggctgatgttggcctttagtgaggaaaaagctcaatcattgttttttcaagaaagtctactgtttttgccatatctcttattaggttaaagtatttccagatatgtaaaaggcttttcacttcaccgtatgttattatataaaactttagctagtttgtacaccgatagctgtattttctgcacttactcttcaagtctgtttagtgctctattctttgtcagaaagtacctctgttttctggtaattgatataatatgttcatttccataatgtttaggtacgcgtca

SEQ ID NO: 85764 - DNA, 688 bp, Citrus clementina
  Intron number 3 from transcript clementine0.9_017570m (loc us clementine0.9_017570m.g) derived from phytozome v7.0 (c hr-ID scaffold_2; pos 3895581 to 3896268)
caccaagtttttcaggttcagatcttcacccatctaataagtactgtggattggatactacctatatattggtttttacaatttattagtaataaatttacaagataaaaatttttccaagtgcactaatgaaattatttagcttttatacaggtttatagaagtgagaaccaagtacagaaagataatgagtataactactgatgctaaggcactctatatacgttgatctaatttatacaatgatctgtaccctgtttcctcgactaagatattcgttaatcttaatcatccagcttgtagtatatgatcactgctattgagacaaatactttgttcttaagtatacagacaaggtaatctgtcgaaacataacaggagtaaggtatgtgagaattctgtcgtctcagctgaggaaagaggatatttcagctcgctataagttgcagtactgttggaaaatggcggcatgtttaagctttttagaaccatatatatttttttccctctttgataagtggtcctctgggtatttaaattgtatttgggtttagggttcctgatgtatgtagtttgcgcctatgggtactgatagttagtttggtggtcattcagcatttattcgtctgatttttgtttttctttggatgcagcactgccggctgtccatttggtgagagctgccatt

SEQ ID NO: 85765 - DNA, 559 bp, Citrus clementina
  Intron number 1 from transcript clementine0.9_023052m (loc us clementine0.9_023052m.g) derived from phytozome v7.0 (c hr-ID scaffold_31; pos 999286 to 999844)
gcaaccactgtctttaacctcaaaaagctctacatgtaatctctctctctctctctctctctcactgaattttcagcttttttgagttgtaataatatttttatattcatttcattctcacttctcttgtctgagtctcaacttcatgactactaatggttatttgctgataccaatggctaaattttcatataatccttcactttttgtcactcgtagctagtttcctaacaaacgtatctgagttttcttttcctttttgttgcccatgtctcatatataattgactacgcttcagttgcttatgcaaatttctttttggagaaatgtcctcatcaagaaagtggttgttgtatgtatgtataggagtaattctttgattgctttaacgttagatttcagtctgcaactagaattgtgacaaaattaggcacatcttttataattgcaatttccgttcagttgtgatattgttttgaggctttgactgaacaattatatttgcttttctgaaataatggcagataagttgaggtcgttcggatttcgtgtgaattgc

SEQ ID NO: 85766 - DNA, 800 bp, Citrus clementina
  Intron number 1 from transcript clementine0.9_010634m (loc us clementine0.9_010641m.g) derived from phytozome v7.0 (c hr-ID scaffold_4; pos 1445482 to 1446281 reverse strand)
ttcactcaggtcttagctctcttcattctttgaaggtatgcacattttgaagttcatagtgcttcttttcctgtttgtctttttttctctatatgaaacttaaatttgaccttttttaatgttactgaaatttgtttatctgcgctttttatttgtacttttgtctaagaattggtatgttttaactcagtggctattatttcaatttgtcatatttgaagaattagctagaattgattgtgcatgttatgattaaattgagatgttgtggcttttaattcggagctgctgtggaatggaatcaatagtagtcatgtgcaagttgttaatttgttatgcctttaaaattaagctaaagcatgacagtttcaaactggtccttagtctcagtgagattgatgtctgattctgaaattcgtcgataaagtattcaaattttgctggatagtttagttccatttggccttgcctagtttctaatcaattggagagatgatccattcacattgcaaaagaaactttcatgtgggttgccttgtgttgtagaataagaggtaatgggttcccttgtgttgtggaataagagataaggttattgagctagcatgtcatctgttgtatcataggccaactttattctgtggccctataaaacctgacattaatgctgctacaaattttgataactatcaatttttgatggtttactgaataattgtaacctcatgaagtttctgtaaagtttctgagttaatatttctgcagcttagtagcggaaaatataaacttcaattaaagtc

SEQ ID NO: 85767 - DNA, 885 bp, Citrus clementina
  Intron number 1 from transcript clementine0.9_003713m (loc us clementine0.9_003725m.g) derived from phytozome v7.0 (c hr-ID scaffold_2; pos 9355775 to 9356659 reverse strand)
gtaagcagtttgctgctgaagagatttcggctcaggtataagggtgttatgaagtttttgtgtaatgggtttgttgaaagtttcgattttatttatttatttatttatttttgcgttgtttggcttatgatggaatgatgaatttgtgtcatgttgctgacatgtggctattcaccacatagccatgcgtttaaaattaagcagaagtgaaacagtaactgacatactaaaatttactggtatcctattgttatgggtgtagacctgtagttgaagttggaatttgggctcatgatggtatttttgttttacattgggataatgtgatgtggattttggatatgagaatgtttgaattgaattttttttttccagggtgggttggagctttttagtttctagaatgtaataggaaaagaaagaaagagttgatagttgcataggagttaatttttcttttggggatgaattagggtttttgggtgggattgatgagctcttttttttttttttcaaattttttgtttgttctcatatttatttctgtgacagcattttcttccgcaaggaaaattgttataatgcatgtaaacccacttgtgcataatcttatagtacttgctatgttgttattctgcaatgtgcaagatgcacttacctgcaacctgcgaggaacttcttaaggctcaaagaaacaaatatagttattctttattattatttttttgaattacattgaagtagttcattctaattggtcaacttgaaattgcaccgtgcatttgtcttccttttaggtgtattaactcattttacatatgtagagtacttgctgatggttaatttattctgtttttctatatcaggtcttgagaaagcttgtgg

SEQ ID NO: 85768 - DNA, 757 bp, Citrus clementina
  Intron number 2 from transcript clementine0.9_016802m (loc us clementine0.9_016220m.g) derived from phytozome v7.0 (c hr-ID scaffold_3; pos 5256566 to 5257322)
tgttgcagttgccactgctgtcactcatcctctaggttcttctaaacttaagtttttaaattttcataaaatttaagttttacctttgctattttaattggcaagaagttctggacgtgtttgttactacggttcgaatggtagaggagttgctacataccaggtgtattttgtcagaaaatgtgaacccaaagaaaggattttggtttaatagtgaccaacgtcggagtagaatattatcacttacattggaattcatgcactgctatgggatgtaaacccattgctaagtactagtagctttgttgtgaggcttttgtaagcaaaaagagtaggaaatgtagatggcagtttcattagatccaatttggctatgctttcaggggctgaggacatgtaattctacaggagtataggtgtctgaagcaaagtcaatctcgctttctgagcgtcagccagacaagagtatttgggacttgggaaagaatttaggtttccattcctgcaagctgcaactagttaattacttaatgaacttttgtgcataagaaaggaagtaaatagatggttcaccatcagattttttatcaagtgcttattgattaaacatctagttaattgttcttcagagtttgagtgcttgtcatatagaaccctttatttttatttatttatttgtttgataaggcttgttatatagaacttaaaaaagaactggagacttttgatatttaattaatctcagctcggaatgcag

SEQ ID NO: 85769 - DNA, 768 bp, Citrus clementina
  Intron number 2 from transcript clementine0.9_017324m (loc us clementine0.9_017324m.g) derived from phytozome v7.0 (c hr-ID scaffold_3; pos 7360032 to 7360799)
agtcctgtggaggtgagcattgagaatatcaaaatattctttctttcttttgtttaaaaggtttacgttagtagagtcaagttgatttatagtctcctataatttctactacgatgtgaaattaggtggtaaataaaagaatttaaaaaaataataataatttgtaaaccaattactcctataacagtaatgttctttatttccatatcatcataaatggtcttttactaatagacgaattaggcaattgtctgggaccctaatttttaaaacggttccactatttgggacatttagttgatgtgtatcctaatgaataagcattcttttaagatttcacatattctaattaagttacatatataaaaagcttaattataggtatcttatctccccattattattacccattcttaattatctaaaaattaagatttattttttaataaaaattttacatttgatattcttcaccttaaaaataagatctataaaaattccttatttgataatctttacatacggtagaattaatggctttatttatagaaactattgttctattatttattttaaattattgtcgttattattctttacaaatttagtttttttttttttttcatattgacattggcttgtataacaaaaataaatgtaagaacacctaaaaaaaaaaaaagaaatggcttaatgccccaatccaataaagatgcccagctaattaatggcatgaaaatacattatcaggactcgactttggcctcg

SEQ ID NO: 85770 - DNA, 703 bp, Citrus clementina
  Intron number 1 from transcript clementine0.9_017410m (loc us clementine0.9_017410m.g) derived from phytozome v7.0 (c hr-ID scaffold_4; pos 1339211 to 1339913 reverse strand)
aggtaccctttttctttcttctttctttcttttcttttctttttccaaattttttaattcttgttttcagtttcttggtgagttttgcttcttctgttgttgctaatttcatcattttctgtttgcagtttttgttgtaaattggttaattagatgcttgatttttctttctttctttctttctttctttttggtttgggggtatctgttattttgtttgattatgcgtttctcattttaatttctaaagtctctttgtctttgcacattttggaatcattttatttgtcaattttatttttcactgggaatactaataatttagacccaaattgtgataggtgatcggttaattatatgctgccggcaacatgacgttttccagatttttttttttttcttctatattacaagttttcgactcctatgacttgaacccaccgaaaaagaacagtcaaaagtttgatatagcagtctagttgaaacttgaaggactaatggcttagaaatattacccctcctttttttttttggtctgaatttattggattcattttgtggtcaataattcaatataacatgtatattggtatcttaataattcacacgcacctcttgattgtttttgttatgtttaatcatttcctcaatgagcatacggtgggattactcagcattttttctttcctgatattttgcagtt

SEQ ID NO: 85771 - DNA, 424 bp, Citrus clementina
  Intron number 1 from transcript clementine0.9_003058m (loc us clementine0.9_003056m.g) derived from phytozome v7.0 (c hr-ID scaffold_3; pos 2991095 to 2991518)
gctttctcgaagggtactgtccacatatttctgttttatcttttacttatagctctctgtttggttgccgagaatatgtgctaaaatagcgaaatgatggaaatttaagtttcactattttacttctctataaataattttttttctttattaaaaaaaagaaataaaaaagtcaatatgagatttgaattaagtttcttggttcttgtcatagtagtatacttctcaggcaaccgcagagagagttaaaagttttatgctgttatttaagctaattatgttgatgtattattgggaggtgtattaactgttgtagagatacttgttaatgactgattgaagtttctgtctctctgtttgtttgtttttttttttttcgtatttcaaaggttttggcatctacgggttcgttttggtgaggatt

SEQ ID NO: 85772 - DNA, 724 bp, Citrus clementina
  Intron number 2 from transcript clementine0.9_011408m (loc us clementine0.9_011408m.g) derived from phytozome v7.0 (c hr-ID scaffold_2; pos 3043754 to 3044477 reverse strand)
gcaaggtatgctgaatggttaaattggaaattttgaacttcaaacagtgttagtgtatgtaattgcttcttgcatgtttgatttgaagaagtttttgttatagttttatcatatcagtgccaacgaaatttatgccatgggacttgggctacattacttttctctggtattactgttaatgatgcaatggaaattaaaactatgtaaattagctctctctgtgtcttgaaattcaattttagactgctttttatacataatttttggaatgagcttccgcatttctaattctacattcaaaaccacaattctatcagttcctaatatcacactatgcaccacgcttctgcatgacagcccttaaaaaaaaaaaataagtataccaaagaggtcttgcaccagtgactggcagatttcctaagggcctctctgttgaaattttaatctggaattgtatgctatttcagctgctagctctgtgtgtgtgtgtgtgtttttttttttttggagcctccattttttccttggtcttttctgttcctcctagttgtgattaataaacttgtcttagattccttcttttctttacctacaagatttggcatttgtttctcctccccgttcatcctttctagtggcattgttccttatgaaattattctgtgaggcttacctcggactctcttgatgataattatactgtggctgcaggggcctggtcctg

SEQ ID NO: 85773 - DNA, 462 bp, Citrus clementina; identical to SEQ ID NO: 81603
  Intron number 2 from transcript clementine0.9_015578m (loc us clementine0.9_015578m.g) derived from phytozome v7.0 (c hr-ID scaffold_4; pos 5794779 to 5795240 reverse strand)

SEQ ID NO: 85774 - DNA, 554 bp, Citrus clementina
  Intron number 1 from transcript clementine0.9_029629m (loc us clementine0.9_029629m.g) derived from phytozome v7.0 (c hr-ID scaffold_3; pos 5004974 to 5005527 reverse strand)
tgcggtttcgtctgtagttgctcttattggggttggtaagaaactttgtttaataagcatgtagttttgtgtaaagactagtaatattttggtgcctacttttgtagccaactaggataatgctttttcaaaatcaaaaatacttccagccgtactattgtaaccttaaaataataaaaattagttgaaaatgttaaatttgacttcaactcttctcacaatggtcaaaagtgtccaaacgaatatcctataagcagcagttactgcacttcagagacagtcatatgtgtgctgtctccatctgtcaacctatttgtcaacttagggtggtgttcttaatttctggttatacaagattgagcatgtccctaaaaacttggttatacaacattgagcatgtccctgaaaactacctctcccatggtttgtttatttattccttgttggttttccttaaactatttaatgctttgcaatcctgttaatacatactaactacatattgtcaacatgttttaggaggttctattcttggagttaagtttctagatcct

SEQ ID NO: 85775 - DNA, 894 bp, Citrus clementina
  Intron number 2 from transcript clementine0.9_017002m (loc us clementine0.9_017002m.g) derived from phytozome v7.0 (c hr-ID scaffold_10; pos 1599491 to 1600384)
ctttattcgtcagctacctagattccttaggcgaggcaagctgttaataacttttacaactccaacgttgtgatttataagttatgaatatcaattgacaaacatgcatttttatgttgcttctattaagtgagttcttattgtatgttctggcatgcatcatgtgctataaggaatatgaggacatgtgaaacatcccattgtgtttggcatggactcattgcaggaaccataattatttttctttgaaaattttgagttgtatatgtttctaataaacaatgagtaaattggcttggtgaaattctgagcacttcaacatagaagaacattgttcttttatacaagatgaaatagatatctttagtctttgaatgtgcatactattcttggggatcttaagacttcagtaactactaacaatggtctattggcccttctctttaactcctgattcgaggatgatattttccatgtttttaaccatttttaaacactgaacttggttagaaaatagatcagctaacaatgatatataatatgacagagtgctatttatacatatttacgactaaatatttttgctgcaatgactgcttatattttgtgtttcatttgaaagtgactggaaaatggaaactccctcaagattagtctatctcatggtatctctgagctaacttgtttcgatgatactgtacatacacactattgttttcggtgtattgagttctctttcctctggcattactgctaaatctaagtagttttattaaccccctaaataaggtcaaaacctttccaatttactatttcctttttgtgccattcacgatgaacatgattcttctgtttgcagatccagaagtttgccttgcgattttcaacgaatta

SEQ ID NO: 85776 - DNA, 753 bp, Citrus clementina
  Intron number 1 from transcript clementine0.9_005453m (loc us clementine0.9_005453m.g) derived from phytozome v7.0 (c hr-ID scaffold_4; pos 6142553 to 6143305)
caacctggaaaatatttttctgagcaagcagtgaagtatgaaaattttccctgcttatcatatttaaatattaaaaatgtgataattaacttctatgcttgtttcagtgcttcagtactatattgtctaattttattatatatttcctgttatcatctataattgtttcttttggactggtcgttatagggagtatcttcaattcacaagaaaacctatttgtgtcattctgttgatttaaaaaaaatcaaataaaatataaaaccaatttgcttttcaacctcaagatgaatgcttcaaagatgaggttagaaatctttagttctcagtaaaatgctgatttgatcttcaacataattagtagaagtctttcttggtagcgtgctctaatggatgccagtgtgcataacacagaggagaagtgattccaataggtgggtaaagttgagaccaaacatttggtttgtgattattagtaatctcctatgttctctgattaacctactgagatggtggttcaaattgacatatgatggaaagtggtggggcacaattgctgcacattgcttgattttggggggctttgaagctgttgtgtaggaaaattttgacaatagtgaagtgaatctaaattaggattgcgtatgacactcattcttgatcctgtatccattaaaacaaagcaatcgtgttgtcttttctagaaaataaattgtagcatagttattgatcaactttctctaaacaggttct

SEQ ID NO: 85777 - DNA, 581 bp, Citrus clementina
  Intron number 2 from transcript clementine0.9_015854m (loc us clementine0.9_015854m.g) derived from phytozome v7.0 (c hr-ID scaffold_2; pos 2991996 to 2992576 reverse strand)
catctctgagtcctgagggagttgatcttctgtcggtaagttttcttattgaatgcattaatgtgagattcccacaaaccgtactaataattattatgccttatcaattgcccaagttgggatctccttattgttttgtatccggactcaggatgcgtgtcaagcttgactcgtttaagtaaacgtgaaggctctagatttttgtgtttatggccctagataggaggcggattttattagtttattccctcgcaattatccatttaggatgacaggaatgaggcttcatgcgcttaggagtctaatcaactttataggctattgtttttattgtaatagtacaagaacgaggggattaattgctagaggtgacagctatggaagcttttttctcatttgattatggtactatgaagcattagatttcttctcttacttgaaaagtgagtcatgatctgtggaatactgtagatttaatgcagttaaaatatcatgttggcagtgctgtgattatttttatctacttcttttattgcttaaatttctggggttaatagtttttcatttcattattgtagtta

SEQ ID NO: 85778 - DNA, 322 bp, Citrus clementina
  Intron number 1 from transcript clementine0.9_008431m (loc us clementine0.9_005439m.g) derived from phytozome v7.0 (c hr-ID scaffold_7; pos 6208992 to 6209313 reverse strand)
gcctaatctgatccgtctcttttcagtggtatagtttttacttgggagtttagtgatggatgtttccataattgatactgaaattttgtgaattttttttttcagttgtgttgtctagttattttggatttttaagttagatgtttaagagtcacccgctggttattaatttattaagcttgattttactccaattaattttgtagcctatttaagaataactattattattcagatatttgtgcttttgtgcactttaaaacattcaaagcttgttttttagtagttttttcttctctgcagaggtggtggcagtccttga

SEQ ID NO: 85779 - DNA, 675 bp, Citrus clementina
  Intron number 1 from transcript clementine0.9_002197m (loc us clementine0.9_001929m.g) derived from phytozome v7.0 (c hr-ID scaffold_2; pos 5236475 to 5237149 reverse strand)
aagttacataatcatcatagtctcgtatcttcaaggtactcgcatccttcttatttactcttaatttgttttaaattctgcttgttctactgttttgactgagtaattttagcgcagctaggatttttgaaagtttgctgtagaattaattatttatcttctgtttttggtttgaatttttttctttctctaattcagccaattaacttgtttaattgacttattatgccatcatttagtttagcctttttgtttgcgaaccaaacggcggaactggtagatgatttcttgtcggttgatttttttctagtttctcgtcatcaagcaggagtcagctaaatgtagtctattaaattggatgttgttgtaaattatttggaattttatcaaattatgtttgacttttgagtactcaaatggaatcaagaaagctgatgtttaatatgatatctcgtgacataatgtagtatcatgctctatctcgtttagaaataaaaatgaactagcaaaacttaataaaggaattaaatgagaaaggtcatatagtaccagcttgaaagccccaggaaatagtcattccatgaataggatgctttgtttcaataatttgatgtatttaattctagtgtgttgataatgcttattttttatttatttttccaggtcatcaaatcc

SEQ ID NO: 85780 - DNA, 647 bp, Citrus clementina
  Intron number 2 from transcript clementine0.9_017320m (loc us clementine0.9_017320m.g) derived from phytozome v7.0 (c hr-ID scaffold_2; pos 1258424 to 1259070 reverse strand)
actggagttaaggaggaaaaggaaagctttataaggtacagtttgtaaaatcaattaaaggatatatctaactttttgcttttactaaaatattgaaatgtggtggaaaatttgaaattaaatgttgaattggattttaaaaggttgctgtttttcatgagggtattgtataaatctctgaggaaagtagatactcagggtatattttagactgttttgctcggagcttgttgaaggatttgaagttttcccccctgatgacattctttgcgactagaaatcttatgcaaactctctgaaaccacagattttgccgtgtgtatcatgatggcaatcacttggttgctagtggggagcagctttttagctggggttgtggcatgttctgggaatatgatgcttttacatttcctagttccaaaatttgttgttatcctgtttgtctatttcatgtttttttactgcaaacataaaataatgcagtgaacatttcagtaatactccttaaaaagttttcttgatgaagctgtcttctattttgaattgttaatggcttcttagaagcttgtggtgaaaaaacataaatgcatttgttctgtttgcttatgccagggagagaatccgaatatctgtaattggggatactt

SEQ ID NO: 85781 - DNA, 500 bp, Citrus clementina
  Intron number 2 from transcript clementine0.9_015347m (loc us clementine0.9_015347m.g) derived from phytozome v7.0 (c hr-ID scaffold_3; pos 36468 to 36967)
ccactgtttcccttttatcaaattgccttcaagaggtaagccaagctttttcgttttcgatcttttttctttgaattgtgcggaggacgaaaaagcttttatttaagaagactatgagggtaatgacttttgactttgcagctatcatattatcattattattggtttgtgttagaaatttataataattattgtcaatgtggatattttcctgagggtttgtatgtaagtgtttgtgtttctgctcaattttgagagaaaaactgaaatgaaaaaaaaaaatttcattagcagcaaatgtttacttataattgacagttattgctgtcattccaccagcaccttgatcccaaatgaaaactatttctgctgaacatgtttaaagtactttcaacacttgaacttgactcgtaattattgttcatggcattggcagttattatttactttataccttatctgcaggccaagaacgtcacttcaagaaacccaagagaatc

SEQ ID NO: 85782 - DNA, 896 bp, Citrus clementina
  Intron number 2 from transcript clementine0.9_000535m (loc us clementine0.9_000535m.g) derived from phytozome v7.0 (c hr-ID scaffold_2; pos 2976118 to 2977013)
gttctaattcgcctcattcacttcaacatgtatgtgcagcacaccattatcttcctttaacttgcctttagttttgccgctcttgagtatgttttcagaattgaatcatgaaattgggtcgtcatgttatagccttaaataatgtagtaggtatctgtgccaggcatcaatcaattttatgattatgtttctttgcttctcaattatgcactttgcattctattggtaaataacgtaaagagacctgacagtgtgctttattcaagttcctcaatcaatgctacctctggtttttaaatcatcaattttggtagtcttggaatcccttaatcatttatatatttaatttatccccttggcgagcagtctgcaacggagctgaaatttgagttctagaacagtagaagagatatgtatagttttctgttgttgtatatgatcaatccatacttggctcaagtgggcatgtgaagacatttatcatttttttgccaacttttatatgatcaatccatacttgctgtaattccatgatacatagcatgtgctttgttcctagatttgtttgaaaaaaggttgatctttctgctgcagttcttaggagcttttttttaaaaaataattcttatgggaaatctatcatgaagtgtttgttgatcattgtagtagttagattgacttgtttttttttttttgaaaaaagggaaaacttcttgtgatggtgttgtaacttcaattgcctattattactggcaattcccttggcgttggtaccttgttctcaacttatctttcccagaagtattggatacataaatctgctggcttccacaaatgtgatctgtattgtcttctctttcttagttgcttctgtttttgtaggcctgaaagtttca

SEQ ID NO: 85783 - DNA, 305 bp, Citrus clementina
  Intron number 1 from transcript clementine0.9_000056m (loc us clementine0.9_000056m.g) derived from phytozome v7.0 (c hr-ID scaffold_2; pos 4809994 to 4810298)
tcgttcacccccaactcgacgagtacgttgacgaggtacgctcttttcattaacctcgctgttactttataactcttctttatttaatttcgtatttattgcttttcatttttttttttaattttttctcgtgaagtttgttattatgaatctttgtggaaaagtgaagaacttgtatgttgattaatctcgtgtctgattacattgtgaatgaaaattattgatcgctttgctaatactttgatcttttattatgtttcttttgtttattaggtattgtttgcagagccaattgttataactgc

SEQ ID NO: 85784 - DNA, 800 bp, Citrus clementina
  Intron number 3 from transcript clementine0.9_008163m (loc us clementine0.9_008163m.g) derived from phytozome v7.0 (c hr-ID scaffold_3; pos 3350127 to 3350926)
ggagccctcaagggcaggtgaatttggttagtaatttaattaccttttaccttaatatacgttagattatcatttttaattgtttgaaatcctcaaactaaaattttgtttttatatggaattgggtaacgtgcctgactcaaattggcgtcaacttttgcaataacttacttgttcatctttgccatttaggattttcttgtagtgtattaggcaatccacctaacggtggcaagcgacgtatctaacatctgtcattcccagtaaatttaactacctcaatcagcttacataaagtttaggtttacagtagtagagggtgttcttgatataccattcactttcttccttgaaaaaaaaaaaaaaattatagtagagcgcgtgttttcttaaagggtattcaattatgttggcttttgtgcgccgactacgtgcacagccgaaaggttgttggtcccaaattattaaaggttgatcttcctcgatcctagaacaaatgccccatgaatccccagatcgaactatctatatataagaaaaagatcgtattatcctatgggtcctttttttttttttttagccattaatgtttttcaatgttcggacgattttgtcaggttgttaacccatagtagtttaatgttcatcaaggaatttgagtaaatttgatactaattacaacatcatagttagttttctaaattatagctagctctaaacgttttaactgtcatacattttaatatctcattaactgatgaactacggttgaaacttggaacagaaggctggtgctttca

SEQ ID NO: 85785 - DNA, 774 bp, Citrus clementina
  Intron number 1 from transcript clementine0.9_005771m (loc us clementine0.9_005776m.g) derived from phytozome v7.0 (c hr-ID scaffold_10; pos 4381348 to 4382121 reverse strand)
tgagcagaggtcgctgcgggaggatattgagatcggtgagaacatcttcagttctcagtcatttccatttatcgtaattttaattattagttttgttatttatcttcaccaatcaatattaaaacatttaattctcgcttaatgattagttggcgcacaattttcaatcaagaaaataaaatagaaattttaaaaattttaattattctatttaatgattttagtcactcttagaaatgattaatgaaaaaactgaattcagtttagcctagttgtactattaggcaccttttgatttggtaactatttttttttcttttatttaatttctcgtgcccttgttaactgatcaattttactttcgttttcgttttctttcgttttcccagttaccaaacgcatcattagtgtttgaggcctcaaactcttccttttgttttctttatggttaccttagtttctggagttgaactctagggcttgttgcagatctcaacgttattgtttcacatgatttttccttttatgctctgtttaattgtcagccaaaaactatccgaatgaaagtacttcataaaatttgggatcttggtgctggacaatgtggaattggcatcttatagttactggaaaattcaaaccatttattagtcatcaaatcggttttgaatttgaattttggaaatctttttgttgaattttgtgataatatataagttgcaattcatctgatttgcagtgcttctgggtagatagttgatcataagggttttc

SEQ ID NO: 85786 - DNA, 661 bp, Citrus clementina; identical to SEQ ID NO: 81045
  Intron number 1 from transcript clementine0.9_015788m (loc us clementine0.9_015774m.g) derived from phytozome v7.0 (c hr-ID scaffold_85; pos 95979 to 96639)

SEQ ID NO: 85787 - DNA, 576 bp, Citrus clementina; identical to SEQ ID NO: 83483
  Intron number 2 from transcript clementine0.9_015788m (loc us clementine0.9_015774m.g) derived from phytozome v7.0 (c hr-ID scaffold_85; pos 96867 to 97442)

SEQ ID NO: 85788 - DNA, 797 bp, Citrus clementina
  Intron number 1 from transcript clementine0.9_014541m (loc us clementine0.9_014541m.g) derived from phytozome v7.0 (c hr-ID scaffold_31; pos 1063467 to 1064263 reverse strand)
actgttttgttgatgtaagcaatctctgctctctcatttttcatattctttactttatcaagctctctgtccatgtacttactgatataacatagtttcaagtatgtcaatgaacagtatctttataattttttatggcattaaacaaaatatagagttttcataaagcctaaggaagagtttgaatatatcattttatgttcaacaacttccaaaaccatttatatatattttctcttttatctgtctgctactcattgcattcttcttctgaccgcatattcatgcacgtagagatcctcacccccaaccccaagctaaaagatctgattttttcgcttcagccgtacaacaaaactttcctctctaatttggatgtaccgaagaccatgtaattctttttttataaataaattttaatatggggttttcatgcactaaaaattttaatctagtaaagatttggtccaaaacaggaattaaaatccatctcatggcctcacccctgctgagtgcttttaatgatcatgggtccaatattaatggtgtatggttgaaaataaatcacacttgttttatattcttccagccgaaaatttaaatcaacaggaaatcctagtcataaaaacatatgtaataataagacaatttaaacaagaagagtttgcattatttatataatttttttgaattcctgtccataagataagaaggaatctatctacttgtaaaactaacaatacaatggactgttaacatagcaagttgttaattaatattattttttcaggggtgtg

SEQ ID NO: 85789 - DNA, 1062 bp, Citrus clementina
  Intron number 1 from transcript clementine0.9_023063m (loc us clementine0.9_023018m.g) derived from phytozome v7.0 (c hr-ID scaffold_2; pos 2661291 to 2662352)
agcagctaaaaatacctaaacaccaaactcaaaaggtagggaatcttttttcttttaatttttttttttgctgcttattatattttgggaaatcatcatttgtccagccaatgtttaatcacagttcaaaaatactttgctgttaaactaaaattttgttctataaacaatcaatttgttttaagaaaatatatagataactaaatttaacaaagaagaaaaggggaaagaataaaaaaggtagaaaatttgaaaaaaaaaaatctttggggggggggggggggtggaatttctttctcattttttctattttaccctgtgatgtcatcaaaactaacagccattaatgtcgaagtggaaaattgatacactttgcaaatattggggggactgctaataattttaaaaggatttgagtatattaaaacttgcattaaacaatgggggtggacaaatgataatttcctttatatttttcaatggaactgttagatctttagttataaggtttgaaatgaaaattgaggttaagcgggtggagtgtatctgtcaatcgaaatatataataaaaacaaggaaaattgaactttaacgggtggcatttcttgtgttactcttaggaaatgattttatctgcaagttgctaagttcagatggcctgtctggaaattttatgagtaaaaatggctggttttgtttgtttttggtgggggggggagagatcgcgactaccgttactaagtcttttactagaaacaaagctaagatatatatgaaagctaaaggaaaaattttggataaactagaagaatactttctttgttgctgatttggctgagatctatgatcctgatcattttttcatgctcatttgacgatacaacaagatttgaacttagtttaaaacagcttgtttttgtgtttaagtttctttgctctcagttgtttattgtttgtttgtgcattactgtaaacagtctatgggaaacttcactgatcattttatttcgccatttgttcattttagataaatatttccctatctgctaggaagaactccaa

SEQ ID NO: 85790 - DNA, 616 bp, Citrus clementina
  Intron number 4 from transcript clementine0.9_007607m (loc us clementine0.9_007607m.g) derived from phytozome v7.0 (c hr-ID scaffold_3; pos 5705131 to 5705746 reverse strand)
tcatttgttatcccatcgcgtatcctattggaaaggtaatctcataattgatggttgaattttgaattttcttttacagacttgtaacgccagatgacagacttgtataattattgcacttgggctcagatgtttattggtaatagcagcacaaatggtataagatttactttttttaaacaagtattataaggtacttgtgaagcctcatcagaagatgataacagaatgttattcaactcctattctggatggggacgcttttgagcttcgaacaatatgaattgttattgacgtatgccatgagttgccaaattgtgattttgttctatcttcgtacatataacactatgcataccattgcactgtgctccttgaccactttcttacgtctaatcaagttaagttattcaagctgcataattgttttttgctacatttcaagaggaggtgttaggtggtgctttatttgtttgggagattgctttgttgcataatttgcataatttgtcattttacttgacattgtaattgcaccattccatgtcccacaaaaaagaaataaggtgttgcttttattgagaatctttctgactcaaaagacatcagattcttg

SEQ ID NO: 85791 - DNA, 781 bp, Citrus clementina
  Intron number 1 from transcript clementine0.9_007539m (loc us clementine0.9_007539m.g) derived from phytozome v7.0 (c hr-ID scaffold_10; pos 2546314 to 2547094)
cagacacggtggctattttgtgggtaagcttctctctctctctcttctctttccgacactcacacaaaaagtaaacattcgtgaacttcaatttgttttggtatctatgatgactcagacaaatcttgtgcctactcatgttggtaaaacttttatggattaattttctataaaaccaacccagaaaacacagaaaaggcacaaaacttttacccatgtcaggctaggaaatcttgagttaattattttttatttttttaaaagaccttacactgtggcaaaaaatgacagcgtgtaaacaaaatatcttaaatctagaacaaaacgatcattttcagaatatccgaccgacttcaaatatgtttgcttctcagtgatgatttttaaaagttgatgtgtctctcatttatctttctaatacctttcatgtgtgcctaatttcctttcttttattttcttgtctgtttgcttcaaagattttgacactatcagtggcactgcttagccctatgcttggatacagatatcctagacgaattctctaatttcatcctacagattaaagacttcatactaaccctcctaaccctaaccctaatttgttgactaattagtcaatactctttggctgattggctcgctcgaaattaaaaaaagtttcagcaataatgcttcgtagttactaggttgaccaaaatatcttaatttgtgcgtctgcgtcaatattgtatcaatacttttatccaattattattttttttttccctcaatcatacaggag

SEQ ID NO: 85792 - DNA, 234 bp, Citrus clementina; identical to SEQ ID NO: 85642
  Intron number 2 from transcript clementine0.9_024178m (loc us clementine0.9_024178m.g) derived from phytozome v7.0 (c hr-ID scaffold_2; pos 185951 to 186184)

SEQ ID NO: 85793 - DNA, 500 bp, Citrus clementina
  Intron number 3 from transcript clementine0.9_031709m (loc us clementine0.9_031709m.g) derived from phytozome v7.0 (c hr-ID scaffold_3; pos 4951302 to 4951801)
gctaaataccgtcaaaagcaaaaagcttcggcagggtaatagcagttacttgagttaattgggtgatgtagtgggaagggcactttgcacactattgagaatgatgcagcttgttaggagaggataattgttagaatcatagaaactgtatgaatgattaatcatgctaaataaagattgtttgattggtgctatgtgtatttaccaattcatgactatattgttgatttaattgtactcttttcttcttcttttttaaaaaaaattttagaaattgcataagagtataaatttccctcagtagttatggggtataacagtaacagtagttgtagattcttaaattattgtcatttcatttatgtacatctccgaacacgtaatagttttatccaaattttgcatctcatgcatttactgcttgtgcttcacactttataatgcttgtatgtacttttttttttttccctcttgcaactgaatattcattcctttttcag

SEQ ID NO: 85794 - DNA, 958 bp, Citrus clementina
  Intron number 3 from transcript clementine0.9_017271m (loc us clementine0.9_017271m.g) derived from phytozome v7.0 (c hr-ID scaffold_3; pos 6761993 to 6762950 reverse strand)
aaaattgatcaaaaaccagaagtcactaaaggtaacacattgtccctctcgacctaattgatttcagttgctatcaatatttgtattagatagtcaagcttgaatgactaatacgatgttgtcattggccgtgctaacctcatgataggaattaatgataggttaacggtacacgtacaactcttaacatttacatatagctgctattgaagctccatctacgaaatggatgagattttattcttgatatacatgagttctgagaaataatgataacaatctctcctttctactttcagttcaggatgtttgaaattgttatctagattttctggagcttctgaagtcattttgtcattgttgagctttcataggttgatgaacttgatcctgggaaaaagccactcaatgggaacttatacaattgaatttgtgaatttgactggaatttcacttctatgagatcttatattggattttgcagtcattctacttatataacttttatttatgtgctcatttgcttcatcataattaagtatcggtggataatccaacaaggggcattgtagaatattggtctctctaaagttattgagttccattggatctgcaattttaacactaaagatgagtttgagcttcaatcttctgttatcctcatgtctctctccgtgtccatgcttagaaacccaaagtctttggggaaggagttctaatttccaactgcttttgtaatttttctctttacttcaactgtagtaaacatctggtgggaattagagtaaatacacaacaatcactacccattttcagggaaacattatgttgtataaagatctgatgtaattattctcagcttcagttgactgcagctcgagattttaaacataagaggtgcctttttgaaactaatggttctgtgataacttattctatttggttgtgtcttgtagat

SEQ ID NO: 85795 - DNA, 227 bp, Citrus clementina; identical to SEQ ID NO: 82502
  Intron number 2 from transcript clementine0.9_006228m (loc us clementine0.9_006228m.g) derived from phytozome v7.0 (c hr-ID scaffold_41; pos 1918308 to 1918534 reverse strand)

SEQ ID NO: 85796 - DNA, 979 bp, Citrus clementina
  Intron number 1 from transcript clementine0.9_012773m (loc us clementine0.9_010884m.g) derived from phytozome v7.0 (c hr-ID scaffold_4; pos 6758391 to 6759369 reverse strand)
cagttagctgttcttttgacttttggtgactaaaggcaggtgataataatgggataatagagcaatctctgttgttgattgtttttattgtgatgatcactttattttcattattttttgctttgaattttagtgggtatgttttagaattatgtgacaggatctgggttactgtgttttttttttggctttgactgattttaagtcttccttggattccggcttctgtgtagtaaaagagatggttgctttgctttatttgtatctggtcatttatggggctttatttaactgttttatgggtcttcgctcgctcttaagttttccctgttctgggttttggagtaattcacactagagctaaaaagttcaggtttttggcgttttggagtagttgaagcgaaaagcttcatcttgtaggtatttttcttttctgggtttttgaattccagttcaggtttagcgaacttttagatttgggaccgtgtctccgctcttgattttggtcaaaggtgaaggaatcatgatttgaagttgatcataaaattttccatgctgttggtttttgggtttcatttgaagggtttttcttttgtaaaattggcttcttcatgttcagagttagtgtttgctttagctttggcaagtgatgcactttttgggaggcagcttatgtgttggtcttaaaagcttattaacatttccgaatttgccttgaatttggagctttctgcctcaaaggttttaccgacaaaaataggcttttaagctctaagagttttttcttagtctgtgaatttctgttccaaatatcagatgtgccgtcaatttgcttaagtttcttagctttgaattgattctttggattggtttaaagggatacatgtttctgctttctagttgggaatttcattttgcttgacctgatttttcagttatatcttttgtgcttttccagtttcaaattcttggtgttccc

SEQ ID NO: 85797 - DNA, 1021 bp, Citrus clementina
  Intron number 1 from transcript clementine0.9_018785m (loc us clementine0.9_018747m.g) derived from phytozome v7.0 (c hr-ID scaffold_10; pos 3222411 to 3223431)
ttgaaaagagaaaacaattaacacaaaacaacacagtgagtttattattattatttatttatttatccatttgctattgtaatgttatgtgttttgtcacgatcgttggatgcagacggaagcccagaaggttaaaattcttcctttctcaaacttcatctcaagaagttgagaaagaaatttttattatattataaacgcaaacactaaatggattaatttatttatttttaatatatatgtatatatatatatatatataatctttcatatttatttattatatattttggtacatgtaaatgttgttatataatagtttcgtgttgatacccatctttcatcttcgtcagtttcttgcttctctttgccacctatcatcttctttccttttttttttttttctttgtaagcattttctcttttcttgttttatttattttttattttgctatgtgtttcagttactgagattcttaattgcatgtgttttatttgatcttgatgtatgttttgctttctttgcgcaatgtggatgtgagttgaagttgttttatgatctgggtatgcttttgtttgctgtaaaatttatctatttcttaatgcatatttaactgattccggctttttcacattgatctgtgattatttggatgttaatgatcatacccttgtagttggattgccttgtcgaagtcaattatgacttcatgcataccatgatctgtttgatgatatgaaaaacttgttttttaatttattttttcattaattctgactgctaacgattgcaattttgcttttaataatgttcttgtaaggattagatgatttagttagtgttaatgatctatagagttggtggctatttgctttcatccatatttatagtattgatgcttaactactttttcttcaattttagttgatggaattgtatctttcatatttcttcaatctcaatctggttattttttttttttggttgttattttgatagagttgatagcttgttgaaagc

SEQ ID NO: 85798 - DNA, 678 bp, Citrus clementina
  Intron number 1 from transcript clementine0.9_001783m (loc us clementine0.9_001783m.g) derived from phytozome v7.0 (c hr-ID scaffold_4; pos 7124991 to 7125668)
tcttcgctccatctacatcgtccaaccatcacaaggttttgtttgatttaagttcgttttagttctttgaatttgtagcatattacacgtggagctccaatttagctcttcttattcattctaagctagtttaagtctcttagcacccaaatagagcaatttttttttgttaattctgtttggttccttagaaaatgttgcttaaactttgaattctggatacggctgttagttacactaacgctcattctattttttttttttctctcttcgttgtatggaatttgcagaacacgtgaaatttgatgatgcagcgataatgcatctcatgaacttcagaaatatcttggttaatatttctttaactatgttccaaatttggagcatgaaccctgcaaacatagagttgctaaaagactaatcatcatggcataattttgcggcttttctttaataattcagtaaatttttggtcttttagcaattctctgtcatgtagatttgagaaaaaatgcctacatcagcatgcgagtactctctttctagctgaaaagattgaaacaaacttctttgcatgttggaattttactgcataaactttgaacactgcttgagggtgaatattcccttgtttattgttaaaagacatgacagtgtcagttatcttattataggttg

SEQ ID NO: 85799 - DNA, 583 bp, Citrus clementina
  Intron number 1 from transcript clementine0.9_022835m (loc us clementine0.9_022835m.g) derived from phytozome v7.0 (c hr-ID scaffold_31; pos 1069771 to 1070353 reverse strand)
cctcaacgataattttgatcttgttgcactctccggtaatatttgcttttacgccctttgacttgagtacaaacagaccttggagtcttttgggataaagcagtattggagccagaattagaaatctggaggtggaaaattttttaatgccaatactgagtcttgaaatcttagagatagtttaaatgttgaatatcttatttaaaaagaaaaaaataaattttgataaggatgtctcatccactaaatatcaatttttttctcattattactcttactaagacgaccaccgacacaaagcacattcatactctacagcacctaggaggcttgactgaatatcctaatgatgcgaagaaactgtgttttaaagtttgacattggtgattaggaatatgttaaaacgtttgacaaatttactccccttaatcacatcatgaaatttgaattgcttcccaagagaaccaccataatgaaactcaattattatccttaatttgtatgaatttgagtaaaaataacaaagattggctatgcatgtttttcaggagctcacacatttggaagggctcagtgccgaact

SEQ ID NO: 85800 - DNA, 545 bp, Citrus clementina
  Intron number 1 from transcript clementine0.9_022136m (loc us clementine0.9_018347m.g) derived from phytozome v7.0 (c hr-ID scaffold_7; pos 3616574 to 3617118 reverse strand)
tcgtcaccgcctgcttcaccctccctgtcgagaaggtttcgttttttaatcttttttttcttggcggttttatttggttacttttgattgggtttttggtgattttttattatttggtttttgggttttcattcaaattcatttgcttttttgtttccatttgattaatggatcggtgattatttttagtgtttagtgacaacagatcagttgtaggggatttagggttttggatttaggtttcagggatgcattttgacattacatgtaatttctttaattaaaccctctattcatgagaattgtaatgctagattctcccttcaaattgcagattgtgactatgtgttgccattttttaatggtttattgcattagttctatgagtttcttggctgcaataaaagggttctgaactggatcttgaacctgaagcatttcgatgccttgagttttctgcctgctaagtgtattttttgagcagcctccaggcttttttgttgaagaaagtgctgtgtcttgcagatattgaaggactttttaac

SEQ ID NO: 85801 - DNA, 720 bp, Citrus clementina; identical to SEQ ID NO: 79435
  Intron number 2 from transcript clementine0.9_020789m (loc us clementine0.9_016683m.g) derived from phytozome v7.0 (c hr-ID scaffold_119; pos 283534 to 284253)

SEQ ID NO: 85802 - DNA, 984 bp, Citrus clementina
  Intron number 1 from transcript clementine0.9_023307m (loc us clementine0.9_023307m.g) derived from phytozome v7.0 (c hr-ID scaffold_31; pos 527660 to 528643 reverse strand)
ttacaactgggtcgccaccatcattggccctgctggtgaggttcccctaagctctaactcgctctcttttggcaatttttttctttttatcatttttggtgacgggttgttgttttttatgataaaatttcaattttgatcatacttccgtgatgggtggtcgttcttcatgataaagtttcaattttgatcatattttagtggtgggttgctgtttatattgtttttgaaagataaaagtttcaattctgattattttcgagtgatggttgttgtttgtattgcttttggtcaatgaagtttcaatcttgataatttttgagtgatgttggtggttgtttgcttgttttaatgattctgtttcaattttgatcattttcaagtagtgggtggttgttatttacctgttttcttgttttttattataaaataattggtcattttttgagtgatgattgcttgttgtttcttgttttttgatgataatgtttcaacttttattagtttcaaatgatggggtggcgtgtaatttcttgtttcatgctccttgtcttgatttgtggtctgtcttggttgaattataatggcaacttgttggaatattgctgatgctatgagtttcaagcgttaattgaactaaggatcgttgctcaattattgatgctcattgtctttattagcaacagactattgggaaaggtaagttcacatgttgaattatctagtttttgatgcactgcatcgttgatttgtgggctttattttatgtgtttatcaaattattaaacatgtttctataaaagttgcatatgtctttttccgactatttgctttccatttgaattgtctattttctgttacagcagcttctgaaatctggttaatgcctgagttgtcttgttggcatgtcagctttgcagtgttcactaagctcattttcatgttgtaggaacaccataccaagggggtatattttttcttgac

SEQ ID NO: 85803 - DNA, 546 bp, Citrus clementina
  Intron number 1 from transcript clementine0.9_009699m (loc us clementine0.9_009699m.g) derived from phytozome v7.0 (c hr-ID scaffold_113; pos 329327 to 329872 reverse strand)
gtgaaatcatcagcgccgactctgtccaggtctaatctgaggctttttaattattattttttcattcttatcttaaatggagagagtttaagtaattatgaagtgggtagagctttgttttattgattggatattgtctgggatgaaaatgaagagtcaacgaaaaaaaagaatgtcaacttttgagtttttttatttttggttttatgttttaacttttaactggcaagtgttttgggataaattcgctgaagggttcagtcagaatagatactactaattcattttttgaaacttcgatgaatggattgtttctgcttaggtatggttaagccatggttttacctaaatcatagtgttatcagatactgcctattcagattggttgccatgtgctcgttaggttttgttcgcataatattgtgtattagtgcgacccttttctctgtggttgtaacaagtactggaatctctctgaaagtaggttgattaagtgttctttgtgttacaggtttatcgaggtcttgatattgggtctgcaaagcc

SEQ ID NO: 85804 - DNA, 510 bp, Citrus clementina
  Intron number 2 from transcript clementine0.9_031755m (loc us clementine0.9_031755m.g) derived from phytozome v7.0 (c hr-ID scaffold_3; pos 5077934 to 5078443)
ggtgtcgttacaatcaccctcgcaatcgtgctgcggtaattatgatcgtttcgattatttgcctaaatttcttgcattacatgttttgagatgtgagtattaccttattttttgtgttttttttagtttgatgggtaattactgttcggtcaagtctgggttaggttttgatatggaaaatttgagtgtgcatctcattcaatataaggtgttaatattgtttaaatatttgtttgttaaatcagtaagctgaggaaaagataagggacttacctagtctatgttgaattgttgtattttacgctaccaagaaatgaagcttctgtcttagtctgcgccacaccatgagaaatttatgattgaaatatggaatttgattcatttcttctattttggtcttttgacggctactgaagccagcatttgtgtaaattggattgtactcactttcttctgatttttctgctctgcttaggttgaggctgctgtaagggctacaggagattatcc

SEQ ID NO: 85805 - DNA, 341 bp, Citrus clementina
  Intron number 1 from transcript clementine0.9_003283m (loc us clementine0.9_003293m.g) derived from phytozome v7.0 (c hr-ID scaffold_4; pos 1073091 to 1073431)
gcagcagcagccgcagctcaattctttttctaaaggtaaatttttctgtctttatttccgttctttcattgatttttacccatttgcctaaactctgaatcagagcgtcatcaaatcaaaatcataactttcctctttcattttgtatcaaattgagcattgttgttcaagtaagctcgtctattattcagcagtttatggcatgtctttttaacccgacaggaactcagggtggcaacctttcgattttctgttttgacttgctatcttctttgtttatagattcttgtttgttttgaatttcagcaaggaaatccaatctgaattccaattctggcaac

SEQ ID NO: 85806 - DNA, 788 bp, Citrus clementina
  Intron number 3 from transcript clementine0.9_017152m (loc us clementine0.9_011433m.g) derived from phytozome v7.0 (c hr-ID scaffold_2; pos 6598481 to 6599268)
gtttacggccaggttagtaaatttttctttagatgaatgacttgtttaacatctgtacagtagtaacattgtgttaatttgcattcatgagaaacatgaaggaaagatcatttctgtctaatttgtataatttcaatgctcggagatcagcggtgagatgatgtttaaaaaactcccggtcactcattttctggtggagcaataaataaagaaatgttgataatgaaaccacaaggtttgagtctgtgtgtttggaaacagggaagtgcagaaaatgtggctaaacccaccaacaaactgaaagtgaaacacaaaacactaggaaacttaattgtttgttatctaaataatcattaaatatagagatgtgttttgtaaatatatttatgcttctaagagttgggaggcgtgaatttgtttgtgccttaaacctggattgggtttcagtatcaactaaccaacagtaaacaagcaattgtttgtcaaatcaaataaattcatatgtataaaagaatgattaattaaaatgcaacaaattcacatatcagttagtgtttatttaaccattcttcaagattaggatggtgcttcaattttggtaatggtacgatataatattgtgtttgagaaaatcttttgccatttctgaggaaaagttctgttttgatcactgattaggacatttgtggactacatcatatggagtaaattctagtaggtaattgagtgaggcaaactgtacaaataatatgcttatgattttattgtttaatccaattctaggtact

SEQ ID NO: 85807 - DNA, 882 bp, Citrus clementina
  Intron number 1 from transcript clementine0.9_035246m (loc us clementine0.9_035246m.g) derived from phytozome v7.0 (c hr-ID scaffold_7; pos 4767183 to 4768064 reverse strand)
gaacagaagcggaaaattctaatattggattttaggtacgtgaaatttaatgaaggattcccctcgtattttataacttaaaatggtttccctaaaggttcatgcgaaagagagaatttaatttttattatattgtcgagtagatcaaagggtaattaccgtagttgctactttggtggaaaatatcttgtgttgatgtgattttttattttatttatttatttttgtttagacaaggttaaactcctgcgatggatttatttgtatcaagtcttcttttgttgaatgaaatggttcattagccttattggagtataattttgtgaaggaaagaagcataccaataatgtggaaagtgggaatgttggcggttatgaatgtttatgttcttacttaccactgggtttaaccaagtgatggtctaaatgcagaaggctgactttctcttttccctcatttaaattcttggggaaaaaaaaaagttagatatcctaacaaccattccaatggtaatcccaataaaatctcccatttgagacttatttatgactacatcaacgtggcatctgtaatttaggagttgccattcccagataacttcttgtatattattcccgcttttaatttgtttttggaagatcttactcatagagacttatctagaggtgtttatggtgtaaggaatatatctggtgatcagcctaacaaattaaaggaaatattttctgtatatctaatgcactacgatctcttaagttgatgtttcgagcttcaaattacatccttaattgctgatatctgagtagttatagtgaagcttttctgctagctgacgtctctgtgcttctgtatatgtgacctccaatccatcttgttgcaggg

SEQ ID NO: 85808 - DNA, 225 bp, Citrus clementina; identical to SEQ ID NO: 82473
  Intron number 4 from transcript clementine0.9_035264m (loc us clementine0.9_035264m.g) derived from phytozome v7.0 (c hr-ID scaffold_3; pos 1296084 to 1296308 reverse strand)

SEQ ID NO: 85809 - DNA, 406 bp, Citrus clementina
  Intron number 1 from transcript clementine0.9_024943m (loc us clementine0.9_024943m.g) derived from phytozome v7.0 (c hr-ID scaffold_7; pos 5393186 to 5393591 reverse strand)
gaactttgctggtaagtcttgtttctgcttgttaattttccaagtccaagattcccctttgtaccacgattcaaattaatcgcacctgacattaataatatttcattatccgtcaactttttaacttcataattagtgatgattttttttttattttttatttttacaatggtcagattttactatttcaaaagtagatatatcaaattatttaactttataatgtcagagtggttcatgacaaagaactgattaatttcgagggggggaaagaaaaggcttggtcatttttctcattaatcattacatcgtgcatgttgttcgtaaagcgtaacatagataagctaacgaagattcaatgtaattcacaggtggtgatttcaagcattcgaagcaaagaattgat

SEQ ID NO: 85810 - DNA, 831 bp, Citrus clementina
  Intron number 2 from transcript clementine0.9_006047m (loc us clementine0.9_006047m.g) derived from phytozome v7.0 (c hr-ID scaffold_2; pos 7489968 to 7490798)
ccacgggtgcagtgaaagaaggaaaaaatttcctcgtaagtacaacgtgtgtcaatttattctccttagtttcttaatggcttctgataaatctgtgggttcattcttcgacaatttggaattcgaatcacatgttttttttttccttaaatttactggcaataacttattttgtgaaattctagctctgacctgtgaatttggtcaatgcttttaggtttgtataatttacaagctatagtacgaagaagtgaatttatcattttcatttgttgaaattgtaaagcagttactgaatctaggtttgacgctccaaaaagttgcctagtttttgtatttagacctcatttgcaggagtatactatattcaggtcaattagctggtaacactcttgtttctttctatcattatcaattgtttaaatgggtttgtttgataattagcttcttgaatggactgagagcttgttactagcatagggttcctgtgtcagccaagaaagggccactccagttttgaaagattgtaagttgttggtgattttcctaggtgtttccaccgataatttgaactatggtgcatgcatattttgttactactttctctaactcgcacaattgttggtcctgcttagcaaaatatatgcagtaatcagtttctctaggttgaagaacgtttacatgttgatgcattattggaattgattttatgaattccttcctatcatcgcatgatcttgcactctatatatatatatatattttgatttttttctcggctctaacactgccattcttgatatttaggtgccagaagtgagcggtcatcaa

SEQ ID NO: 85811 - DNA, 276 bp, Citrus clementina
  Intron number 4 from transcript clementine0.9_024630m (loc us clementine0.9_024537m.g) derived from phytozome v7.0 (c hr-ID scaffold_7; pos 4748037 to 4748312)
cgaagctagatactcaagtcaagatctatcgtgatgtaagtttcttgtttgttttaacttaactgatatttgcttagtcttcaaattcaacttgtgctgcattttctgtttagtaattggaaataaatgaactcagaaccagctttgtgatttttatttgattctttgcttttgattagatcgctatatttgttcattaggaaggatgatctaagctttttagcttagttgttttcttgatgaaatgcgttgtacttaatgcaggagctgactgat

SEQ ID NO: 85812 - DNA, 601 bp, Citrus clementina
  Intron number 1 from transcript clementine0.9_004884m (loc us clementine0.9_004884m.g) derived from phytozome v7.0 (c hr-ID scaffold_14; pos 2301511 to 2302111)
aacgtcgcaagtccggaaaacgtcgccagtgtcaggtgctgtacttttctttttgcttttatatatatatatatataaagagatatatagagcaatgctagttcatagaacccattttgattcttgtccttttttgttgtttttatgattgtttttccgttttcagagaatctagtaaatggatttttagcaaaatagcttcagcttcaagaaaatgcttatcttgtatgaagaaatatgtttttggagcaagacgaaggcgttgtgtcttggattattgctgagtgctgattgtggaatttattttgtttttaattttttgtgaaacttggattgctttactttttatttatctattttacttaaaatgctttagaaagagactagtagtgtatgctctcaaacttgatagtaatttagtatacatattgaagctgccactttgtagtttgtagtttgctgattgaatgctacactgcttgctctgctaactgatttttcatctgcatttttgttacttgagtttgggaaatgtgtgttgcatgatgaaatttctcaattaatattatgtatatatgacattatcgttttgtttcagggg

SEQ ID NO: 85813 - DNA, 439 bp, Citrus clementina; identical to SEQ ID NO: 78939
  Intron number 2 from transcript clementine0.9_000420m (loc us clementine0.9_000421m.g) derived from phytozome v7.0 (c hr-ID scaffold_4; pos 6846205 to 6846643)

SEQ ID NO: 85814 - DNA, 887 bp, Citrus clementina
  Intron number 1 from transcript clementine0.9_002323m (loc us clementine0.9_002323m.g) derived from phytozome v7.0 (c hr-ID scaffold_105; pos 79830 to 80716)
atctgctcgatccacagctctaattcagctcgcaggtaccctcttgcttttcctttcctatgcttcagatttagtttctttttaaaattttctagttcctgcttgggtgctgagaaaatggaagaaaatgatggatttttagtgaaaccttgtgctgttattaatttattcgcttgcccattacatgtttttgcgttttgagtgtagatatgctgttaattagtgaaggtaagtcctggttttcacccaaccgaaaagtttttctttcttttttttgggtttttattattagatcctaaatcatttcttgctttgttcatctcatgtttttgtgttacttttagtgaatcgtttttgtaaaatcacgatctgggttttacccttttttttgttttgcattgaaagttgtttacttcttttttttttttttgaagagagttgtgtacttcttttgttttgtagtatcctatattttgattatatttatcaacttttttcatgaaaatttgctgtttttatgctagaaagtgatgaaaagtttcatttctgtcacactttttttcttcagaggtgcataattatttccctgacaaattggcgttaaaggttaaaagccagcttttttattttggctcattaaaggcttaaagcagggctagactgacacattaaagagagttactagagccgttggttagataaatctgaacaacctgtgacaataacaagtcgtagaagtaaatgcagcattttaaggcaattttagttgatggtttttgttgctgagaatcttgtagtgggtttgttttcagtacagcatagtcccttttaacttggggcttttgtttgtaggttgatcaagtgactcataagggtttgttgtgctt

SEQ ID NO: 85815 - DNA, 712 bp, Citrus clementina; identical to SEQ ID NO: 83837
  Intron number 2 from transcript clementine0.9_002323m (loc us clementine0.9_002323m.g) derived from phytozome v7.0 (c hr-ID scaffold_105; pos 80759 to 81470)

SEQ ID NO: 85816 - DNA, 562 bp, Citrus clementina
  Intron number 1 from transcript clementine0.9_022979m (loc us clementine0.9_022979m.g) derived from phytozome v7.0 (c hr-ID scaffold_7; pos 6511615 to 6512176 reverse strand)
gaggaagctagtagataatcaacttttcttcttcttcttcttcttcttcttttttatgaaaaacaaaaaaacaaaaaaaacaaaaagttctttagaattctttcattctcctttcctgattttgctgatgtacctaatcagaattttgcttttctctttttactgggttcttttcgacaattgaatctttgtttgtgtaaaaccatacatattattgtggacaccagtttctcatgaagagaaacaaggtctaatgattatcgacttctgtttttagactggacggttctgttccttctgttttcattttcagattcaactagctagaatcataatggagtaattaccgtaccttgattattattattattattattattattattattattattattatatgatgatgctcaacttagtggactgcttctctttcactttctaatcattaaatttaattcttctcattaaccgcattcatcaaatttgagttttcttgtttttattgtctctcaatatttttaatctgattaatgaatgataccagtggtggaaactaagg

SEQ ID NO: 85817 - DNA, 697 bp, Citrus clementina
  Intron number 1 from transcript clementine0.9_000970m (loc us clementine0.9_000793m.g) derived from phytozome v7.0 (c hr-ID scaffold_10; pos 68657 to 69353)
agagaggtggtctagccgagaaggaaatcgagcaggttttaactttgctttaagtaatcttcgtaattttgctccatcggtttataaacaaaaggcaatgtgctgtttctatttatgaaatgtgggtgttctgaaatttgcttctcaatgctaggttctaattacattagcattcctgcttcatgagaaatcactaaaggtatagagtagccaatttgtggagcagttggatgcttgtatgcttattttggaagtcgtatgtcaaaacaaataccttgtagtttactgaatgatgatttgattttcatgttttgattgcactgggcactaactattaatccttatattctctggtgttttttaacgtgttcatcggtattcttctctaagtgcatattcttacttctatggaaagaatggttatccaagtgtatttgtgagtctgtatatgttacttcctagttatcatttattggtggtattaaagtatttgcaattttaaactggggcaaattaagcagttgatcagcaaattcatatccaaggagggtcttagcttcactcatgagctttattttaccattcctctatttgttcaccattttaataaaattcttttataagaaacacctttgttttgcatagtgattttttatttacaggccattacattgcttaagaaaggtgcatatttgct

SEQ ID NO: 85818 - DNA, 789 bp, Citrus clementina
  Intron number 2 from transcript clementine0.9_000970m (loc us clementine0.9_000793m.g) derived from phytozome v7.0 (c hr-ID scaffold_10; pos 69371 to 70159)
gaaaaccaaaattctgtccattccatctttcaaatgtaagtttacttggtatgttttctccgtttggataatccttccactgactagggttaaaaactatggcactgataggaaaaaaatgatcttccagaagtccttaaatagtgcaggaaaatcacccttttgtgagattatatgaatggtccagtgaactgctcctttgttttatatgaataactaatataactgcatcctttattcttttagttgcccactattgttctgacctaggccacccggaacatttttctttaaatggaaaaatccttttccttttctctctgtttattttcttccattttcctgtgcgtgtaattgggcgggtgaagagagaaattatcactattttcagaaaaaaaactttgaggagagagatgactcaggcaggggatataaaggagtagcaatactagaggcagtgatagatctctatttgcttttaatagaaggaaataggtactcaatcgtcatatttttcatactttgctttcttttggccaagaattttcctccaaattcaaacataaagatgtccaatgcattacttttgtcattcttacaagaatatggagtttacaaagttgtaaggcaaaataacttgcatttgcattttgtgtggaaaaatatttatgttgcttgggcttcaaactttggtaagcaacctttagcatttgaatatggtggagaataatagtagaaattgaattcttaatactcgtctagctaatcagagtgctattctgcgctagg

SEQ ID NO: 85819 - DNA, 559 bp, Citrus clementina
  Intron number 1 from transcript clementine0.9_005111m (loc us clementine0.9_005127m.g) derived from phytozome v7.0 (c hr-ID scaffold_4; pos 1457653 to 1458211 reverse strand)
tccttttgtcttttaattcctcgaaaaggtatgtaaatctaatgatctttaatttcaagattttgttttgattgcttttggttagagacatgtaattaaatgtttaatcgggggaacgatcgttagaatcgaatcaaaaaattgtcaaatctgatttgttgatcgactgtgctgggattttattatttttttggtttttttataggcgaacttttaaaatttcagtttgtagatatatatatatatttttcaattcaatattgaaatcgtaggaatttgtaagtttcttctaacctagacctgtcaaatggtagttttggtgttagagcctgatttttgctgcatctgattggttatttgttgtttaggtttcatatttttgctgtatctgattaggtattgaagctttggttgttgcggcatctggttgtgcttttggtgtgaaattttatatttttgctgcaattgattatggctttggtgttaaatttgatgtccttttcttttctttttgttttttccccaccttctctttgcaggtattttgtgaaactccata

SEQ ID NO: 85820 - DNA, 507 bp, Citrus clementina
  Intron number 1 from transcript clementine0.9_020548m (loc us clementine0.9_020548m.g) derived from phytozome v7.0 (c hr-ID scaffold_2; pos 2965617 to 2966123)
ccgcggctgctggctttcttcaacctccttctcaggtaacttattcttcaatctctattcctctttgcattttcttcttttgtatttcgtccgttttatctaaaattgaaactgtttggctccctctgtttcctggatctacggttagatgcttcattttgtaataaaaataccatttttttattaggcttctttgattgtaggttcctttaagagcctcgtgcatcattattctggttaatgtttttggcccaacgcatttgtaattatatgtttctcgattttggttttgtttcggattttttgtttttggttctgttgtcttttaattctagaatagttgatatttcaatgtgaatggtgtttaagttcaattagaaacgagttttgaatttgggtgctgttagttagggttttattcttgttcccccaaaagttcgattttgggatgttaatttgttcccattttcgacagctatttcgcctgctgttttaattatttgtgtt

SEQ ID NO: 85821 - DNA, 672 bp, Citrus clementina
  Intron number 1 from transcript clementine0.9_008111m (loc us clementine0.9_008111m.g) derived from phytozome v7.0 (c hr-ID scaffold_7; pos 1858480 to 1859151 reverse strand)
cgtaccctaaaaggtaactcttttaagatcccttatactttactttttttctttctttttctttttctttttacagtttttttaaatagacatatattttttcttggggtgaaatagatgtaaaccaaagacaaaagaatagttttatttatcttttttttatggatttaatccagtgtttcccacctgtgtttggaggatttcaaggaattatgggtttagggttagatatagtttttctttagcgtctcgttaaatctctctttctctctcctttagtagagattgaagaggtttttgtttttctttctttttctctttttttttttaattttttaattttttgtgttcttgtttgaataagaattaatatttcttatcaaaggtctttttattttggggaattgtaatttttttttattgttgtattttagttagttggggttaaattgagcaatagttgattttgtgggtgtgtggggaaaatgttatatgattgaggaacaatttagggttttgatggaggggagatattttggagattgatagataatgattatgatgaaggtgtttataaggtttatttcttgaatttgtttcttggcggaaactatggaaatgttgttcaacctatcagcaacaacaaaacccacccaggaatcgcgctgaatt

SEQ ID NO: 85822 - DNA, 141 bp, Citrus clementina
  Intron number 1 from transcript clementine0.9_031652m (loc us clementine0.9_031652m.g) derived from phytozome v7.0 (c hr-ID scaffold_2; pos 7002977 to 7003117)
ggatcttcaaggtagcaattattctcttttggtcattgctaagtttttgtttaaacgaagagggaaagtcatgaagccagtcttcaaatttgattttgtttaattttgtagaattgtgcaaaataggaagtgaagagcaga

SEQ ID NO: 85823 - DNA, 374 bp, Citrus clementina; identical to SEQ ID NO: 79064
  Intron number 4 from transcript clementine0.9_012968m (loc us clementine0.9_012968m.g) derived from phytozome v7.0 (c hr-ID scaffold_4; pos 1559481 to 1559854 reverse strand)

SEQ ID NO: 85824 - DNA, 796 bp, Citrus clementina
  Intron number 1 from transcript clementine0.9_030371m (loc us clementine0.9_030371m.g) derived from phytozome v7.0 (c hr-ID scaffold_2; pos 2784883 to 2785678 reverse strand)
tttgcagaaggatcctcccacgtcttgcagcgctggtataaatttttgttacttgagaatttggatcatgttttagttgatttatatttaaattaatcgaaatttgctgctttgtggtttgtttccaaccttttggcccgggggttttaaagaatggttgtgattggccaccgaaaatattctcatgtgggtgaattcttaaactcctaggcggggctaattgtattggtgggctggtggttgttttccaactttccaatggaaacccggatttttccgggaaaacccccccccccccccccccccaaaacccacaacaaacatttaaatgaattaaatatacattgtattacactctctaacatataatttgatactgaaggtttttgtatttttcagccatagaactatagtgtcatcaatcaataaagtacttgttgactttattatatttcactagtgaaatgtcatcaagtagcacctctcaatgagtggcacttcatattctacatcaagtgggtgcaaacattgtatcccagtcatgtatgtgcagctttaatctttttccgaatcatttgtgttaactaaatatgtaagttttggtaattgttccaaagcttgtttaactatttaacagtgtatgctgtatcagttgggtacaaatgttgtatcgcgaatttatatagttgttttactctttttttgaatcactttatatcatctaaactaaatttgttattttttgctgattgtttctatcttctttaattgtttaacaggtccggtggctgaagac

SEQ ID NO: 85825 - DNA, 799 bp, Citrus clementina
  Intron number 1 from transcript clementine0.9_021054m (loc us clementine0.9_016877m.g) derived from phytozome v7.0 (c hr-ID scaffold_4; pos 4757701 to 4758499 reverse strand)
ttgtcggggaacgaggtgtttaacaacaccatcaggtatgtgaccttagatctgtgtgcatttgtcatcttgctgtggctaaaaggagctgaaaaaggagaaaaaagtttaatcgtagcagtggtataattttgaccattattgcaaagattcgttgacgtataaaattggaaatgttgacttattttatttagaggatattaggaaatttagtttttgggtgttgtaaggatttatacggtgatggggtaataactaaagaaataaattgttatttctattgaaagctttgagttatggactctgtaattagcagtttactgctgagtcttatatcttttatggaagaattaggaggaaaaatgtatatttacctatcagcttaaatttttgggctgaatggtttatggaacactttctatatgaaagaattcgtggctgaagttctagctgagaccgaacatgttattgagggcaatggttcaaaaaagatagataataatggtaatttggaaataatgggtaacttcggagacagcaagacaggacacatcataacaatgttgaagtgtgattatgagtttggaaacactaatgtttgtgcactcatctttgcctttctcatttacaaccattggagaaaacagatagaagatgcacaattagctttgtctaccaacacacttgttttgatttatatttcaacttctcagttttaggctttgacaattttttcatgtgtgtatatatgtatctattggttttataagggccacggcaatcccaacttctggagtga

SEQ ID NO: 85826 - DNA, 766 bp, Citrus clementina
  Intron number 1 from transcript clementine0.9_003094m (loc us clementine0.9_003094m.g) derived from phytozome v7.0 (c hr-ID scaffold_141; pos 60500 to 61265)
agttcttgctcctagcaaccaaatcgatcaaattcgtaagcttttcaatatgactcttattagatttcattaatatgagtttaaattttttccccttcttttacacagctttattttgtgtgtttgtgtgtgtgtgtatacatatatgtatatgtatatgtatatgtaaaatcttcatatctgcaaagtgaaaccattttgttttatttttattctttgttactactttcggatgtgcacattttataaaaatgacaactaattaaacatttattgtatgcagatcaaataaagaacttctttatgattgatcatgtagaaacttggttaattattatcatgtacgttttactattgtttttttaaaggacgttttacaaatcataagtatcagaaaatgttgataaactcatattttaataagtcggtagattcatctagctctataaacttagtactaatcgatcaaattggtatatgctatttatgttcccaaaaaattaaaaaagaaaatcactcatgttaacttacgtaattaaagtagaagaacacttataggttcggcgaatattcgaattctattgtagctctataatgacaagaaaatcgaggatgagagataagtttaattttcatgaatataatgaattagatttcttcgtctttctatcattttttttttaacatcaaagcataatctataaattatatagttataccgtaaagttaactatatgtataaacagaaataaggatcgaatcaaat

SEQ ID NO: 85827 - DNA, 652 bp, Citrus clementina
  Intron number 4 from transcript clementine0.9_017235m (loc us clementine0.9_017235m.g) derived from phytozome v7.0 (c hr-ID scaffold_7; pos 4154315 to 4154966)
gaacaagttctgggacctttatacctaaaggaaaggttgtttaattttttttcattgattgatgttgtttatgctttgattatatgtacgcatgatttttcttgcttgttattgttgtttattataatcataattgtttgcatgttaaactgtggctggttttaatactgttacttaaatgtttaagcataatgcacatgagaaacacgggaatatgagcaactgtagaatatttgtcatggcagagagatcttctgcataccaagatattttccttctttgacatttgttgcactcaatgaacttgccttgttagttggaggcctatcatgtctactaacattccttcttaatacattgcaactgaggagattggtgatacatatggggttagtttcatgagttaaacctagtgacatacttgttttccattaatacagtgcatgaatgactgaatcttcattgatgttattatagagcaacagaacttgattagttgaatcacattttcaggtgcataaggggtatcttgatgttttgtaagatgacatgggcagcttagaaaatttatgatacaactgctttcctttcatatgattgtcaattgtttctcgatatgcattagtataagcattttcttcccctttttagg

SEQ ID NO: 85828 - DNA, 767 bp, Citrus clementina
  Intron number 1 from transcript clementine0.9_009139m (loc us clementine0.9_007899m.g) derived from phytozome v7.0 (c hr-ID scaffold_3; pos 1138161 to 1138927 reverse strand)
gcgcgtctcagtcagtcgcattgcagaaattggaggttctttcttttattatttttttggtcttttcttcttggtttactcaactgtcgtctttatccattgttctcactatttatttgttatttattttccaagaacctcaagatttggcttcttacatacatactatgagtctttacattataatgactgttggaattatttaattgtcaggatctagaaactgttctcaatttgttttctagggtttcttctgtcgataatcaagcaatgtggatattcttgctaattgtttctctaattgcgatgcttagttttctaattgttaccaagtactcttctactttattggttaatgtgattattctttccgattaccaatgcctgtttatctgttatgctcatttccagcatataatttcactgtcaactagcgtttattgactaaatgatttattctgttttgatgtggtctaccttcagctgtgaaaggtgcaattgttcctctaattttgtatgctaaacaaattaaactggtttggtttgcattgtaattccatagatgacacacacacacacacacacacacacacatacatatatatatatatatatatagagagagagagagagagagagagaactttgattttcgtggctgtttttatagctttgagtgctctgatcaatatattgaccatatgatctttccatattctcaattgtttatctgactctctggcgcattgctattggcgaacaggaat

SEQ ID NO: 85829 - DNA, 779 bp, Citrus clementina
  Intron number 1 from transcript clementine0.9_023045m (loc us clementine0.9_023045m.g) derived from phytozome v7.0 (c hr-ID scaffold_4; pos 5445195 to 5445973)
aaattgaagggtttcgagttggtgtcaatttagaggttcattccgttcccatgccttttactgttttcatttgttctattctatttcctatctcatgctttaacaatttttaacttttaattactgtggatgatggttaattttgcaaacaatcatgagcttgtctcttacaattgctaaattattgatttattgcacaattttaccattgattaatgtatgtataaggtctgtgttgtatttgggtggaaccaataatgaagagtatggcatctcaaaatctggagtttctatgggagtttatcttcagttaagatacttgaaaatgcagttcgtgaagttaatatattgctttattagttattgatgaaggttgtaggttggacaaaagctgccattatgtcttaagctgttctgaaaataaaaaggggacttatacctgcttcattcaaagtttattatataacttaatgcgattgaacagaatgttggatggcccaaaatgttccacttgatagaaatgaaaatagtacgtgtaataatcaagtatgccttttctccttatgtctgggcattgctgcattggatggatttgaatagttgacgagcactcatctttgttcattgcacatttttgaaattttgaagggcatctgctatgtagttggctagttgctgcgtacaacttaatgttatatttttttccttacaatctacaagtcaatatttggtgttcttttgttttatgaatttttctcatgttatggcccagttctata

SEQ ID NO: 85830 - DNA, 852 bp, Citrus clementina
  Intron number 1 from transcript clementine0.9_019909m (loc us clementine0.9_019909m.g) derived from phytozome v7.0 (c hr-ID scaffold_2; pos 5528691 to 5529542 reverse strand)
tcagcagccgaagttgttcaagactccaccgacaggtcagtttttttttgttttcaaaaagccttttgaaagtactttttgttgctttttgggagcaaaaactctcgaatttagcttttaaagtgcttttcaaatccttttgatgaattgatttctgggtttcgtagaatatgtatgtctgtttatatttggagataatggagaatggttgttaagaactggcttagttgcttttttttttctttggcgcaatttttattcctactttttgggaaacattatttttctttgatttttaaaaattccctaatgatggatttcatatctgtttgttagctttcatgcaaaagtaatgggtttaggaaataaaccttttatgtgtttgggttaatctttatatttttgtaatggttatagctagtgaagcatgagtaacttttctatctaaatccatattcgattttgtgctttatttctcaaactatatttactgaggttatagttatagtactttgcttgttgtgtcattgtataatgcaagctagaattttttttttcctttttttgggaaaaaaatgaaaatacattcaagctttgagctgaaaagtaaaagaagttgcatttggatttgtcttattcaaagttaatgcaaaattgtagtttgtttagctttcttattttgggaagccattaaagtttgttcaactttcttcttttgaagagtgattagtaacttcacggggggtaatttaatggttctgggaatattaatctggttgataattttctgatatgttgttcattttgaattttataagaagtgtatgttcttgaactacaattatatttagg

SEQ ID NO: 85831 - DNA, 943 bp, Citrus clementina
  Intron number 1 from transcript clementine0.9_010656m (loc us clementine0.9_010656m.g) derived from phytozome v7.0 (c hr-ID scaffold_3; pos 8858103 to 8859045)
accatcctctactcctgccgcttcctcttctaacggtaattttaatattgccaattcagattattattattattattttctgttaggtgcgttcttaatttgcatttattttgcatgcttttagtttaagaattgcaatttgcaagtgttggttaaaataaaaaaagtgctgtttgccttaaataacattcctcggattttaatttcattctgataactatgtgggattatggtggattatcaaataatcactcttttgagaatctactccaaaacttttttgatttgccatttttttttttcaaatcaaacattagttgattgagttgttcttttaagactcaataaaccagcgatcatcacataagggcttatcaaacatattctcgaagtatattctcaatttggaatcaactgcaatcccagacatgcaaataattgaaatcatggctgcttcattgcattttttaaacaggggtttgttttgtacttttattctatgactgctattgaatggaattgctacccgccaagtatcagtcagtggatgggcttttatcaaacaacagtttaggctttagcttccgcgctttcaaaattaacttgaaagtacaacagttggaaacatacctatgttggtttcgttaactgtgtggtgttcttgaatgaaatggtaaatggtaggtattatctaattttatatttatactggactggattttctctgcttttatgttctggataaattacttctagtttttgcaagcactagtcttaaatgagggtgggggatgtatgataggtttgaaacggattttgaagttaccattttcctacagaaaactttactttaccatgttcgtgcggaaaactttacttcttctttacactgggttataaataatttttgtaggttcttcgagtgaaagtgcagtgcaagtaa

SEQ ID NO: 85832 - DNA, 1000 bp, Citrus clementina
  Intron number 1 from transcript clementine0.9_019958m (loc us clementine0.9_019958m.g) derived from phytozome v7.0 (c hr-ID scaffold_14; pos 1024637 to 1025636 reverse strand)
gaccagtaaaaacctaaccctcttctcaattcaacaaactgaagggaaaaaatttgtaattttttttttgtgggtttttgttcttaggaagtaaaaataaatcaaaacccttgttttgttttgtatgatttcattattgcttggaaaaggtaatgaattgagaatttttgaactactttattttgaacccattattaagcaaacgatagttgctcaatatcactaaattttgagcaatttcatggttaggctttaggctgatgagcaatttgatcacccgattagagcagatattgtaggtaaaaatatggacctttgagtactgtatgtgggttattatgtttaagggtgtgttttttactattgtgtttctgtctgcttaactttaaaagcacaccaacggaagtgtttggtttggtaagcatcctgttaggatcacacattggctaagtatgggatttgttggtgttttattaactccaaggcacccgccccttacatgttggtttttatgggtgagttctacttcgtgggcgcacaatacaaccacttttatgtgatagctaatctgtataatctacctgcaaacttatactgggaaactagtgatttcaagtgttacaattagtaggactcaaaaacttacaatataaccattataagtggtatgtttcaatcattgcataacccaaaacacaccataaacttgtccatctaaaaactacttttgaaagacttaacccaaatgtgtctttgaaaacaaagaatttcatcctagtttcttttatttgtttctagtactgagcatcgtttgaagtttcactttactaattttgataatgttaagactgtatgataatgtggcatatgaaatactattccaagattgtgctaaactatgaaattgacaatgtgttacttgcccctcaattattaatttaagtatgtttgaattttcttttcttattctttacattacgtaggacatttggaacaatac

SEQ ID NO: 85833 - DNA, 346 bp, Citrus clementina
  Intron number 2 from transcript clementine0.9_014310m (loc us clementine0.9_014310m.g) derived from phytozome v7.0 (c hr-ID scaffold_7; pos 4544314 to 4544659)
tgtcttttcacattctcttgtgctagaggtaattcttaaactcattaattaaagttttcttcaattttcttttttatgttttaactggttaggtctatcatagtggtatcgatattaattaatttattttaattggcttgttaattaattaattaattattgggttgcattgcatttatgtttgagagagggatggatattttgatgtactggggatcttagctgccttattgggcttatttgtagcttgagttgctagggtcaaattcttgcatatcattaaaacaatgttttgttcccgtttgttgcagaacttagggttaaacgccatcatagtccccaggtt

SEQ ID NO: 85834 - DNA, 905 bp, Citrus clementina
  Intron number 1 from transcript clementine0.9_011542m (loc us clementine0.9_011542m.g) derived from phytozome v7.0 (c hr-ID scaffold_4; pos 4114238 to 4115142)
gcacgaacaccgtaatcagccaaaccaaacgacaggtgatcttttcaggacgttttcatctcgttcttattgttttgcctctgtttcttttttgttttttttctctttttcgttaatctctgctccctacatcgtgtttggtttattctaataatgctgttcattgcgtattttaaaatttagttgctgtttctttgtttggcttctgatctattaatctcattaacatgcttaatttgctgatgaatttttttttattacattgcaatgtcagatcggttacgttgcttttgttgttgtcaatgaattctcattctgcgagcttttattttctcgtgatttacaataggatattcatcaacgcatgatagtttgttcggttgttccccttgaaaacttttcttggagaacaaataaggaaacaggaatattttgtttgtttttattgcaaaattgtttttttttttcctttaatttctgttgcagaaagattgatttctgcgtttgttttataattttaaatcttccgtttgattttttttttcgtttcttttcatggctaataaattaatgtgctaaaattataattttcttattgtcatgtaattacatgaaagaaatcttggataattatttttaaataatattgctttttatcccagtcttgtatgtaagcaattggtacctacgacttgtgtctactgtatactgtgatattgagtaaagcatacgcttatggcacaaaaatattaaacaaaagatgccttatatatacatataaatgttcttttaggcattattatggtgagtgagttagtgtctataatttctggacttaatgaaatagttgattgacagttatctctatgcactttgcttatcttttatcttggtagtttgtagtc

SEQ ID NO: 85835 - DNA, 962 bp, Citrus clementina; identical to SEQ ID NO: 81502
  Intron number 1 from transcript clementine0.9_014456m (loc us clementine0.9_014456m.g) derived from phytozome v7.0 (c hr-ID scaffold_31; pos 1051148 to 1052109 reverse strand)

SEQ ID NO: 85836 - DNA, 927 bp, Citrus clementina
  Intron number 1 from transcript clementine0.9_006770m (loc us clementine0.9_006770m.g) derived from phytozome v7.0 (c hr-ID scaffold_41; pos 1257353 to 1258279)
agaaacccctccgttcgaccttttcaagatttcaggtacatgatatataactacttattcttcttcactcacgagctaattttacttagtgaagttctttcttttgggggtaaaaaagaaaaacgatttcatgcactggaaagagcagaagatttttatccttaattatatattttttttcctacaataaaataattgtgtcttttattttcagaaaattcccatttatatataattgtctaaagttaagtcaattggataataatatgaacattagcatgttgatgagctgtaggattaaagatagggaacctggtctgctttaccaaaccaatagcatgttgtgttaacctccaattttatttcatttattgataaaatttagacgtccataattacatattttaaacaatttaaggccgtttcaattttaagcttggtagaaaatcggtataggaggcggcgaaatccatgtacaataggaggcacaagggtaaaataaattgaaaatttttgtttttagcccgtttttattttgtattggattaagatttttttaatattttatttatcattctcgtttcgactatttttttttaagtttaataacagaatttgagtttatttgtggattttaaaattgtaaactataggtatttcatctgtaatatttaagtttttatttgcttggatgtacttttgcagtgaattttacattatactcttaagaaagttatctttttctcatgaattcgaaacataaactgacttattatcagttcaactttgtcaagcaaagcgtttgaaaataattcatcttgtaatattacaaaggatcaaatgattttattcctctgatatatattttcttcttgtaatattaatgtaacagcacaggtgcggcttgcttgaacaaatcttttatat

SEQ ID NO: 85837 - DNA, 895 bp, Citrus clementina; identical to SEQ ID NO: 79990
  Intron number 2 from transcript clementine0.9_018868m (loc us clementine0.9_018868m.g) derived from phytozome v7.0 (c hr-ID scaffold_31; pos 112826 to 113720)

SEQ ID NO: 85838 - DNA, 480 bp, Citrus clementina
  Intron number 3 from transcript clementine0.9_023988m (loc us clementine0.9_023988m.g) derived from phytozome v7.0 (c hr-ID scaffold_7; pos 5686080 to 5686559 reverse strand)
gtgattggaaacagaggacttggcaagcttaagaggttggatttcatcaatgaactcctaattttcttttaaaaaaaaaaaacttttggtatgtttttgattgttatagtgttgctttcgattatgttggacattatgttaaagctctactgtttgtttccattcggagtcatctgggatttcagatgctctctatttgaaaattttctatatgtgactttatgaggccatgaaaagacaccaacccaaacttttttccaattaatgatttttcttggaattaaacttttttctgagaactttcttgaaacattgggctaaagtcttccctgctatttgaatcaagtgtccgtatagctggcatcacgcaccatggcttcaacggataattattgagacctcttttgactgaaagtgttttcttttgggacttttttggtttataattttctcttctttttgtatctttgcagggctata

SEQ ID NO: 85839 - DNA, 864 bp, Citrus clementina
  Intron number 2 from transcript clementine0.9_020454m (loc us clementine0.9_020410m.g) derived from phytozome v7.0 (c hr-ID scaffold_4; pos 3855897 to 3856760)
accctcctgcttcttcgggtaccttttttttttaaatttttttatttgtgaagtttgtttgccccgttctgtttggttttcgagaaaatgtggacaattagaagaacagaaggcgcaaatttcaattttggaattatatttgagttcaattttgagacttctactttgggtttcgttgattgcagtttaattttatacccataaaagtaaattgtagggttagggtttttttattatttttttattatctctgttttatttatttttgtatgttgatcaacatttttgggaattgattatcacagattgatcatctgtaccaaagatctttcttttttttttcttttttttcgtttcccccacttagtacataagcaagttctgttttaagtccagctgaaatattctttacaagattcttctgtgatagtgaattcattgcactgaatatattatctgaattttaatttcaaacaatatttgagtcccaacttgaatcaccatattgcatgctgctcatctcttgaatgatgaatgtaaaatttcttattattttattctaccatccgattgataaatgctacatcagttggcactcaaattgggactttttgtgagtgtgggtcgtttatctggtatgctcttctttggcttaaaattttgtttgctatttcttatgatatcacctgttgcattagcagatcctttttgtgttgtctgtgattgcattttgcttccctttctggattcagaagtttaagctgttaggtctgcttgttcaattgttgttttgttgtgtttgacaagaatgtgtaattttggactgatctaacttttgctcctatttaatttagacaacattcc

SEQ ID NO: 85840 - DNA, 589 bp, Citrus clementina
  Intron number 3 from transcript clementine0.9_017508m (loc us clementine0.9_017508m.g) derived from phytozome v7.0 (c hr-ID scaffold_4; pos 4088029 to 4088617 reverse strand)
acagggcaaaaacactcacttcctgttgttggcaggtacaccttttgaactttcctctgtcactgaactttgatgttattggaagcagggaattggttaatcactcttttgactccatccatgtgccttggaaatgcttgtcagctacttgttaaatcactaatgaaccaaaactgctgcatgatatgcttgaatggtacattaatcttttttttttttcctcaaaatggataacttagcatctgtttctagcactttttttcactatgattcatatggggaaaaaaagtggctccaatattttcaaatttcttcaagcctttcatttcatatgaatcacggaacatataaagtttgtcaatcaaaattctgaaggccgcgtttctgtttgaggacataggtaaagtttatatataaatttaaattgggaaataatagtggcttcaccacacaaaaatgtaattcctagtacctttatgcacaatagtattatcttctttacattcatgtacctagtttccttcttaattgtataaatccaaggatttcatcagtgtggggattattttgctcggtgcatttcttgctg

SEQ ID NO: 85841 - DNA, 704 bp, Citrus clementina
  Intron number 2 from transcript clementine0.9_003360m (loc us clementine0.9_003360m.g) derived from phytozome v7.0 (c hr-ID scaffold_3; pos 7374742 to 7375445)
aggttggtttcctggagctctttaccatttagtgtttacttgtcttctttgcatgatccatttgtctttctttcatcaagtctgtgatcaatccatttttctccttttgtttctgagttataactcttgaaatttaggaaaggaatttaatcacttcttttaaaccagtttgaggtctcgattaatgaccggaaaactttgaataaggaagtatatggtgagaaagattcttatctgttattagttttaagatcgtagaattatatcattaaagttggattctaatttgtcaatttgccataataagagtgatcacgtcttttgcctggagtttatctgtatagttgttatgcagttgaacgtgagtctgaggtgcctttaacttgaattagttcaccttactacgaaagtacaaatttattgtctcatggacgctctagaactttcccacattgttgaagatctgtgcatatgttgtattgtttattgtttttccattcattgcttgccttatcaatcttgatattccgttatcgattattaatttgcatatgtgtttctgcatttgatattttgaaataagtggcaggaacaggcatattgaacttgggaatggttttcatgattttatatcctgctttgcatggctaagatgttggcattttgcaggaagctagggctttgttaggaaggattgaatatca

SEQ ID NO: 85842 - DNA, 666 bp, Citrus clementina
  Intron number 1 from transcript clementine0.9_013006m (loc us clementine0.9_011679m.g) derived from phytozome v7.0 (c hr-ID scaffold_31; pos 1004790 to 1005455 reverse strand)
tgttgacacctctaaaaccatagccttaagtgaaggtatagcggcttgttctttgttagtgtttgtgggggggttgtttggttggtgagaaaatgaaggaaagtgaaaaagaaacggtgggctgatctgctttttattatcattatattataaatacatatatgatatattgatacgttatcaatatatttacatggtgagcgataatgttaagttccttagtccgtgcatcaatagctttagcattaatcacgaggcgttacaaaattacatcaggtattccgttgcatatcacattttttgtttctttttaattattagaaataaaagcaacctcaatccaaaccatgcatgggtactttcatacattcttttatgttcatgtgtgtgtatatatatataggtatgatgtttgtgttatatttatgtgtagatgcatacttaatgaggatgtttttttaaggaaatgttgaaccaactattactttaagagaagaattcaagtaattgattgatcggcggttctaaagattgaatattttctgagtggctgtattttgatatcaataatgactatcatgctctctgatgagtgatgactacatattaatgcaacttacgtgggatgctcttatgtcaatccccttgtaggagaaaaggaatact

SEQ ID NO: 85843 - DNA, 926 bp, Citrus clementina
  Intron number 2 from transcript clementine0.9_017182m (loc us clementine0.9_017182m.g) derived from phytozome v7.0 (c hr-ID scaffold_14; pos 4155323 to 4156248 reverse strand)
ctatcagcagactcttgctaccttgaattttgcaggtttcctcctcaaccccttttactttttctatctcggttttgtttaatttgttaatattttatttttttttaatatatttgttttgactgcctcattgtctcaaaacttattcgtataaagaatttggagaggaaaaaaaaagttttgattgtatttgaggagacaaaacaatataagagttattagtttccaaataaacatttcaatatcttacataatagctgctcttttgaattattaagttgaatataggatttagtatatcaattgcaaatactagatgaagtggattcatacttaaaaatgttgagtgcatttggtcatgtatatgacaccattcgtgtgggcagtgagaataagggattgcattatcttgtattgctggatggttactttcatcaaattgtgcctgttacagttaatttttggtgggaaagttttggtagtattttactttgatcgagaggataactgccttgtggtgtaatcaatttagttgcatacagatatatattttccatcaaagtttgtaatttcacttattctttgtgtcctttctccccttcccccacgaatggcttgctgtttgccatgttttttagtatacttggtataaaaaatgaactcaatttaactttctgcactcacaacaggtatgctcaatacaaactaaattggttatgcgtgttcttttaaaactatagataggggccatgactgtcttactttggggtgttgttagttgatggcaaagtggcactgttgtgctacaaagagccgcttgtcttcttctattccttcaccagatcatttgtcttttagcgcttgatttaattcagatttgattgcctgtagattcaaaaacactaaaggaagagaagcgggaggaa

SEQ ID NO: 85844 - DNA, 896 bp, Citrus clementina
  Intron number 3 from transcript clementine0.9_006389m (loc us clementine0.9_005230m.g) derived from phytozome v7.0 (c hr-ID scaffold_10; pos 379254 to 380149)
agaccattacttttgcttccattgcggctatcctggtacgttttttttttttttttatgttcttccttctcattatttatttattttttctccctgatttcaaccatacatatataatattgtagtttgtcctgtataatccgaactttttcttttcttttcttttctttttttgggtaaaaaaatacttagctggcggagcactttgtaacaaaatatcaaggaacggtagttcatgtggtatataaagttaatttcgtttaaatactactcactaccacccatttatttttacttttttgtttaatttttgctttgacatcttttcactttcctctatagcataaaaagctcaaaaaagtttattataattttgagagtagtgctagagagagagaagtacgagataaagacgagagaattttactctctctctctactcatttactctctatcattttcttcattatttctctcgtgtttctctcgttcttctcaaccctaatcattttcctaattttgattctgcattattcgttttggacgtaactctccctgctcctcatttatatcttttggccttttattatcaattggttttgttaaagggaccctcacaaaatggccgtggggcccacttttaattttaccgtgcaagggcagctgtaaggtgcagaatctgtaagttagcctccctcttgttagttgttaaagtccgcgtgggccccatttgattaccaaacatttacttaactaacatttaaggtttttcacaaccgttagatttttatttaaaggttactacgtaatcatctccaacattcaattacatttaattaatttgtatatatttatttatttgacgaaatgtacatcctccgaatgaatgacagggc

SEQ ID NO: 85845 - DNA, 799 bp, Citrus clementina
  Intron number 1 from transcript clementine0.9_015524m (loc us clementine0.9_015524m.g) derived from phytozome v7.0 (c hr-ID scaffold_24; pos 3191646 to 3192444)
aagatttttagacttgtgtggttataatttaatttttgtaataataattcaatcaaaagaaattatgcaatcataatctttatctatcatgtgggtcttaattagtttttttttttttttcttttaggggatcagtgaggctaagcccccacccacgacgtgagttacattatgttaacttaaaaccacaaattatatttatgataatgatttttttaaagatctgggtatttgaatgttaattttataatttattttggattcttctccaaggtcaaaataagcaaaatttaaggacatgaacatgaaacattcagtatagagatccaaaatcggacaatataaggaagtgcattgtaatgaagagaaacatcattgaggagttaaaacagccaaacaaaaagaatgcaggtttgaactcttaatcaggcttagtgatctccaggcagtgactttataatatcagaatcacctgcaaaacagagaacggaaccattaatccctgaagctgctgctggcagcagcgattatagtatacggcacagagtcgagaacacatcgcgagattacacctggatcgacaatgctcaagcaagacacacggaaatacttgccgcatgctgttcacaaatcaacattgtctgaaaaattatcaaaatgaatgtgctgtgtcaattacaatatcaataaggaacaataaccccaagtattgctgttatgtgggaaatctaagaccggaacagataaaatacttacaacaaaagagtaggagagcaataattagagaaaagtccccgca

SEQ ID NO: 85846 - DNA, 969 bp, Citrus clementina
  Intron number 1 from transcript clementine0.9_008244m (loc us clementine0.9_008244m.g) derived from phytozome v7.0 (c hr-ID scaffold_24; pos 2483832 to 2484800 reverse strand)
agatcgatcgagagcatatcaaagccgtagttgtaagcacatcaaatcgcattctttaagtatattaaatttgccctcgctatgtataaaatatggccacgcctacgccactgggttttcgtacgattaagtaattctttaatcccataaccaacataagtttcaagagaaccgatgatttctagactcttgctgcacatattttgaataatttgtccccccttctagaggggacccattataagttcttagattaagtgtaaaacgaaaaggtatcagagactgaattttgtattttagctacaaaattatccgattcatgtttcttacgaaggagtattaattgtcaatttttgggtcatctattttttaatcagtttcttggatgttctacgtactttattagcaaaccgatatttcctctttttatttgtatttcattcttttaggtttttaattttaccaagagtaattaaatttacaagaaaaaaatttgccaagtacgctactccaaagaaaaaaattattggaagttatggctgtgggcttgtggttttagtactctacttcaaagaccgaagtgtgtaaattttggggtgcttctagttaagtctagcaagcattttcgacaaagcattcattatcatcaagggcaaattgccctcgggaatattgattatattttcatccttatccgacggccatcttacaccttaggaaaaagtatttattatcaaaggtattttacgccctcggatatatttcatcggtgatataactgtttgttgtagtgttcgtgttggctttcacatgagtaaatatagacatgtgattgatacataatatcagaattgatcttggccagtaaacataaatagcaatatacatgccatagaagatcatctgcatgagtcatttttaaccctagatatatgcttcagtcatttatggtttcctcaatttcaggac

SEQ ID NO: 85847 - DNA, 621 bp, Citrus clementina
  Intron number 1 from transcript clementine0.9_007087m (loc us clementine0.9_007087m.g) derived from phytozome v7.0 (c hr-ID scaffold_2; pos 7612666 to 7613286)
ttaattccttcaacctcatctcgtgctcaatcaaggtacaatccaactttcaacttaattcgtcagctcttcttttaccagtatttactcattcatgtacagttattttgatcactatgttttgcgtaaaatgttgattctaattttctttgaagtttaattgtttttatttatttatttatttacttgataatgtggtgatttacatttcgtgctgcgttccttgaggtccacagttctgatagaagctcaaattttagctccaaaataacacttggaatttaatccaactgtttttattctggaagtttattaactcaatataggtgccgccaaaataggtaattgtgttttaattattcattaaaatcctaagaattgatggatgctatcaaaattctgcacttcaaaatatgctgcataccgaaatgtgatacctatcttttgaacgtggttcctcacacaatctacaaaagattttgtgaagtaagctaaagccagtgtggagctaaacgtgtattttcattttgttttattacatttggatcgaataaatggcagtttatgagaaattcattagtattaaactattaatgccagcctctttatatttctaggctt

SEQ ID NO: 85848 - DNA, 626 bp, Citrus clementina
  Intron number 2 from transcript clementine0.9_007087m (loc us clementine0.9_007087m.g) derived from phytozome v7.0 (c hr-ID scaffold_2; pos 7613607 to 7614232)
cagaagaaacacaggtctaggaattcacaatgtaagcattccctactagtaaaaaattagtgcatatggtttcagattgtaaacttaaattgtttagcatgaaatgaataaagctagtaggctatctttcttgcttttgaacattttccctttccttttctttctgtgataaatatgtgggttgtccatgcttatctgccttaaattaaacttttttctttcatgtcaggctagtatgtctctcttgttctggcacagacctgaagaggatttactgttttctaataatataattgaagactgttgctgtttctatctgtttatttgaatatcacagattatttaactatgtattaatttttggcttgaagccttcaatctaaagctgcctattactgtttgtggacttgaagcttttcagtgagttaagtttcaggccaaaaagttgtgtttttggcttggttttcttaggctttagaatctttgattcctattacatcattgggatgacatgacgattggcacttctctttgcatcctaacatctctgtttgtatgattggtgaggttgaaatcttccactccagagaaatgataatatttcgtgacatgcagcgttattcctg

SEQ ID NO: 85849 - DNA, 713 bp, Citrus clementina
  Intron number 1 from transcript clementine0.9_002854m (loc us clementine0.9_002854m.g) derived from phytozome v7.0 (c hr-ID scaffold_2; pos 4720542 to 4721254)
ggagatcgctttcactgtcttcaatgtaagtctcttttgttttcattttaaaaatttttctctatttttcaaatagatattttgtgggcttgatttcaatctaataaaagaattttattcaattggatatttagattattttgtgtttgaatttgtttaattctgttgtaatctgggatatattatatgataaatatgtagatgtattattttgttactgcagttcctctgattgatgaataatcatgtgctaattagtgtatatgtgctattcttattgaattgatttctatggaagagtttggatttaacattacatattattatttctatgattgatttggtaaatgtttgtgctattggattaatattttattttttgggagattttgtgttccttgtgagagttgacctttggagttttgccaagcctttggtactgaaaatccgtcttttttcagaaaaggatattttgtgttgattctgaacctttcgggatttattcgtttgactagcagcccgcttttttggagccataaaaaatttgtttatcgttgtcattattttaaatcaatttatgattggattagtgtagtttgtttctgtctattgatttgaagaatttagtagcacaaatatatttcgaagagactcaatatagcatctttgtaaatccagggtttgaaccaggggccaaaaggcaaggttcctgt

SEQ ID NO: 85850 - DNA, 905 bp, Citrus clementina
  Intron number 2 from transcript clementine0.9_000984m (loc us clementine0.9_000984m.g) derived from phytozome v7.0 (c hr-ID scaffold_4; pos 3439046 to 3439950)
acgtcgtgtacttcccacaaggccacagcgagcaggtgccgttccgtttcttcgtttctcttttcattacattttgtattgctgcctgataataataatatcggttgttggttgggtgaaataataattgcggattagattgcaacgatcttgttaaagcgagcactttggttgtttaagtaaattaccattttaccctgagtttagatggtgttgcctcttcaactttctaactactgctgaattgctagtaacgtgttgttgactttttattgcatttttcctgtttcttaaagtcaaccaattgatagtgtaattctactatgcctacaaagcgtgcgagtgatatactgatgacatttgtatcactatgtagtttgtatgggaatttgtacagttagtgttgttacttgttatcattaccatgtatttgtacatgtacaaactattatggacaaatttacataatatgagattattggctgaatgaaaactcaaagtcaaactcaaaatcataccaggtcaatttatatacaatagttttgtgtctagcatttattattcattatatatttcttgaatttctttttcatcaaaatgtggaaaatcttactcactgtcatgctctactctcctccaataatagtttaagaattcccaaaagttatgtattgtggatagctttgtttaccgtcgctaaaccaggactaggagggaagaggttaattattacttcttgttccagttaaagctattgctatgctctaagcattaaacactgtcagctaaaggactgatggattgttgtatatggatgctttgtgcctttttgttggtgtcttctttttggactaagttcattctctgacttggattggaatttatggctacaggtggcagcatct

SEQ ID NO: 85851 - DNA, 615 bp, Citrus clementina
  Intron number 1 from transcript clementine0.9_031253m (loc us clementine0.9_031253m.g) derived from phytozome v7.0 (c hr-ID scaffold_156; pos 121069 to 121683 reverse strand)
tcgtgtgcactatcgagtctgatcctggtatggctttagatcaacctatatgggcaacgtactcttgttgacttgcagttgtaaatttcgagcaatttagctgggatgccaatggcaaaataggttaaaaaatgtggttgaatataggatttatgagatgatgtagtagaaaagaactagcggttttagggaagaaggggcatggctctgttcttagaaatgagagtgaattgatggagttgactagctgggggtttaagttatggtagaattagagattggaagtgtttttgtctgtgcttactgtaagtagaattacctgggggttttaaagggctgaaagaaatttttcttgagttcaaagctttgagtatgcatgacttaatctagcaattatttctttccagtatatcaatacaatattttcatcttttagtcctataacttgttgtatttgttagaaatcatgtccacatctcatccatattggttaagtatcttagtgttatatcaccgtgtatatggttgtatatataattttttaatgcggacatcgttgagtttcatgtttgcatttcaggcgtgtttactgaacttatacaacaaattcaagta

SEQ ID NO: 85852 - DNA, 792 bp, Citrus clementina
  Intron number 1 from transcript clementine0.9_013792m (loc us clementine0.9_013792m.g) derived from phytozome v7.0 (c hr-ID scaffold_10; pos 3096180 to 3096971)
ccgtgttcctcactttcatcgctattgtctcactggtaaattctctcctattcctacttcgtgctttcacgcatatttagtcactttgaatctggtatatcagttaatgtgtatgatattatattctgtttggcagcacggagctttttctttctttttttcttttttttaacttcgttgaccatttttggccaattatatttgattttatggtcgcaattttttttctcatttagtccgttttaggttttaatattgacttaacatcttctgttttaatcgtttgaattcaatcttgtagctttgcaaatattaagtgttgtgatcccacctgagtaaagggctttccttggggtgaatcagtgaaatgaagaatgatttcgattggcttgttgttaagttcaatgctgttctaaaatgaacagttcatcaatgtattatcatgggtggtgtttttaatatgtttctcttttgcttaagatttcaataatttgttatttgcttaattatttttttgcttggtgatgcagaggctttaatgtcatgaggccaagcaaacatttggaattacataattaattgtacttccatttctatgacatcagagaaaaaagttgaattgtgctatatttttttccaattacctttttcatttgattatgtatccttgatgttttctaagtgtgccagattctgacaagtctgtttatataataattcacttatgatgcactgtatctaattttaaatattccagatattgatcccatcatcgtcatccatcaaaagtag

SEQ ID NO: 85853 - DNA, 599 bp, Citrus clementina; identical to SEQ ID NO: 81917
  Intron number 2 from transcript clementine0.9_016403m (loc us clementine0.9_016403m.g) derived from phytozome v7.0 (c hr-ID scaffold_3; pos 2027777 to 2028375)

SEQ ID NO: 85854 - DNA, 862 bp, Citrus clementina
  Intron number 1 from transcript clementine0.9_009911m (loc us clementine0.9_009911m.g) derived from phytozome v7.0 (c hr-ID scaffold_4; pos 3339794 to 3340655 reverse strand)
gaagcctgacggctgtgatcttccaaggtgtgatttttaaatttccctttttttttctggttttatgaatgtttcttgaaatgtgatgatttgtggtttttgtttctgttttggattgaatgcattatttatgaattttttcatcagagaagcaattagtatttgttttgaattacatagatacaaatgcacttcttttacttactatatcaacttttctgatactctttttggttgtaatagcttagtaagttgtaatattgcaattttcagaatgtagatgttaggctgcggtatccatgatgggtcttattagttctcctctgtaagatggctcaagtcgtggagaaggagagatgtattctgctgtaagcaaggctacaaaagctacttcttctgaccaattaatagctttaaattaacaaatcaatcttgccatctggatgataatccttttataatccatgtttgatagttgataggagaatcttttcctcatccattggtattgaggttaagaatgcatttgggcatctgaatttctatttctgcattctgttttcacagcaaaatccatatgaagtggtattttatcttgtcatggggagaaatttcataattttcatcattttaaatcttgtagattatttagtagccagtgagcttccagtgttgaatttcctgcttctgcttgccatggaactggcttggattccatgctttcatccttttttggttatattactcaagttgatttgcctacctatacttactactgttttctatttattgcttcctggtttgaaaattttcagatctgttgtatgatattttcttcaatttcctttcattggtaggttta

SEQ ID NO: 85855 - DNA, 261 bp, Citrus clementina
  Intron number 1 from transcript clementine0.9_007924m (loc us clementine0.9_007924m.g) derived from phytozome v7.0 (c hr-ID scaffold_7; pos 1367324 to 1367584)
cacttgaggtcttccattccttccttgtcctcgataatatataaatttaaaatttctctttgctagattgtttttttttcctaagatttatattctttttgaatttatttttttgttgttctcagaattaaatgcctcagccgaaagattctgtcttttatatgaatgtattgtgtacttgtatattttgtgttgtataatttgttttgatgattgtgtttaatttttttaatcttttttaacaacaatgcaggtcattga

SEQ ID NO: 85856 - DNA, 729 bp, Citrus clementina
  Intron number 1 from transcript clementine0.9_014487m (loc us clementine0.9_014487m.g) derived from phytozome v7.0 (c hr-ID scaffold_31; pos 1059234 to 1059962 reverse strand)
actgttttgttaatgtatcaatctctaatctttgtttttttcttctatttactatatattgatataacatatatagtatatatatatatatatatatatatattctctttagtggctttaaacaaaatatagttttacttaaaacctaaagaacagtttgaatatgtcatttttaaaaatccaaaaccctttttatatatcttttgttttaattgcttttacttgtatgctgcttgtgcatccttgttctgcccgcatattcataaatttaaagagactttttccccctaaaagatctgattttttcaattcataggacgattttttcctttctaatttcgatgcaccgaaggccgtgtaatttttcaaaaagacacttatatatgtgattttcatacattagaaattaaaatcaaataaagacttagcctaaatcaaggattaaaatcctctagtgatctatttcttgttgagtgcttttgatgatgccttgagtctattattaatatagtttaaaatttaactactccaactgaaaagcttaagtcgggagtaaatcctagtcttgaaaacatatttgacgataagacaattacaataagaagagtttgcgttactttttatttatttgtcatgagataagaaggaatccatcaacttattaaattaacgatacaacgacacttaacatgacaaattattaattaacaatatcatttcagggctgtg

SEQ ID NO: 85857 - DNA, 539 bp, Citrus clementina
  Intron number 1 from transcript clementine0.9_009204m (loc us clementine0.9_009204m.g) derived from phytozome v7.0 (c hr-ID scaffold_146; pos 301227 to 301765 reverse strand)
tcgccaaggtcttagattttctttcacttagtatttttagatttgatgtagttttaatttcattgtaattgggttctgacttgctaattctaacattttattattgatgtgtgatgaattggtacaggagagaattaagtttgtgatgttgttatttgattgatttgaagatatgggttcacttgaagttcaaatcagtttcatgtttttactaaataatcaagctgggaaatttgaaaattttgggttgctaccatcaaaagttctctttgccttgagatttaaaatgttgttaatgcaagaaatctgtttctggtgctcatttgtgtaacaaaattgaaccgcgtggcttgattttgaaaatttgctttgaacatatgggaagtggttggtcaggcttgtttttgcagtccaccagtggtgtaattcaaattttttttttccctattagaatgcattagttctttcatattcttaatgttcaagaagttgttttgtattctgatgatgaactcatttaacatttttggtaggaattg

SEQ ID NO: 85858 - DNA, 627 bp, Citrus clementina
  Intron number 3 from transcript clementine0.9_013104m (loc us clementine0.9_013104m.g) derived from phytozome v7.0 (c hr-ID scaffold_7; pos 1319941 to 1320567 reverse strand)
ccagtggtcgtactactggtaagttgtttaattaatttgtacaaatattttagttcatttaatttagcattttggacttgagttcactttcaaaatcacctgatctttcaaaaaatatggttttttcacgaagaagctaagtcgtcaattaggtaactttcttcttccttttctttttatttgattgttagtcatcatatgaaagcttaattgcttctcaattggattcttatttctttttctatccaccttttccctgttagtagttagtagttttaattgtcttcaatgccttcactgaactttgccttctttaccttaaatattagatattagtagaatggcattttgcagttgttttgcagagattttgtgatacctagagaaaaaatttgagttatgaaataagtgtgctttaagaagaaagaaaccactgttttccttttggattattcaatatattatgccaaatttatacatgattttttaaagtaatttgggatgttttgcttgtttatgacattaaattatattttaattattctctgatcttgagtaatttctatggaaatgatgacaatctgtgttcaatgctcaattctgcaggtattgtgcttgactctggag

SEQ ID NO: 85859 - DNA, 898 bp, Citrus clementina
  Intron number 1 from transcript clementine0.9_013104m (loc us clementine0.9_013104m.g) derived from phytozome v7.0 (c hr-ID scaffold_7; pos 1321156 to 1322053 reverse strand)
atctcagagaacgtgaattctagtgtttcgataaggtatattctttgttctctcattatctgctccgattttcaaattttatgcgttttttaattttgtttttgtcctttttttttttcaattgatgctggtgcattgtggaattgcttccatttatgtttttttaaattaatttttttgcctgcttgcacagtgatttgaagtgattcttttcgggattgatggtattaattatttcttaaatttaatttgttttcgtttcctctggcactgttagccattttgccagaaatttatggaaatggatggtttagatttgagttgctttgtttttggtccttcgggttaattgtttaccaccgttatttttgctgaggttaatctttttagaggtcaacaagattttttgattgaacgcctcgtatgcatatatgaaaattctatcccatatcgatagtcagtttgatttgcaaaccgatctaaattgggaagtggtaatttaatacttaatgtacaatcttcgtttgcattacaattgcaagatgcggcgtgggagaagttctatttaagtgtatctttccaagttatgccgtagattttgcacctacatagaatttgaattgtaattgctgataaaatggtcgagctctctttgtgtttttgttgttatacattttcgttgaggtgtgtaatatgttatagctgtccatagttttcctgtggaatgattggtggcattgctagatattagctcgttaaaaaactagttctatgatagttaatgacagaaggctgctttcagtcattgctgtgaatgttattgatccgtttatatgtttttcataaataaaatttaattccatatggttacagtgtattctctagcagtcactagaag

SEQ ID NO: 85860 - DNA, 781 bp, Citrus clementina
  Intron number 2 from transcript clementine0.9_019415m (loc us clementine0.9_019415m.g) derived from phytozome v7.0 (c hr-ID scaffold_2; pos 4907907 to 4908687)
ctcatcacggtttgcttttttttttttctgtttaattataattcaattggcattatgaactgtgataaatctgtgattaaattaatatcttttgtgcaatttagtggtagttaattaatttgttgatagagagaagcgtagaaattgtttgagaaatccaggtagtgtgtttgatggttgaagtttgagttacattgtcaaaaggggtttcatttctcttgtttcgtataattttgagagctgcaagcagtgaaatttttgttcttccgagatttatttgattatctgtttgagatctagaaatatacattgttggtttctatataattgaatatggagccccattacacatcagatggtttgctgagttaagaagtttcttccaagtaaaagttttcatttttataacactgatagtttaagtaagaataatgctacaaatcccaaaatttgttccaaaaaattcatcacaatgaggtgtcaatggtatagtagatagtaaaatggtgcaattaataaattaaattagaaattgagaaagtccattgattgttagatatgacacctcattttggatgtgtagcattattgctttaccaattaccagaggtatattgaaaatggttagagtaaattggcgatttttttttaattttttcttttccttttgtgttttctgtttcatttgtaatcatctgtgtccagtatctatttcccagtcctcagtttcatgaaaatgatcagttttacgctttgacaacaacaggcatctatattgggg

SEQ ID NO: 85861 - DNA, 500 bp, Citrus clementina
  Intron number 1 from transcript clementine0.9_017229m (loc us clementine0.9_012247m.g) derived from phytozome v7.0 (c hr-ID scaffold_10; pos 5150952 to 5151451)
acctccttgatagggatattgataatgtaactgctttgattctacctcgccgtatttgattttaatctttgacattttcaataaattttttttcttttttatttgctaataattttggtctttttggttaaattaaataatgccttagtgatgtttttgagctggtactttcgcaaaaccctttattgatactcacatggagaagggagcagaagagctcaaagttcacattgaagtttcgaaaatcagtagacatttatgaattcactaatgatcatctgtaacttgcttagttgttatagtggtttgaatgagtagttttttttttaatttaatttaggtcctgtcaaaatccatccctccatattttttgcgtattcaactgattgtgtgaagtgtttctttgaaaaatgactgtttctttaagagctggatgattttatatttgatatttgtgtaatgcaggtggaacgcacaaggttaaggcccattgcgagtgg

SEQ ID NO: 85862 - DNA, 671 bp, Citrus clementina
  Intron number 2 from transcript clementine0.9_006263m (loc us clementine0.9_006263m.g) derived from phytozome v7.0 (c hr-ID scaffold_2; pos 2137529 to 2138199 reverse strand)
cccaaacaaggccttcttccaactctgtttcagtggtataaactatacacacacttcagttcatttcattcttttgctcatatttcatccttaaatatttattgctgttacttgtttaactttgccttttaggaacagattctcttttgtccatttttagtttcttcctgtttcaggcgatttttaaaactcttggtgcctgtcatttttgcacccttttgtcagtctctgtactgctcataataagcttataatttaagcactagcgcttttgttttttttctttttttcaattggcttacaaatttgaacaagcgtctttggaacacatagagcttctagacttctagttttatgtatatagcatgaaagttatgcgatattttggctcatacacagtttgttaaaatgttatattatttcaatttttaaatttaaaaaaattatatcatattattttgtaaacatagaattgtatcaggactttactagttaaataaacggtaagattcaataaattttgaaaatttcataaaagaaaaggcttattgggacaaattgagttttgagatacattatatgcatatatattgcttatcgtcagttttgatttgataagtttcaatcatttaatctcagcaggaggaatcagttaagaggcaacaagaacc

SEQ ID NO: 85863 - DNA, 589 bp, Citrus clementina
  Intron number 3 from transcript clementine0.9_021474m (loc us clementine0.9_013512m.g) derived from phytozome v7.0 (c hr-ID scaffold_2; pos 3057146 to 3057734 reverse strand)
cttgtcaaattataatcaggattcatcaattagtattcttgtccagcttcctctaccacaagtaatttctacagccataacgtgatccaatttttgcttttactgatctgaaagagaagagcatgtgtcttgattttgaagccttttcaattcaaattagacctcgaactgagaatactggccaatctcaatcttagctcacctctatagagcaatattagaattttcccctggacagacgccatcttgcaaaagtttagacaagtcatagcatgtgattattgccaagtttccttgccaaatggaaaataaatcttaatcgcccaaaattatcgctctataccactgcttcctggtgattaaggggtatccgttagtaaaattttgtctacaatttcctgatttagaattgtttttttttttttctccttttcctctcaaaagacctactacacggtgatcattttgtttatgtgttaactgtttatattcatcagaaagaaaagagaggaagagatatctcttagatattctgaaataaacttaatgttttgacgcaagcctattgatttgtgtgtgcagcatttgg

SEQ ID NO: 85864 - DNA, 495 bp, Citrus clementina; identical to SEQ ID NO: 79946
  Intron number 2 from transcript clementine0.9_021474m (loc us clementine0.9_013512m.g) derived from phytozome v7.0 (c hr-ID scaffold_2; pos 3058020 to 3058514 reverse strand)

SEQ ID NO: 85865 - DNA, 812 bp, Citrus clementina
  Intron number 1 from transcript clementine0.9_000266m (loc us clementine0.9_000266m.g) derived from phytozome v7.0 (c hr-ID scaffold_4; pos 5049550 to 5050361 reverse strand)
agaggttgtggtggctctccccttaccacttctcggtatgcaattaagcaattcaagtttttgatgatgcaatattgtgaccttggatgttttgatacaattaggtggttgtgtcgataagagtagtcatcttcttttttctgagtttgttttatttatttgtttattttccatataaactggatagcaatatgatgaaaagagactaacacttgtagattaactagcaacttttgattgaataagacattgattattgtgttgcttggagtagatgtgagaatttgacaagagaataagtggtcatgcttgaattgattataggaacaggagcagaatgctctttgccaatagccaaggtttttgttgttattttgcataatagtgttttggattgattgggtgggactgctagtgtgtgaattggagtgagggagtttttgggtaagactagtaggactgggaggtagaaagttgacaattcttgggctgcagtagactcaactcatttgtttcttatttgtttgttttaccctccaattgtgtgtgtgtctgagtgtgagggagagaggggacaacttttggtgtcttgcacttgtatgttgttagaaaatgagaaaggggaaaaaaaaaatttatttgcttttatgtatgtgaaataagaagagaaaaattaaaagcatttcattctcaatctctagatgactagtaattttctccaggctcttgttaaaagattattgcaaaaaccgtctgatggtagggcttcttaattacttcattatgtaggttatttacagctgctgacagcg

SEQ ID NO: 85866 - DNA, 743 bp, Citrus clementina
  Intron number 1 from transcript clementine0.9_012687m (loc us clementine0.9_012687m.g) derived from phytozome v7.0 (c hr-ID scaffold_3; pos 4204408 to 4205150)
gacaggggagctcttgttgagttttacgctccttggtaacgttgtttacacttcagtctctctttcgtttctatgtcttatttttagttgtaatttaataatttatccgctgatcgcgattgtttgttatgttatatagatctgtgtgtgaaatggatttatgttaataatgttgagcgtatatgattgcatattagatggcaaggatcaaataaaatgattctttgaggatagcttttgtcaattgaagctgggagacagtcggatcactgatcttgttgaatattaagggaagctgtggtgttgttatattagaagtttgctttgaaggttgtatttggaaaattagaagaaagatgaaatcaattgttagctttatttctctccacagcttttggcaagaggagtgatttgaaagtttattcttcatactttatcggtatcaaagatgatatttttctcgtacgacatttcaccactctttgaaactcttgccgcctcaagccgcaaagtagcaggatagagtttgttaaaaacttgctaaaagtacttaggagtccttaacggttcaggcaaacattctatactcataaaaggctatagaagttttcaagatgtttttgttttttagttgctggtctctgaattatgaatgtcagatgtgtaacctgaaacaatgttcctgaatgcgttttgtgttaaatgtgacaggtgtggccactgtaaaaagcttgctccagagt

SEQ ID NO: 85867 - DNA, 801 bp, Citrus clementina
  Intron number 3 from transcript clementine0.9_021670m (loc us clementine0.9_021670m.g) derived from phytozome v7.0 (c hr-ID scaffold_7; pos 1357539 to 1358339)
cctctacactttcttcttcagatcttgatacagaggtcacttctttcttctcagttgatgcctcggttttattactatgcatttaaaaacttttagcacggaagcgtagatgcattatgttagtccaggcatacaattatttctttgagtaatactatgcatgcatagctaggataacaatcaaatatttaaacttgtgtgatcagttaaataaaatcgtgtaaaaacctcttgagcaagtcatcgagcagtttgaatagactttatttgtacaccattattgtattttcattcaagtactagctttgggtatgatgagtaccagattcatttccttatcttttgattttgttttctttaatctttagttaatttcacggaacaacaaaagcaacttaaaatcccactttactctttccacatgggccgtcatgatggtgtttttgactgcacttgttacttccactaaacccttttaaagattgcagatctctttgtttgagttaaaatatacaaatatggttgtcctcacactcaatgaggttccatgaactgaaaacaagaaagagatgcctactgcctcttggatctctcactgattagaatggtgaaaaaggtttcttatcacgcatgcaagtgaacctagggtcccagaacatgggctaacagatcaatgaatctgtcattgctattaatctctgatcagtcttcctttgtgcctaaacttttgttaatcaattcagatacttattttgtttgatatcagtccactggttcctttttccgcgacaagagcatcac

SEQ ID NO: 85868 - DNA, 587 bp, Citrus clementina
  Intron number 3 from transcript clementine0.9_014019m (loc us clementine0.9_012405m.g) derived from phytozome v7.0 (c hr-ID scaffold_4; pos 4612930 to 4613516 reverse strand)
ggctgaaaagcatattcagaaactattactacttggtgagtagaacacaagacaatcctttcttgtcactagattgtcatttgttatgcatacaattggttaaatattttgcagttttattaaacttgaattccaattattgagggcagaatattggcatcttgcaaggttttttttttactttgctttgctgcattttgaggaatgaaaacattttgataagttgtgaacaacctacacaagaaaattggcaccctttggtaatgaagtagacaagtagattgcaaacatgaggtcgagatttatgtttagcaaacaattatttttttctgtccttgctgaatgctgatgccctccttcagccacctagattcctgccacctcctttactctgcttttaccttcttgaatttgattatattgtgcttttattttctggccttaattctacttccagtactttcaattgaaaacactgtttgttagttcgcattttattttgtttttctttaaggttgatctgtgatataatcaaaattttatgttgtttaggtgctggagagtctgggaagtcaacaatttttaag

SEQ ID NO: 85869 - DNA, 701 bp, Citrus clementina
  Intron number 1 from transcript clementine0.9_017715m (loc us clementine0.9_017645m.g) derived from phytozome v7.0 (c hr-ID scaffold_3; pos 577058 to 577758)
tcgttactgggcttccggctactacgatttgacaggtgcaattcgctatttccttcaattaatttcttcatacatctacattagttacgtatggttttagtataggggttgcattaactaattaggctttgtggcacaaagatcataaagcttacaatattctatcaagctaaaacaaatttgaccactaaatgtggttcctttttttgtgaaagagggagaccattcgaaaaatttccaaggaaatggtcaataagtaatcttttttaaaagtaaagcattaaggcgcatctgcactttagttgctttcttacaggcaccaccgttctgatcctctttgttattgttttttggtttgttattaatgttacccacctttcatttagttaattagagtacttttttttttttaattttcccacacttcaagaaagcaatttaggacccacttccattcaaataataagtgcaatgataatatagaaactagttctttctctgaattattctccaaattaggcttgaatatttagagtaattaaattgaaaacgacgaaagagagagctttactaaacataaggatgtggcagtggcagccttggtacacgtctcttgtcaatccataccaaatagaatacaacgctaattcccattacttttttgcttttgcttttgatgctttcagtagattcttctcacg

SEQ ID NO: 85870 - DNA, 506 bp, Citrus clementina
  Intron number 3 from transcript clementine0.9_017009m (loc us clementine0.9_017009m.g) derived from phytozome v7.0 (c hr-ID scaffold_7; pos 5677654 to 5678159)
tcatcatccggagcactggcaaccatcttggagtggtatgtttcattcttgtatacacaccaagtaggtttggcaaatggcaatttttctccggcttctgcaattagtagtgttcctatttgcccagtcagtcaatgaagcctaagctctgtgatcataatattatctagctggattgccttttgttagtgtgggcagtgggcatgaagatctagagtagaattatgagttctgagatcactagggtatattaagtgatgagatagtccctccattgtattgcttttattttttttttctgtaaatctgcaactggggtttgattcttcattatctctctgctggatatattccaccagtgctggatgatggtacttaagcgttacagaatctgatctatacatatctgaacaatttttaactgctaattaatttatttgtcaacttttgcttgactaatgcacttgcttgcagtgaggactgctcttgtagcactaattgctttc

SEQ ID NO: 85871 - DNA, 407 bp, Citrus clementina
  Intron number 2 from transcript clementine0.9_034074m (loc us clementine0.9_034074m.g) derived from phytozome v7.0 (c hr-ID scaffold_24; pos 2400817 to 2401223)
gacacattggccaacctgaagcaattgaaatacctgtatgatcttttcccctagtattagaatgattgcttactatagttcattcttttctatttggttataactgtttttgatttttatcaggagactcatttcttacctagaagcaagaaatttatgcgaaattatgtacatcttgtgtttttggaaataccttgtactctatcagtcactttagattatatcggtaccaaactaggaccgacctctatttccagatttgatttgcagatatagaggcattaaatcttcaagatgtttttttcttattttctaaaatttttattattgaaaactaaaagtgtttcaacttgtacttctatataaggatagccgactcaacaacaacagcctgtcaggttcaattc

SEQ ID NO: 85872 - DNA, 1051 bp, Citrus clementina
  Intron number 1 from transcript clementine0.9_004528m (loc us clementine0.9_004529m.g) derived from phytozome v7.0 (c hr-ID scaffold_4; pos 6365724 to 6366774 reverse strand)
tctgttttctttcgagatttgagtttaaaatctctgtaagtttttaaattctatgcttataattatttttttaattatcaatttctttgggtaattttatttctaattacggtaaattttttattttttatttttttgtctgttgaaagttagggttttcgattggtttgtagcttttgttgttgttgttgttgttttttttttttttttgtttggggttgaaattgacttacttgctgtgttttttggctgagaaaatgtgaaaatttggagagaaattgaggtttgaattttgaaagtgaggtcttttatcttttttgaggagatgttttgtaattgaaagtgtgaaaaattgggactttatacgaaattgagtttagctttgcccatttcagctgaatttttatttcagtaagtattttcctgaacttcgtgtcatttattcagcaaactaacatagggtttttgctgtgtttgtggctcttcttgctggtttttggtgaaacccgtgttaagctgtgtttggttgctgggaaaatgttggaatttgattagagattttgagatttgaattttgatactgacgtattttatcattttagggaggaaaaaatggaactatttttgcattttacttgatacggcctggttttagtttaatttagctgaattcagggaaaagaaatcataaaccctaataattgagtcgtctttttcttcaactttttgttattttcttagcaaccaaccagaggatttattgaacttacatttttttttctctgtcttgagagttcattcaggcttgcttcatttgtatttatgggttagttttaggtttattttaaggaaaaaaagttttgaagggatttatttatttacttttagaagagtatttgacttaagaattttcagaacttgctgtactatgctagtattaagcaatcaaactgttctgttttctgggatatgaatttgatcgataaataatttacttatatatactatttgtgcagcttttattggcattgagttgtgagagattcttgaa

SEQ ID NO: 85873 - DNA, 766 bp, Citrus clementina
  Intron number 2 from transcript clementine0.9_008363m (loc us clementine0.9_008043m.g) derived from phytozome v7.0 (c hr-ID scaffold_7; pos 4624834 to 4625599 reverse strand)
agattatttggagcattcccccaggataccaccaggttagtttagaaacaagtctattagataaaaatttagtggctttaaattttttgatcagtgtgacaaaaaaagtagtggctttaaattttgtgatcggtgtgagaatcttaggaatttaattagctagtgtttgagttggttgaacatgacatgtttcacgaggttgtttgagttagttaaacgtggattgttcaataagagtgaaatgtttaaattttaaacttggttcatattctgtcgttttcaaattcttaatttgttatgagggtgagctagtcaagttgttatttgggaaattttagatattgaagcaatgatatctgagagaacaatggggcatatgagctttagagtgggtggctgtgaagcttggaaaaatctgaatggggaattggatcacttgatgttgatatagtatacttacagattatggtcaactaattcctttagtaactgcaaaggtactaaacaacatactgatatattaagaagcatgcttgattgtggtaagtcttttttgcatgaagtaatccctttttcttacatagtcaatttgcagttcgtgaagatgtacgtgtttgtttatacccacaaagaaccttcagttaatataggttgtgaacaaaaggttctctttgtctcacatcggcactcatgatctttgaattttgttctcataaagttatgttcttttatattgtacattatgtgcagtacaagttttgtgtgg

SEQ ID NO: 85874 - DNA, 1009 bp, Citrus clementina
  Intron number 2 from transcript clementine0.9_003027m (loc us clementine0.9_003027m.g) derived from phytozome v7.0 (c hr-ID scaffold_4; pos 3565939 to 3566947 reverse strand)
gtggccctttattccttcttcctggcttggtatatctatatatacatacatatatggtgatcctcaattagtttacttgtcttttgaatttttataatattttggataaaaaaaataaagatacacagaaatgtgtgtgagtgtttttaaattttaatctcttagttgaaatacgcattcaacaaatcagacaatcttatatgacacgtgcagttgcattatatgagagaggcttaatatgaccgtctgatcaaatcatgatattcatcttaaaattcatttattcgtatgtattcacaattggtcgatttcaagatgtgcgtgtgtaatcaaaactttattagatgagtgtgcaaatgatgatatcatgtaggactttcttgtacttggacaaattgcgatcttctcattatatatacttaagagccaactttcgggttaaagaaatatgatctccttcttcaaatctttatttattttcgtgaaaattaacgaaaagtaaaggaaaaaaaaattgcaatagtcgtttcactatgttaatgatcccagcctcccgaaatcatatttttttctcttcagaaatcacatcagcaccgatacgagtaaactgaacttcaataattttatcatttttggtattttttaagtctatacatgtctatatagtttaatataaggttgttattagtcacaaagaattgaacaaattcattgtatttacaatttcatgatccccttctctccctttctgttattaaaaaaaaaaaaattgtaggtatttctagcaaaaaaactgctttcaatatcttattcatattgttgtcatcatgacaagcatcagcattctttttttttaaaaaaaaaaaaatctatgcgtattttttaaaattaagattaagattttttttttgaaatctatatatatttttcaaaattaagtcgcatcatttatatatccattttcaaactcaaaatcaatatttatgtgtaataaattatgagacaggtg

SEQ ID NO: 85875 - DNA, 805 bp, Citrus clementina
  Intron number 1 from transcript clementine0.9_010731m (loc us clementine0.9_010731m.g) derived from phytozome v7.0 (c hr-ID scaffold_3; pos 4944853 to 4945657 reverse strand)
gtaccttgctgcaagaggtatgcgtttcgtcttgtgacataatttttgttatctttgggttattgctgactgttttgaagttttgttatgtgagctaataagaattagtgctctcaagtctactggttcttggtgttttgctttcttttagtgtttggtttttcattctctgaaatgagttatcgatgcttttgtggtaagctagaagccctgccaagcagaatgaaccattgtagaaaaagtgaggctttcattgttatgcatttgcggcatgaaaatcttgagatggtgatcggccttactttatatctgttgagctgctctagatactggctttttgaatattcttttttgtttttaatttcagcatgtcctaacaataatgaaatgcacagtagcatagttaaagatctggaaactgcgaaatgtcgttgcttaaacacgatttcaaccttttattttgtttctatcatgctttttattgcttgctgattccaatgctgtatgctattgcagatttgttcttttcaggcctgttcttggcttgttgtgtctttgctctttgcctgtaactgattttaagttgaaccattaatcgttgccttcctatttgtgcccgcaaaatataaagtatcacatcttctttggtttcatcatgtccctttggacactgagacttttcattatgaattcgttcaatgtatatctttatgttttcttatggtacaaaatttccagaaaggttggtactaaacaaataccaaatataggtgagaaggggtgctgatagagcagagatctacag

SEQ ID NO: 85876 - DNA, 671 bp, Citrus clementina
  Intron number 3 from transcript clementine0.9_024410m (loc us clementine0.9_024410m.g) derived from phytozome v7.0 (c hr-ID scaffold_7; pos 3311848 to 3312518)
ttgcctggttctatttaacgtactggacctaagtggtgagttcatacaactttaaataggttacttttgtggttaatttgagggaaaaagatagcgagaacaaagttttgaattcttcaatgtgattttgttttatagaagtattttaatatgtttaaagcatcagcatttttatctaactgagaagatatttgtaaattttcctttgtacgaccatgcttcttgaagttcgttttcttttgttgctacattttgctgcaaagcatatgcaggatcgtctgcagtaagttctccaatattttgcatgcaaatttgcagttgtgctgttcaattctatggggatttgttcatatcagtaaattatgtatttcagtggcattcttgaatgctttacataaattaggttgaaatagatattctaatgagctccatgtgtactaatttttaaatttttttttccttgaatgggtgagcagttatgtgaattgaataattttcatattacatggtggattgtctcatcaaaaactcattaaactcattgtggcagctattaccacatttattgatttttggaacagtgaagtctgaacttcatctatttctatgttgttgtgagaatgaagtgacattttctttttgtatggtagggagcatcagggcctgtaaga

SEQ ID NO: 85877 - DNA, 612 bp, Citrus clementina; identical to SEQ ID NO: 81397
  Intron number 1 from transcript clementine0.9_020413m (loc us clementine0.9_017797m.g) derived from phytozome v7.0 (c hr-ID scaffold_24; pos 535990 to 536601)

SEQ ID NO: 85878 - DNA, 660 bp, Citrus clementina
  Intron number 1 from transcript clementine0.9_017425m (loc us clementine0.9_017425m.g) derived from phytozome v7.0 (c hr-ID scaffold_3; pos 7839024 to 7839683 reverse strand)
tttgatttcaattcattcgagctgcccgctccttggtactactaaaattctttgacttttggtttgctattggtgtggtttagttgaatttggtcatctgttattttcgttaggattggcttttttatttcttgaagtgaatgctttgattatgatttttcggtagttttctctcacaatctgattagatggagttgaatttgcccttaatttagcttttaatcttttaaagtaaattttattttcttatgcatgaatttctttctagccatttggagtctgtttgtagcatcggtgtttctgcttaattttgaaaacatagttgctaaagtgtgtagtaaacacccacattttactttgcagctaatgtttagtcactgcctccccatttatgctcactgctagtgattctatttcacaatagctgttgattgagagctataaaaccttaatcccaaacgtatgcttcaaattgtatagtcgaggaactttctgactgtgttttgtgctagttctcttcagagttagtcaaagttttctgatggaatttagagctttggtggttaattttgctgattttattgggtcatgaggcagttatatggttgtgtaattggtgcttttttttttttttttggtggcaggttcatctactcattt

SEQ ID NO: 85879 - DNA, 452 bp, Citrus clementina
  Intron number 3 from transcript clementine0.9_018688m (loc us clementine0.9_015340m.g) derived from phytozome v7.0 (c hr-ID scaffold_7; pos 4689921 to 4690372 reverse strand)
attgaaaacattcgctgctggttcttccaaggcaggtatatgacatcatgttacatcagtataaattttttgacttttatgaaatgctgttttgctaaaaaattgatctacgtgtaagattgaatgtagtaacttgctatctacctatgaatattggtatatgacatcattgtttcctttggttaactgcttatgttgtggaaacttttgtaacttgtctgaagtagtttggtacagacttgtttatttctaattttttccttggaagtctgctagttcttcatccttttctgttgtttggaggcgcatacactgtttgatttggatttttcttgtgtttatatgattattttttaatgtttcagcttttatttgctttctcacaggttatgggctcattgttctgttgttttgcagaaaatcatattaatttaagcgcttacttgtcttat

SEQ ID NO: 85880 - DNA, 875 bp, Citrus clementina
  Intron number 1 from transcript clementine0.9_019878m (loc us clementine0.9_019877m.g) derived from phytozome v7.0 (c hr-ID scaffold_3; pos 8365966 to 8366840 reverse strand)
aatcgcttttgggaaattttagtaacctctactcggtgaatatgggttattccggtttactttatgctgcttgtaaacaatttttgtacttattttcctttcatttaactttgtcaccctgtcttggtatcaatgatgacgtttgtttactcattttggttttaagttgtttatacaatctaagcaggagtccgctatttgattttagctcgtatttagcggcacctataagtagtattttgctcatgatttttttttttttttttttttgaagagttctttagttgctttacttggtaactggagctagctaacaaccataactattgggttaattttagctggagatatatttgttttaaaaaaagctggtcattagctcacattgtaggagttttgatggttagtggtcaattgacgcaagggaactttcttgcttcataaaaatttgctattcctcctttgtgcagtttagtttgcttctccataggaaattacatgctttcatcctgttatacttgcagtgagctcaaattgctgctccaagtaactaatggttcaaattatatttgcctaaatattattttttgtcactgaagttttccttttaatcaaattacttgaaaagatgtatatcttttgatgctgttttccttgtctgatagcattctgtttttgcttttcttcatgttcatttttcaattattgactgccatcctattttcatttaagtatattactgttactgttcagattgctttttttttttttaatccaatagtagttttaatttataattttttcccaataggaattcagattcttaggcattctctgtttaatctgtttttggtgatcctagaagccaacggtat

SEQ ID NO: 85881 - DNA, 747 bp, Citrus clementina
  Intron number 2 from transcript clementine0.9_024168m (loc us clementine0.9_024168m.g) derived from phytozome v7.0 (c hr-ID scaffold_10; pos 3929641 to 3930387 reverse strand)
caaattcagaagcggaattgagtgattcaaataaggtatgtgatataggatttattaatgtagtctatttaatgagctatagcctttcaaattgacattcttttgattattattaagtttattaatagtgtgatgtgtttagcttgagcttttcttctatattgttcgtcttagttaatgtccacgagaaaatgagagcgagtaaatatccatattttgagagtttgtatctgatggatgacccatcactagactaaacaaagttactgtaagtaaggagtggcatgttgatttcgtgatataggttacacacgaggtgaaaattatgatattcagaataggagctcttttcgaaatcatgatcaattttcccaactctctcaatttagtaaaggattgtgggtgccatctagtttagttggtgaaacctcttgggctgatatagtaggtctcggttttgaaccctaatggtgaggagatttaaatattcagttaccagtcatgctatgtcttataaaaggtcgattcaatactcttaagtgttcccttcttaggttttaggataatctaaatgtgatgttagtaagtgagattgcctggcagtgggataactatttcatgtctaacaaatttcctgatattctgctgttgcttgcgaccaaacaacatgtatcttttaatttattagtgattaaatatttacctctttttaacttgtttttttgtcccacatggcgtatatgcagg

SEQ ID NO: 85882 - DNA, 595 bp, Citrus clementina
  Intron number 2 from transcript clementine0.9_033180m (loc us clementine0.9_033180m.g) derived from phytozome v7.0 (c hr-ID scaffold_3; pos 1399956 to 1400550 reverse strand)
gcaagatattggaagatcggggtggaatagatccggtatttaatactgttaaacatatatacagctgttaatatatctatatttgtaatactatgttcaaaggaaaggaaatggatgttacagaacctatttatatttgcttttgcttttgcttttgtgatttggcatttacactaaccactttcccgctcaaacccccccacaaaaaaaacagttaaactagtggtgtgttaatcatatggagctatcaataattaattttatgtaccttgtcagcagcgtctaatgataattttgtaaggcctgtcagcagcgtctactttcacattgactgaaggatttctttttcttcttcttttatatttttaaacttttttttttctaatgttgtactgtaacttctttttgggtaactgtacagatgctaaaactgcaactctgaagtttttaagtgcaatgtcgttgaggttttgtgagcattctttagtcactatatgttagaacataaggttcatgaggacctatttgagttattaatagttttgtaagaaacttttatctattttttgcttaagacaggtgggccttgactcgc

SEQ ID NO: 85883 - DNA, 667 bp, Citrus clementina
  Intron number 1 from transcript clementine0.9_014597m (loc us clementine0.9_014591m.g) derived from phytozome v7.0 (c hr-ID scaffold_7; pos 3723241 to 3723907 reverse strand)
tacaagaaggctcaagccagtttctggaccggtagtttctctttttctttatctttaactgtctgttaaccgtctcagcccctttttttcttttttctttcttctttttttattgttctcttgttgatatttggccttgtcttagcatttgtttatgggggtatctttttgtttttatcaaatacgaattgaatcgtgtgtttagcgagtccatgtttattcgtgaatgtagttactttgtgttgtctttccattgttggtgagttttattggggatgtgctttatatgttttttgtttttcgtcaattttgtaaattttatgattagaccttacacttgaataatgctctttgagaattggagtatgtttgtctatgtgctgcaaaatggttctttaatttttttttcccctaatattatggttattttgaaatatttttggaaaattttttatttctctctgttaagatttgatgtaggcatgaattcttatttaattggccaatatgtgtttgtggacctggattggggatacttttgtcttgtgctcttagtaactgattcgtttataaatgtgtatgtttattcttcacctatttgctttttccctaccataagttctgatctgttgtgggtttacagccgaggaggttgatctttcccagg

SEQ ID NO: 85884 - DNA, 693 bp, Citrus clementina
  Intron number 1 from transcript clementine0.9_018291m (loc us clementine0.9_016429m.g) derived from phytozome v7.0 (c hr-ID scaffold_2; pos 5170950 to 5171642 reverse strand)
gctagctcaggggttctttctgcaatcaccagaaggtaagtcacaacaaaccaaatcaggtttttgctttcatcttcagtgtttttttttttttttaatttttatcaactgatccaacagctactcatctcatgcttatgacacttatttagtactaattcagaaaacatacacaaatgatttattcatcaccaatatctttctattcaaagcgagtactcgagctatctgcactctttttctatcctaagtttacagtaacaatttttgtgtatacttcactttaaaacattaatgttacaggattgtacataattaatggcttagattttcagatctactggtttgactcgaaattacagagaaaggctcttttccagtcaatttgaaaatagacagaaatatctttcaagatttcaaaattgttatggttttttctccctcatatttcagattcaattacatccctttactattaaaaagattctcctactttcaacgcctttttttcctcctagaattgattcgcttttttttttttttttagtgataattcattggattggaatctacctgcacaaagatctataagtaagttagtttgtaaaaccctcgaaaaaaaatataacatttcaaggtttgcatctggattgtgtaggctagagggcaaggtagcctttattactggagggg

SEQ ID NO: 85885 - DNA, 298 bp, Citrus clementina
  Intron number 1 from transcript clementine0.9_029222m (loc us clementine0.9_029222m.g) derived from phytozome v7.0 (c hr-ID scaffold_2; pos 5326604 to 5326901)
ctttgtttcaggttctgtctctgtctgttcttcagtaatatggttgcttcagcaaaacttgtacatcaacagacagactaggttcaaacagttgaaaatttcttctcttcataataacaattgaaattttttgaatccattagtgacttggtgtagacaccatataaacacattagccgtgtctgttgtgattatgtcatatatcttaagaaaggtgtatgaaatagcattcaagttttctctgtaaatcaaaatgtgagtgtggatttttatgactgaatgatgaaataacaggtct

SEQ ID NO: 85886 - DNA, 600 bp, Citrus clementina
  Intron number 2 from transcript clementine0.9_020316m (loc us clementine0.9_020316m.g) derived from phytozome v7.0 (c hr-ID scaffold_7; pos 2776516 to 2777115)
gaactaccaggttcatttttctatttatcatttttttttaggcaaatgctaagttacaaagattgtaacttacatctctcatgtgaactacataaattacgagttttataattttgtgtgattcacatgagaagtgtaagttacaattattgtaacttaaaggctccatttttttttatattatcacatgtttcgatatgtaaaggaaattacaaacatagacatcttatatatatatattccaaattaccagtgataaacaattagttaaataaattatattaaaaaaacaaaaagctatctagtcaaactgtaacccatataatcgaataacttatttaatctcaagtgttaaaattaaaatagagaaaaaatgttagaaaaacaaaataaaaaattaataatttattatagacttaaatggtaaaaaaataataataatagagacccaaaatgttattcctcataaacataattcagaaaggcttgcaaaaccatgtttgatgttattttctaatttactatttagattgccacgttgctctaattctaaacatactctgatttctttgctcgtgtatgaattatgaaaggctctat

SEQ ID NO: 85887 - DNA, 670 bp, Citrus clementina
  Intron number 1 from transcript clementine0.9_007129m (loc us clementine0.9_007129m.g) derived from phytozome v7.0 (c hr-ID scaffold_2; pos 6004695 to 6005364)
cgccggaaccctccccgattcgccacaaaaaagaggtttgttttattttgtcttttctatgtcatatttgtttaataattactgcacaacgagtaaactcgtgagccagctgagctgactgggtttgacatgtttgaattgtcggcaattacggtcatttctcgcaactttgcccggaatgtctgtgttgaatgtcaaataggccctgcttttaattgtataatttgcaaaagatccgtctctttacagggttataaatgtcatttgattatttgtttgtatgttcatgtaagcgtacttctgatcttgtctctgccatgcaaatcttttgattatgttagtgtctagaaaattattttccgaaagaggacaaatcttcttgttttttcttttgtttcttatcaatgaaatcccgacgtcctttttttagtaaattgctattttcagctgtatttttttgaaaattacaagtgaagtcaacaagggccaccgactctgattggaaattcacattcctaattcacaaattatgaagattaaatgcattgtagttattaactcaaatacaataatgtcttgtttgtggttgttatgaaaatttaataaggaattgtgggcaatgtcttaatcacgctataataattgtttaataaataggagcaggagaatc

SEQ ID NO: 85888 - DNA, 875 bp, Citrus clementina
  Intron number 2 from transcript clementine0.9_020270m (loc us clementine0.9_020270m.g) derived from phytozome v7.0 (c hr-ID scaffold_7; pos 5657561 to 5658435 reverse strand)
actgttcctcagaaagctaatcagctttactgcaggtacttacggaatcttcttcagcttagagtttgattcttggctattatgatagttgtggtgattgcattgaattttggaagcatgatacttatggggtgattttgattaatgttcaaatgatttgccaacttgatttgactgccaaactgaactgcgtgattgtcaaatttcatggttcttgtttaattattctttcatttaactcgatgtgggacaagctgtttagaaaatcttctttaaaacataactctctgaacctaggattctaaatttcttacgcctgcatttgggtgtatagttcacatttgatggtcatggtcgcatcacctcagaatgattcaaatttgttgccttgttggttgataataactattcctcagctagaccttctcatcaagcccatgatcgtaattcttctcatcatagaattaggggtttctccattccttaaaagtgtcctaaagtttgtagtttgtattggattagtagatcttcctttagaatctatagaaaaagatatattaactcataactatgttattgacgactatcgaggatgtggaaaatcatattagttcataacattggatcgctggcatataatgatgatgatgaaaatgctgtgcctttttgtattttgtacatttacaattaagcttttagtttgtgacgcatagtttcaagctgctggtataaaattattgttttaatctaggattaaaaccagcgcattacttttggttctaatgaaaggggaatcacgatgaggtacttgaaatgatccataaccaccagaaaagtcatcctttttcactatctgcagatttctggagagttta

SEQ ID NO: 85889 - DNA, 579 bp, Citrus clementina
  Intron number 1 from transcript clementine0.9_020270m (loc us clementine0.9_020270m.g) derived from phytozome v7.0 (c hr-ID scaffold_7; pos 5658587 to 5659165 reverse strand)
gctggtctcttctttgctactgcttactaattcatttgtttatttgttctgtcaaaagtgaaaatcatgaacatactaagttcccatattttcaatttcttacgatattgatggaatctgttattgattaagcaactcactttggtacgtatatattttagtaatcttttgtgcaaagatttgctttttcgaattttaacatgtcgcggatgtcgtgaaaaaatgactaaagttcaactgatgttggtcacattatgatgagtaacattgtcacgtgaggactcatggttaatccacaacatcaattttcttttctcaaaggtgttattgaattatgtcatttgtttagttgctcactataattgtgctgcgtagttcctcactagattattttatgcgtgtggatattaaaaaggtgctagacttgtgaaccaggttgtaaatttggctgttttagcctaaaatccccttttatttttttaagttgaaataatttgtgctgtgttctgattcactgtgagcatggttctctttggttatgcagggacaagattacatatttgttagggagtttgtcgc

SEQ ID NO: 85890 - DNA, 721 bp, Citrus clementina
  Intron number 1 from transcript clementine0.9_005954m (loc us clementine0.9_005532m.g) derived from phytozome v7.0 (c hr-ID scaffold_4; pos 7502082 to 7502802 reverse strand)
ttcttctctctcagcaccctattttcctttcaaaggtatgttttcattttacttttttttttttttctatagttagtttgcatgtttaagcaaaagtttggacttggaatcatcttctatcttctaataagctttgttaactcagttgtttagaaataacaaataattgttatcaatgtggaatttgaagttctccaatgtttctatatgctgtctcttcaccgtctgcaattagtggccaaatcaagatctttgatttgagggttattttgttataaataataactaacagaggttacagtatgttaaagactacttatagaggacatctttgtatgatatggaggggtcattttgtggtgaatgacatttaacaggagccaaaatacaaataagatatacacgggtcctgccttcaatatttttgctacaaaattgggagaggttgagttcataatcattgatcattgatggttctgtttttagttttaatttgtagtaacaagcttcgatcatataatttgatctcagtcacttaaagtcaatatagagttggctcaatctgaccaaaataaaaatctaatgttaattacatagtgtctggttatgatttgttgaagttttaagtgattttttaatttatctgattgaatgaatacttaatatgatactgaggagttttgagatgactgaatttggtacagattacaaagaaccaaca

SEQ ID NO: 85891 - DNA, 1001 bp, Citrus clementina
  Intron number 1 from transcript clementine0.9_022252m (loc us clementine0.9_022252m.g) derived from phytozome v7.0 (c hr-ID scaffold_24; pos 2178103 to 2179103 reverse strand)
acttcgaaataatctccggccgccttgctgttggtttttctttctagctttttatttatttatttatgttttttgcatgtaaaagtaagatcgtcggattgcttgactttctcatcgatcaactaaatcggaagatcatcgtgattttactgtgtgatagagtgataaaataataaataaagaatttagaagatttttttttttgtgtttcatttatttagttatgggcaaaagtaatttgtaccaaatacttcagcattttcgtttaggaacaaaagtaatttgtaatgataaatgtaaataatgcctaagaaaaatcaaattcttttaagttaattacatttgcaccgttgattttgaagtccggctacgtcatgcctatcctgtatgaaagtgttttggatttgaaaaataatatttatatggaaaataccataaaattaatttaatataaaaataacataagacaaaaattattgtcttaatagtgaacttttatttttatcttgtagttaatttttttgtcttctagtgatgatgtgttattttttctgtacaaattacagttgttttggttttgtcaaatgtaacctcaaatctcttaacaaaatttttataccagttcttaaagaacacaagatcaccttaaagttagcaagagtagaacacaaattatggcagagatgttttgatttgccgcaaatgaaattcatgagacatgtatgattgttgaaaatctctttgctgcattttgtggctaatgcaggcaggctatatagttcacgccaatcgtgaatcgttgtcgtaaagaacacaagatttttaaatttctggttctgttcctattctcaaacacattctttatctgtaaatttctatcaaccaaatgattttgcctttggatcaaaaataatttacccagcaatctcacaggggtgtacagagtgttacagatcccttggtttttgttgtgcaggttgtgtttgccgtaactgtgacaa

SEQ ID NO: 85892 - DNA, 450 bp, Citrus clementina
  Intron number 1 from transcript clementine0.9_003523m (loc us clementine0.9_003523m.g) derived from phytozome v7.0 (c hr-ID scaffold_14; pos 2637276 to 2637725)
caagatcagaggtatggaccacctgttgaattattattatgattattttgtgatttgttatggggtttatttgctcatgaagtttttgttttagttatagtgattgttgttttatcaattgtctttcagttaatttattcttttttgagtgtttgggctaggattctattgttgttagtagataagagaattgtggaaaaataaattaattgcaatttgaatataaaatgtgatctgggttaactgtaaattcattttggaaattctgtagaattaatatattctgggaagtgactgggttatggttccttagcccaagaaagacatggagatttgattcattaattgtgaatataggttaaaaatgttaatctttaaagcttcttcttaatctgctttgcagttttctttttgacttattgtttcttatgaattaggacaaattccggc

SEQ ID NO: 85893 - DNA, 692 bp, Citrus clementina
  Intron number 2 from transcript clementine0.9_014029m (loc us clementine0.9_014029m.g) derived from phytozome v7.0 (c hr-ID scaffold_10; pos 2674177 to 2674868)
aaactcttctgctgccaagcgtgctagaactggtatgcattttcttttttgttttctttattgctgtaagtaattaccgcccgtttggatttcttgaacgacttcacaactatgtatatattctgaattttgttgtattttcttgtgcatgtctcagtattgacccatttgtacgagtactaggatgtttaggttgcttacatatacactaggagcatgccagtctgcaatggagtagacccaagattaaataatcactagtctaaattttatttgatcaatagtttttgcgatgaaagtatcatgtacaatttgattgcttttgattcccaaaggtgaatactgagagactatttcatcaacaagatgattgtattggttatttgatctttgctaaagtgcaattgcaaacttaataaatcctgcttccaatttggtcttttaatgacttgagtggttccacaaacattctgataaattaaacatatgaagaaggttccactgtctttgattctttctaaaaggaaatgcatgctttgttgtgcatgactactgcgtgccatgtagttatattgtattagacattgaatatattactccacaggaccaagatttgatgtttctgatattttagttatgacatcaagacttgataatcgaattcttggtaaccgtaggtagtcggagggaag

SEQ ID NO: 85894 - DNA, 718 bp, Citrus clementina
  Intron number 1 from transcript clementine0.9_020839m (loc us clementine0.9_020839m.g) derived from phytozome v7.0 (c hr-ID scaffold_3; pos 9080977 to 9081694)
agaagctttacatcttctattctataacatgtatgtattgtatttcttatgctactttttctttctttctttctctctctgagacagattagctttagagagaaagaagatttgtactgatttttttgcatgttcaagctctagatcttgatgatatttgatacaatcatctgtgattcctttgttattttattttgtctggtgaacgaattcatcagcttcagttttgattttctctctaaattttacgttttctgactcctctgaattgcaccaatcaacaaaagggggaaaaaaaacacccagattggagaatccatcttttttgtgttcttcatcttcaattttactatcttcttgatttgatttgattttcacttctgggttttttgagttcatgaagaaaagcttttgatttgaagaaagctaaacattctttcctgtcatttttttccgaaagaagaagactcactgaattagccaaagaaaaattccatcttttcagttcaccgcatctattttgtttttgttttccctccctcacttctgagtttttaatctagaaaaaatacattggatttgctgacaaaacggctgaattagccaaaattttgttcttttccttgattttcctcttctgggtctgttttggaaacccaacttgatgtataaacaagctgaaatttttctgggtttttatggttttttggctgtagga

SEQ ID NO: 85895 - DNA, 845 bp, Citrus clementina
  Intron number 2 from transcript clementine0.9_033915m (loc us clementine0.9_033915m.g) derived from phytozome v7.0 (c hr-ID scaffold_2; pos 5299755 to 5300599 reverse strand)
cctcaacgtcatctagtagtgcaactcccccaccggtatcatcatcaattatgatctatgccatcatcatcatcttcttaattattagattcttcaatagccaatacatctcatttttcagtaattagcttattagggctaagtcaattcatcaccattgatcatcatctatgatatatttgaatatcttttacctatatggatcctcatgacttcatctgttttaatttgatgtggaaaaaaaaaaaaaacctagctagtgaagttcaatatttgactttaggaagagtcagcatcatttattgtttcatgagactgaatcaaggttgaaatgtatcgttaaacccaagtacgtactgcttcaagatcaattgagagaataaatgattctttagcttacttttgaatatattacttaccctaaaatatgagtacttctcttcttcatgccaaaaatctatagacctcttgttctggaaattaagttatatctattaagagtattgttagaaagaaggattattcactaattgtaaggatcatgtttcgagttagttttgttttggacatttaagatttcaccaagttaaactttaatgtttttgttaaagtattgcacgagagatttcatcatttcaatgtaacctttttttttttcctaagaaatgacatccccaaagaaggattttagggaggtcattagcatctgcagtgcttcccacaagaatggaaaggcagtcaccatgatatagatttatcatttcaacttccatctacaaattaagtttctagtcttaacagaaatcatatctgaaaatctaattatttaattttgcaggtaaggc

SEQ ID NO: 85896 - DNA, 547 bp, Citrus clementina
  Intron number 1 from transcript clementine0.9_033915m (loc us clementine0.9_033915m.g) derived from phytozome v7.0 (c hr-ID scaffold_2; pos 5300829 to 5301375 reverse strand)
ggatctcccgcgtaaatacatctctctctttaatattctcatattttcaattttttgttttttttgtttttttgtttttgatgctttcagctcaaacgggttcttgaagaagtggctagctagcaacgatcaaatgtattatatagcatgatttcatgtttaccaacacatcctttacaaattttggccataagtgcatgcactttggctcaaaattctaattactacatatactttgaagttaattcctttgattttttattttctttaaagatcatcaagattattattagtgttttataggaagaaagcttaattttcactttcagaatgttcgatttcatcatcgcccttgaaaactccataattaaatccaaattaattggcacggagttaacttattaatcaaagatcgcaacgtttaattaatatattattttctttctttctttcttttcaattttgggttgttcttgatatgttattgaattgatttaaatttttggttgcagaattttcacaactgctgtgccatagagatcctgaa

SEQ ID NO: 85897 - DNA, 528 bp, Citrus clementina
  Intron number 2 from transcript clementine0.9_017762m (loc us clementine0.9_012719m.g) derived from phytozome v7.0 (c hr-ID scaffold_2; pos 5409108 to 5409635)
agcccgtgtcttggttcgcactaccatagcaagatgtaggttcgtttctaaatcttggtatcttttgataaatctctctggttcggtgttctgtcatgctttggatgaacatagagatcagagttgattattttagttacatatgaatgttcttatctctgtggacattgcatcaattattcataatttgctataagattgcgatagtaattagtaacttgcaggcttgtgatgaagcaaatatgagctaacaagtatgaatctgaaatcatttagcatatgcttgcactataaattttcatattaacttgcaacttaaacctttgactaaagctcaccattaataaaaaaattttagaaagggtattgactgttaagtctactgaattctgagttcaaagatctacttatatgttgtggatactgctttgaattttgtattaaggtcaaatataccacatgtagaatattaagaatgtttgtttcttactagatcagacaaattgtcaagtaaatccaagatccttg

SEQ ID NO: 85898 - DNA, 605 bp, Citrus clementina
  Intron number 2 from transcript clementine0.9_034384m (loc us clementine0.9_034384m.g) derived from phytozome v7.0 (c hr-ID scaffold_3; pos 5003140 to 5003744 reverse strand)
ccatccggaagtatccgaagttttcatacacataggtgtgtttcctggtctctggtctctggtctcatcatctttgtaatagttttggacaatctagaatggagctacttttagttgctattttcactgtagccatgagtttttggattgaataatgtatcagttagtatcttgtttcttgacttttaaaagtaaaatgatttctaggtttggtgtttgcaccttcaggctctgacaaacattcttttacctcttaatagtaaaccagtggtcattaattatgatggttgaggtcactgcaagcagcatgctattcattgttgctccatatatgagatttattggtgttatcccgtcttgcttaccgccggtagaattcgactttacggatacaattttctattaggatcccatcatcttgattatccttgctcattgtaattgtagtaatgtttcttattatcactattcctgctgtcaagacttcactaatttctttgctttgatttgttctcaacatttttgcctttcatttccaatgtaacatcctttttttttgaatgccctttgtagatcctgcatattttcaattttctcctagtaca

SEQ ID NO: 85899 - DNA, 625 bp, Citrus clementina
  Intron number 1 from transcript clementine0.9_002472m (loc us clementine0.9_002472m.g) derived from phytozome v7.0 (c hr-ID scaffold_4; pos 3048403 to 3049027)
gatcttcgtagagtcacagctgattctagaagaaggtaacctttgcttatatttgttgattttttttttttttggatgcttgcattttgtttgaaacgaactccgaaaaatacccaaaaagtttcaatttttcattttccatgacgattttctaatggcggctataaactccttgattccttcagcttggaacttctatatatatatatataatctagcttggctacataaagtaggttgatgttgatcctttgagaactgtgtttgccttgtttgattgagatcatgcttaagtttcttgatgttttgttgtttccgtgctgtggtaggggagtcctctcctggggctaatagaggccaattggtactgtgaatattatgctaagttggttatatcaagtttgattaacttgttttatgaaaaattttgaagcttagttttgctatgaactatttgaagatttttatttatttatttattttttggtgcttgttattttgtattctatgtcatgttttgtggtacttgatcaagatgctatgttagtgtaacttctctatgttatggtctaagattctttttgaggctgttagatataagttgaagttttttgttatgttagat

SEQ ID NO: 85900 - DNA, 797 bp, Citrus clementina
  Intron number 1 from transcript clementine0.9_021102m (loc us clementine0.9_021102m.g) derived from phytozome v7.0 (c hr-ID scaffold_2; pos 1804522 to 1805318)
tctggcgcccctggccatcttatctgttgtcttaggttattggaagcatcgagacagttcaatacttgtaatatcaacataagagcatcttcaagtaaaggcagatttgaccgttgacaaggcattttggacgtcatcatccgctcaacaagatttcacatttcagcatcaacattttcttttaattatataagtagtttctatttctataactcaaaactcttataatttttttaaaaaatagctttttattaaaatcaaaatggggtgatgtaaaatattttctaaaagaatcattttgttatttttttcattcaaaaaataagaaaaggattaaagtatcttttaattatttaaataatctcatttaaaaaaaattgtaaaatttttttggggggtgtctaaaggcctgctcatgattctattaaaagcaacggactgaagtctagctggtccaagtcaggttttcgaagggcagcccaggcccagttgtttagtgtgttaaggtttaatctaactgagttacgcaggcccagttagcatggtgaaagtagataataacgctatcctgatatgttatatccaattcattttcctttgtctagaaccctccacctttctccacgtaatactcgacgtgtctccgcccccaaactctttaccaccttctctcgacgccacgaaagttctcgcaacacgtgtcactccacccataaacacgatactctttatagcaatcactttcaacccagctatcctcagcgtcaatctgtgcaattttatccagccgaagagct

SEQ ID NO: 85901 - DNA, 587 bp, Citrus clementina
  Intron number 3 from transcript clementine0.9_016282m (loc us clementine0.9_015852m.g) derived from phytozome v7.0 (c hr-ID scaffold_4; pos 3487745 to 3488331)
ttgttgaagatgtatccaaatgatcatgttatgtatttttctcttcaacttactagattatgttcacgcttgtcttcttggattcatttatgctactgtttccagtttcttgttagttccctttaaagctcaattcataatcatagtaatttcaatagtgtgacagtccaccatttgttttgagtctgcacttttcgggacttgttttcgatcaatggactgaatgaataaacatgggtttgttgtgaaggacatttcaaggtgtgctagaaagcgaatacagcatctagttttgtattctatgtacatatatctgtggttgctgcaggttcacttgttgaggattatacgtgcatgaaaactgacacagtgtgatgtttactatttgccctttgttgtcctgactacataatctagattcagtggccattaaaactcggtctgcctgcttgaaatccacctcctatactattgttctgttgttattggttgctcgctaatgtccccattactagtgattcttgttcctggaacatcttttgctattccttaatgcaagaaatcacaggatcagattgtttttcctc

SEQ ID NO: 85902 - DNA, 482 bp, Citrus clementina
  Intron number 1 from transcript clementine0.9_008323m (loc us clementine0.9_008323m.g) derived from phytozome v7.0 (c hr-ID scaffold_2; pos 427732 to 428213)
ggagctctgaattgaacgtgccagtgctcaaagaggtaaacatttgacaaatttatgtctgaggtttgaggtcacatgaatgaattgcattttgtagattgaaaagatccaatttttttttttttttttaatattgaatgctcagttacaaacgttatgcctgcctttggaatatgaaatgcttaagggaatgttgttatggaataggatcactagttattgactggttggtaaatattaatggtgtgatttcaaatttaagcacaagtacggcagttatgatctttttgtttttgtaaatgatctttttgctcacctcaagggaggacaatttgaatgaaatggttgaacggggtggaattagatgggccaaattgtaaagcaagtaatgaaatgaaattagtttgttgactgaatgtgtaattcttcttatctaatctactgcaggctaaaattttccacttcaattctgaagttttgat

SEQ ID NO: 85903 - DNA, 667 bp, Citrus clementina
  Intron number 1 from transcript clementine0.9_000102m (loc us clementine0.9_000104m.g) derived from phytozome v7.0 (c hr-ID scaffold_31; pos 1206043 to 1206709 reverse strand)
ttcttgaggttcttttatttttttttttgcaatcagtaagtttactttcatttgcatttcaatttgccgatattcaattttcaagtttagttgaatttctgctccgtttggttgctgagaaaatttttttggggggacatggaaagagaaggaaagtttaggatcttatttttattatttgttttaggtttgcttgattttgattgcctaggattttagatagaacctcattcagagtttgcttaatctcattgtcattatagtaagctcgctcttaagtttttttttttttttgggattcgcagtcagtaagatattgtcatttttgtttttgtttttgtaattgtctttttactttccaattttatttccagttgagtcggcttcgtttagtttttgacaatgttttggaatggaaattagaagaaaatgagatttgggaatcatgttttttaggtttcgcttgaatttgattgtctagggttttagcaggcgagcaatatttcttctcatattgttttggttataaattattattttattactgttgatcgtgagttgaacttctctattttagtcggcagctaattcgcttagtaaatctcttttactgaaaataatgatttattttttgttaaaatttgttgaattttgtgttgtatagaaa

SEQ ID NO: 85904 - DNA, 975 bp, Citrus clementina
  Intron number 1 from transcript clementine0.9_010884m (loc us clementine0.9_010884m.g) derived from phytozome v7.0 (c hr-ID scaffold_4; pos 6758391 to 6759365 reverse strand)
tagctgttcttttgacttttggtgactaaaggcaggtgataataatgggataatagagcaatctctgttgttgattgtttttattgtgatgatcactttattttcattattttttgctttgaattttagtgggtatgttttagaattatgtgacaggatctgggttactgtgttttttttttggctttgactgattttaagtcttccttggattccggcttctgtgtagtaaaagagatggttgctttgctttatttgtatctggtcatttatggggctttatttaactgttttatgggtcttcgctcgctcttaagttttccctgttctgggttttggagtaattcacactagagctaaaaagttcaggtttttggcgttttggagtagttgaagcgaaaagcttcatcttgtaggtatttttcttttctgggtttttgaattccagttcaggtttagcgaacttttagatttgggaccgtgtctccgctcttgattttggtcaaaggtgaaggaatcatgatttgaagttgatcataaaattttccatgctgttggtttttgggtttcatttgaagggtttttcttttgtaaaattggcttcttcatgttcagagttagtgtttgctttagctttggcaagtgatgcactttttgggaggcagcttatgtgttggtcttaaaagcttattaacatttccgaatttgccttgaatttggagctttctgcctcaaaggttttaccgacaaaaataggcttttaagctctaagagttttttcttagtctgtgaatttctgttccaaatatcagatgtgccgtcaatttgcttaagtttcttagctttgaattgattctttggattggtttaaagggatacatgtttctgctttctagttgggaatttcattttgcttgacctgatttttcagttatatcttttgtgcttttccagtttcaaattcttggtgttccc

SEQ ID NO: 85905 - DNA, 973 bp, Citrus clementina
  Intron number 1 from transcript clementine0.9_026580m (loc us clementine0.9_026580m.g) derived from phytozome v7.0 (c hr-ID scaffold_10; pos 2911807 to 2912779)
acgtcggactgccgcctcacttttccggataaaaggtttgagttgcttctgtttctgcttctgcttctgcttcttcttctttcactgttgatttatgcgctgactcagaaacttggagattaaaatattatacgattaaagatttcaaatttctctcttttagattttgtgtagagtgaaatacttacattgattaattgatggccaaccatcttatgtcaaatgtaaaaaggtcagggtcatgattaacttggtctgatagcataggtttcttcatttttagttacgtgaactacattttgccctctacttaaaatgacaatctttaatatatccattcagaatctgaaaaaattaatttactttcatttattgataagataaaaatagaataaattgaggttttaacactttttaggatagatcaaagattgacgttttattgagtaaactgaaatttatttttttacttaggtcttgtctaggggattgaggttgggtaaaaggtacactactaaaagtgtttagcaaatactagctattatagcctgaaagctaagttgatttaattttacatgtataatatgaaaattttattatatctttactaattttatcaaaattattatataagaactatttttattgcatactattaatttttattttacagttacattttttttctacaatagatgtagtttaaaagttacaacaccataataccagataacctttaattgtggaagttagaatatataaccttatcttatcttgtctgctgcagaaaaagacaattaaatcaagtcgcatacgaagaattgcttttctcacaattatgtcttgatttgaataataatcacgaaatgtgattcttctccactaattcaagcattagatgctgaaactatatttgtactgaacgttcttcattcaatgtgtaataataaagtatatttggccaaacagagat

SEQ ID NO: 85906 - DNA, 663 bp, Citrus clementina
  Intron number 2 from transcript clementine0.9_024353m (loc us clementine0.9_018477m.g) derived from phytozome v7.0 (c hr-ID scaffold_2; pos 3793242 to 3793904 reverse strand)
ttcccactccttctgagagcagccaaaatactaaagtaagttcctgtgttaccttacattataaaatatatgtaattattacatcaatcgattattttcttttctgaattttgacttgtgtatataacctttttttttttttgcatcactatagaatatgagcattttttcttcagaagaaaagcagtcttgtgggttgatttctgattcttatcgacacattttgtcgaataaaaaaagaattacgtggactaaggatctgcatgaacattttgtcgagtgtgttaatcgccttggaggttctgagagtgagtaaattgatatgatcaataatttatataggatctagctaatgattttatgtacttacttattttaatttttgatgatcattgtttgtgaattgattaatcctagaggcaacaccaaaggcgatactgaaactgatgaaatcgaaagaattgagtatcctacaagtaaaaagtcatttgcaggtttctattaattaattaaaaaactgatattgctgttttttttttttctttttacttcatgaaattttaattgtgatttatctcaacatgagatctgatatttcttgttttatttctctcttgctgcttgtcagaaatatcgatccgagaagctcatatcagaccagtc

SEQ ID NO: 85907 - DNA, 626 bp, Citrus clementina
  Intron number 2 from transcript clementine0.9_027225m (loc us clementine0.9_027225m.g) derived from phytozome v7.0 (c hr-ID scaffold_10; pos 1297795 to 1298420)
tatcttgatcttctacaggctgattatcctgaagggtaattctctgttttttttttatattccttaatttatttgaaaagttgtagtctgtagaccattgttaatctttcgcgtttcttgcaatctggccttcttgctcttcttttgagaggtttttgggatattttcctcttttctttttttctttttttttcgctctaggccactttgatttaatgcaggttgtgaattgtgtgtttgggaattaggaattgcaagcttgaatgtgctaagattactggtcttatttttattttttaatatttatgcattactattttgttggctggttcactgatgtgtaaatttggacagccatggatctgtaagcacattgtttatatatgtgtgatttatttgaaatttgatcctgtaatctgtactctgtagagctgttggattttaccatgtgatttctagcaaccatgtgtttgtttgaatgtgaatgaatgttagtccttgtatttgatttatgggaggctaccaaacttttactggtataaaagattagattcaactatataagcattttttttttttggcatagagttttgctcatgactgttcggtatgcagagacgcacttg

SEQ ID NO: 85908 - DNA, 814 bp, Citrus clementina
  Intron number 1 from transcript clementine0.9_017621m (loc us clementine0.9_017391m.g) derived from phytozome v7.0 (c hr-ID scaffold_3; pos 8129078 to 8129891 reverse strand)
aggaaaaatacaactcttcatcgtcttcttctcaggtaagacttcgtgtctttctcttctgatttttcgtctttgtctttatgtggcctaggtttaaattcgttttactgttattttattttattttaactgattcaacattgttttcttattattgatgctgttaggtttgctgtagattcgcctctttgaaggcgctaaattaataattttatggccgattcttgaagttgaataaattctgacaatgtttcaattaatttgattgaatcgcgtgttcctgagattgaataattttaattaatgaacaaatggttttttttttaattgttgttgcttttaagttgttattattattattattattattttgaaaactttgaagtataatgattttgttggagaaagaagattaaatttttttattatgaaattcagatttttacagattcctaagagtgtttctttttctaatttttttaatgagaatgtatgtttgattttcattattacattgcatttaatcctgaatgttgtatatttatcgctctctcataacttttgttcatgtaaagttggtatagttttaaagttaagcaaagtaaagaaggaattagaggtacagcttgctgaattagagagctttattggtgatctattttgctgttgttgttttacatgctaatagttaaatctctaccaattccagaagagtaataattactttccttgaacagattttttttgtaagattgtcatgaatttgtggtattgatcaggtttcattgtgatttcaaaggccatcttgctcggt

SEQ ID NO: 85909 - DNA, 525 bp, Citrus clementina
  Intron number 1 from transcript clementine0.9_003894m (loc us clementine0.9_003894m.g) derived from phytozome v7.0 (c hr-ID scaffold_2; pos 9298057 to 9298581)
tctaggtaaatttcttaattaaattatagtctaacttaactaatctgagcttggaatcttctccatggcatcggttctttaagtatattttgggtataaaatgttatgaatgatactagagccagtttgtgacaggtttggattcttaaagctggcttagtttttgtcaattaaggctcccattggtattttagcattcaggccatgattgttatgaaatgaaagttatatctgtaaaataaaagtcaatattattaaataattaaatataatttttatatgataattttgagaaaattaataaaattaatataagtttttttttttttttattgacagataaaatcatctcaacatgaaaactagagttgcaagtgttaattaatcaaataatttagggttgtgccagacagcaatagtaaatgaagccgaattagatttcttgttagttcggtattctttttcatgacagatatagatatgtacctttttttattcgggtattctttttcatgacagatattg

SEQ ID NO: 85910 - DNA, 338 bp, Citrus clementina
  Intron number 1 from transcript clementine0.9_005861m (loc us clementine0.9_005861m.g) derived from phytozome v7.0 (c hr-ID scaffold_4; pos 1411558 to 1411895)
gcctcactaagcctgctcaaatcgaccctctcaaggtcccctcttttctctctctcttcctcttgttcttttacgtgatagttaatgttagtggctttgtgattagatctgtttttaatttatgcctcaaaattgttgttcataggttttttcctttttaacaaatatttctatgatttgattggtcgagtttatatctatatatttataaaaagataataatgatctagcgggtgctacatggtactgtctggttgctcacttgagattgatttgaaatactgattatgttctgttgacaacgttttggaagatctcttttgccgcaaaagaggttg

SEQ ID NO: 85911 - DNA, 645 bp, Citrus clementina
  Intron number 2 from transcript clementine0.9_015261m (loc us clementine0.9_015261m.g) derived from phytozome v7.0 (c hr-ID scaffold_4; pos 6148054 to 6148698)
actctctcaaggagacgtttaaggttagtatcaattcatttgtataagttcatttgatctgcttttggtttggatgctaatcaaagtagtgtaaagaaagggaaataggagtgaaaggtttggttttagttatggggactgcccaaagattgaagcttggagttgactgatactaattcaaccattgaaatttttttctttttgggtgattttatttttcttctcttaagcttttggattacatggcagcttggttttgttattgatttgatctgggtttgtactgtagctacttttttcattcttggttctgatctattggtcttcagattattgtaagctgttaaccctacttttattgaagattttctagtttgctttgaacttctgcttttctaattagctgtgattgtgtacttctgatagtttgatatgcgattttggacattttcattgcctaggataaaataaaagttgagacccttgacttggtttattgaaagttcaggtttccttcttttttcagatttagtataattggatggctaaagttgctaattacacatgtgccggcatgagtatgtgtacttgctcctgatttgcataaattaagttgtaacgtaagttttgtctggtgatcccaga

SEQ ID NO: 85912 - DNA, 658 bp, Citrus clementina
  Intron number 1 from transcript clementine0.9_030593m (loc us clementine0.9_030593m.g) derived from phytozome v7.0 (c hr-ID scaffold_4; pos 280412 to 281069)
ggcttagatctaaaggagggattggaagcgataaggtaatctcttcttgtagggtgctaaattgaattaaaaacaaaatattatttgcattatagagtacaggcataaattcattatctatgtcaattcattcataattttactccaaatgtagtaatagatcaccattaatttattgatacatcattcatgcatgtttgttttcgtcttcagtttttatattacaatatttaatctattaagtattcttaaaaaaaatacgagaaaaagttggaaaacactttagggtgattgggtacactttcgtatggcacaaatagtgctaggctttgtttttaagcggacggcttgtccactttctgttttacaacttattcattaatacatttttgagtttcttatgggaaaaaatttgagaaaacactttaagtgaaaacaaatttgtatttcaatttatacttatattcttcactctaggagtatttattttttatagtgaattggaaaatatattctaccaataattaaaggaataattttcttttaattattaaaaagataaggtagttactcattacccatataaatggatagttttaatctgttccatatctatacaacagaacgagcttcagacacggtttgcagcgttccacta

SEQ ID NO: 85913 - DNA, 614 bp, Citrus clementina
  Intron number 3 from transcript clementine0.9_035330m (loc us clementine0.9_035330m.g) derived from phytozome v7.0 (c hr-ID scaffold_2; pos 9385625 to 9386238)
tcacgcagctcgcagttgcaggtaaacaaactgacgtactgttttattcacatttgtaaagtacataatttgtttgtgctggaaagaaataaatatacctatgggtgaaaaatcttcaagttcaaatcaatcacaatcttaagagtttttctaatgaattaaattatctccaccagttcccaataatttgatttgtagcaagcaagagttactttagaaggtcaattttggcttgcttttcaaataacaagtttggaaatcaaatgcagatcatgttataggcactcatttattttaatgaacatttgtatttgggtatagtttgatttaccccaactaaaatgacaatctttaatttacttgcaagatatgaaattatcaatttactactattttcattttaaaagatgagggcaaaatgagggtgtgttgatgaaattctttttatcttcttaacgacaaatggagtaaagttatgttttcagaacctcgtggaattagttgaagaatattgtcattctaagtgggggtatgtaaattgaaatttatgctttctttttatcatatactaataatcaaatatgcaggtcatacggtttttgacaactagaact

SEQ ID NO: 85914 - DNA, 589 bp, Citrus clementina
  Intron number 2 from transcript clementine0.9_002688m (loc us clementine0.9_002688m.g) derived from phytozome v7.0 (c hr-ID scaffold_141; pos 324479 to 325067)
ttcctgtaagtaggcagcagtatagcatttacatatttgtcaagtcttgtagaaatttctttcattggatcatctattgttgccatcaatcatgcccagaatagctataggaactgtctatgggatactccaccctttaagaatagccaaacagggagagatggttaattgtgaaaattttataaaatttgaattgaagatctagtgtactgttttataacctgggggactttggggcactattcaagagcaaggatttatttggatgagccgatgacagaacatgtgctatatactcctaggattctcaccatttaaagagatatatatttaatggtgcagttgaaaagtataatttatctgtgagtataaaataattttagttgattttgagatcctagtcaattttggtttagtttctgtcagtggttttgttgtgttcagtgattaagtctatggcaattgaatgtctttttgggtattttgtgttgtttgttcattgctaatttcctgtttgcatcattttttttttgttagctttctcctatggactttattgaattcctgtttgcagattttccggatcctt

SEQ ID NO: 85915 - DNA, 353 bp, Citrus clementina; identical to SEQ ID NO: 82200
  Intron number 3 from transcript clementine0.9_002688m (loc us clementine0.9_002688m.g) derived from phytozome v7.0 (c hr-ID scaffold_141; pos 325251 to 325603)

SEQ ID NO: 85916 - DNA, 359 bp, Citrus clementina; identical to SEQ ID NO: 80370
  Intron number 1 from transcript clementine0.9_003499m (loc us clementine0.9_003499m.g) derived from phytozome v7.0 (c hr-ID scaffold_4; pos 6230687 to 6231045)

SEQ ID NO: 85917 - DNA, 491 bp, Citrus clementina
  Intron number 1 from transcript clementine0.9_014575m (loc us clementine0.9_014575m.g) derived from phytozome v7.0 (c hr-ID scaffold_14; pos 3814775 to 3815265)
tcctcagcagcagcagttttttcagtttctttcaggttctctctcacttcttcttcttattattgttgctatttttatcagcaatacacttgattttggtaacaactgtgttaattttgttcatttagaatattggtttgtgaatttaagttaattttggattaacattccagagaggtttatatgtttgtttaacatcataatcgtcactactgcccacggagtccattttgagaatctttagcatgtgatgctaattttcagattcaaagtcatacgaggtcttaaattttgattaagatggaataaaatcagtaaagttttgctttatatttgttttgtgaagattttgttttgtagttctctcattgttgttgtgagtatagcaaccacgtgttaagtttaaaccaaaatagctaggatttttcttatacatgatcaatcaatcagtgatattgttctaattgaattataaattcttcattctagga

SEQ ID NO: 85918 - DNA, 477 bp, Citrus clementina
  Intron number 2 from transcript clementine0.9_014627m (loc us clementine0.9_014627m.g) derived from phytozome v7.0 (c hr-ID scaffold_3; pos 5636789 to 5637265)
atgtgagtgtccaaatacgctcatttcatatctcgcttgctttctttatttattttatttctgggtttcttccttcttttaggattattaccgtctgattgttgggtattctactctatatgtttggtgttattaatcaactactatgacatttgagtttggattcagtgcttctgttaatggagttgcttggatttttcacctagtaatacgaagcaactcactttgcgctaacatttggagtttgatttgattccacatggctggtctaattttagaaaactgggaatggcatgtcacattcggctcttacgtgaatgagttcgtttgtcatgtagctgtatttataatgattccctagttccataaaagaaaatttatttgttattatttatttacagtactttcagtattgattgtaattcattaaatcgatgtttcagtatttttcatgattctaaccttgattggccagga

SEQ ID NO: 85919 - DNA, 868 bp, Citrus clementina
  Intron number 1 from transcript clementine0.9_001355m (loc us clementine0.9_001361m.g) derived from phytozome v7.0 (c hr-ID scaffold_7; pos 4281493 to 4282360 reverse strand)
ctccctctatttctccgattcagacacaacgcagagtaagttttactctaatattttttttttggggaataatttaattctgtgtttatttggctgttaatctcaaaaatttgaatagcaaattgataaaagtttcatttatggatttctgcgcagcattgctgttaatgggtttacgaagcttgtatttctattgatgtattgtgctttttaagtttagaaagcagaagtggatttttcaggccggcttttgcttgcaacgtgtaaatgtgtgtattaatgggtatgtgagttttgatcttttttaagactcgtacgtggatttttgaatttttttttttttaaatgggactttactttgttcttgatttaaacttttgtactttaattttagggtttgcaactgtcacatcaagtgtttttaacttttattagaagaggatttactttaagcgtgttaatattgtgttcttgcatggtgtttttgcaatgaccttccagttaaatggctcagtttccaaccgttgatctgtgtcgtgcaatttactggcatatgtattatttacgttcgtgtattttctggtagatatatgtttaattgggggtttttgacttctaattagggtctatgaatttttttctgaattcttttaattaaaggattgctttttttttctagtttctggctatgagattttgaagacatgtgctcaaatacactttgtacgaaatttaattctacatttgaaattctcaagctctttagctatctattttcttttttcttacagcgggaggcaatgtgatgtatggggctgtgcacataattgaagcaatttgagttggattttggatttttgggccagcg

SEQ ID NO: 85920 - DNA, 865 bp, Citrus clementina
  Intron number 2 from transcript clementine0.9_023679m (loc us clementine0.9_023674m.g) derived from phytozome v7.0 (c hr-ID scaffold_4; pos 6029965 to 6030829 reverse strand)
aattggtatttctacatcgcctgtgttgataccaggtatgaatatattcctataattagttcgtgggaagacatatatataattgtgttcgttggtatatctgtatacaaatttttttcaattgtcgctcttgcaaattagattctgccttctaaatcagtggataacttttagaggaaatgtgtacaagttagttagctttcttagagtcattaactattaacacatatgagcctggggtttgttgacaaataaacatgtgtgaggttcatttatttggtgtattatgtcatggttacttgtttgattctctttctattaacacgatatagcgagcactgttaaaaagggaaattatggaagcattcatgatttttaataaagtcttaataacatttgaggagtaaatccgtgcaaccttgctcaggttggtgtccatgattgaatgtgaccaagtatcataaaaccaagtcaactactgctgataactccagctttatgcaaccttttgtcttgaagtgtattttcaaagctttttgttccccctgctttctgcgtcacaaaaatattaatttaggatgagagatatcaagaagacaaaaaagatcatgttttggaccttgatttgatttgggactactatgtttatatattagctttttgtggtatgccaacgatggaagacaggagcatctccatgaggtgttaaaataagttttcatttgagtgcggcgtatgttatagtaaattattgttcttgctggacaagattttatttttttctttttaatgttagaattaccattaacttatgatacacttgaatacagcaaaaacaagaaactggtgcaaggagcaaaatagg

SEQ ID NO: 85921 - DNA, 360 bp, Citrus clementina
  Intron number 1 from transcript clementine0.9_023679m (loc us clementine0.9_023674m.g) derived from phytozome v7.0 (c hr-ID scaffold_4; pos 6030847 to 6031206 reverse strand)
tcagtttcttttaaatcattcctgcactgcttgaggtgaaaaagctagggtttttgtttttttcaattgcacataatcatgtttgtttatacgaagaataattacagttatttgaggaaattaaggatctgatgaagatgggtatttttgttttcatttatttttctcatttcagctaaaaagttataaattcaaatagtagactttctgcgggaagaatacgttaatttgggtttatttgattgacaatttatgattgaaggaattagtttttgtctgataaaccaataacattggttttgaaattaagttctaatacaagcagctacgtttgcaggtgattttctcctcacagtcaag

SEQ ID NO: 85922 - DNA, 379 bp, Citrus clementina
  Intron number 1 from transcript clementine0.9_005195m (loc us clementine0.9_004854m.g) derived from phytozome v7.0 (c hr-ID scaffold_3; pos 3467609 to 3467987 reverse strand)
cagtactggcattgctctcaatcacgtccctgctggtatatcatttttcaccctttttatgtgttgagaatttatttatttattcttttatgaatatgacttcgatgatgaatcttcactttgacggtagaatttcataccaaaaaagatcggttttatttgttgattgattgatccctgatatttgattttgttttagaattaatcgattcaaagttttgtttttttgaattttttagtttgtgttgtatggtgttaacttacgtgttaaagaacggaaaaaaatataggtgttaaagatgcaagtgacaagaagattttagttgacatgctattttgggcagtggacaaccctgctccctcgaattatctgctgatt

SEQ ID NO: 85923 - DNA, 680 bp, Citrus clementina
  Intron number 1 from transcript clementine0.9_012154m (loc us clementine0.9_012154m.g) derived from phytozome v7.0 (c hr-ID scaffold_7; pos 795453 to 796132 reverse strand)
caacaggattaaggctgagactccttctcatactggtagttttctagtttgtgttgttagctgtttagttgatgattgttaaataaatatgtttttttttttttttggttaattgtattgatctcgattgctgaaagcttctattttggggactgtttctattgattgagattaatacatacttctatagtgattgtttttgtagatggggttaatgggtttgtttaagaatgttttaattttctgtaacgtccttttgtgagtctattgggctattgtaatgaattttgtttttaggtattacaagccttttgttttcattggaattgaagtttaatgcagtggaattttgttttttgagactttattagaagatttcctgcaatataattgctagtcattattgttgtaatgagttattattattatttttgagagcaaagtaaacctttcatttagggccaaaaaagccaataatatacctgtcttaagaacggaaatacaatgtcagaataggctcaaataaaatacttaggattttctaagcctcgagccttgttcactacagatttttcctttataaccgaaatgaaatgcagttccacattaggtcgaatgatttatgatgttgaattgcttttctctggaaaaacttaatccttgtgtctgttcttttgtag

SEQ ID NO: 85924 - DNA, 924 bp, Citrus clementina
  Intron number 4 from transcript clementine0.9_020551m (loc us clementine0.9_020075m.g) derived from phytozome v7.0 (c hr-ID scaffold_7; pos 4924621 to 4925544 reverse strand)
catcgcctctatccgccgtaattaattatctgcttaattcctaatctaaaatttgttcttaattaattagtttttcttggttaattaatttctcacaggataagatctacaatattattgttcttgttaatttcttttgcttttttcttccaaaacaagaagcctttctatattcggtattctcatgccgtaaccagatcactaattatatatttctctataagctacagatactcttcttcatcttcttcatcttcttcatcttcttcatctttcctaataaataataatttatagagttaagagtcaaaactctccatgcattctttaatgcgaacttgtcatgacaactcttcatctactcttcttcttcctcctaataaaataataatgtatgtctttaatataacaaggcatggaagtgattaatgacgtgattgatggcgttaatcacttcccagatcctctcacttgtgtattcaacttcaaaatatctaatgacgcatataaatatatataaatggttaagatttaattatttggcacattacggcaagacccctgtcttcattaatagggtggcaaaatctgacctttaaaaatgtattgaaaaaaaaaagaaagaaagaaaaagaaaggtggcaaaatctaaaccatactcgccatggcaacatatttcaagacagctagccaccgacattggttgggccgttgaggggcatggggatcgagtggccctcagctaagccgtcagatttttcttacattattattattattattattatttgttctgtttggtcattcaatatgtttttttttttctttccttttttaatgacataataataatactgcatataattgctggttcatgtttgatccacagaaaacagtggtgacaacaaagagtgtggagttcat

SEQ ID NO: 85925 - DNA, 672 bp, Citrus clementina
  Intron number 1 from transcript clementine0.9_019258m (loc us clementine0.9_019258m.g) derived from phytozome v7.0 (c hr-ID scaffold_4; pos 4584202 to 4584873 reverse strand)
aattctttagaagaggttttgcctgtcaggtttgtttttcattttaactttcgtatttagggtaactgaaattttattttattttttttttggttctgtgggttttttgagtttacagttttgttcatattacaatttttttttttttggttttttttcccctaaataatcagttagattttgtcatttaggacgtgtgtttttgttcagttaaatgaccatttgaccgaaataggaagggttaagacttgaattcattttggtatttatgatctcaaatcaagaatgtcatgaactggggagtttaattaattaataattatttttattatttttgggtggagtttctggatttgcatagtataaaaagttcgatgattggatgctcaacaccaataagaaatcttagattattagggtttcttctttaggggcagttagtacttagttgtgcagtagaaacggtaaccttccgtgaaactttattgctgttaatgaattatgatcctgagatgaaatccagagatttataggaaaacaatccgccgtttgcatttacggttgaagattggccggctgtataacctacaactgtttcgattaaaatcttattatgtcttgatatgaatgtttgcaggagagggatctcaagtttctatagtgggaaatcaa

SEQ ID NO: 85926 - DNA, 818 bp, Citrus clementina
  Intron number 1 from transcript clementine0.9_021902m (loc us clementine0.9_021902m.g) derived from phytozome v7.0 (c hr-ID scaffold_3; pos 8332806 to 8333623)
ctacgaattgattcgattcgcttcttgaaattaaggttggaggcttcaatttgacatatttttcatttctgttaatttttttttttgtttttatttgatgatcggtttggttttatctagattgatcgtttccgagtatcgattttcatgtgcatttcatttatcgattcgtttgctgctcgattgtgcttaatatttgatttttaatacgttcttggtcgctgattgttgtgtcttcacgtcattgttcattttaagggcttgggacttggattttttttaaaagatgtcatgtttttttatgatcaggtgtgcggattcttgatttcactgtgaaattcgaataagaagtgaacagtatgagtattctgatgcatattttactgttgggatttcgaactgcaaatctgtgttgaagttggcactttttaggtttgaatttgatgatattgctcaatgatttatgcttctatgccgggtctgtggtttggaaactgaaactgttgcaatcacacactagtcatgattcttattaaatattgaagtaaaatgtcttcagtgttttcttttataataatctttcataaaattcttaaccatgttttgtgtatagaacagtgtgacaaccaatttttgcactaaaattgtaaaacattagaattttataagattttttttcctgtgttagtggttgtgtttggctcagttgataatagtttgaccagctggtgatgtatggaacatattgtcaagtattactgactttttcttccctgatatccctttaggtgatttttcaaaaaggggatttttggagc

SEQ ID NO: 85927 - DNA, 611 bp, Citrus clementina
  Intron number 1 from transcript clementine0.9_014069m (loc us clementine0.9_014069m.g) derived from phytozome v7.0 (c hr-ID scaffold_2; pos 87192 to 87802 reverse strand)
cagcacctctcgctcggcttactattctgttccaggtttttttttgttttttgttttttggcttggatttgctgctttttcatttatttttatttttatttttgtatgtgtgtgtaaagccagagtttttttttttgggtagtttaatttgatttatttctgtaatttttaattcctattactttgttagtagtactttttgaatagaatgtcagaaatttgcatgcacttatttttttcgtataaatgtaggagcttgaaaaaaattataaaaaataaatttacatcagtcatgaaatgtatttgattgtatagtatgtttccgtcttgccatgagtaccctttcctttgaagatgaatttgttttaaacttttaatctgtcaaaatattgcagatgttttacatcaagcagaagagttagcattccataagccaatctaattcgtaatcctgtgctatacaatctggatgagatatttatcatgaagtgtccatatgctgattattacttagttttattattatggattatttgcagagcgttttatttttcattaaacttgtagttttcttgaccgcgggtgttactttgttttattaggtgcaaggt

SEQ ID NO: 85928 - DNA, 733 bp, Citrus clementina; identical to SEQ ID NO: 82025
  Intron number 1 from transcript clementine0.9_009521m (loc us clementine0.9_009521m.g) derived from phytozome v7.0 (c hr-ID scaffold_3; pos 4632541 to 4633273)

SEQ ID NO: 85929 - DNA, 1036 bp, Citrus clementina
  Intron number 1 from transcript clementine0.9_001003m (loc us clementine0.9_001003m.g) derived from phytozome v7.0 (c hr-ID scaffold_24; pos 771043 to 772078 reverse strand)
aaactgcaagagtaagcactctataatccctcttctgtttttgctttattttgatgtacacccatctggatctttttgttgttttctgatctgggtttgttccaaaaatgtatcttgttggttttcaatttttattttttaattggtgtttgatgagttttgaagtgcattttttctgatttaagtgatgtatgttctactgtgatttggttttcatttttattggatcataactttggctatgttgcatattagtgttttttaatctaacatggatccattttctaaataaatgtgagacttttgatgtgaatttgagcttaattttgctgatttacgttaactgtgaagctaccagtttcctgttgttggtttctagatttgctatgagtttcagttttgatgttagcttagatgactgagatttggtgtgattttgaaagcaaaccatcgattgtgcttctgatgtatttgctgattctcataattttgttatttaagaatctcctaattttttggatattcaaaagaaatttgtatatttttttggaatgattgtaactgttatagaagccacatgtaaattaccatgatctgagttctcaaatgcagtggattatttgagtcttgaaaggaagcataggacgctgttctggggataggaactttcaataaataaaaaaaaatttagtagataagttaactaccattttgtttggattatttgtggtaataatgaaattgcttgcttactcgacgaccacttcaataaaatgatgaaaatttgaacttgaaaaggacagttagaataagtagattctcagtttaaatttctatttaaatatcagttgaatattctgctcttctgaggtatgtctttatatcctatgatcacccaattggcaattgcattgtttgtcctctacatttttatttggtttgccgagcagtcacaataacttgcattaagctaatgagctcacttgtttgggtgtgttcagataaagtccgtgaaagaattgagtggacaaacttg

SEQ ID NO: 85930 - DNA, 682 bp, Citrus clementina
  Intron number 1 from transcript clementine0.9_035426m (loc us clementine0.9_035426m.g) derived from phytozome v7.0 (c hr-ID scaffold_3; pos 4343024 to 4343705 reverse strand)
gctcctctcagtactgaagatcccggtccttctaggtacggctttcttctttatttcagaatttatgtttccattcgtcagatactagaattgtccacgtgagatggcattaattggaaaaagtaagaatgaaaattgcatgtgagaattgtttttactattttcgtcgtggttctgcaacagtaattatttgtttacttcgtttgatttaacatagaaacttactcgtcatattgttcgtttggaaacatagttagcgtcatagactcagagcatttatttggtaatttgttttattttattttattagatattttctgagttagaacttagtggattagagtattgaatgagtttttccaatcttattatgtagtcagtttagttgacatcgtgtacttatggattttcaatcagtattaatcaagatgaagttttgacatattaactgaatattttcatggagtggcgtgtccagagtgattggatagggagttgagggagcattgtgggatttttctctgttgatgacgcttgtaatatattcaggcatcaaattgtgatctttctcattcagctgtttgaaaagccacgtgctgttaaattctgcattgctgaaggtagggttaaaaaatgtgagattcttccatgtgaccatatttccttggttggtgcagcagtg

SEQ ID NO: 85931 - DNA, 416 bp, Citrus clementina
  Intron number 1 from transcript clementine0.9_014786m (loc us clementine0.9_014747m.g) derived from phytozome v7.0 (c hr-ID scaffold_2; pos 7730831 to 7731246)
aaatctcaagaaatataccaagtcacaaatttagggttaggatttctgggttaggagttcataatttccataattgatcattctgtatttttgattttatttacgatcataccacaccattcttcgccttgttttcgccgtccgatcaacccaatttctccgcaatatggtcctgatttcttccggtggccagaattcagttatcaggctatcaatccctcttctcaattccttttcctgtacagattcaacgctccgtttgttattttgtgaaaattagctttttaaaaaactacatctcgatttgttgttaatcacccaattgtgtatgtttttttatttgttttaataggcttttctcggtggcgatttctgtaattaatttagtgattgtgtagagttcgagtttgtatatt

SEQ ID NO: 85932 - DNA, 569 bp, Citrus clementina
  Intron number 2 from transcript clementine0.9_014786m (loc us clementine0.9_014747m.g) derived from phytozome v7.0 (c hr-ID scaffold_2; pos 7731500 to 7732068)
aggtataaattgcttaaatgtgcttgcttttgatgcttggccttgtgggtgcatcaaatatgttatgtatgaactgattttgtttgtttgtgtgtgtgatgatatgatactggatatctatgtgtatctgccatagtgtatgtattttttttttcatacatataatttatctggttttttttttccccctgtgacttggatgatttatttgcgggttcccttgtgatgttgggtgtagttgttttaattccaagtgttatgctgtgtagatattagtattcatatgttagtggtttccttagaagatatctggactgtggcttttatttttaatatttttgaggtaatcttctagatatgtcttttatttcattttcttttaccagttatgtccctggaaggctggaaccaaagcttgtaggatttttctgaagtttgtttggcctagtttgagtttttattgtatgttccacttgtgaaaatggttgttttattatggcaaccaacatcaatatctaatacattaattttcagtttttgttgctgggtgcggttccatttcctactga

SEQ ID NO: 85933 - DNA, 434 bp, Citrus clementina
  Intron number 1 from transcript clementine0.9_004115m (loc us clementine0.9_004106m.g) derived from phytozome v7.0 (c hr-ID scaffold_7; pos 5436703 to 5437136)
aaggtactattcaagctgcttttgttatgtcttgtaatttcatttctgtgttcttagaatattgtttttttcccttcatttggggttttttattgcatgtagtttgactttgaatgttcttcttttgtgattcttcagtgtttgatatgactttcctgttggtttgttgtagaagtgataataaaatgaaatttattagatttggtcttatttttcaaatctattatactctgttttcaagcatcctatgttagctaattttaaagttactttgaaagttctgcttgtttcgttaatcagtcggtgatttgatttgttcatatgtggatcaagagagttattttgtgggcctgtactttctgtagataaagttgtgtgatcaagtaactgtatgaattgttgattaagcttaacgtggggttttcagttacaaa

SEQ ID NO: 85934 - DNA, 880 bp, Citrus clementina
  Intron number 3 from transcript clementine0.9_025474m (loc us clementine0.9_025123m.g) derived from phytozome v7.0 (c hr-ID scaffold_2; pos 5353579 to 5354458)
atttgccgcaagtatgctcatgtctcactttttcttttcttttcatttattttcatcaatgcaattagtttttatgtttctgttgtttctttgcttggtgggtttgttttagtgataatgttgttttagctacgggacctgactttacttctactgcaaattacggtgcagaagaagtcatacgaggaccctaaatcaattcccattcttcaactttgtcaactgtttttagatcttgttgcagttgattttcatggatggtacattcaatttttagagaaaccctgtctatttttttttggtattgcagttgtattgttggttaatatagtctaaatttatgataagaacaatgcttttagactgtttagcccattactgcttcacttaagttgagttgcggcttgtatgttgggactattacgttgaactctcttttgcaattgaagtgcaattgagagcatcacagttccagagattaatttccatttcaactttgtcaactgggtttacttaccatcagttgattttcttgggtggtatatgatgtattattgattgtttacttaaataattcatgaatattgaatttcattttgcgtataaatgtgcttggttggtatcactcctgaaaccattgttctgttcgacttataagtggctcgtctagctgtagcaaaacatcactgctatactgtggttttgtggttttgtgaaagttatatgcagtaaaccattgccattttctttttcctttgactttgctattttgggtgggcgagattgtctttcaatattattttttatgttgcacatatgctctggttagcaattaaattactgtatttgatgttaaactaatatggttttgggttgttag

SEQ ID NO: 85935 - DNA, 219 bp, Citrus clementina
  Intron number 3 from transcript clementine0.9_019894m (loc us clementine0.9_019658m.g) derived from phytozome v7.0 (c hr-ID scaffold_4; pos 3150980 to 3151198 reverse strand)
caggatcaagaactgctcctgttgaaatccttgaagtaataatttattaattacccatttttcttcttcttcttcttctcctcctcatcctctttttttttttttttgaagtaataaaattcaattattgtttcttcctctctctctctcaccctccagtgattgattgactaaaaattaatttgattttgggcctgcctgcagcttcgggtaaaaaca

SEQ ID NO: 85936 - DNA, 253 bp, Citrus clementina; identical to SEQ ID NO: 81933
  Intron number 2 from transcript clementine0.9_024288m (loc us clementine0.9_020277m.g) derived from phytozome v7.0 (c hr-ID scaffold_2; pos 1445203 to 1445455)

SEQ ID NO: 85937 - DNA, 786 bp, Citrus clementina
  Intron number 1 from transcript clementine0.9_030550m (loc us clementine0.9_030550m.g) derived from phytozome v7.0 (c hr-ID scaffold_3; pos 7354952 to 7355737 reverse strand)
ccgcttgttgttcttgttttcgagagatataattggtaactttcttatgttccactattcagtatagattctgaaacttgatgatggatatgtttataatacagatagttaatttgtttagagacaaataattcaactgggatatttatataagtactctttatatgaaaatgggccattatacctataagtgagtattgcttaaaaagtcaaccgctgttctgcttggtgtaagtttgcttagtactagaattggtctagattgtatgtcgttttattgcatagaactgtcaattggtactaatgcgcttttaaatattagaagtagttgcttatggacaaatgtgcaatgcagagtacataatagcgaattgtctgtcttgtgcctgtgaagtgcatctcttctcaacttcagttttatcatcttgtccatttctgctgatgaaggcaattaagctgattttcttgtgggtttcatacttatgcacaatctaaaatatatgcaggaagtggacattttttgcatttaacttatcctttgtatatgctgttaatttttctacctcaaagttatctcaatttcctgtttgattctcgggaaaaatgagtgaaagagaagaaaaagttcaagtttgcttaagaaattataatccctttagaattccaccattttccatttcttttaccatatctttccaaaatgtaagaggaggttttcattttataacttgtggaattgcaccatgtccagggcaactaagaactggaagactttgaaagaactag

SEQ ID NO: 85938 - DNA, 484 bp, Citrus clementina
  Intron number 2 from transcript clementine0.9_004555m (loc us clementine0.9_003153m.g) derived from phytozome v7.0 (c hr-ID scaffold_85; pos 816289 to 816772)
aaacctctatttcaactgggtatctgtcatttcctttttgcagtggtttttgatttcgtgaacaaattttttttcgcttagagatatggatgtttatgctagttatttgctaatgtaaaaaggaacaaaacctgcttaaaaggtattaaagaaagaaaaaaaaagaaccaatttgaagaaggggatacttatggtgggagttctattctttggggtttaattgatgggaagaagaaatagcttatatgtttacagaattagacatttgatcgcggagttagttgaggaagataattaattacaatgtctgatgttttttctgttggcctcagctaattgttaagatttcatacttttttctggttttacatagctgtgacctaaagcttaatgtatatattgataattacacaatccgtttcttgctgatacttggctttaatctgtagacctgaggctcttttgggagttgagaagatttacg

SEQ ID NO: 85939 - DNA, 550 bp, Citrus clementina
  Intron number 3 from transcript clementine0.9_004555m (loc us clementine0.9_003153m.g) derived from phytozome v7.0 (c hr-ID scaffold_85; pos 816761 to 817310)
agaagatttacgaaagaggagtttctgattatctggtttgttccctttatgcttacagaatttgaattaacactatgcatgaatttatgattctttttattttttattttttgagaaagattttatgaaattgaagcattgtagtaaagcatactagttgtaatcttgattcactttgtttttattttattaccaagaggtgctaacagttcatgatgcacaaaagattggggggggggggggtttgggggaatcttcttggtacatacataaattttagtatctgtatcattttcaaccaaaaaaataattttacagtggctgaagagcagcattttcatttatatgaaagttcaattgttatatcgtctgtttccgtctcctttgtggtaaataaagtccttgatgatggcaataagaatcacagaagaagttgttaatttcatatctggagattttcatcatagcagttcattgaaagtgaaggcagctgaaaacacttttttctgatgcagtctgtccctctttggtgtgattatttgaaatttgt

SEQ ID NO: 85940 - DNA, 642 bp, Citrus clementina
  Intron number 3 from transcript clementine0.9_032921m (loc us clementine0.9_032921m.g) derived from phytozome v7.0 (c hr-ID scaffold_2; pos 4384138 to 4384779 reverse strand)
cacaggtttctgaattttcttgcttaatatagcttgtctgtggataaggaatggttttactgaatgttgaggatgcttactttggtgataaattattcatttttgtcttttgaggtaggtttttcccggtggcacaggttcatctttcaaatccaggaaactcaaggcatcaacttggaagaatgctggcggtcgattccaggcaagtcacctttgacactaggataggaaaaaaatattttcaatttttttttggctggctgttctttaggctatgcgtcatatgtgcatggctgtgaactaatctttattttggttatcttgccctttttattttctcttatctttccaaaattggactctaggctttattttattcctcccttccccttttatagtacagcttttagatggacagcactatgcaaactatttcttgtaattgcaaaagggatgcttgctcattcctttgccaataagaaagggcatcaatagtttctacatatctgtttaaataaaatgtggcaacttgacgttttttacctctttcatttgttttaatttgcatcagacattcctcccaattctcctaatctgtgctgttttgctttctcagtggctgcttcattgctgttagtgcat

SEQ ID NO: 85941 - DNA, 681 bp, Citrus clementina
  Intron number 1 from transcript clementine0.9_005637m (loc us clementine0.9_005531m.g) derived from phytozome v7.0 (c hr-ID scaffold_2; pos 2859375 to 2860055)
tgtcaaccatcaatcaggatcgttggtttctggtaagttttgattatttttttttttaatttttaattcttaacgcgacttttggaactgggtattgaacccaatttcaatttaattggatgggtctatgataaggtcttatcttgctgttgaatgttttagggtttgaattgggattgattttggatttttgagcattttgctttttcttcattcattgatggtaaatcaaatgtgggattttaatttatttatctaaaataaaaaaaatgttactttcatttctttcgctggtgttttttcaattgggttatggattttgatgactcttaatctcattaattaagttgtttgaggttcttgcagtgatgtttttaattcaatacgagcaaataggaacccgattttgggtggattaattataatttaaaggattaattataatttaaagagttatattgataattttctgataattagctcaggaaagcattttgtgtttacttcagataatgctcaattgcattattatcttgaaaatctaatagctttctaagattgcttcttcgaacctggttataattctgtctacaacttcaggttttcagtgtaattgacccttgattaatattgtcaatttgagctctttgcttatcaaagttgcattttggattgttgcag

SEQ ID NO: 85942 - DNA, 413 bp, Citrus clementina
  Intron number 2 from transcript clementine0.9_022409m (loc us clementine0.9_022409m.g) derived from phytozome v7.0 (c hr-ID scaffold_4; pos 1264281 to 1264693 reverse strand)
acgcaggttgacaatattgctgaactagagcgaaggtaaatttcaatcttactcaaaattagcatagattgatcaaattacacaaacatgttggctattgttgactgttggtgatgtacatatttgtatacacaaatgtctatgaatccttgtggaaatgtcactctgagtagacacatgcaaatgctaaattgaatcattttctatggttctaattatcatcactgacccatcatttgaaaaatcaaacacaagaagtttgttttgaagaaaaatttattctttgttacccaatgaagttgaagagtgacattggtataactggaagtttgggtttaggcacttcaagttggatatgtacgttatattatattttggcaccatttttttctgagaattatgcaggttggagg

SEQ ID NO: 85943 - DNA, 453 bp, Citrus clementina
  Intron number 1 from transcript clementine0.9_022409m (loc us clementine0.9_022409m.g) derived from phytozome v7.0 (c hr-ID scaffold_4; pos 1264713 to 1265165 reverse strand)
tcctcgacaaacccctcagcaaaggcaaacaagaggtcctcttcgaatcgctcttcttctttttttcttttaattttttttgtttcatactctgtttggttaccgcgaaaatgtgctggaaaatcaaaagcaactgaattccatctgaagctgaaattttttgttcctcagttgctttcacagcatttctttagctggcagagacaagtaaaaatcagatcttggcagcagattatgacattgttttttttataattatttacttagataaaaatgagacattccagttatagtattaattttgaaatatattttgattaatgaatagcaaaagttaaagagttgaatttgaaaaattgtttaactttagatataaagtttagatctttgaaaatttatttgtggttctgatggttaggtaagtttgagtgcatttgcatttctgttctcgga

SEQ ID NO: 85944 - DNA, 677 bp, Citrus clementina
  Intron number 3 from transcript clementine0.9_000072m (loc us clementine0.9_000072m.g) derived from phytozome v7.0 (c hr-ID scaffold_2; pos 3849582 to 3850258)
agacaagagctaggcgccaaaaggttagtctgcaaaattttattgcttgaatgctttattttagttgtcattgcctgtgcacagagaaactagcatttttgcattaggttagttgatcctatttatatccttgctttctgccatgcgtatatttaatcatgatcacgattctatgttaaaaaaatgttctgctatattttacatgggtgtgctagttgattcaaaagaagaaacctttggatgtagtacaagaggtctgagttttgattcctggttatatcagggtggtgtaggagttaaggttatattgtaaaaagaaaaattattggaaaaggttgtatatactggcatgatgaaggaggctttttgaggaacctgttgcatatgtgatggatacgtttctctcataattgctaggcatccaaatttttatgtacaacatgaactttcttcatgaaatgagtccacaaaaaaattgcaaatgtcctttcagatgctatgttgttttcaaataacaggtacaattcagttatgcccctatgtgattgtgaaatcatattaagtctaagaagtttattatagtggtatgtggagttttttaccttaaaaattattgaatctttgatggtatcttggttttaggcacttgaagcacccagggaaccacgtcgtcctaa

SEQ ID NO: 85945 - DNA, 492 bp, Citrus clementina
  Intron number 3 from transcript clementine0.9_020177m (loc us clementine0.9_015340m.g) derived from phytozome v7.0 (c hr-ID scaffold_7; pos 4689881 to 4690372 reverse strand)
attgaaaacattcgctgctggttcttccaaggcaggtatatgacatcatgttacatcagtataaattttttgacttttatgaaatgctgttttgctaaaaaattgatctacgtgtaagattgaatgtagtaacttgctatctacctatgaatattggtatatgacatcattgtttcctttggttaactgcttatgttgtggaaacttttgtaacttgtctgaagtagtttggtacagacttgtttatttctaattttttccttggaagtctgctagttcttcatccttttctgttgtttggaggcgcatacactgtttgatttggatttttcttgtgtttatatgattattttttaatgtttcagcttttatttgctttctcacaggttatgggctcattgttctgttgttttgcagaaaatcatattaatttaagcgcttacttgtcttatgtcagtggggcattagctgggtgtgcagctactgttggat

SEQ ID NO: 85946 - DNA, 925 bp, Citrus clementina
  Intron number 1 from transcript clementine0.9_011459m (loc us clementine0.9_011450m.g) derived from phytozome v7.0 (c hr-ID scaffold_10; pos 1692448 to 1693372 reverse strand)
tgtcacacttgttgcacggttttttcgttttgcaggtatttacatgttcactctctttttatttttctgctttttaagtaattctacaactaaaaatcagttcaaaagctggtagctttattgatcggcatcgctcgtatgctgctaaagtttctttttttttttcttaattggtttttttttttccggttcttatgttaactgtgttttttttggggcgaaaaaaatatattattattctcttttaaaaaaaaaaaatcttcagaagtaacttaatacttaggtttatgtttgtggtcgtgtaattctttgtgtctttgaatgtaagcaaaggtcagttgtttgtctaatctgggtatttgggcttttgttgatttaaataaaagttttgatttttagtgaaaaatgggaacatggtaagttgagggtttgaacgggatttttggtatgattgtttattcaatcaaatggaacattttttatgattcgatgaatttagtttcttgtagaggattatgtgtcggaagcacatgcttgcttggttcatttcgtgttttcaggaatagctgcaaatttattgatttcgtttcaaaatctttgttcttgcatgtgtgtatatatttgacaatggggatgtgagattgtgattatgccacagagttaatacattaccgcataggattaccttgtgaagacattgaaaagggggaagttctcgatttctttcttttatcatcttagattgtggctagtagagtagtaacattgttttgtcaatagtgagcaccattttccggtttcatgttgttgcaatagatgtttctctggatttgtgagttaatgtttcttaatagacctcttttcttgtaacaatgtattgaatacagcaggtcctgttttgcttccacaaggatctgtgtctgtt

SEQ ID NO: 85947 - DNA, 763 bp, Citrus clementina
  Intron number 3 from transcript clementine0.9_010909m (loc us clementine0.9_010909m.g) derived from phytozome v7.0 (c hr-ID scaffold_2; pos 443083 to 443845 reverse strand)
aatttcaggggtaacgactaatgacggattgaattacagtttaattagttgcaattgttttgtcatttggggttatacgcctgttgtttgatatattttaagcatacattgtgcttgttcttgtgctggtttgtttttgtttttcttattttggccttatgggaccttgtttgttgaaatattatcctgataattttggaaaaagttcaaaatttgatgccatcgtacagtaaaaggaaaaaacaaaaggggaaaaatcaaattgtattccactttagtattaattagttacatagaagaaagcctacttatgatatagcataaactttgtaaatgaaaagggctgctgtagtttgttgttggaggatatcatgatttgatatgatattgttcttcttgtgccacaacgcgaagttattaagagttttaatcagcatttttcctgttatctagttttctgtcttccagatacctagtgaatgcaaggatactttatttcttcaaaacgggatgtttctaatctgcttcaatgataacttttgagccttgattttcatccctcagaaaacaaaacatccacgtgctatttttttaagttttattgtttagtctctattcatgcgcttttttatttatggaacttgatgagcatttcactatgttgcaaacttctgacatcagtgaaacaaattttagagggcaagagaaaatcaaaatggagcctttcagttaaataaatgatctttatgtaggcaaatactgg

SEQ ID NO: 85948 - DNA, 445 bp, Citrus clementina
  Intron number 1 from transcript clementine0.9_035267m (loc us clementine0.9_035267m.g) derived from phytozome v7.0 (c hr-ID scaffold_24; pos 1511884 to 1512328)
tttctcttttgaaagagctgaagcacgaaaacattgttaggtaatcacttttgatatcattgttatttcttttatcttggaatgatttgcattgaaaatgaaacattgaaaagacctttcatgtgcaaatttatgagaaaccatactgaggtttggttaaacaattgattatcttcatgcgaagaatagtcctaagaagcagcttttagtttctattttgtcattctatctcataccattttgttgcagtgcccaaaactttatgatgtgaagagccaaaaatccattgtgacagctggatcaatctagaaatgtatattttaaacttggggatttcttaaacaatatttaggttaggatttgtgataaaaaatagggaagaatctaacggctggtgtatgcattttggtccgagtttgcatatggcaatggtgaatatctcagg

SEQ ID NO: 85949 - DNA, 937 bp, Citrus clementina
  Intron number 1 from transcript clementine0.9_029681m (loc us clementine0.9_029681m.g) derived from phytozome v7.0 (c hr-ID scaffold_24; pos 614698 to 615634)
tccttcgatctcaagccaagttttgggctaataaggttgacaaaaaatgtaagctccctagccacatatctcttgctaattccttttatctttttttttttttttttttttgctaaagattttaagtgacaactctaaattatttagaaaatacttacaactatagtttggaaggggataattagcaatacctttttcaaaaaaatatatatttgataccctttatcgaaatatttcgctcctcccctcgtgatgaaaaattcatcaaaactctaaaacaggtttgaccttattaaggtaaaatagtaaaaagaataaaacaaattaaaaggggattttgatggacgttgaaaagtgatacataacaaattaacaaaatactatagttatttagttaatatactttgttcatatcctatttaaagtggcaaataatgtgtcaatatttgattgatttaagtaatatttaattattaaatcttatcattcatgttccaaatagtgaattctatttgtgacatatcagttgggatgctaagtaattatcccgactgagcaagcatagaaacactcgaaacataattaatttattgaaacaacatagcaaaattacgcaactcttacaatttttttaagatatttgttatttttcacacattaaaatttgtaagaaccaaatattatccatctaaagtttttattacacaacagtcgtggtttaatcaattgttgaagattttgtttagggaaagaagaatatccagaggcaggaaagaaagagatgatagtttttttaagaacatggaatgagagcttggagacaaacacttctttggtggagagagtttcaaatttgtagatttgcactggtcccattcacaaccaacttttataaattctagactcttaggaattttagcattgaagctgagtgccc

SEQ ID NO: 85950 - DNA, 910 bp, Citrus clementina
  Intron number 1 from transcript clementine0.9_021921m (loc us clementine0.9_017283m.g) derived from phytozome v7.0 (c hr-ID scaffold_14; pos 4083160 to 4084069)
ttttccgaacaaggaatttgtctttcgagaaaaaagtaagtaaatatttttctcattcttcttcttcttcttcttcttcgtttctcaatttattttgtgtcttgattttattcgtaatttgattgccttagaagtactttttggagaatcactttctggattcttttttaaaactgttttttttttaaaactaatgagaatatcgtttatcatgagatcatcacttaacgaggattttctctatttttttatttaagcataaaaatgaaatttaaaatttataaaaaaaaaaagttgtaagaataaaagattaatgaaaatctgatagctggattactttcaggatgatgctgttctagaatatataagaatattccgtagaaaaataatttactgtgctttttttttggtggcatctttttataatttaagaattgcatattaatactaatgaagtataagtgctgatttgttgtggtttatgtggattgtgatgtgattttgttttttggatgcttagtatttcttcaattgttaagcaggaatattttgtttgcctctgtcaacggtacgaatgctgtgagtccaacccccttggttagtcacatgttcctaccactacaatttttcattcttttttctctaatttcttgagaattaatctatgtggtgatatataagtttgatatatggtatggcggcagcaattgtcacgattatgaaagtgatatattttgatttgtatcatataattctgttaccaacataatcgcttaaatattggtaattgacaacaaggaggataatcttgtgatgtcactgtttcccattcttctctagcttttatggtatggatggcatgatgtcatgacatggacatgattgttttaattgcagaaatcggaccaag

SEQ ID NO: 85951 - DNA, 813 bp, Citrus clementina
  Intron number 3 from transcript clementine0.9_021921m (loc us clementine0.9_017283m.g) derived from phytozome v7.0 (c hr-ID scaffold_14; pos 4084689 to 4085501)
tcagtcaaacagacaaaatttttcataacacggttgtaagtaattcttgagcagtaatagaatcttttactggctttctagagaagtggaatgatttatcgtctttcatctggttagtgagctgtgaacatttttcaagtttctatgcttatatcttgttcaagatgatcatctttttcttacaatcggttcaactattgtttgtaaacctgtcattgttctatattttctagaataataatgactgcttacattagacgtgttatactcgataatgtttatgctcttcattttctctggggcatactttctttacaggctactatacttttgttgtaacgcatctaccctgcattctctttttgtttctaagtggaaaagaagttcttagcctactgtcagacccttgatagaaaatccttgtgttacctgctatgttgcttttacgtgaatgtgtgtaaataacttttatgtttcgacttttgatggtggttcaaattaagagcaacaactcaaaaattggtttatgttttatggagaatcaatgttcagtttgtgtcatgacagtgcatttttttggctggatttattgcatttatattgaatggtaatgaacaacttggctgttttcccatttgctaataacatgtcgacatttgccccacgcacatatgaggacgtgagtcatactttgagctggctcagtttatgagttaaatatcaattgttatatgtttgcaagctcttagctctgtgagattgatttttgttatgctagagacaccgggcgcaaagttgaagatcctgacttgc

SEQ ID NO: 85952 - DNA, 679 bp, Citrus clementina
  Intron number 1 from transcript clementine0.9_001256m (loc us clementine0.9_001256m.g) derived from phytozome v7.0 (c hr-ID scaffold_10; pos 3565192 to 3565870)
tcggtatgtttgtatttattttgagcatgcagggaaagattctacttgcttttaatttgtttgtagagctataaaggtttttgaggttttgataaaatttacctgattaaattccgcagaaagtggttattgcaaccagttttgttttctctcaatatcattggcatgcataaggaaagctttgaaacacgactgcaatgtgtgtcgatcatctattaaatcttttataggactattttcgagatgtttcatcttcgtggtggcagaggatgcaatcaagtgtcatctgagcttcataataggcgcacacactaatacactatctgtggagccttcctattccattaaaattagacattcttggtacctaattggagtatctgatagaactctgcatgcacggttcgcacaaaaacctgcgaattagagaatactattctcgaaggactattccttttttatttacgttgacaggtctaaaaaacaggaatataacttcctcatgttcttgaagtgaatattattttttcgtatagtgttttcttgtaatttacaaaacgaaagaaatggtatcttgtcattgcttatataacttggaatgcttcatatcagagccagactaattttctccgctttttctttagttcaacaaagctggaacttcaattacaagtcttgc

SEQ ID NO: 85953 - DNA, 406 bp, Citrus clementina
  Intron number 2 from transcript clementine0.9_007449m (loc us clementine0.9_007449m.g) derived from phytozome v7.0 (c hr-ID scaffold_14; pos 3589368 to 3589773 reverse strand)
tcttgtttggttgctttcgctgttggacaaaagtaattaagatgctttaaagtgttttttatgtgaaagctctgaaagtgcttccttgaaaagtgctttctaactagcatttagaatgattacgttatccattgtgtctccagaaagtactcctccatgtgatatattttttattttgattaagcacttcttttttgtgatatagctcgcgagagatgctatcttcaaaagcgctttctaatgcttttacgtaaactgctttcaagtttttttttataggacatgttttgaagtgatttataccaaagcactcccaaacgcactttgaatctgtttttcactgtgggtaagtgtttatatgttttaatggtactttctcttcttttgtgcaggtatagtgtcggta

SEQ ID NO: 85954 - DNA, 699 bp, Citrus clementina
  Intron number 2 from transcript clementine0.9_004441m (loc us clementine0.9_004441m.g) derived from phytozome v7.0 (c hr-ID scaffold_7; pos 1222606 to 1223304)
caggtacgctactattaagagacgggtacccatttgtatttgctgaaattctgtttggttagaaggaaaattgaatgattcagagtggctggaaattcgaggaatttacctacctaagtgagtcaaatggctggactaatatcactgtggttaattttgtatacactgtaagagaaaattgaagtgtcagttgatagtttcatctattatagaacaaatttgataagttcgatggttgaatcgtgaaaaaatcaactcttcttgagagtcttatactcttattattgatttcttttggccataagttacaaattttattcccaagtagtggaaaactcaaagagatcatcgtctccgggttcatttggcttggctacttcaagtagactggagtaagtttgggattaatacacagatgctatgagataatcattaactgtcaagtacaaatgtgccggtctgggtggtaatcactagattccaagcaaaaatgagtgcttatcaaacacttaagttgaatcacaacaatccaaaaaatacctgtaaatggattaatttatctagtgtagtatcttctattcacatttaaataacaaacataactttaatgtttcatagaattcattgtttctagtatcatgtaaactaactttatgacagtgattggtgttacagggtagtgaagagaggccaggccta

SEQ ID NO: 85955 - DNA, 503 bp, Citrus clementina
  Intron number 1 from transcript clementine0.9_006875m (loc us clementine0.9_006875m.g) derived from phytozome v7.0 (c hr-ID scaffold_2; pos 7384115 to 7384617 reverse strand)
aagtctatcaccctgataaatatcaagctcctcatgtatgcccctcaatcatttatctgcttttactttatttctattgtaaatttgcttatccaattgctgcgtcgttttctttcaaactaaccgaagttgagtttgattgtgttttataatgtgatattttgcttatccaaaatcgtgtgcattgtgtttatgaagacatattactgtactactgttaataatattctttttccccttttttttttaaaaacattattcatatgtttattttctatattaatcttcaatgcattgttatagaagtagtatgtgcgtcaattgttaaacttgttgctctttaagcatgattaggatcttgtttcgctttctgttacgtatgcctcttgtctcagcaatgcctagtaattgaatttttactaattaatatgagcgtgaatttggacgggtttgttgattttgtgaaagtggttactgaatttttattaaatcttcattttcag

SEQ ID NO: 85956 - DNA, 665 bp, Citrus clementina
  Intron number 1 from transcript clementine0.9_024492m (loc us clementine0.9_024486m.g) derived from phytozome v7.0 (c hr-ID scaffold_10; pos 232210 to 232874 reverse strand)
ctgcaatcaacgctacttgccgcgtcagctcgtaggtttgattttttttctttaaaaaaaaatctattttaaaaaaattattgtatcatagccttttctttcaaatctatgctgtatctttgatttacttggttttttttttgttcagttctttctttctggctaatgttaggtatttttttcgatttaaatgtctcaattttgcaatatcaatgaatctttaattgaatgaatggaagatgagctgtaatattttggtattgtatctgtttaattttttccgtctgaatattattatcatggattttttactttcatatactgaatcggtattgtatctgtgacctatgtcatgtgatatgaattggggtttgtattgaaagcgcattcagattgcaatttctgatatgagttttagttggaactgcttaaaggaagtttcctgagattggtctttaatctaggctcaatttaagctctgtggtaataattaccagagaatctctacttgttgatttttgcaaaaagtaaactttaagttgttgtatcctttttgctgattacacttgaggaactatcactggttcattattcgtattataattgatgacactgagtattgttgattttgggttggtcttttactgaatttgtaggcagtgaga

SEQ ID NO: 85957 - DNA, 417 bp, Citrus clementina
  Intron number 1 from transcript clementine0.9_024999m (loc us clementine0.9_024860m.g) derived from phytozome v7.0 (c hr-ID scaffold_4; pos 2722810 to 2723226 reverse strand)
ctgtcaccaaagtccaaaacggtatactgttttaaatcgccgttattattgagtttatgtaatttattctccatgtgggcgtttctgttgtctgggttactttgtgttttttttttttgggggggggggggggggagggaatcattagaaatggaaatttttttggtatcttacttaattgtgggtttcagttttggttttgctgtttggtttctgaagaagtggaggaaattttgtggaactggaaattgagatctttgatatagaacaggaaaatgaccaagttatggatattttgttttgtgatttttcttcattttctctgctactcgaaggagctttgttaaatattttggttttttgtttctgtaactaatcaagtgtaattgggaaattttgcagctcattcaagtttgg

SEQ ID NO: 85958 - DNA, 862 bp, Citrus clementina
  Intron number 3 from transcript clementine0.9_013177m (loc us clementine0.9_013164m.g) derived from phytozome v7.0 (c hr-ID scaffold_4; pos 1966962 to 1967823 reverse strand)
gcgtccattgtagggtaaattttcaaaacttttgtgctgttaggatatgttggattaaagtgcatgctgtgacttagggattggatttgaatctcacgtagtgtgtttgtgagtttaattaaaaaaaaattaaaaactaaaaaattatggtaaaatatttaaggattaggatgctctattagtatttttctcttagtctcttataatatttcaagtctaatggaaaaatctagcttatttataaataaaattaaaaaaatagtttcattgttaacattaaaatttaaaattcaatattaattatttatttcattcgaaaaaattaggagagaaaaaatattgggacaaaattcttatccaatgtttaaattattttagttacagggacaggggactacacgtgcccttgggacagctcttcctggtctgtcttttgattgtcaagtaaaaattattgtttaattactaaccactttatgtcttgtactaatttcgaaactaaacacaaacacatttttactctatgttgtacacagtatgagatgcttatacgtagaaggaataataatcttaatctcttgcattaatctgaggtcatcacataaaaagcctaaacaatggaaattttgtgataaatctacaattgtcttagcaaaatatatgaatattttagatgataggccatgtggatattaacaaagacaccaaacgtgaaacgttatgcttaattctgatttacttgagacatttatttcacagcaagctagtgattattaacccttttcaactatcaaacacttgattttgctgttacctaatttgtataggttagagaagatagatcttggaagtgtgagaagtg

SEQ ID NO: 85959 - DNA, 875 bp, Citrus clementina
  Intron number 1 from transcript clementine0.9_011586m (loc us clementine0.9_011579m.g) derived from phytozome v7.0 (c hr-ID scaffold_4; pos 4112298 to 4113172 reverse strand)
aacaagcttccacctttcatcatcatcactatcaggtttgcctaacttcctttattttctttttctttttaacaatcgcctttgtgtttaattttatatcgctgttcaaaattttgaatctttcattattagacatcctaacgcttaatcaaacttaagattattattattattattatttggctatgggttttagtagatgaacgttcgatttcatctatggcggtttggttcgtagattcagtttttgcttacttgcacgagatgcctagataattgatagggctgtatgacgtttgtaatcttgtcgaaatatgcagtgacgttttatcgcttgtgtttgtccgatgaattcattttgtggggttatatatgttattaaccgcagagctttttgttttcggtaattgaagtgttatggatttgtgtcgacagaactgaagaagtatttagtaggagttaatttttttgggctagggctgagtttcctcttttatgctcttcgttgtggataattgaagccagtgcgtttttgtatagatgataagattgcttacaagtttacagtgtgaggatttgtctccttttatctgcatatttctcagaggtttctgctagaattccagtgtctgttttattgcattttctctcccctgttgggttttattttaataactttaaatttaagagaactgaactttgcttagtagctttattaggctaaatcactttagcggagggttgcagttttgtttccatgcaattttggtgcatcgatttttcattttgaatttcagtatggttactgttgtttttgtcacttggaactcattacaggtagttacaatttttttttttttaaattttcctcagtc

SEQ ID NO: 85960 - DNA, 604 bp, Citrus clementina
  Intron number 1 from transcript clementine0.9_022552m (loc us clementine0.9_022532m.g) derived from phytozome v7.0 (c hr-ID scaffold_4; pos 4012496 to 4013099)
agacaccacccgctggtttcacttgcactctttagatctaagttaagtatttataaaactttctactctctcttaacgtcctatcttatatttattcttcatggtgtattctcttctaacagaaaattgatttttgcatgagcttaccttcttctcttatgagcattaatttttgctctttcttcttttattgttactccgtagtttcatgtacaaatttctgtatttttgtatttttcttatgtttgtttgatattcggtgctttatctactgtagaatgaaagtattaggtgttaatttatgaatgcctacttgatatatagttatagaaaattatcagttctgctgttaaaatcaacctgcaattttatcaaaacactttaacaagtaagcttactattgacagcacagttgccagaaagtttaaataaaccgagcctccgacatatcgtaaattgtagtacttacgtacttacacacacacacccatacatacatacatacgtacgtacgtacatacatacatacatacatacatacatcaatcataaatgctattgattgattagatgtgatgatgtgcggatgcaggttggtagattg

SEQ ID NO: 85961 - DNA, 892 bp, Citrus clementina; identical to SEQ ID NO: 82740
  Intron number 2 from transcript clementine0.9_019176m (loc us clementine0.9_019176m.g) derived from phytozome v7.0 (c hr-ID scaffold_3; pos 2547681 to 2548572 reverse strand)

SEQ ID NO: 85962 - DNA, 696 bp, Citrus clementina
  Intron number 1 from transcript clementine0.9_012406m (loc us clementine0.9_012406m.g) derived from phytozome v7.0 (c hr-ID scaffold_2; pos 3086730 to 3087425)
tttaaaactcactcgattccaaatcaacaactccggtaaagttaatttcctcttatcggtgcttgcatttttattccttttctcttaatttgcggagtaaattcgattttcctgaattcgtgtgttgttgtttctctgcgaaagtatgctagaaacgagagtgagtgaaatttcaaaaggataaacaaatataacaaatactttagttcgtgaaatatgaatcgacacgaaacccaaccttcaagaaaccaatgcattgtctccagagtattcgactctccctcgtgtgagatctcacctcgcacgtgccattcatcaattcaaagttcaaactccaaacggtgactccacctgcgtctttcctctttaatacatttctcgtaccgatcgatctccgatcgctgcttctcccaatttcaggttgttggttgtttgcttggtttgacttcaatctgtttttgttttgaaatttttcaaatagccacataattagtgtacggagggtgcagttgctgcggcattcttgtttgcttcttacgtgtctgctgcttcatccatatatgaatcaaacaattgtccgttatttcttggtcttcaacattcatttctacttttgaataaaatttttgaaattattatttggtttgattaaataatgcagggcacttggtgatctttgagctctggcatcaacag

SEQ ID NO: 85963 - DNA, 811 bp, Citrus clementina
  Intron number 1 from transcript clementine0.9_029434m (loc us clementine0.9_029434m.g) derived from phytozome v7.0 (c hr-ID scaffold_4; pos 3646199 to 3647009 reverse strand)
gccactccccgatcacgatcgaattgttcctacaggtatgtacataagattttatatggctttataaatttgctaatttgattcatttgttcttttatgtttgtttaggtttgatattaaacctatttttttcttttttctttttgttttaatttgagtaattatgtttgattcaattttttttttaatgtttaatattagccattggttctagggttttggaatttgttatatatacttacttctgtcctcgtgcaatcatttaatatagaaaaagacgaagtgaaattcgaaagaacggacttaatgcggttttaaaatatcccattttgggtgggatgatagtatgctctgcttatttttgtgtgtgtgtgtattttggttttaacttcgttcctttttatgggtatttcggactgcttgtcttctggctgcatgtgaaaaacaatttggtatgtacatatatgtatgtgctcaaacactgcgataattttagcctcaaaagatgtttctgatattgtagaatcaaggatttggaatgtgaataagctagactagttcccaagtgaaaccactatgaactgcatctagggtgcacggcagcacgaagagcaaacatgtgtgtttattatctttttcaccttttaccttccatgatttgtgtgtcaaatatgcatgtgtgactggatctatttattgttttctgggatcagtgctttgtgatttctgtgtttgtttagttgtactgagccactgaattttaatgctgagcgcaggagagagacctgttaagccagataattcaacagag

SEQ ID NO: 85964 - DNA, 938 bp, Citrus clementina
  Intron number 1 from transcript clementine0.9_029431m (loc us clementine0.9_029431m.g) derived from phytozome v7.0 (c hr-ID scaffold_3; pos 3898920 to 3899857)
tcgcagtgctgttagcgtcggaggaagccgaattagagccaaccatggctgctttgtagttcatggccgaaccctaaagctctgataccatgtagtaaaaaaggaaaaacagagagacaaagctatagaacttttccttattattcttattcaaaacacagtgatcggtagaaataaataggaaaactagagagcaattctaggactaatttttaggaccataaaatcagagtgtatctactttcctgatttatggtattttcctattttattcaaataacaagaaaatagctaagaatccctaaattatcgacactatgaataaaatttattatcattataattctacaattgttaagagacttttaaaataaaataaaattaaattaaaagataggtggatatgcatatggatttagatattaggatagatctagacctgctccagatccgtcttaaatccgcacatcaatatccaaatccgattcaaattcattttaaaccgatctaaatccaatccgattgcatttggatcatgtggatcttggatcagatccaatccattgccatccctatagcaagttgaacaggaagtgccttttctcttttaagtaaacagcaatatgtggtttcatgttattaacttttcattttccttgccatgttaacttcgtcaacaagtagttttatacaaaatctcaagctgatctgaattgacatcaaatattcaaataataatgtttccttggttagcctggagaaagaaatcttttctatatgttctgttgtgagaaacaaggaaatctatctctccactataattcttgttttcataatctgcataacgttcttcttttattatcttcttgtctgcatggagtttaaatgatttatacaaatcattccacttgagagttggtcttatccattgtcaggga

SEQ ID NO: 85965 - DNA, 816 bp, Citrus clementina
  Intron number 1 from transcript clementine0.9_028567m (loc us clementine0.9_028567m.g) derived from phytozome v7.0 (c hr-ID scaffold_24; pos 3183042 to 3183857 reverse strand)
ctccaagcttaattgcactcagcagtgtattgaaagtatccttttcatgttgttattatttgcctaagttttatctagaataatcaatacattttattggcaaattaacatttttttagtttgttatattagagcttaagtgtttgttatgtcgtactaaccactattcaatctgacaggatcgatgaattaccattttgatatgtcgaaattttgacacttcaaatgaatgtgcttgcatattttgttgtaattgcattggtagtgatctttttcaattgatttttctgatacaggcaaattcttgtgttttctttttcccatttcttgaaattagattattggaagcaaggttatctagaaatgattgatggacttgtggacagaagtatatttgagattgaaacttttcttttagatgccagttaaacatattggccaatggctacccctcgaggtcttcacttgtgttgaaatttaggcccggcatttactgcatttgtatgtgaaatttagttgattgattatgaattatttttctataatgtgctagataattttggttggatccaactttgaaacatttgctctgctatgcttttgctcaatgtagttccaagatttgaataatacctttgcatgatgtgtctgtgtgagtaatatatctttgagtctacttatttatttgtttaattttttttttaatgtgctctttttggcgttaaagcaatcatattgttcatatatccatgcgatatgttcccttaacttatgtgcatagctttgtcacattggtgtatatttcaccgcagcaaa

SEQ ID NO: 85966 - DNA, 344 bp, Citrus clementina; identical to SEQ ID NO: 81868
  Intron number 1 from transcript clementine0.9_020705m (loc us clementine0.9_020712m.g) derived from phytozome v7.0 (c hr-ID scaffold_3; pos 2404087 to 2404430 reverse strand)

SEQ ID NO: 85967 - DNA, 378 bp, Citrus clementina
  Intron number 2 from transcript clementine0.9_009011m (loc us clementine0.9_009011m.g) derived from phytozome v7.0 (c hr-ID scaffold_4; pos 2301705 to 2302082 reverse strand)
tgctgttttgtttgaacttggtctcatctcttgtggtaaagaatcaaactctttgtgtaattatagtgtcaaaatgcatttgaattgtcacgcatggaaactgtgtttattttgtagtgtttgctttggataagtaaaattttttttttttttttttttatctgaggaaacatgtgaggtcttctttaaagaaaaaggaattaaagaagaggacttgagagtatagcacttgataagtgcttctcgaaaattgattcttgcagaaagctcttgttatgatgtattggtattacccttaaactatgaatttatttgattactgagctggttttacattgtgcagattgctggtgccccaccaacttgtgctgctaatct

SEQ ID NO: 85968 - DNA, 406 bp, Citrus clementina
  Intron number 1 from transcript clementine0.9_010195m (loc us clementine0.9_008986m.g) derived from phytozome v7.0 (c hr-ID scaffold_4; pos 2184814 to 2185219)
ggaaaagaacaggtcactaattttttttctaatttcacccaaaaaattgttctttttgaatcttttttttttttttttgcttagtttgtattttgcatttgatgatctggggctttatgcatattcatttttttgttagtaaataaatgaagtagaatttagttcaatgcactaaagtagtgaagtttttgacttcgttgttgatttttcttagtgtttctgagtttgtatgatttgaagttgtgatagtaataatttatcttgtttttgttcgatttaactgttactatgttatctcagttaaatttctgttaaatttcttggtccagctatgtttagaaggtctgtctcttcaattgagactattttgtaatgcaggtttttgatttatcagaggtgaaaccac

SEQ ID NO: 85969 - DNA, 422 bp, Citrus clementina
  Intron number 1 from transcript clementine0.9_035524m (loc us clementine0.9_035524m.g) derived from phytozome v7.0 (c hr-ID scaffold_154; pos 136093 to 136514 reverse strand)
caaggtaacttcttccatggttatgttccttcatctttgagttccttaagaggtcttagagtcttggatttatctcaaaataacctttcagccaaaattcctaaatttttggttcgattagaattgatgtagaatctaaatctatcattcaatgaccttgagggcatgataccaactgaagaagtctttaagaatgtaagtgctacttcagttttggaaaacaataagctctgtggtggcatacttgaattccagttgtcaacatgtgattcaaagaaatctaaatagaagagattaacttttgtagtgaaattagtaatagccatcgtttatgtgctcgtgggactttctttggctctatgttttctgtttctttgttgggtatagaaaagaaaaacaaaagaattccaagtagttcaatc

SEQ ID NO: 85970 - DNA, 677 bp, Citrus clementina
  Intron number 1 from transcript clementine0.9_020994m (loc us clementine0.9_020858m.g) derived from phytozome v7.0 (c hr-ID scaffold_14; pos 1349070 to 1349746 reverse strand)
cctctcccagcttcagctcttgtgcgtagtacgctcttaattttctctgtttctttttattttcctttttttcaattttatccctatttgctttttcttattgtgatttccagttagtttagtaattgttagcacaagtttttagaggtgatacgaatcgaatccccagtggtgattttaagagaaaacttttagctcttaatggcattaatctgttgagaaagaaagagcggacaagtcgataatataattagaaatgttctaatttagtattctggactttattaagacttttttctacttatttaatgtttttttgcttgagaacatcttggaatttcaattaattttgaacatttatacataagacacactttacatgaagcaaactgaaactaagtttaggtaatagtcgattgaacttattttaaaatcgtttaggataatacaagatgtataactggatattcaacatcaagctcacatcctgacaattaaagtacaactagatgatttttatcaatgtataaattgttacactttatatatagtccttttaaagagcagatattcaaactttatgaagtgtggactcatccttttacagcgttggctgtacaatattatagagacctttagacgaagacaaacaatgactcaccttacagtcaatgcag

SEQ ID NO: 85971 - DNA, 593 bp, Citrus clementina; identical to SEQ ID NO: 80890
  Intron number 2 from transcript clementine0.9_002246m (loc us clementine0.9_002246m.g) derived from phytozome v7.0 (c hr-ID scaffold_2; pos 6339896 to 6340488 reverse strand)

SEQ ID NO: 85972 - DNA, 940 bp, Citrus clementina
  Intron number 1 from transcript clementine0.9_014257m (loc us clementine0.9_014272m.g) derived from phytozome v7.0 (c hr-ID scaffold_4; pos 6386599 to 6387538 reverse strand)
tggatttataaagttgcttcctttcgcttgatctggtagggctcacaacacactcacttcataaagtttcttccttgatctgggggtggtcttgtgtcagcttgatagtgagtgttctaaacttaaataatgatttttatgcataccaatttgatttgttgagatgatgtttcttttatctggatatcatttacttgacgtattaatttgatagtctctcaataatagttcttttgtctatagtgcttattaggaatggaattatggaaatttcctgttgttattgtgtgtgattaagtcatcactgtaggaatcttgcatatgttggaattacgatttgttccattatattttttttagttatttcagctaagttttcctcaatggttatgaaaggaagtgctaccatatcatgatttggattatttagttattttccaatcattgtttcaaaagggtcaactcagatatgaatcaggttttttttttccacacattaagtttgggttgattttgaagaattgtcttgtatatgttttcttcctgttgatttgggaattaggactggaaagtaagaggattggctcgatacggggggaacttaaatttgaattgttcataattttgataaatatttggttgtttatctgtccctctttgtgaattgtgattgtgatcttaatttttgttatgctagatgaactctagaagaatataaactgattttccactggcaattatgtttataatgtaaagttaactccccagaagtattgtatatcatctgatatccttgacagtgactgtgttcataattctaaaggtaatacatcaatttctgggtgacatttactagaagttgggtctgaaaatgttgccgagtttataatttagtattgtaattggtttgcaggtctgagtccgcttttgctatcctcta

SEQ ID NO: 85973 - DNA, 659 bp, Citrus clementina
  Intron number 1 from transcript clementine0.9_003068m (loc us clementine0.9_003068m.g) derived from phytozome v7.0 (c hr-ID scaffold_4; pos 6824603 to 6825261 reverse strand)
gcagacactaaccggtaccgtttttgtttgttgagcgactacaatgagtttgttttctgtttggttgttgaggaggaaaaaaaatgtggtgataagatgagaaaatgcagctctagctcagtataagctctgagattagcgaaattaaaaatataattttttttggaggtttagaagctgaaacaataagtaaaatcaattaaataaatatagtgaagtaaggatttaagtgtttctttcgaatttttttaggattttataatgaaaatctgaagaaaatatgagaattcgactgtaaaaatgaagaacgctttgtatttggaatagagtcagttcagtgaagcactttcttcttattattttctttgttaattttgttattattattttgaaaatctaaacagagactgtctaaatcaaaagatatttgtctatctggaaaaaagaaaaaagaaaaatagtatgccatttttgtattaaatggaactggaaaagttagtccggacataataatgtgtttagcatgagcaaattctcattaactttatcaaatgctttttgtttgtatctttattttctttggtatactgttggataatcttacgtctctgattatgcttgcaggagatccaccatttgtagtagcacgtggaggattt

SEQ ID NO: 85974 - DNA, 1011 bp, Citrus clementina
  Intron number 2 from transcript clementine0.9_006555m (loc us clementine0.9_006555m.g) derived from phytozome v7.0 (c hr-ID scaffold_2; pos 4264361 to 4265371 reverse strand)
tggttgcttacggaggagcaccaatcaaccaacaggtttccatcgttctcattcttgattgtatttttggttttcttcttttgaaaattatgaaatccttaacattttggtccctgtcttctttgttaggtgttctttatttgttttatctggtttattatgtactaaaattacaactgcttgacataaatttgtgactaattatttacttttcttcaactcaaaatatcttctttttgaattcataaactgcagaaattgctttcaggatgtctgtgttgcaactattaccactgctgaaatttgggattgatgcaaattgaactgatagcttttctcttatgtttgccgatggagttctgacatttatttgaactttcttgttatttctcttttcttttctttctttctttttttttttttttttgggtgatatgttggagatataacaatgtggtttgcatttcttctttgttgtcaaagattttggagccatgcttagagtcttttttgatttattgatcattgctttgatttggactggaatggatgttggtggccatttcggctgtgaatgtttctatcttctgttggtcgctgtaaccttgtctgaagtgtaaaagatgggtgaatttttgtgttaataaaatagagggacagctttcgattgacaagattcttctctatccgagagaggatgtaggaatgatgtgttgcttttttcttttggacagtttatggtgtttgttatattggttcactagtaagaaatgcaagctcatttgctgaatggtatcacatgacctttttaattaatgttttttttttaacttataaatttattatttgatagtattagctgtttttcattgtactgcctttgtcttgatgctatattagtcttcaaattgaagattttttaatatttgttctacccacctttgttttgtatactgattttttgttgtgttgtcagttgcgagagcttgagagaggggttgatattcttgt

SEQ ID NO: 85975 - DNA, 682 bp, Citrus clementina
  Intron number 1 from transcript clementine0.9_003577m (loc us clementine0.9_003577m.g) derived from phytozome v7.0 (c hr-ID scaffold_4; pos 642267 to 642948)
cctctagagcagccacgctcggcccgctggctttggtgcgtgttaattttaattatctactttgagttttgttgctttgcttttagtacgtactgtgaaatatgatttttttttaattttattctttttttcattaacacttgtcgctgctttgctttggtaatgtgaatggttgctgtcacgatttttcagtttccctcgaacgttcaatcgtcttgaacccggcccgttgcatactgtgttctcgcttgacttgactttactcctctctaatatccatgaactgataggttctgtcggattagaaattttattatgcaatagtgtatgtaattttcattggtcataggagttcccttttcttttcttttttactttataattgtaatttttaagaatacagattcaacttactttttgcttttgtagggtctaatccaattttctaatcctgtgggctatagcgttagttttacattttggataaaacccaagtgggaacaaaagaaatttccactaacccaccgttccctttttcaaaattctctctctacaagtctatatatgtaaatgcttaaatctcttttaacagctaagctcttgtgatttcggtcttacatgacagctgctttgtttattgttcttgttttattttgatattggtgttgtgatagtgcaggtg

SEQ ID NO: 85976 - DNA, 300 bp, Citrus clementina
  Intron number 2 from transcript clementine0.9_003577m (loc us clementine0.9_003577m.g) derived from phytozome v7.0 (c hr-ID scaffold_4; pos 643085 to 643384)
ggtatttatgatctgttgctgcttttatttttttcatgttttaatgcatatgggcatttgggtagaaagaaacccttttgaatatgttcagagtttattgatttcttttggtgttgtagccaatagtttccatatgagaatggcacgattgtccaatctttgtgtttctcttttttaatatctgtctttcaaaaataatcaggttatatttcttagcaaagaaaagaaaattataagttgactaagaatgtactcacgttttaacttttatgtaccgtaggtcaaaattgcaaggaactt

SEQ ID NO: 85977 - DNA, 948 bp, Citrus clementina
  Intron number 1 from transcript clementine0.9_001784m (loc us clementine0.9_001784m.g) derived from phytozome v7.0 (c hr-ID scaffold_24; pos 468304 to 469251 reverse strand)
ttcctcgtatatttttgtttctggaaattgaatgattgttgttgttgtaaaatttttggaacttttggtttgacatgttggtatgttgatttgaattgtgtgcgaattgaaggactaaaatgatgaaatggcatagtttgcgtggttgtttatgtatgtttcatattttgtattaaatagaagctgaataattgtgcgttgatagtggttgctgttgtaggtgggaaaggatgaaaattttgaaatccgggtgagattaaaatgataatgtgctgtgcatttgtctttttttttttcctttttttttcaatgttgatgttagtgtgccaatgtttgatcaactgtgaaactcccctgtattatggctctgctgaggattgcatttgtatgagattcaggaagagagcattctttagatttttaggggctacgttatggaaggcagtaatttattagcaatctctaaccacggagagagagtgagagagggttgaagattgggttgagcatgatacatccattttcgttttcatccctaatcttccattggagttgtatatatactcttaatgcatacaaacagatatgtgtatctgtcagttttctttaaatttttaattttttttatattttttttgcatagtttcattttatgattctgccattcaacttgagattctgaggaatgaaaattgaacaagttgtatgagaatgagtcaagatcatgactcagctttattcattataagtttttcaacatcttccttttgttgcagaaagtgaacaggtcaaattattacaattgactttgtgctattgcagtcagttttaatgatgtcttgcagttgagtgtcttcctaattagttccactggttccggccattaaccatgcaaatatttcttgaagtacaggtggaaagaatagtgccgatagatcgcttttagta

SEQ ID NO: 85978 - DNA, 921 bp, Citrus clementina
  Intron number 1 from transcript clementine0.9_025296m (loc us clementine0.9_025296m.g) derived from phytozome v7.0 (c hr-ID scaffold_3; pos 2634212 to 2635132)
attgttggcttgtaatttctggaaaggtttttcatctgactcggtggatgtttgttttacttgttaatttgttattattattattattttcccttcatctcatggatttttctgttcttattctctttactgcatgtcgagaacaaaaaaagttgtactttttaatctaatatttagctgtatctaagaatcattttgatccagtagatagactgttcagattaaagatctagaagtaaatttttttcggaccaaattgaggtgagaacatgagagaaacatgctgttgaaagactgaaagtctctacgattcattttaggtttttttattttctttttccatttttcttctggatattattactaatattttattgtggtatgtattgtttggtgagagaattagaaaatggtaacatgctgttgaaagtctgtacaattcatgatatttgttgacaaaattttcattaccgtctatagtattccgtagaggaataagaaatatctattatcttttcagtgaagaacttcaaggaaaattctgcaaatgcctgctgaatgtacgatcaagtgttttataatgtttgatttataaaattcaagtatatgattcaagacttctatgtcttgcataagaactaaaaaatagcttacagggaataaaatactgtagtttgcagtttgccacttgtgaagagctaaacatacgaaaaagttgtaatcaggggccagatcgcttggccaagcttgttctaatccctctgtgttttttctttttaaatttgttatgtatgtttgaggtagatcattgacaatttcaggacatgcatctatccggtacctcatgtaatacttttgcttttcaattcaacaagccattaaatagcgtataactttcagaagccctgtatcaggtctata

SEQ ID NO: 85979 - DNA, 543 bp, Citrus clementina; identical to SEQ ID NO: 82280
  Intron number 1 from transcript clementine0.9_021283m (loc us clementine0.9_021293m.g) derived from phytozome v7.0 (c hr-ID scaffold_3; pos 997097 to 997639 reverse strand)

SEQ ID NO: 85980 - DNA, 395 bp, Citrus clementina
  Intron number 1 from transcript clementine0.9_003242m (loc us clementine0.9_003242m.g) derived from phytozome v7.0 (c hr-ID scaffold_7; pos 704718 to 705112 reverse strand)
cttctctctctatcaccatctgggtttcaactgaggtatgttcattttattttattttgaatgtttagtattaatttattagaatttaataatgttttaagtttttgtgtattttcttctaaatgttgactgttaaaaacttgaaagagttaattttgtttcatgaatcagggttgttgatgggttttctctatatgcaagtttcttgtgataaattctaaaagtgggaatctgaaaaggtttaatgcttgtttattaagggtctacaaagttgggattttttagagcaggaagctaacttattgaaggaattttggttgtttgattgactggggattggatacttgccattggaggttctagatttattgggttgtatttaaaagttggtgatt

SEQ ID NO: 85981 - DNA, 610 bp, Citrus clementina; identical to SEQ ID NO: 80305
  Intron number 1 from transcript clementine0.9_023428m (loc us clementine0.9_022111m.g) derived from phytozome v7.0 (c hr-ID scaffold_7; pos 5214226 to 5214835)

SEQ ID NO: 85982 - DNA, 556 bp, Citrus clementina
  Intron number 3 from transcript clementine0.9_014535m (loc us clementine0.9_014535m.g) derived from phytozome v7.0 (c hr-ID scaffold_4; pos 1346020 to 1346575 reverse strand)
cagccggacttggtgctatttacaggcatgttctcatctccgtttttgttcattaacctgattttgttgggtgcctgtattttcgttttcttttctgatggcttcattctctttgcaccaatgccaatgggtgatgtaagcatatgtttgggattgagtgctgcagaatgaattcacttgccatcaaatttaattggctgactgcttggtaaatattagctatcatgagattgagcatgcaccgaacactttaattgttgtgctttcaaagtcaagcacacggttacagacatatccaagaagtgaggacaaacatttatggaaaacatttccatttcagataacactcttttgattgctggtggagatttcttacacatttgaacttgtctgtttaaaaggacaggccatgtctgattaattgtcttttgcgcccatataatgggcacaatatagttttttgtttttttttccttttcaataaaactatatttctcattatttgatttgtttttttcctttcccccttctttgactcatttaggtgattttggta

SEQ ID NO: 85983 - DNA, 422 bp, Citrus clementina
  Intron number 1 from transcript clementine0.9_012185m (loc us clementine0.9_012185m.g) derived from phytozome v7.0 (c hr-ID scaffold_7; pos 3948633 to 3949054)
cattcttgcattccgtggacgctagaatcaaattggtaatttctatttttaatcttagttttgttgttgtcttgctttattgttgcttttacttgatgtttttgtttgttaatgttcaaaaatatgcgggcttgttcaagaaatgaatttttcttttctttttttttggtggatacaaattttagttctttttaaattggtttttagttcttttttaaattggttttaagattatgacttttaattagagacatttgtgttatggacagattgttttactctaaagttccaattgtgcctgattttaaacgtggttgattttgtgtaataatcaaattgagtaacttatatatatctgctgatggaaccttttacttttaaaagttctaatttggatatccaattacattgactcttcaggt

SEQ ID NO: 85984 - DNA, 713 bp, Citrus clementina
  Intron number 2 from transcript clementine0.9_012185m (loc us clementine0.9_012185m.g) derived from phytozome v7.0 (c hr-ID scaffold_7; pos 3949148 to 3949860)
gatcctcccaaaacaagtgtgggtaagtgtttttctttcatgttttaactataaaggccgatgtgtttggacaaagctgtggtgtccgtgtataactctctgacgtgtattattctgttgcttaatctattgggttaaaccgacatgttacaataaggcagtatctttcaaaaaggctgttaaaccattgcatcatgaataggtgattagttcattgatatgaaaatctggctttgcaagtgtgattgtacaactgcaggcgaattcttctgattcttgctagatgatacaatgagttctaagaaaattggcttgctttggacaagtggtacaacgttgatggatgtattgataaaattgtataagatgttgagatctgtggtctgctgggttatgttaactcatcatgaatgtaaagaaaaatatagtttctttagtctgaaatgtcatgtttcttgctgactccatcccctgctgattgattttatttgattttccctatggtattttttttttatttttaagttaataccagcatatctatatttgaatggtgatcttggcaatcgtatgtaatgtagatgtaattttctacatgttgctaatccatgcaatttttttttcttttaataaatgtttcacattattatcttgtaaaattttgaatgacacttgtaggatcaactgggaagagtctcgctgctttctggagt

SEQ ID NO: 85985 - DNA, 457 bp, Citrus clementina
  Intron number 1 from transcript clementine0.9_014043m (loc us clementine0.9_011664m.g) derived from phytozome v7.0 (c hr-ID scaffold_3; pos 1721753 to 1722209 reverse strand)
acagtgtatgtgaaataaacaatttttttacctttatgtttcctgaatttgtatttattagaagcctaatgttcccctaaattgccaaaatattgtaagagtttagaaagaattttttttatttaatgtccccttattatgcatctaatttcttcgacttttactcagctaccaactggatggtcggggataaaacttttgccaaattgattttggccttcgtttccatatgataaagctcagaatgataaattaagttttatgtttgactagagctgtttaaatacctgctaacaaatatgtgtaatagtaattttcttattatattatattgtgtaacgatcccccgcctctcccccccccccccctttcccccaaaaaaaacaaaagattatgttgcgatatgatgtctgattgattttctttctttttacttctttgcagcaaatccatcaaa

SEQ ID NO: 85986 - DNA, 524 bp, Citrus clementina
  Intron number 2 from transcript clementine0.9_033395m (loc us clementine0.9_033395m.g) derived from phytozome v7.0 (c hr-ID scaffold_4; pos 6401151 to 6401674)
ttcagaaactactgcaagaatctagacgctcactggtttgatcattgcttcttctgctcgtttaataacctcaatttcatgattttttaagttttatgttaaattaaagttaaaattggggtgaattgaaatagttgttaattaatttagttgtgtttggaagtggccaagtgctcagtagaaagcactttaatgttatcaattttgattatctttcaataaatttaattaattaattaattaacattttgttctgatattttttagaaaaaagttacctatgagtgcttttttacccaaaaaataaataaataaaataaaaaacaaagataaaaatcttgcaaaatacaattgaagtgctttttatctgaaagtgctttcgtaggaagcatttccaattttctttctacaacaaagacaaagtaaaatatatgtgtgtatcacttccagacttgcatagttgtttctgtgtgagtttatgtgtttttcatgccctactattggtttatgcagctcctgcagct

SEQ ID NO: 85987 - DNA, 694 bp, Citrus clementina
  Intron number 2 from transcript clementine0.9_013442m (loc us clementine0.9_012926m.g) derived from phytozome v7.0 (c hr-ID scaffold_3; pos 1523485 to 1524178 reverse strand)
tccaattctcacgagtcaacatctcttctccaaaggtacacgacgtcgttcattcattctttcttctttaagctggttctcttttatttaattgtcatgtggaattttagttctgcgtgtttgttcttgcttgctcgaagatgcaggaaagtaagacgagaagctgttgtcatttgtttatttattaattattaggtttcagcgattgtatgtaggacttgtttggctactgagaaactgtaggtgatgacggaaattgaaggaacttaaattttcacttgtcagggtgtttgacgtttaggacatgagatccggaacgttgagattagcccaaacatagggccatattactattttgtatagtctagttattaaaatagtgtttttttttaaaagtcttttaggattcaaataccacccaccgggtcaaataggttctaacaaaatgttaaactaccgtcaatccagaagcttaaactcgtgggaaagaataaacaacagcagttataatcatctatactaccctctaataacattcaaagtggatttgggacttgtcttatagccttcttgttcatggaatctcgcatttttttcctccgaaaattaatgcaataattttccatatacatgtgtctgaagtgatcttgctgaaatttttgacatttcttattgttttgactttaccagctcg

SEQ ID NO: 85988 - DNA, 356 bp, Citrus clementina
  Intron number 1 from transcript clementine0.9_030505m (loc us clementine0.9_030505m.g) derived from phytozome v7.0 (c hr-ID scaffold_31; pos 752518 to 752873)
atcaaacgttagatcatatcaaagcaacgatcgtaccatgtttttttcactcaaaattaatttaaattcttagctgtccccagcacttagcccgagttttcaaggaactttaattagctgacaatctgtatacgaatcctggagaagtaggggtctaactaattaatttgggttttttgttcctctatcatttaaaaaaaaaaataaactctcagctttttttcttttctaattagacaaaaaacattaatttttcgtgatatatatgtttgattgtttattttttgttttattattattattttttttttttgcaagcaggaaaatattgctgccacggacacaattaaagttac

SEQ ID NO: 85989 - DNA, 1057 bp, Citrus clementina
  Intron number 1 from transcript clementine0.9_014928m (loc us clementine0.9_014912m.g) derived from phytozome v7.0 (c hr-ID scaffold_3; pos 1369678 to 1370734 reverse strand)
aggaactggaaggaaacaacaagtatcttctcttggtaagaattcttggcatattttgtttctgctgaggtcacactgactgtgatgaatgtaggacttatagctcgttaacctgtttgagccagattctgattcacctcagataaggactgataaactagcaattaagcaatccagtgaagagggaaaacaggttaatttgacaatataaaagatgccttataattttcccattggtctagttaaagaatatcacaagccatttatagttttggtaaagatattattctatttggtaaagataatgcatcaacatttaaatgacagagaatggatgaaacaaataatttgtcttcttatttttgtcatgtatattgaatttataacagtgtacatttaaggtatggttaagttttaaacttgctatttgtccctgatgtttgaaagttcaatatgttgggattcaaatgtatctgtcttgacttcgaaaacctcagaagtgaaaaatcgtttgttggcagacagctgtttatgggagatttagtcagaaaggaacaagagtgggtgtcttttttttgggggggggggggggaggggattgatgtactagttttgagattgttttcttgctggaaaatgcagggcatataaagtgaaacttcttgaaatccctagttaattgtttgcttctaaaatctctgttaagaaacaataatagcatccacaagaaccaaaattctcaggtttatgaccttcttcatcatactgtatgaagccaccagcaaaaatcatatttattagatttgttgctaaaatatattatccacggatgtataccaaagcattattttactgcaattaaaccttcacaagcttgttatttgatttctttagctacttaaattctaattatgagcagccccatcaatgagagaattactctgccttttggagcaaggttgggtgttatgtttgtgcataggattataatttgtttcgatgattttgctgattttaaattgttttgctaggtgaatcgctctctggttcagctggg

SEQ ID NO: 85990 - DNA, 634 bp, Citrus clementina
  Intron number 2 from transcript clementine0.9_005138m (loc us clementine0.9_004258m.g) derived from phytozome v7.0 (c hr-ID scaffold_4; pos 2750412 to 2751045)
aagaagaggagaagcggcagaaagaggctgagagggtaaacttttgttgggttttttttttttaaataaaatttcaagtcttgttttctaaattctgtttcggtggaatttggtcggttatgaaatgttttttcggatttatctctgcatgtaatcagcttaaggcaacacactaggttaatattggtgtaatgtgtgtgaaaattgcaaagtaattttgccattttggtcttttctttcacttcttggagtctttgtgctatggtaaatatgttattattcatattgcacctaataatgtagaatgttagctttatcatgggaatcttcaagaattacttattgtatgttttaatttttatgtgatttagcattactacatatacaagctatttgtataaactgatgtgagttgatatgtctgagagtcaaaaacaaaatagtcaaagaaataaaagagataaacaatatatagtatgattatatgtgattttcttcctatcataataaatatgatactttattgctcattaacttcttacatcttattatcttgtgatccttttacggtaagtaatgcctctgtttataaattccaggctgccaccaaggcaagcccccaaagtcagaaacc

SEQ ID NO: 85991 - DNA, 572 bp, Citrus clementina
  Intron number 2 from transcript clementine0.9_002507m (loc us clementine0.9_002507m.g) derived from phytozome v7.0 (c hr-ID scaffold_3; pos 8764454 to 8765025 reverse strand)
agtttgcggtaaagtctgacttctgtgattatgttttattgataaataatgccgtggttcagccttactgcagtagtttctttttttcagccttttgatttctcttttctgatggggcatttcatatacagaactgaacactgtcctatgtagaggatatagtgtagttaaggcacatgtcaccgatgtcagctacttcaaaattatatagtgctggatgtggtttaagccaataagacaagaaaggggtgtggccgcctatgaagatacatacaaatatgttaatattcgaaacatatacaaagaaatgtgcctgtaatagttttcctgtctacgtaaagtagtaaaccagctgtctatttaatcttgatacaagttttgcatgtttaaaaaattatctttcatctttaacagtgagtccatttttagctgtaatccttttctcaagcatgacttggttttgctttcgttttcatctcaacagtaaacctgtttgcaactagaaaacattgtaatttttttgtaacttttctctaggtcgacttggaacataatcaatatcgatctttcct

SEQ ID NO: 85992 - DNA, 675 bp, Citrus clementina
  Intron number 1 from transcript clementine0.9_004529m (loc us clementine0.9_004529m.g) derived from phytozome v7.0 (c hr-ID scaffold_4; pos 6365724 to 6366398 reverse strand)
ttagctttgcccatttcagctgaatttttatttcagtaagtattttcctgaacttcgtgtcatttattcagcaaactaacatagggtttttgctgtgtttgtggctcttcttgctggtttttggtgaaacccgtgttaagctgtgtttggttgctgggaaaatgttggaatttgattagagattttgagatttgaattttgatactgacgtattttatcattttagggaggaaaaaatggaactatttttgcattttacttgatacggcctggttttagtttaatttagctgaattcagggaaaagaaatcataaaccctaataattgagtcgtctttttcttcaactttttgttattttcttagcaaccaaccagaggatttattgaacttacatttttttttctctgtcttgagagttcattcaggcttgcttcatttgtatttatgggttagttttaggtttattttaaggaaaaaaagttttgaagggatttatttatttacttttagaagagtatttgacttaagaattttcagaacttgctgtactatgctagtattaagcaatcaaactgttctgttttctgggatatgaatttgatcgataaataatttacttatatatactatttgtgcagcttttattggcattgagttgtgagagattcttgaa

SEQ ID NO: 85993 - DNA, 625 bp, Citrus clementina
  Intron number 2 from transcript clementine0.9_022428m (loc us clementine0.9_022428m.g) derived from phytozome v7.0 (c hr-ID scaffold_2; pos 2134828 to 2135452)
gaacctctgcattaattgacttctttggagatcaggtttgagtttttgctttacagttcaattctattgccttgtcatgttgcttttacttgaagaaaataaaataaaataaaataatttaatggttttgatgcgttaatctcaaagttcacacactttttgtagtcaagaagaataatatgatcttaaattttattaagcttttttttttttcatatttgctgggttgatttgatagaatagggagtatagttttttctcagggaaaaatgattgagatatggaaacttttcagataattacaaatgttaatcagttagtttaaaaccaactttaggataaggtgggcgaattggtaaaagggcaattgccatctccttcatttttgcctttatattttgtgtttggtcaaataggcctaccctaaattgaaggggggtcctggtagcatctggaacatccgtaacaacttggaatctttagcaatactatattttatgtcacagttgcagcttcgaatacaagcttttattctctaagctatattgaatttaaagacttgtctttgggtttttttgtgtgtcacgcagattatatcttatctgttgatatcatcagcatcttc

SEQ ID NO: 85994 - DNA, 909 bp, Citrus clementina
  Intron number 1 from transcript clementine0.9_016532m (loc us clementine0.9_015779m.g) derived from phytozome v7.0 (c hr-ID scaffold_2; pos 854785 to 855693 reverse strand)
tctccaacagctacgcaggttcgtacgagatttcacttgcactgtctgttttttgaaaattcatatctagatctgatgcttttagggtttcattatctacaaaacgttgccaattagatgcaatttcatatttagggtttcatacgcgagtatggttgagattaggcttttcgatacagaattgtactcaatttttgacggattcgaatcagttatttctttgattcggtgtgtcaattatgatgtttaggttcagtgtattggcttatattgatgcgaatgctcgaaaatcctcttatttttatatgagcaatacataccaaaaggttcaaagaaggagcgcgcatgaaaaatagacaataaaattattttatttaaacaaaaaaaagaaaaagtgaaaggtttgagagaaattccaccctcttacttgttggctaataactttaatttgattttacaatgttattttgttttgagtttcgctatgctgttatgtaacttggtgtttgtagttttgtattcgtactagaaatatggcaaaatagtgatctttgtaattggcaaagttgctttcataaataaatgcacagtccctttatagaatctgatccgttaatgagcaattttcatatttcatttccttatggagcagcatttccgcttttaccactgggattggcaataacgcataattgtacatttctcttcacctttatattttctacatctttgcatcctttgtaaaacatatgtatggtgggtctgctccttggttagtatttgtgagatttaactctcatttatcacataaaatatggtaactaaggttttttcattacattgtgcgattaatatttattgatgtatccaattggtggaatatggtaatttcagtgccttttgaggaag

SEQ ID NO: 85995 - DNA, 168 bp, Citrus clementina; identical to SEQ ID NO: 81914
  Intron number 3 from transcript clementine0.9_007229m (loc us clementine0.9_007229m.g) derived from phytozome v7.0 (c hr-ID scaffold_3; pos 4274043 to 4274210)

SEQ ID NO: 85996 - DNA, 768 bp, Citrus clementina
  Intron number 3 from transcript clementine0.9_023278m (loc us clementine0.9_020467m.g) derived from phytozome v7.0 (c hr-ID scaffold_7; pos 2773432 to 2774199)
cttggtacaaggagaaggtttatcctgttaacaaggtgatgctgatgctgatgctgatggctgatcaataataatatttgattttatttgattgatcatttaagtaatttgatagatcaacaatatgtgcattgttttggttaacatggagcttataatctactgggaagattttgaatagtattagaaagtttctgaataataattaggaatttttctaatcaaggtgttgatagaccaattcagatatagaaaaggaagaggttagctgtgtttggtattgaggtagggcagctgtagattaaaaactacagagctaaagtgttttgtaaaactataatatttctactatttttgtcaaaatcataatttaaaaatcatatttattacacatttttaacttttatttcatagttacagttttttttttgtccatagcagctgtagctaaaaaaaccacagcacctcaataccaaatagcctaattatgtgactctgtgtccttatgccccatctttgaaattgaaatgcttgtaatctgtgcggaggagttcctgaataaaattggaatggtgtcttttgtgctttgtgtacctagtaaaatcttaacatattctgatttgagcaagttgcttgcttgcaagaaaacacaacgaaagagttaaactgattgttacactttcgtgcaagattagggatcattgctggagttatgaagtatatttacctattagagttcttctttacaggttccagcactggagcaca

SEQ ID NO: 85997 - DNA, 726 bp, Citrus clementina
  Intron number 1 from transcript clementine0.9_014655m (loc us clementine0.9_011187m.g) derived from phytozome v7.0 (c hr-ID scaffold_14; pos 639087 to 639812)
gcagtctcttcagttcacaagggtaactgggcggatttggtaaagtttaatattttattatttattttttaaattatgtttttgatctttgtttggtgatattaccatctcctacagtatctgaaatcttaggccggtttctgcctgttctttgattttttattttgtcaaagatttaatcatttaagaatttttgcttgaattatgctcaatgtcgtctcattttaatattctattgaggaatctagtgaaatttaaggtttcactgcatattattgctgtaattcatttcattttgtttcacttttcttcaattcaaacattcaataggatatgcatgacatatgcagtgagaaaagattgacatggttcatcattcaatttcaccaaggaggtgagagaatattatattttagcggcagacggagctatttttctagtatctggggggattatgctaatcttttcgtggtgttttgggaattttgtaaatcattaaattcaaaaaagttaaatgcccggtttatcacacccttggatagagtttatctcttaggctagtttcaatctagtgttctgcacacaaacacacttatgcacttgtgcaaatattttatgcatgtgtttgatgacagaaactttctctggtttggtgatttattcctggtcctctagaataaaaggtttcttttatttctcggcttgttcaatacagatataagcaaa

SEQ ID NO: 85998 - DNA, 873 bp, Citrus clementina; identical to SEQ ID NO: 82619
  Intron number 1 from transcript clementine0.9_011720m (loc us clementine0.9_008792m.g) derived from phytozome v7.0 (c hr-ID scaffold_3; pos 1726802 to 1727674 reverse strand)

SEQ ID NO: 85999 - DNA, 770 bp, Citrus clementina
  Intron number 1 from transcript clementine0.9_014417m (loc us clementine0.9_014417m.g) derived from phytozome v7.0 (c hr-ID scaffold_14; pos 1794506 to 1795275)
tttttttcttcgcaggccaccacccagagctcacggtaatacattttcttctctattattttcttattctctgtttggttcccgagaaaacgcacaacttaaaaagaaaaaaacgaaaatttttctttttcattttttgtttcgaaggaaactaaatgtaaatacgccttgtttgtagcgttttctgccttttctcggcagccaaacagattatttttttcttataattcttcgattttcctttaaatattcgtgtacatcatacacactgttagttgagtgccagcttattttaactttctcgtaagattttattcaatttctcggctgccaaacagtttacaggatttttttttaattttccacttaaacgagaaaacaatgaagaataaaatcataagaaatggaaaataatggatgaacaattaatatgcatggggattgattatggtgatcgattcggtgctgcaaggcagtgaatgttagaaaataataaacttttattttttctcttttaagaaatagaaaaatttatggcgcttttaatacgtttgatttgattttgattttgatttgatgtatatcataaattggttatggagatttgcgcttcttgtttccttttttgttctgctgcttctattccttgtttcctgcttgtacggttttctcatcttaaattcttcgtaaaagcggcaagtaattgagtaattgagttgttgagttatgtctttctatttttctcagcaatttaatacggtaggcccggc

SEQ ID NO: 86000 - DNA, 619 bp, Citrus clementina
  Intron number 2 from transcript clementine0.9_001638m (loc us clementine0.9_001638m.g) derived from phytozome v7.0 (c hr-ID scaffold_14; pos 333058 to 333676)
aagccatcaaattttactaccttatcagaattcaggtaagtttatcgcctttttaccctctcttatgagtcttcattcaattcactttttttattggtatttaaaaaagaaaaaatagtaaggtaatgtataattaactattctaatagtaaaaagaaacctaaaagttagatttggttttcagtataggggacatgctaacccagaaaactaatgaaaattattagtttttacaaaagtttttaaactgtatttaaaagcaagattcaattgttaccattatttttatttctttctaattgttaacttttcttgatgctaaatttatatagccaaaatgcaaagcaatgcaatgagtagagtaacttcaaagcatagtacatataattaatagtctctttcttagatataattttataatgatcaacaggaatcacaccaaaatccacagctaaaaacaaaattgacgtttgaacgtcaatttttttatagataaactttattttatgtgatttatttatttatttatttttattgtatttcaaaggtataatctaatttgggtggtcaatagattatgattttattttgaatcttcttcttttcagctgtttctgcc

SEQ ID NO: 86001 - DNA, 840 bp, Citrus clementina
  Intron number 1 from transcript clementine0.9_004180m (loc us clementine0.9_002946m.g) derived from phytozome v7.0 (c hr-ID scaffold_10; pos 2389341 to 2390180 reverse strand)
aagcctccttggctcataccgattttcccggtacgttttggctcaaaacctcagttttttttttccactttaaagtaaatgaataaatttccgtccgtatttcctttatttttgatatatctatttttcggggattttcagttttacgttggcaattcgcgttggcaaagtgccttatttgtttttatagttacctataaattcggcgactcgcgttttattctgtttttgcgagtgtcgattagctgatagagatttttgtgtctggtctcggttaagatttcatcccgtgggtcattttcgagaaatcattttccttattttctttgggttgtaagatgcttttttttttttttaatgaaaatatcattttccgaatcacgaatacctgctgcttgataaaatgtctaaatcagatttaatgcttttatttttgcatagttcttaattttttgcttcttgtataacgctagtactgtatcgtttttaaattttgtattcttatattttaattatgtccagatcaactttgatcatgagaattgtgaaatgaaatcgtactttgtaattcttttttgaaattccctgtttggtttccaagaaaattggaaactgggaaactacatcatcaatcatccagacgaaattttatacgagactcggtttattggcttgctattttcagtcattgcaaaagaaagtagaaaccggggcttgtttggacaagtataggtctgcttgagatattcaaaacattttcctttgtcagttggtgattatgatttcttctcctttatcatttcagacgatatagatttgcaatttggttttccactgtga

SEQ ID NO: 86002 - DNA, 1059 bp, Citrus clementina
  Intron number 2 from transcript clementine0.9_006090m (loc us clementine0.9_006096m.g) derived from phytozome v7.0 (c hr-ID scaffold_10; pos 4819391 to 4820449)
ctgctctgctgtacgctgaggatttctacattgaggtgattaattaacagtgacctttttgcatgttgttctctatattatcattttgtgtgtgtttattttcaagctagaaccaacataaaactcattttcaaaaaaaaaatatcaacataaaactcataaaatctgaatttagatacatactcggattatgtgcgaaaaatcgacaaatcaaggttgtgctactgaattctagttagaggatgatcacaaagctggaaaatccccgcagatcacgttgcaagaaccctctaagcttctcttggctcgaattctctcaaattgcactctttagctcaatggcttgtccctagcttgtctcttgtacctttctccatggatttactctttatttatagcattccaagagtagtgaatcatcactaaataaggttaaactattgttggagtcatcttccactcagtgatcacttaatatcttaggatattatatcattccactcaaaattgatcacttaattcttggtctcctcatgggtgacctcaaaatgatagaaccctaatgtacatgtatatctatttacatacacatacacatacacatacacatacatatacatatacatatacatataacttctttgctaccaattgtatattgtgtactgtggctgttcagtggaagatgctttttttgtgtttagtgcagtactatcccctttgcaatgttagtttaccttgtatccgataaaacatcatgtgggtgatgtatttagcaatcatcaaacatgttttgctggagatacataattttatattttatatctctgtctcagtttttcgttagatttaccaactaggcttctcgagacaagcctgtttagatttaaaagtgatttataggaatcttatatgttgtagatgattgaatgcaaggtgcatctacggaccaaaaacattacagtttcatccaagttctttctttcatacttcctaattgtgtttagatgtaataatggctttgatttgatcagaagtggagcggttttcagttattca

SEQ ID NO: 86003 - DNA, 624 bp, Citrus clementina
  Intron number 1 from transcript clementine0.9_031746m (loc us clementine0.9_031746m.g) derived from phytozome v7.0 (c hr-ID scaffold_4; pos 2431024 to 2431647)
tcacttgtacaaatttaatcctgacacactttcaggttaaaaatacccaccaccccgtttctcttttttgtttcttttgtttttctgcaattgccttgctggtagttttctttaaattaaataatgcacttacgcatattaagttctttctttttcttgagttcatttggttattaattagagtgtaacttcttgagtttcttgaaatagtttagtttcttgagttagaagtgtttcctttgcgttcgttgtacatatggtctcataacttgatttgttttcgtactttggtaatgttcttagtgcttttcttgagttcatttgttatagcagtgggaatttcttgagtttcttgacataaaatggtttgctcttcagtttcttgagtcaaaagttacttctttgcgttgttgaatggtgatttaattttctacgtatggtctcgtagtttggtactcggtatgtacccaaaacaaagaccaaaaatattgatgttgatattgttccgtattccaaataatgaatcaggaagtataagttttttattttttattttttgggtgattgatacgacgatgattctgtattaataatgcacagaaaagtataagccttttggtgaaa

SEQ ID NO: 86004 - DNA, 788 bp, Citrus clementina
  Intron number 2 from transcript clementine0.9_015342m (loc us clementine0.9_015342m.g) derived from phytozome v7.0 (c hr-ID scaffold_3; pos 8505408 to 8506195 reverse strand)
cccttttttgcctcgcaagtttccttgcatacctggtatattagttttgcctctgattttctgtgaactggaatcttttaataacttttgtccttctcgaacatattttgatgtgtatgattcttagttgtgccaagcttgtaataccaattctattattacgctggcctttttccgcttaccccttctgtatattgacttctcagatcctctcttctgcttaacatggtgatgtacttttcatatgataaatcaagtaatttgtttttcatcatactgaattttcgaaattacttcagtttctatttgttaatttactcaagatgctatgtgatatgtttgtggagccttatggtccattccattgtgctgtcctactcctatgatgattttggaatgttgttgttatgatttgtctccgacttctatttttaactttttctgcttctgtttgattttttatcggacaaattacttgtcattcaaacgctatcaactttaaaacaagatatgttatgacatacatcattgtatcgtacgtcactcaagattcaaagccttaagaaaacagtttttggatgatactgattgattttgctacaaacttggatatagaatacttgttgaaagttttgcttttctgttttattttttatcaaatgtcaatgaatttattctggtttctgctgtatttgtttctctatgtataatttattagaaccattgcatttctgctatttattttgctgaggattttttttttttttttttttttgagacagcaactg

SEQ ID NO: 86005 - DNA, 890 bp, Citrus clementina
  Intron number 2 from transcript clementine0.9_002773m (loc us clementine0.9_002773m.g) derived from phytozome v7.0 (c hr-ID scaffold_2; pos 3352123 to 3353012 reverse strand)
agtatcatttgttcgacaaaggagaagtaagattttctttcttgccttatattgcaatgtaattttagtcctgtggaagctgtataattgatctggctggtgttttgtactaaggtgattgattctttgttggcgttgaaacctacgaaacattttgcattaaaattggggaggatattagtgtctgtcttttaagctgagtccatcccactgaacgtatagaggacaaaaccacatgtttattagagatctgacagcaacaaaatatttttcggcatccattctgtcagtgaacttttgagataaatagtaaatgattattcttggtagataggtggcaatggcgtttatttatttattggtagtttagttagaaagaataaggagaaggtttgaaagttccaatgaggaaaatgctctattttgtatgggactgaattcaatttttttcaactcgcttagcttcggacttctttcttctttgttcatcacaactaggaaattggggtctgctgtggaaattaagttgttagttattgttctttattctgataacttttagtaagttttcataaacatttaggtgcatatgcagttgcatgaatttatcttctgcatattgtgtctcttagagaaatgcagtatcttgttgggattatttatgagatatgcaaatttttttcttgatttaatttttgatggctgctgtcaaaagaaaattatcgatggcatttgccattgtttctatctgtgaggctgaattattcatgttttcttttcaaattttgacttcacttttactgtctactgcataacacactcatgaggtggccctaactttttctttcttatatttggtttgcagggtttaggtttaggctctttgtctg

SEQ ID NO: 86006 - DNA, 635 bp, Citrus clementina
  Intron number 1 from transcript clementine0.9_006876m (loc us clementine0.9_006876m.g) derived from phytozome v7.0 (c hr-ID scaffold_4; pos 6951268 to 6951902 reverse strand)
tcgaggtcacagagagtccagaacccaattcgacagtgagttccccccccccccttctctctctctttttgtccatttttgtttatagtttcttgttaaatttgcgacatttttcttttgtgtttctttatattgtcaccttaattttgaggttttatttttttgtattactgggtatttttctgtttcgcttggtttaaattccataggttgtttcattactgcattttttactatcttacaagttttaattcgtttcatttcacatatgaatatgtttcttttgttttatcaatcgccttaaattatgatcaacactgaagttttatcagttaaatggcttttcgttcacttcattctctgaatttgttgtaataatattgttgctaaatgttactgtgtcatatcaccgcctaaattgtgttgtgtgtatgtatgttttctttaattatattattattttctattaattcttcttgactatctgtgtcttggttgatatttaagtctgctttgttatgtagttatgggcttcttttttcttttctattcttttggtagtctcattgtgatttgtatctttctatgtttctatttatgcaggtgaggctgagtgtagaagttccagaggcggt

SEQ ID NO: 86007 - DNA, 719 bp, Citrus clementina
  Intron number 1 from transcript clementine0.9_008190m (loc us clementine0.9_008190m.g) derived from phytozome v7.0 (c hr-ID scaffold_24; pos 2583443 to 2584161)
ttggcaagtctgataagtggcttcagtgccttgaggtttttttttttttggttcaatttcaattttttatgctgtttttgtgcaattttggcttctgggtagttggagtttgttgagtttcttgtgctgtcgcttgtgtgtatgttttctataattatgattctgaattgtgcgtttgagttttcttatggcgtgttttgaagtgcttttgacgccactataagcgctttcaagtatcaaaattgtaatgtctgcttttactgacttgttgaaataggcacaagctcttttttcattaaaaaacaatgggactgttttctggagaagtacttttagatgggggaaaaaaaaaaaaaagaaacgcccctgaattgttttcttgggaagcacttagtatgtgatgtttttaagtggaatgctttttagcaatgtcaataccttccgtttgtggttccatatttcattttagtcctagagagagatgtttattcgggccttatacatgagcattgtgatcatattaagattaactcatagaaatgcaacataatgagtattaatctgtgatggcattgagttaatacaatttgacttattttgtgcaaagggaaaatgggtttagatctaaggtgtgtcaatgtggaagttggcattgccatggtgaatttcttcaagcaaacagtttgcctgacttaaatattgcatttttaggtgttcag

SEQ ID NO: 86008 - DNA, 786 bp, Citrus clementina
  Intron number 1 from transcript clementine0.9_013352m (loc us clementine0.9_013352m.g) derived from phytozome v7.0 (c hr-ID scaffold_10; pos 2005915 to 2006700 reverse strand)
gattttttgcaatcgtgggactttcttacatgtaatatttgtctcctgattgttgtgtttcgatctgtagatgatcattaatgtacagataaacgataaaaagttgttgaacatgtgatcatgtcctgtttctgcttggattctttttgcttttttcggtttgatgtgatcaagtttacttgtgtattgcatcgtttgatgtgttttatgatatgggtttgtctcaaaattggattcttctctaatgagtttgtattgaacaagggtgcagattgttttctccccagttttaaatttgttgattttgcttgtttggttcattttgatcgggtcaatttgacttttttcattgctgtgtgttataatgagtttacgtgaacaggggtgtctcttttgatgtgggaattcttttctttctttgtttcttttacaagtagaatatcctttaacagaagtctagtattcttctctccaaagtttccttattttggtgtcccttcaattttaaattcctctttttgattcatattttgataatatctaccagttctgtaactccttttaaggtttctggtttccttatttgtctcttttttttcgctcctcttctttctctatgatctgaatttgattcttttcactttggccatggcaactgattgatctgataaaaaaatcttttatttgcttcatattttatgtgcacatcctttcatgacataacgtttttcatctgtgtttctatctgtaggtttgagacttgaagtctgctgatccttccgaaat

SEQ ID NO: 86009 - DNA, 978 bp, Citrus clementina
  Intron number 1 from transcript clementine0.9_010465m (loc us clementine0.9_010465m.g) derived from phytozome v7.0 (c hr-ID scaffold_10; pos 808797 to 809774 reverse strand)
agccaaagaagaaaggttagtttttgttcaattaaattttcttttcttgagttatgggaatgttttactgtgaagttggctttcttttgtgtttattgaaacatttttggttttgattcgcttgttcaatgttatgtattaaaaagtaatagtgaagaacttagcatgtcatcgaaaaaagagagcaaaatgcaggagtaatccttgtctaatttatattttatacaaaacttggttcgattgagtacaaactaaaacttggaatctatttcctttgaagggttgagcatcagactttatatttatcctgttaaaggagtaatagttgactgtcaattgcaatatcagtgttttctcctcttgggattggttttaccgataatggctatgctaatgaatatatttctttggcctggtttgtgggcaagttttggaaaatgaaatcaaattacttcgccaatttaacagagtgattttttcacaccagagaagatgtattcaactctttcaatatcagggcaaaaatattaatgaatagcagggacattacagaattttgggagattattatttttgcttctgcatcaatgatacaagctgaggcagttaaccagccccattttgcgagtatctcaattctcaattgaattatcataaaacttttgctaaaccagatccttattggttgctctaatgctacttcgctgtgttcccaattggtgaagatattatatcaacatcttctttccctttgtaccattcacatgtggcttgtaaatagatagtgtggacatctttggaggacttctgttctcacaatgtggggagaattgatttcatcttcagttcaccaaattaatttaatgaatattatttcttctttaatgatgcaaatcgcactatgttctttttgcttctccatacctactttagtctgacttttcagtactatacttgagttttgcagaacctgaagat

SEQ ID NO: 86010 - DNA, 849 bp, Citrus clementina
  Intron number 3 from transcript clementine0.9_025994m (loc us clementine0.9_025994m.g) derived from phytozome v7.0 (c hr-ID scaffold_2; pos 448067 to 448915)
aggtatgttaacaatgcctgttattctgcattgtctatttttcatttgacttaacagataggattgttgccttgatatgtaattgaatatagctgataatttgtgtaattttcaggcaaatggttctttgctttttagtatgattttgatagcactagtgcttgtttttgacgttgtatcttatttgtcgtttaggaatatccattcttgttatgtctgtgtgcgcacttacttagacttagcctgtcagcagcatgtgcggtgaaatcacagtagtattatgggctcagttttcaccgagtaatggcatttatcatccttcagatattgaagtttatgtaatttttctactgtctctatttgcatgctttgactagttaaaccctttcggcaaagaaaaaattcttcctttgagtctggggaaaaaggataactttttctttgtttgtgaaaaactattcaaaagaacaacgctctcctatttttttctgatatttctacctgatttaattaatgaattggaacgaatcaacgcaatggatcaatctttttttaacacgtctgctattagaaagcaaggattatgaaatgaggtttgtttttcaagaaaattagaagtaaatagaaatctttattttgaacttgaggattcacatttagcgtctttgtttaattggtgaaatatggttgagaattgaaactgtttgttttccttatgttgatttgatggttagtatttgtggaggtttagcatccctggtcattggagtgctaattctcagcaattgaaagtttcagatttattggttacgtctgacattggtttttgttcttttggcttgcagcagc

SEQ ID NO: 86011 - DNA, 576 bp, Citrus clementina
  Intron number 4 from transcript clementine0.9_016191m (loc us clementine0.9_014720m.g) derived from phytozome v7.0 (c hr-ID scaffold_2; pos 7737347 to 7737922 reverse strand)
tgagtgaaggttacaacatagttggtctctcccaggtaatttaccaggattgtggctgttcaatttatcgcatacttttaatgcatcataatcatcaaacatgatccgctcattttatatctctcagcaacttagaggttgtttatctggtggcatcaaaattatataaatatcaaaagggagtcaaccgggttttgatcctttcttgtgttataaattgctgtgttgtatagttttagtttgtaaggaaattaggatcatttgatcttgtctgataataaattaagaaataaataattaaattattgataatgaagaacaatgcccctcatccgtactattatttttctattgctttttcatgtctctatacacacctagttttctttctcttaaattattgataatgaagaacaatgcccctcatccatactattatttttctattgttttttcctgtctctatacacacctagttttctttctcttaatctagatacggctgcagcttttctttaatgttttcatttccttgtaacagggtaacttaataggtcgaggtgttgtagagttctg

SEQ ID NO: 86012 - DNA, 367 bp, Citrus clementina
  Intron number 1 from transcript clementine0.9_016191m (loc us clementine0.9_014720m.g) derived from phytozome v7.0 (c hr-ID scaffold_2; pos 7738190 to 7738556 reverse strand)
cttagcagtttttcaggttctaaaggatattgcatgtatgtttctattctctctcattttagcttgtttctttaattaatctaacctaatcatgtttattagagttgattcatactgattgtgcatttgagcatatcaaaacatctctttggagtgctcgaataatcaaatacaaaccattgcttaaatttttcttgtaattttctttaaattagtcagatctaagttgagtcaagactgaatcagttgtagtcaattgtttgttcttcgatttgaccgctatgagagtagttgtataaatggttacctcttgtcgatatgtgcattattgcttcacttcattctcaatactgcagagaagttgggg

SEQ ID NO: 86013 - DNA, 653 bp, Citrus clementina
  Intron number 3 from transcript clementine0.9_010267m (loc us clementine0.9_009459m.g) derived from phytozome v7.0 (c hr-ID scaffold_4; pos 7026043 to 7026695)
cacaggcaggtaaaaataggaaattcgtgtttactgtttctatgatatatggtattccactattcctgctactattgttgatctgtagaattctgtcaatttgctatcaccattgacctgatgctattacttatgactttgaatacatacacgcgtgtcacttcagtgtctttctcaccatcaaaaacattttaactccccctgtaacaggcacatgtaggcagatgatcaatgcttataaaaattatatctacattgctttattttctgcatctctctttctacaatgtcatcttgaattttcccaaaaaaaaaaaagaaagaaagaaaagaaaaattacttatggtgattgtgattgtgattataaatattcttttattagtttcttttttatttgcatatttcaggttatccacaccgaaccatatattggtcaatcaaaagtgaaatctgctgctgctacttgtcgttcgtatgttacttttctgcattttttgcattagctcaccttattctgaaggctgaactcatttttgtcttcacttgagagtttggtggggcttattctgttgtattggctttgtcttgattttatctaatatgaatgtgtgttccaggatcaactccactgttcacattattgagcacagag

SEQ ID NO: 86014 - DNA, 598 bp, Citrus clementina
  Intron number 2 from transcript clementine0.9_020145m (loc us clementine0.9_020145m.g) derived from phytozome v7.0 (c hr-ID scaffold_31; pos 1141265 to 1141862 reverse strand)
cctcaacgacaattttgatcttgttgcactctccggtaatatttgcttttacgccctttgacttgagtacaaacagaccttggagtcttttgggataaagcagtattggagccagaattagaaatctggatggtggaaaattttttaatgccaatactgagtcttgaaatcttagagatagtttaaatgttgaatatcttatttaaaaagaaaaaataaattttgataaggatgagaaatctcatccactaaatatcaatttttttctcattattactcttactaagacgaccaccgacacaaagcacattcatactctacagcacctaggaggcttgactgaatatcctaatgatgcgaagaaactgtgttttaaagtttgacattggtgattaggaatatgttaaaacgtttgacaaatttactccccttaatcacatcatgaaatttgaattgcttcccaaaaagaaaagtgagaaccaccataatgaaactcagttattatccttaatttgtatgaatttgagtaaaaataacaaagatcggctatgcatgtttttcaggagctcacacgtttggaagggctcagtgccgaact

SEQ ID NO: 86015 - DNA, 641 bp, Citrus clementina
  Intron number 1 from transcript clementine0.9_020145m (loc us clementine0.9_020145m.g) derived from phytozome v7.0 (c hr-ID scaffold_31; pos 1141983 to 1142623 reverse strand)
ttcttactattgcagctgaagaatctgttgctctggtatgtgtgaatttctattaacaactcctcatctttctcgactacatattttatgcttaaaagtgattaaattactatggtatcagagtgtaagtttgactttacattcgtgttggaattttcagaccctgagtactttaactaaatgaatccacatgcttagttttgagcggcaacagtcccatcgaattaccatgttgacttcgtgatagccccgggccaaattttccgtttgaaaaggggagggtttttctttccccccccccccccccccccccccccaaaaaaaaaacacaaaaaaaaacggtgatgcgattcatcgaggacacatcagttttacgtgctgggttccagtatatattttgaaaaaaaaaaaaaattcttctttatatgatacagtctggttgaaccgttcactcaaaattataacgtcgggaaactgctaattttgggtgcaacaagacccatataaatattagccaaatagagtcggaaagattaattgcatgtgtctttctaattttagttaaatttgtttattatgcatctctcaagtgatgcttttgactaatgatcgtggttttggtaacagtcagggggtcctgc

SEQ ID NO: 86016 - DNA, 676 bp, Citrus clementina; identical to SEQ ID NO: 81961
  Intron number 1 from transcript clementine0.9_012672m (loc us clementine0.9_012672m.g) derived from phytozome v7.0 (c hr-ID scaffold_3; pos 5128711 to 5129386)

SEQ ID NO: 86017 - DNA, 594 bp, Citrus clementina
  Intron number 1 from transcript clementine0.9_006697m (loc us clementine0.9_006697m.g) derived from phytozome v7.0 (c hr-ID scaffold_10; pos 1040366 to 1040959)
attcacgtcttcttcacctactctgttttcaagaggtagctatacagtgtcgtttttcattgccgatgctatctgggtttttttttttttttggttctttgtgagtcttttattattgatcaaagtgtttgtgctctgtctggttactgggaaaacgacaacttaaaaagagttttaaatctcacgtttgatgatgatgatgatgatgatatgatattattagcctttctgatggattctatttataaaataaagtcgtaatttttacaacgttacttggcaatgccattttcttgtataatttatatataataataggaagcttgtcttttcttttcttttctttttttcatttttactctcaaatgtttgggggaatttcaattacaaatttttgaggtaaacatgtaatatatacgcttttgaaatattaatttatgggtctgttcttcccggtccacagctttagatgatttgccttaaaaaaaaaaaaatcattttgaagttgtacctatgattgttcttttacgttaacttgttctgtcactgtttttttcagggagggattctagtttgtgcagagctgctgctgct

SEQ ID NO: 86018 - DNA, 480 bp, Citrus clementina; identical to SEQ ID NO: 82998
  Intron number 1 from transcript clementine0.9_021926m (loc us clementine0.9_021926m.g) derived from phytozome v7.0 (c hr-ID scaffold_3; pos 9094044 to 9094523 reverse strand)

SEQ ID NO: 86019 - DNA, 779 bp, Citrus clementina
  Intron number 2 from transcript clementine0.9_016327m (loc us clementine0.9_016327m.g) derived from phytozome v7.0 (c hr-ID scaffold_3; pos 1556316 to 1557094 reverse strand)
aggtatgtggattgctgtttttcccccgaaaaaaataaagtaattagtcggctcagtaaattttattgcagtgccatagaagaagtgggttttactctgttttactattattggttaatatgtttctaaaagccgtatgcatgcgaattataaaagcgtaattcaaaatattattttattggactggaaattaaaaccatgcttcaaccatgagtaattgctgatagattgtggactattagaaatttttcctttagatttgtgtttgtactatcctgctttctttgtggagcctacatcttcttgacgtgtttcttgagaatgtcacccgaactcttcacttgtagaaccacatagagttgtctcggattcaagaagtatacgtttttccaattattaggtcaggaactgaagaagcaaacctgactagccttttctatgaataagatcggaaccttgctcttgtgtttcttctttagttttgttgtcttaactagatctgaagtctgatccatctgggttatatcagaaattaaacttgaagctctgcccacacggtttacctccttccatgtagtttgcaagtcaggtggtatatctggttgaaaattggataggatttgcattttcttttcctgtcttctagaaactttgtgagatggaaggtctctgtattataaattgatactgatgttcttttttgcttttcttttcctgttattattatggtcatcatatttgcagaaagggagcaggttgttgggtcccatatctcgtct

SEQ ID NO: 86020 - DNA, 672 bp, Citrus clementina
  Intron number 1 from transcript clementine0.9_002651m (loc us clementine0.9_002651m.g) derived from phytozome v7.0 (c hr-ID scaffold_10; pos 2710629 to 2711300 reverse strand)
tttcggtaattttattctttaactcaatctgggttgttcccagttcgttaattctcttacagctggtgactgattttagagctcttttaagagaattaaaagttgtatgttgtttatgcgatgattgtgattgagctagaaacgtgacgtgcccagatccgtagatgatagttttgttttgattcgtattgcttttctttatattgtattgtaataattgccaattgagtgatcatattttattgggggttatgttttgtaattacttctaaagatttgttaaaatttctgccacttgattacccggactgtttggttattatgtaagtgcaatgtgaaaatggtgaacccagaagtttatgtttttacttgtgacttgactggtttcttatcgatgttattgattctctatgttgaagtttgctttttgcaattgtgtatgatgtgtgcttttggtaaaatgtaattattagtgtcctttttggtgttttcttctagcagattcctcactcgtgttgtttctatttttttctcttgttttaagtagggatttttcatacgccaaaagtgcatgaatggtattgagatttagagtggctgaattttgttgttttttcctggtggccttaaatcaataaacaagtaaaacattgaagaagattaagaagcgaa

SEQ ID NO: 86021 - DNA, 858 bp, Citrus clementina
  Intron number 1 from transcript clementine0.9_002110m (loc us clementine0.9_002110m.g) derived from phytozome v7.0 (c hr-ID scaffold_2; pos 4175852 to 4176709 reverse strand)
gcataggcagggcatagcatcgcatcgcttccaaggcaagcaataatttaacatctaattttaccaaatgaacaaaaaaaattctctcactgactcacttactactaatgagtgacgatgatgatgttcttcttgtttttctgtttccatagatctacgcttctctaaactccaatctccataaagatttttcattatatatatatgtgtgtgtatataaattcactcactcatgcatgctgcctccattttatccacaatgctttgattctcctcctcctttctcctcttctctctctttctctccaggtgagcaacctccacaaatatatttgttctttattattttccctttaaaattgcgcaaaaagtcaaaatagaaaaaaaaaagtagctcctcaagtgtattcaagtattcaactcggttgattgactggagatttacgctgaaatttttgttttctttttagtttattgaattttctcggtaaccaaacagagactgtagaatttgtagaagtaaggaagtcaactataattaagctgagtgcttgaagttgtttgtttgtttgtttttaattttctcggctaccaaacagagaagaagaaaatatcttaaaagagagaaagtcaactcgaaattaagcagagtgtttttattgctcttttcctgtcttatttccgcgtgaatttaggataattgattttttctttctaaaaaataaattgtcctagaaaatgtctagataaaatttttaaaagattaatttctttttggaatttgctgactgactcgaaagccaatttaaagtttctgacagttattttttgtttttagcgtgttgaagaagaattgat

SEQ ID NO: 86022 - DNA, 350 bp, Citrus clementina
  Intron number 1 from transcript clementine0.9_003301m (loc us clementine0.9_003301m.g) derived from phytozome v7.0 (c hr-ID scaffold_41; pos 1343922 to 1344271)
ctgccgccattcattatcctcgcagtgttcctggggtcagtcactctcctttccttttttgtagtctttttgttattacaacattctaacttaaatggggttagttctttttttgtttttttttccttgttctcttaataaggaatttgatcttttgtttgattgctgagaaaaaatagttcgataattgaatctacattgaagtggagcgcattcctttatttatttagctgttcgtttacttgagttttaatctttcattggaatatgcattgttttttgaagcttgaaagcaatctgtgttctcagttctttgtaatcttctgagtataaatttgggtgtgtggtag

SEQ ID NO: 86023 - DNA, 420 bp, Citrus clementina
  Intron number 1 from transcript clementine0.9_018962m (loc us clementine0.9_018962m.g) derived from phytozome v7.0 (c hr-ID scaffold_10; pos 1327192 to 1327611 reverse strand)
cgttttgctcctaaccaccgctcttctcttactacgtgagtcccattaacattactcacttttattcttcgtaatcgcttcggtttttcaaaattatgcttccgctgatctttagggatttataatttcatttgaattctcaaactgcgctcaccttggatcaattatgattcttttgttgcattctccgattgagcaacgaattttccaaaaccatcttttattttatttttgtttaatcattgcattaactttttttttccctcctttggggtcacctgtttgtacaatggttttttaatattgtttaaaagaggagaaataaaatggatagtctggaatatcttggatgctaatgtgctcaatggcttgttttaccttgcagttcaagtgttcagacgcaagaaatctaataccatt

SEQ ID NO: 86024 - DNA, 671 bp, Citrus clementina
  Intron number 2 from transcript clementine0.9_026335m (loc us clementine0.9_026335m.g) derived from phytozome v7.0 (c hr-ID scaffold_4; pos 6966703 to 6967373 reverse strand)
gcgtctggtcttacatcaagaccaacaatctccaggttcttaatcttgcttattattattttccagtttccaattaaaagtatatatgttggtgattttatgtgtgtcttccaactttaataaataatccatggtaatcacgtgtctgtcctaaaggtgatgctttgagtgtcctaatggtgatgcttatcttatcagatagtacatgcaactatttatacgaacggagctggcatggtatggttagatgagtatgaatgtgttttttttattctcgtttattcattttgacattttcaattttaatcttccaataattttgtgcaaccttagtttgtatatgtaacttagtttggttgtgttactcattattgtatgaatggggctcttgttttagcaattgattagcttaacctgaaggagttggaattttgcatattgcgttcgatttttagtgctatgatgccgatattccatcattttatttattgttttagcaattaaatatcctaacctgaaggagttggaattttgcgtattgcatttgatttttagtactatgatgcttatataccatcattttctttccttcttattttatagcaatttagttgaaaaatatttattactaacttttatactttcattggattaggatcccaataacaaga

SEQ ID NO: 86025 - DNA, 788 bp, Citrus clementina
  Intron number 1 from transcript clementine0.9_018919m (loc us clementine0.9_014557m.g) derived from phytozome v7.0 (c hr-ID scaffold_24; pos 2285671 to 2286458)
ccgagcctgagtacttcgaagatcaacgcaacgtaaattttgttgtttcttgctgtcatttgccgctgtttggtttcgttctgtgctgacgttttttttctccggtgacgcattcgtttgacgctgtgaaaagtttgttgtttgttttgtattttttggagtaattattaggtttctgacacaaattttaggaaattaaaggctgttaaaaatattttgagcttttcgaaatggaacagttgcgtgtaggtatcaatgtctgtgaattggattgctgttcttgaagtgcattgttaatgaattagtatctgcaaaagatataaaacaatttcaatcagaaaagttacattggatgaagccattggaactaagtgtcgacttgtgttttatgtttatgaaaggagaagtcagaaaaatagaaatttaggaagcttgttaggtttggaaagtgaatatgtgcattaggtttcaatggctttgtgaattaaatgctattgtgcaagtgctttttttattaaattaggcagcataaaagttaaaaaataataataaaagggaagttaaattagaaaatatgatattattttgttttcttatcttttatgtatccatgtagttaaggtaatttctcagctagggaagtattattactctttaatctagagaagtgtgctcacgcactcgtacgtagtggttttgcattttaccatgttttcttttactgattggaattgtttgttttatgttatgtaggaagatttgtggaaggaggtgttccctgttggaac

SEQ ID NO: 86026 - DNA, 530 bp, Citrus clementina
  Intron number 1 from transcript clementine0.9_017116m (loc us clementine0.9_017134m.g) derived from phytozome v7.0 (c hr-ID scaffold_3; pos 5171970 to 5172499)
gtctcagctttaagaataaaacgaaggccactcaggtactctcgcttcaacttgtacgggattcttgtgaaactttgagtaagttttagttgttcttgccattttcttcagattttgttaaggactagttagatttctttccttgtatggtttatccgtttttagtttctttttttttttaatttatttttaataaggtctctcctttggaaataatttataaggtctcttaaataggcagttaatttggatatttttgaaaactgaagtttccctctttctcttattgaaatgaaaattactatattaaccccttacttgttctgtcttgcttgcccttcactgccctctaaaatgataacttggtagttttcgccaattcagatggtaatatatggtgttttttgttactcctggttttgtttccatttctagatagttttgaattattaattaggccgagtaaagaatctttgagtgtatgtttgattttgtgattgtgaagaaggtgagcggagtaaagagagaag

SEQ ID NO: 86027 - DNA, 154 bp, Citrus clementina
  Intron number 1 from transcript clementine0.9_023129m (loc us clementine0.9_023129m.g) derived from phytozome v7.0 (c hr-ID scaffold_85; pos 395044 to 395197)
cagacgggctggcttgattaaggctttaacagctggtaatggcttaatattttcttctctttttatttgaactaaattaatgggtttgttctatttgagcttatgattatttttttcttgttaattttaattttaattttctgggttgttgcag

SEQ ID NO: 86028 - DNA, 425 bp, Citrus clementina; identical to SEQ ID NO: 83807
  Intron number 5 from transcript clementine0.9_011014m (loc us clementine0.9_010985m.g) derived from phytozome v7.0 (c hr-ID scaffold_3; pos 1051190 to 1051614 reverse strand)

SEQ ID NO: 86029 - DNA, 864 bp, Citrus clementina
  Intron number 1 from transcript clementine0.9_006718m (loc us clementine0.9_006718m.g) derived from phytozome v7.0 (c hr-ID scaffold_4; pos 6701226 to 6702089)
caactttgaaactgctttcaaggcaaagcctaaaggtatgccaaagctcaatatctcatgattccccttttacttccttcttccttttcatttttagctgactggtattaatttctgcatgtttcttctttctactctgttttttattttattttatttgaatacaacttctgcatgatcatgaagatgatgatgcgggtgtgttttgataatctgaggtggtgattttgtagctctctgttttatttgagctgaaagttactatattttgcggtgaaagcagttatttattttttagctgaaattttttttcatgaggtgattctttattcatatgcttttgatagtttcatttatctgatgatgcgttacttttatagctgtggttttcttgatgggatggatgctggttgaggatgattttgtctctcaatcacactttcatcacatggaagatttgtatctaatatcttctctttgctagtttgtgattagattttgaatccaatagccagtcttttatgataattgtagtgatatttgaaacggaattggtcatctgcaactaagagtgagtgaatttctcatctgggttagtttatccaccgtgtgatcatatgcaatcgcccggatccatcgatggtaacaccaagaaaaaattaagagaacgatttaagcctatggccgcatttcagtttatgttagtcataaccaacatgttatcaacttatcatgtggaatttcctgcatgtctgatgatgatggagtttcattactagagtaaccaagatttgtcatcctcaaaagctgtcttatctgtgcttttgagaacgattttgcttgaactttcctggtttgcattga

SEQ ID NO: 86030 - DNA, 975 bp, Citrus clementina
  Intron number 1 from transcript clementine0.9_034135m (loc us clementine0.9_034135m.g) derived from phytozome v7.0 (c hr-ID scaffold_14; pos 3990400 to 3991374)
gacccaaaacaggtaaatgagcttcaaaatattatgctaataggttggaatggcttttttaaaaattaacaaaaagaaaaaacttatggtgtttttttttcttaggcatggcccacgacatgacactcatgggtactgcacgtgtgtcgggctgaacttaaggaaaaagattaagcatgacatggtacactatgaagtacatggtggatacagtattgcacgagcacgaatcctcgtaggtcttctctgatggcaatatcaccaacatcattcttaaatgcaaattaagtattgactcagttaaaaagttgtccacaattttaaggcgcgtgatcaaaatgtgtactaattaatgcaccgtccacaataagctgcaattaagataatcaaggaacaatgcgtgtttattttatggacagaacttgatagtttaataaagggtaatgtttagggacctcccttaaggtttactgtattaacacttagatggaatgtattaatgtaattacagatactttcgtcctcgttagtataaaatatgtatcgcattagtataaaagggtaaacatgtaaatacatacttaaatttaaaaaataattcaaagtgaagctcgatgttctgagaaatcttgaatgttacaccctattaaccagatcttggcaataaccaacagacaaaagaaaaccaactatgcacttatctttctctttcacataagcaaaaacctaacatccacttatctctctttcacaaaagtagaaactcaataccatttcaatctttttttctaaagctatgaagaaatcaagattaaaaaagattttacctttagattttggtgttggctcgtgtcttccacaaagctgccagtggagaagaagtcgaaggctgggaagaaatcctagaggaagccgcctctagcgacaagaaaaaaaaaagcgtgcaaagaagaatatcgagacgtacaagatcta

SEQ ID NO: 86031 - DNA, 909 bp, Citrus clementina
  Intron number 1 from transcript clementine0.9_018790m (loc us clementine0.9_018747m.g) derived from phytozome v7.0 (c hr-ID scaffold_10; pos 3222523 to 3223431)
cagacggaagcccagaaggttaaaattcttcctttctcaaacttcatctcaagaagttgagaaagaaatttttattatattataaacgcaaacactaaatggattaatttatttatttttaatatatatgtatatatatatatatatataatctttcatatttatttattatatattttggtacatgtaaatgttgttatataatagtttcgtgttgatacccatctttcatcttcgtcagtttcttgcttctctttgccacctatcatcttctttccttttttttttttttctttgtaagcattttctcttttcttgttttatttattttttattttgctatgtgtttcagttactgagattcttaattgcatgtgttttatttgatcttgatgtatgttttgctttctttgcgcaatgtggatgtgagttgaagttgttttatgatctgggtatgcttttgtttgctgtaaaatttatctatttcttaatgcatatttaactgattccggctttttcacattgatctgtgattatttggatgttaatgatcatacccttgtagttggattgccttgtcgaagtcaattatgacttcatgcataccatgatctgtttgatgatatgaaaaacttgttttttaatttattttttcattaattctgactgctaacgattgcaattttgcttttaataatgttcttgtaaggattagatgatttagttagtgttaatgatctatagagttggtggctatttgctttcatccatatttatagtattgatgcttaactactttttcttcaattttagttgatggaattgtatctttcatatttcttcaatctcaatctggttattttttttttttggttgttattttgatagagttgatagcttgttgaaagc

SEQ ID NO: 86032 - DNA, 353 bp, Citrus clementina
  Intron number 2 from transcript clementine0.9_010857m (loc us clementine0.9_010857m.g) derived from phytozome v7.0 (c hr-ID scaffold_2; pos 4857296 to 4857648)
gagtctcttgtaagttttctgactatctcatcacttatgtataatttttgttttttttggcattatttgacatacatagttattgacttattatataatggatcttttgtgttggcactccaaccaaaaacttcaatgtcagtctttttgtttccctcattttccaatttggcattacatagatttccagtccagatctgttcttccacaattgctttaattattttgtccaacatccaatttcttaaaatcaaacttcagaacattatgcaaattatctatgtgagagacttatttttattacagtttcccactaatctcctcgaatgttcttttgctttcagaatagtgaa

SEQ ID NO: 86033 - DNA, 375 bp, Citrus clementina
  Intron number 1 from transcript clementine0.9_005310m (loc us clementine0.9_005310m.g) derived from phytozome v7.0 (c hr-ID scaffold_41; pos 1135579 to 1135953 reverse strand)
tcaaaggtataatatacatgcatataatttgatcatcaattcatcatcatcatcagtcatcaaatgttttgctttctttttaatttttgggtcaatttgtcttcacatgcaaatgtgatatcttttagttttcttctgacacgcacagcttctgctagccgcagttatttctcgttcttttaattttccctttctgaacaacaatgattactgtactgtttattattattcttttagtaaaaaaaacagcacccctacgtgtgtgtgtgtgtgcgtgcgggcataaatatatttaaaatttattaattttgaagaccccgagtcgggaataattaattaatttttttcgtttaattttataattaagctccacgc

SEQ ID NO: 86034 - DNA, 504 bp, Citrus clementina
  Intron number 2 from transcript clementine0.9_022227m (loc us clementine0.9_022227m.g) derived from phytozome v7.0 (c hr-ID scaffold_31; pos 390813 to 391316)
ttcttgggtaagttaaaaatatttatatattattgaagtttcttaatcttttatactattatgaattgaggtgcggtaatttttaattttgagttgttgtataacagaatgattaatagtcaaatatttggatgtctaaatactgtaaaattcttgattgttgatattcaattattgttgttgatattaattgtcgcagatattatcttttatgatcatgggttcgacaatcttatagtcgtttgatgaatcacaagtatttatatatttctaagtcttttgtgttatgaatctctcgtcaaaaatataaatttgtagataataagttagtaacgaaatacttgtgattattaaaacataaaaacggttgtaaggtactttcaccgtgcttatgttgtttgttgatgtatacccaattgttttcttcatcattgttgttgattctaatgcaatttttcttcttgactagggtcataccaaaagctctagttccaatcgaggtaa

SEQ ID NO: 86035 - DNA, 1051 bp, Citrus clementina
  Intron number 2 from transcript clementine0.9_009721m (loc us clementine0.9_009738m.g) derived from phytozome v7.0 (c hr-ID scaffold_3; pos 2907839 to 2908889)
accctcaaccactctgcagcctcagcctttttgtggtgagtttgccttttccctttccttttacttatttcattgctgaacttcattttgagaagttttggaaggaacctacacactaatggtttggtttcttaaatttcaatttagaattaaaagtgcagttctatgttcttttctattttgatttccatcaaataacgtcaacaaccccacccccccccccccccgcccccttaatgtgatacatttaattcaggtgtaatgaagccttattcaatagctatcttatctggaaaatctgaagattaggtatcgatgtctcgttgatggtaccggtagtattgttcgggctatgaatatgtcaatagaggtgttcgtgaatgcagtggtgggctgccctagggtgacagaggtcaagggatgttcccaatagttatgctgcaaaggccttatgtataactgtattcagggataaaaaatctgttgagagttctgtttagagaacatcaattatgtagttgtatctataatgagtatcgccttgatctgcgtaatggatgtgggtttcttttgcaaaacggtgctgctcagctccgagtagagaaattatccaagttaactgacttgatctctattcaatgttttgtttgccaagcatccggcttgtactaaaccagagggaacaaaacctgaaatttgcagttccctaaaggttaaggactagatttacattttacatgatatttgttaatagttctcagtcaaatattgcatgatgaaatttgaattagagatgatttcatctgttttcatcacttcttgttgaagtgttgttctgctccatggaataatacatttctaacactaaccagcaatattacaagatattgcgttgctgtttacccaattgattattgttttcttcagtgaattttatggaatttgatttaggatgattttcatctgcttgtgtcactattcttggagttgtttctttgctctgaatttctgatccccaagttcgtgtttgcaggtataacaatagtaaggc

SEQ ID NO: 86036 - DNA, 740 bp, Citrus clementina
  Intron number 1 from transcript clementine0.9_028058m (loc us clementine0.9_028058m.g) derived from phytozome v7.0 (c hr-ID scaffold_7; pos 5427459 to 5428198)
aaggttctattcaagcttctttcgttatgtcttgtaatttcatttctgtgttcttggaatatttttttcccatcatttggggttttttattgtatgtagttgacttttttttttaaaaattacatgggactaatgtttaagttttaactcatatttaatgagattagtataatgatatttacaataaaataattattggaattaatttataaatcatatatagcacagtttaaatgttaactcatattcgagatatgtctactctaattatatttcaaaaaggacagggctgccttcacttaaataataaaaaaaaatgaatccgcacaatgcattgtgcgagctcgaacctcacaattgtgaggcttgtgttctaaccactgggctaaagcttagtggctgcatgtagttgactttgaatgttcttcttttgtgtttcttcagtgcttgatatgattttgctgttggtttgctgtcaaatgagaatagaatgaaatttatcagattcggtcttatttttcaaatctactatattctgttttgaagtgtcctttgttagctaattttaaagttactttgaaagtttctgctagtttcggaaatcagtcggtgatttgatttgttcatatgtggattaagagagttattttgtaggcctgtactttctgtagataaagttgtgtaatcaagtaactgtatgaattgttgattaagcttaacatggggttttcagttacaaa

SEQ ID NO: 86037 - DNA, 606 bp, Citrus clementina
  Intron number 1 from transcript clementine0.9_007196m (loc us clementine0.9_007196m.g) derived from phytozome v7.0 (c hr-ID scaffold_7; pos 4288899 to 4289504 reverse strand)
gaatctcccaaccttttggtaacttcattttcttttcttttcttttctttttttttcccttttgctaattcaacttcttcttttttttttccgttttgtctcttgggaaaatcatctaggaactttttaaaaaatagaggctgactattcagatttcaaaagggttgttgattctcgtttctctttcttttcctaaagcttattcttgcttgctgcttaaacttttgcttttcgcttaaacttttgcttttctaattaaaccgtgatacacgcgattaatgcgaataaaaaaagtttatattttgctagatccttgctatatagtattctgttttcgtagctaccactatccaacccgacaagttattggatttttttgttatttatgaaataagagccatgattgattttatcctgaatttgatagctgctatcagaatgagactgagttatttaattaatataattttgacggtatcatgtcagtttgtattagattgttaaatattttcctatgtttatccttttctttttaaatttgttttcgtttttttttttttttttttttcaggttgcttctggctcaaaacttgtaagtggaggtat

SEQ ID NO: 86038 - DNA, 404 bp, Citrus clementina; identical to SEQ ID NO: 81930
  Intron number 1 from transcript clementine0.9_017395m (loc us clementine0.9_017395m.g) derived from phytozome v7.0 (c hr-ID scaffold_3; pos 3257958 to 3258361 reverse strand)

SEQ ID NO: 86039 - DNA, 741 bp, Citrus clementina
  Intron number 1 from transcript clementine0.9_000230m (loc us clementine0.9_000230m.g) derived from phytozome v7.0 (c hr-ID scaffold_4; pos 1124819 to 1125559)
aagactgacaaagatccgaaacagattgctagaaagtatgccattttgtggttttattccgtgggctggttctgtttttgttgtttttggttagtttttgtttggttgctcagaaaagtcgaggaaaatacaagtggttattattattttcttgacaatgttctgcactttttacattatttgggaccaagtagatgcttttactactttcttcggtgggtttgttcttctttgttgttctgattagtttttgtttggcttgtgagaaaagtggagggaaacataagaaaaaaatgaagtcgtgttgttttatggagattatgcgggatcaaggagttgctttactactgttgctcagtgggtttattctcttcttgttattttgattagattctgtttggttggtgagggaagtggaggaaaacaaagaaaaaatggattttttaaaaaatttttttgacaatgttgttttgattttagagattatcagaaatcaatttgttgcttttgctagatttatgtcagtttggtctgcttctgttctttggtcatcttttgcttatttgggaagaaaattggggaaaacacaaggaaagcaggcttaatagtttttcatctttcttctttatttaaaacatgaattttctttaggagttattttcttatgagctttggggtgaatgtggcttacttctgttttgttttctttttcctctttcttctcaggtatcaattggagct

SEQ ID NO: 86040 - DNA, 576 bp, Citrus clementina
  Intron number 1 from transcript clementine0.9_005700m (loc us clementine0.9_005700m.g) derived from phytozome v7.0 (c hr-ID scaffold_10; pos 1364501 to 1365076)
ggtgtgacatcccaaggtgtaacctcttttttttttctctctcgtttttctaatgtacatattgtttgattatgaatttagaaaaaaatataagggttcaaggattttttttttttttcctgcttgaatgcactctttatatcatcgcacaatgattctatagtcaatgaaggtggttgaagaggctcaattgataacaaaattctgaaattagttagtgttaattgttttttttttttttgacaatagtgttatttaattgttgatcagattatttaggtggtgaggagcacgaattgggttccacttctgtttgccttaagttgtgcatataccttgttaagattctgtgagttattagagacttacgtgatcattctttgaatcagattaaattcatgtcacttgtgattgtgattttatctccatgtttaatcataataaagggtttgtatataggatgattctattatatgccagcctctttttgtgataccttatggtttgagtttttttttttttaaaaaagaatacatatccgaattttaactatttgtcatttcttatccagtttga

SEQ ID NO: 86041 - DNA, 794 bp, Citrus clementina
  Intron number 2 from transcript clementine0.9_013612m (loc us clementine0.9_012468m.g) derived from phytozome v7.0 (c hr-ID scaffold_4; pos 2938028 to 2938821)
tgccttttgagaagttgtgggataagttttttcatgtaagttcttttttttttttaaatcttttcgtccttagtcttggtctaatgatatttatgtgcttctttttttaatcccattgttcatatacatgaatcataccctgttttccaaaatttagcactacaagttaggtttagaacagagcaaataaataagtagatttagttggacagaggagccaaagctgttgtagagtgctatttctagcataagtattgaaggttagattggattggggttctctctcttcttagaatggacattacaatggtggttggtgagtgtgtccacaagtgatatttgatggatgccatgtgggctataactttaagatattatgtatgtcgtttgcctgtttgcctatatggattatgccaagtcgatttgttgagagagtcttgggtgctccggagacaggaaattgctttttgctcggtgaattcgtttgattaatttaatctggtgttccttttatttttcattaggtggcaacgagttgtgatacttttgatatggaatttcagtaatgatgaaatactcaaatatgcatttgacagctgtaggagccatctcagtactacgtagcattttgatttttgttgtttacaatatagatttttgatacggaatgtccattgatatagcattttgtttttctcttaggccagtgatatcagtgctataaagcctgtttttttttgttgtttgacttaactcatacttccatgtaaccttttcccatttcttgcagggtc

SEQ ID NO: 86042 - DNA, 749 bp, Citrus clementina
  Intron number 1 from transcript clementine0.9_025871m (loc us clementine0.9_025871m.g) derived from phytozome v7.0 (c hr-ID scaffold_41; pos 1853858 to 1854606)
agagatcttcatcttctacattaattaattatcaggtaatctcaattctcctttctctataaaacacatacgcgctggctataaataaatattagctgcttttttctttcttttttccccgagcttcttagatgctcttgaaattgaaattagtgttaaccatgtctgcattcttcagtgcccatttaataagttatccaattgcttataacgatgacttttgtacggtaaagtagtaaaaatcaagtgaacagttagcaaaatagtatatgttggattcgaagaaaataattttaaaataggatgattgaaacaagatttggatttgatggtggttgtactttcatttttagtttgcatataaagttgtggtttcctatcttcattttgatgttgtctgttggtttgattgtcaaatttcttattttcagttttcggtacttgattgtgagtgcatttttttgtgtagatggatggatagaatctgacttgtaagctatcttacatcgacatattcaaaattttagtttcttttatgcccaaaactgatctaacaaaatgacttataagacacatgattttggtcaatgatccttaaatgacagagatggatcttacagagctggtgcatgactatgcgattcattcaaatagtgggtaataacttgtttagactatcaaaattgatttttattctgtattttctgatttttgtagtttgctacgttgtgtaaaagcataaacaagaa

SEQ ID NO: 86043 - DNA, 632 bp, Citrus clementina
  Intron number 2 from transcript clementine0.9_017528m (loc us clementine0.9_016244m.g) derived from phytozome v7.0 (c hr-ID scaffold_7; pos 174212 to 174843 reverse strand)
aaaaggaggtaaacacactgtattattcttgcaaatttgttgttgttcatcccctgtcattgtcactacaaaacgactttcatcaccccattttcctataatctttatgagatatatttatagttatatatactttttttacttttctttgggtactctgctcagcacctatctatttttgtttctgtttacaaaagctagacgtccgccttttcttttcttttttttttttttgaatctctaatgcttactgtgttgtatttcatgttgattgtgacattttatatgaattaatgcaaaagatgatttgtacatcgtataacgatttcactgcaagtgcttgagatcagtttctccataatttgtgttcgccatgattaaattatgattgtccattctcatcccacaaaaaaagtgtgttgttctttttgggggggggtgttttttgaatgtgttccaagagctgctatcttgcttcttactattgtgatcttttttagttgatggtgagaaaatgcttaactattcctgttgggggaaaaaagcactcaactgttgcaagcactgtatttaattctgaccttatctttctttatcacagattggtttggtgctgaagaagttttttgaag

SEQ ID NO: 86044 - DNA, 742 bp, Citrus clementina
  Intron number 1 from transcript clementine0.9_031621m (loc us clementine0.9_031621m.g) derived from phytozome v7.0 (c hr-ID scaffold_24; pos 575746 to 576487)
gtcccaccaaccctcgcaccgaggttctcatccgtgtaagtaaaatttcttatcacactcattttattttgttgctttcacttcctataattgagttatttgtctcttctttagtttgagcttattaaccaacgagatcctgtatatttaaaaattaagtacctaaaaaatcctcgtcgtatatctgtttgttttccttaaattatccagctttggtctgtatgtaaaatttgtttgaattttaagacacactattttattcttaatttataaggataagggtattttagataattttaaatactattgtagctaacggaataattaacccaaactattggggttgaatgaacatgtacccttattttatgggtaaattatgatttagtccctcaattatgggaaacattactcatttagtttctatatttaaaaatcgcccaaaacattcctatggttaactccattactgttggatctgacttttccaatgtaaatatatagtattattattattttttttctgatataacttaaatataaacaaatctgacatgttacaaatgaaaaataagaaataatcaagtaaattttaacaaagtacaaatatatagcatgaacaatttgaataattttggaaccacaggagctaactttattatatatcttataatcaattggcattagaattgaattttcgtacttcaatatttcttctcatagggatacagctattcttccg

SEQ ID NO: 86045 - DNA, 870 bp, Citrus clementina
  Intron number 1 from transcript clementine0.9_011174m (loc us clementine0.9_011174m.g) derived from phytozome v7.0 (c hr-ID scaffold_4; pos 3128623 to 3129492 reverse strand)
tctccgcactcatcttctctttctctcttcgaccggtaagtttcaatttttataattatatatataaaatttccaattattcaattcaatcaggagtgcttttagcgattcaagattcaatattagtacttcgttcttatatgcacataaaaaatttgggtttctttatctttgtattaatgctgcagttgactcgagaaattggattttgtgatgttggattcttttaaaggacaagtgtttgtttaaagtttcaatttttagcacaggatctgcatagatatttatttatttatgtgtaaagcaagtatagtacttgtagcattcgaagcaatctgttggattgatcgcttatgtcaatgaatttacttgaaaattcctgaacaaggaaactgctctttctcttgctttttcaatttgagtcaataaagtataatttgtaacccgaggatgtattgtgtctgacatggccatcaagtgtttagaatatttactagcctaagttgggaaatgtagtctgtattttggggtttgccgtgtgattttgaaacagaataaaccaaaggagaaagaggagataaggttttgttttggtgtctcaatgaatttattgtgtgtcatttgtgaatttacctattcaaatttgtacaagttgactaaattttttcccatccaattagtgagatgaagggttaccttgagcaaatttataagcttcatgtgtgtaagacctgaccatatctgtaatacagccaaaaatttatcgtccaatcaatgtgaacctcagcaagtttttggcttgtatttttcttcttgtttaacattagatgacttttcattttcaggagttgattattcctgattgaaatc

SEQ ID NO: 86046 - DNA, 981 bp, Citrus clementina
  Intron number 4 from transcript clementine0.9_019558m (loc us clementine0.9_014187m.g) derived from phytozome v7.0 (c hr-ID scaffold_2; pos 7551521 to 7552501 reverse strand)
caggtaaatagaattaggctctatgttgcccaacttttctcctgcttggtaactgagcaattaacagtcttaaattcaagtttaggaggaataaacatatccttgtcctcctttgatgctacaattgaatggatttccttattaaaattcagaagaaccttctggtagctacttttgatgttattcaccctgatgatttatatatagcagcacctattcagagccttagtggctggttacattcaaacccatcaccacagtcagtaatgtgtgtgtttgtgcagccagttccactgcagaaagaggcctaccttggttataaattgttagagtcattatctagtaagggatccctcactagttacttcaatatggtaagggacaagtttttttttttttttaatactgattacacatcagattactgtattacacaaatatatttacaactgctattagagcatatattacactgatatttacaatcagatatataacttgggacttacattattacattaattctatgaagcatatgcccaaacatatgatcctcacagacgagggatgtctctgctccactcgcatttcgcaagggagaaagacttgcaaattaactccacacaattttttgcttaattgagggaggttaaacctatggagactcaaactactaccctcataatcttttttaactttgagcgtagtggtttaccactgggctaaagcccaagtggcgtaagggacaagttaaaagtcaggaaaacacaaatttcaatacactgcaagacaaaatacattgcattgtagtatgtgtttttcttgttttttagcttatctcttactttaataaaataaaagattgtttattggaaaattactaatatatgttatacagatccattgatgtagctaaatcatttgttgcattttgattttttgttttcctgcagatattgtcaggtaaatttttaaggagtt

SEQ ID NO: 86047 - DNA, 807 bp, Citrus clementina
  Intron number 3 from transcript clementine0.9_016195m (loc us clementine0.9_016195m.g) derived from phytozome v7.0 (c hr-ID scaffold_2; pos 5515212 to 5516018 reverse strand)
cctatcctggtaaaccctgtgtttccttcacttttaatagggattgtattctcatgagagttcagtattattttgttgtgttttctttgattcttacatgttagggattgtattctcatgagagtttagtattattttgttgtgttttctttgatccttacatgttaagaaatattaattaattttatcaatgattttggtggatgttagtgctttataattacagaagttgtaatcattgggcttattatcataaccatttaaaagaaactggatcatgtgctacttagtgatcaagagcatatagctggacaggcttgcatctacaaagtgaagtgaagtaaaaattgcctggttttaatttcctaggacaatttggattcgtttaagtttgagattattttagttagtatttcttgttcttatttttattacgcctagttggggttataagtttagagatgtcacttataccgaacagaatatttatcctcgagcaggaatgtaaattgaaatcttggttgctgcaaaatttaaatatatacatgtatgtaatgttttggactatcttcaacctatggagcatggacagaactgcatgttggtttcttgaaagaaaagattttctactttggctcacagtgagattcaacctgtggagattttttgtgagcaagttgcttcactttagatatatatatgtttgatgatatgtttaaaacttacagatttttcctctgctgaaattactgcgaggactggataactgtaggaggtttgcaagttggaggtgggatcaattctgat

SEQ ID NO: 86048 - DNA, 475 bp, Citrus clementina
  Intron number 2 from transcript clementine0.9_016195m (loc us clementine0.9_016195m.g) derived from phytozome v7.0 (c hr-ID scaffold_2; pos 5516183 to 5516657 reverse strand)
cagttcgtttccgcccttgcattgatatacacaaggtattttacgagcaatcctgtttctgttaatcatttatccttttatgttaacgacttgcttcattgttggattcttttcttttgtcattaaatggttttagaagttcgatttttaattaagcatttcggttatagcaaactcttttgaaatatttgctcggtaacttatttggttttcatttcatttaagcttaagccttcatatttttctttgatatttaacatattaaaagaatggattagaatttgaaaggatgattctgaggatttgtcccacatgatttaattatgtaggtggtggagtagaagcaaaatttgtttcatcttttatttttactggtgtgtgggtgaggctgaacttattaattgcttgatttttatgaattaaagtaattttcttatcagggaaaagtgaaacaaattgttgggtccactcttca

SEQ ID NO: 86049 - DNA, 733 bp, Citrus clementina; identical to SEQ ID NO: 83591
  Intron number 1 from transcript clementine0.9_014241m (loc us clementine0.9_014241m.g) derived from phytozome v7.0 (c hr-ID scaffold_3; pos 2085915 to 2086647 reverse strand)

SEQ ID NO: 86050 - DNA, 489 bp, Citrus clementina
  Intron number 4 from transcript clementine0.9_017360m (loc us clementine0.9_017360m.g) derived from phytozome v7.0 (c hr-ID scaffold_85; pos 417933 to 418421 reverse strand)
ctaccacttttgggtcaacccattgcattgtataggtaaatgccaatatcttgcatcaacaatattgtagtattccaacaacctgtgttagatattaattttttctatcaaagtattgatgtatggtttaagagggacttccgtgtttaaactgtaacctatgttcagttacattcggcatgaaaaatcaaatagaatgtgagagttggtctttctgggaatatggagttttcttcttgatccagtaacaaacattatagtatttccatagtgttgttaatgtgattctcagtttattttagaatagtaccttgggttaaaggtaccctgggtgggattcagttactgaggtctggccctcaggcaaaataacagttatgtgtttaaagttgtaatagtcgttgtttccattgcttatgactgatcctcgttttttcttctgaaaataataaaatgcattttttcttcagtttctacactttctcacgc

SEQ ID NO: 86051 - DNA, 1036 bp, Citrus clementina
  Intron number 1 from transcript clementine0.9_016991m (loc us clementine0.9_012584m.g) derived from phytozome v7.0 (c hr-ID scaffold_7; pos 4355199 to 4356234)
ccggttacttgactttccccatctccgtcaaacaggtagttctaaattttaattctgccgtattggctgtgcttaaattcaaataaatattccattttttcggtttaatttaaatggtgaattgtaattgaatcaatttttttttctgtcttccaaataaataaattaaagcttatttatttattttggtagtaaatcgttgaaattgatttaagtttgtttgcttgaaacttaagtttatgtttggaatatttctatttgcttttgtgattttttcccccctgcttatgaggtatgttttaggacatgataattggtttatgtaagtattttgtttaattgaaatttccattcatcaaaaaaaaaaaaaaagtattttgtttaattgacactaattatgtctacaattaagtgtgaaacatgttggtaattctggaagttgaaaagtgcttatcaaaatgtgtgtttctcttgtgggtctatgaactaacactttgaaggtgttgtgtttttatttttaatgaaacaaatggtttttttatttttttattttttggttgtggatataaaatatgttctggataaaagttgagtgcgtgctcatctttgccaaattgcctcaatggttgataagcttctggttaatatttgctgtgttttttgttaaaggcactaaggcagttctagactgaattttaaatcttttcatgtcccaatctgagaattgcatgggaccactatttagattcagacaattttttaatcattatgagctacatgtgggaactttcttgtaaccatcgttttttttttccagtagtgcaagctctttaggaccactgttagctttagtagttctggtctactctgattattagcctctgctattaataaaatgtttgttgtttttcttttttgtttcacttgttttttaaatgcatgttgttagtttggttgtgactgagattgcagtgcagtttccactgaattagtggtaatagtgacatatctctgcaggcaagagatcccttacaaa

SEQ ID NO: 86052 - DNA, 856 bp, Citrus clementina
  Intron number 3 from transcript clementine0.9_002087m (loc us clementine0.9_002087m.g) derived from phytozome v7.0 (c hr-ID scaffold_85; pos 118473 to 119328 reverse strand)
ctatctgaatttcggattccaactaaagagcagaggtaagatatttttatgttcctgctttctatagcctgtcgtttattttattataaattagtttcccactctacttcactataacttagtttgttgaagtcagcaattttcttctttacacttatcctctcctctgatataatatgtttctagtttaatttagaatagttccagaccaatcctcttgtactagtagttcttgagattccctaatttattttttaattgaactgctttgactggttagagcatgctatcctttcttctgaacacttttggaatgactgggggtctgtgtaaattaaattaatataaaattatttctgggaccagcagattttgtttggatttccgaatttccgtttatcgttccaaatatgatctgactagaatttaaaaccttcaagattcactaatttcatgattggactgctgtacaagttcataacttcatgtgctggattttatttatttaaatgccaagaatttgatgcactttatctgttaggtctcatgttttcctccgttagaaacttgtaacctgatttagtttgctagaaaattttaaaaaaatcataacatttttgttttattcttcacattttcttctcctcctaatttttttaatccatttataagccttcagcatgcctgattgataaaattttgtaggcttctgtcatatataataagatatagatgaaaaactcatatccttcacagtgttggtgccggtaatttgcaagttttctaggttttatatgcagagggctatcatcaggctaactttccggctttcaatgaatttgatttcagcatttgg

SEQ ID NO: 86053 - DNA, 740 bp, Citrus clementina
  Intron number 1 from transcript clementine0.9_013586m (loc us clementine0.9_013586m.g) derived from phytozome v7.0 (c hr-ID scaffold_3; pos 6332488 to 6333227)
atttctctagctttgtcaggcagcttaacacttacgtaagtaatgctatcctcaatcccttttagtctattaattattatcaaatgaccctggaaatggcttcttcggctttactctcaatcagaatttctgaatgaaaccaaaagaatggactttgttttgttttatttttatttatttatttatttattcctaaatcatcttccaatcattcttgttgggtttgtaatcttttgaaatgcgcaagcatgtgcaagcgtgttggactgtctagaagccatccaagtggattcatttttatttaataaattatatagactgatggttcttagagcttctggaaactcacatgaaatctttttatttccaatcagtagaaagttcgctaacgcctttccattttattatttttttttctcacttttgttaactaaatttactggagaatcagtgctcggaatttttacaattattgtcccttttttctgactgtggggccttgcttcatttcgtttgctgggcacggaatttttttccccctaattttctgccgtcatctagtgcatgaatgtttaattaagaattactctgcgagacgatgtttaatcaaagaataactctttatgaaatgaatggatacggaagatttacacgttcataaagtttctctgttctggcagtggatgcttagttaaaattttgcttttgttgcagggctttagaaagatcgatccagacag

SEQ ID NO: 86054 - DNA, 717 bp, Citrus clementina
  Intron number 2 from transcript clementine0.9_003684m (loc us clementine0.9_002946m.g) derived from phytozome v7.0 (c hr-ID scaffold_10; pos 2388569 to 2389285 reverse strand)
ccaaggtatgaactgtttataccaattgattgaatttgaatggtgcattaggcaattttgttgaattttttcactggattttggatagcttattgtttatcttattaaatagtactattttacttttcattgacaagggggcatttttgtttacatgtttggtagttgtgtctttatgcattaatgcattatgtatgcccatttcagatcaaatgttttatccctagttgacaaagactctctagatttttatgctaatttgattttaaatgagggtgttatagtacaatatacggttacatttatcaaattggtctttcaaacattagtttcatttcattactgaatatcaattctaatgcagttacatggagacatgtgcaagaaactctctgcactttactgcaaaatattgtctgtttttccttccttggaagcgtcacggcctaggagcaaatctggcattcaggcgttatgttcattacacatagcacttgagaaggccaagaatattcttcatcactgctcagaatgtagtaaactttacctggtatgaacattttgatacaatatttaacgttagcctcaattttttggtcaaattttttctactatatttatgtctggcgaagtatgaggttttggggaggaatgtactaatgctacaacttttatcatgtaggctataactggggattctgtgcttttaaaatttga

SEQ ID NO: 86055 - DNA, 454 bp, Citrus clementina
  Intron number 1 from transcript clementine0.9_005233m (loc us clementine0.9_005119m.g) derived from phytozome v7.0 (c hr-ID scaffold_3; pos 1074156 to 1074609)
tcacattctttcgtaccattaacctattcgccaaggttttgttttcaccctttcttcatttccttcttttcatttgctaagaagaaatgaaaccttttttttttttaactttaagtaaaactcaattagggttttattgtttgtctctaattttggttgaccaacaaaaacaaaaaaaggaaaatgagtcgctttgaatttgaatttgaggtttttggtggtattagggtttaagagaagtgaaaggaaagattgattatgttgatcgtttgggttcatatgaagatttcttggagatcatttccgcccattctttctttctgaataaaagtgtcctgcgatttttttgcatgtaactctactagtatttaggccaataattggattttttggtatgaaagtgaaacactgtctgtaattttgcagtttggtgcgtttccagtctttgttgttg

SEQ ID NO: 86056 - DNA, 743 bp, Citrus clementina; identical to SEQ ID NO: 82721
  Intron number 2 from transcript clementine0.9_005233m (loc us clementine0.9_005119m.g) derived from phytozome v7.0 (c hr-ID scaffold_3; pos 1074752 to 1075494)

SEQ ID NO: 86057 - DNA, 1044 bp, Citrus clementina
  Intron number 1 from transcript clementine0.9_028831m (loc us clementine0.9_028831m.g) derived from phytozome v7.0 (c hr-ID scaffold_2; pos 6854595 to 6855638 reverse strand)
acgaatctttgattttgtaattgatcaacgacaacgtatgaaaaatgatgatactaatctagttggagcaaacaatgccaccaggagcgactttctgcagtttctttttggagtataaagagccaaacactggaagatcgatttctctttcacaaattaatgccatttttatggtaatatttctttcctattgcaacatttttttttccaaaaaaattcctgaagagttctttttttttaaaaaaaagaaaagaaaagaaaagattagaaggttttacggtacataagaaacaagaatttgagttttgtcgatgtgtgtttacatatctttgggtttcaattttttttttaaggtactttagtctgtcaaaattttatctttggttgaatgacatttaggtcttaatttttctcactttaaactatattggtccctaattttatttcaattagtcattacattcctgaatgatgaatgtaatttttatattcaaactttatatgtgaatgatgaatgtggtatttttacatataaaaaatttcttaaattttgacaaatacgtcatatatagactagcaacaaggatataatagtaagagaagcctaaaattatatttctactcttacaatttgatgtaattagagtgtcaattaggtttattgataaaaaattctattttaatttttttagatttggccatttggggttcaaaccctattcgcatgggtgagaagagaatttgattaccaatcatattatgctttaaacaaagaaaaatgttaggaatgtaatgggtagcttgaaaaaagaaatgaagacctatatgataaatgtgagaatcattaagtacccaagtgttattctcccttagtcataactcataaattttagattctaactattacttaaaaaatccctccataacattttattttaaaaacccagtggaaaattaaaaggaactgctaagtatacttggggactgtttaatagggctttgattttgttgagtgatgataataatttgccagcccaattggac

SEQ ID NO: 86058 - DNA, 382 bp, Citrus clementina
  Intron number 2 from transcript clementine0.9_001601m (loc us clementine0.9_001601m.g) derived from phytozome v7.0 (c hr-ID scaffold_41; pos 616423 to 616804 reverse strand)
gctatctacatcttcgagaattgtacaatttcagcctttttctaatttttgataacatggctgtttgatgtattgtctgtcacttgcacacatgacacaactttcgtgtaataattcttgttgctgctctcttaatattaaagcaaaagtgggtcacacattcagttaggatattggacatagaaacagcaagaggctcattttttgcacagaatcttcaccaacatattcagagattaattgattaacttttggatgcctaatgaataatctactaaacttacctactgatagctctttacatttttttttttcatagagctcaattaatgttgtgttctttgcaggcaacttttgaacttgaatctgtcgggaaacttat

SEQ ID NO: 86059 - DNA, 604 bp, Citrus clementina
  Intron number 2 from transcript clementine0.9_006401m (loc us clementine0.9_006401m.g) derived from phytozome v7.0 (c hr-ID scaffold_3; pos 3081815 to 3082418 reverse strand)
aatatcactccctcaacgcttcttcttatccggtattctttttttctttttttttcttctccctctctatcttttctctttaattattattattttctttttgtttttggagttttggcatatgataggtagaatcccctgaattttcgttctgtctgttgagtgtaagttgtggtggtctcctgagcccaacccaactttgatctacatattccatcgaatcaatcgattgtctgtgttgcttacctgttcttgattgattgtgtatataactggttgaagtttgagagtgattagaataatcttgcctttattggagacataattgtttgattgatgacgcaggcagcagattactagttcatttcctttgtgtgtttttcttcacttagcacattttgtggacaagtatgcttttggggaaacagctctgttctgcttgaatttagtataggaattagattatgcgtgcatgttttgtattccactagtaaactggagcattctgatgaaaatttgcaatataatgacttttttcccccctttttcctctaatctgacttgtatagaaggaatttgtcctcttccgtttgaagaaaaaatc

SEQ ID NO: 86060 - DNA, 518 bp, Citrus clementina
  Intron number 1 from transcript clementine0.9_003821m (loc us clementine0.9_001274m.g) derived from phytozome v7.0 (c hr-ID scaffold_4; pos 2869908 to 2870425 reverse strand)
caggccagaacagaaatttagttgatataaaacaggtaaacatctttctgacatttttcaagaaatttggttgatataatacaggtaaacatctctgtgacatttttcaagtaacttacatcacttactttgttcacgatccatttatccttaatgtattcttaatatccatttccgatgttcagatgctaacttttaaactcctcattcttctgttaatagtactgtaggaaaataatcttctgttaatagtactgtagggaaataagctctgcatataccgtcatgtgaatttcagagtggttttttccttttggtgattagaattttagagttactgattaccaaatttacctctagctttttattctttgaattgcatgcctgtgaacgcatagctatgttttcacatttacaggaagactttcctcgttcttcatcaccagtgtataatcagtctcattctttcggctattctgattccagttccttgagagatccctctgttatctcgtcaa

SEQ ID NO: 86061 - DNA, 592 bp, Citrus clementina
  Intron number 2 from transcript clementine0.9_018843m (loc us clementine0.9_018843m.g) derived from phytozome v7.0 (c hr-ID scaffold_2; pos 293038 to 293629 reverse strand)
gcctagtgccaacgtcaacttaaattgcgaaccttgtaagtttcttttctttgctattataatatttttagcatgactatcagtgctcatatgttacatttttaacgctgcgtgatacattgcatttcattctactgtatttcttaatggtcttgtctataattgctacaagcacggttgttaattggtacacatgcatttgttgtttactgcgagtcagttattgatgatgatatttgattaaatgagaaatctaagtctttccgttatgtttcatgctttgtcgtcgtccacattgtattttgcattctttttggaacattgctgaatgtcctctttcatgtgaatttggaaagctgacctaattcttttacctcaaaatgagttttacttgaaggcctaaagactattagactccatctgagttgccagaaagttcctctaattagtttgtgacagatatctctagtacaagaccatttggactagtttcaatagtctgtcttgttcttttatgatttcatttcaacggtctaataatatcttatttagtgcagtaccatttggacgaatttttcagttgtcttcttta

SEQ ID NO: 86062 - DNA, 887 bp, Citrus clementina
  Intron number 2 from transcript clementine0.9_028470m (loc us clementine0.9_028470m.g) derived from phytozome v7.0 (c hr-ID scaffold_24; pos 3187656 to 3188542 reverse strand)
ctcgtttttttttctttttcacagatttagcaaaggtaattttccagatctttaattaaacgaatctcttcgggtttaaagttcaaaccctaacttgatttcttttcattctttgtgcagcgaaggtgacgagttcttgaatcggcgacacaatggtttcgtttgaaatgaatgatcgtaaaagtgagtgggcattcactatttgattagaaattgtttgcttaaatgtaaaattcctagagattttgtgcaggaagatttgagtgcactttatagctgcttcgctagttgtgtatattacgttgagcaatggaaatgaataggaattagtaatttgatcatgtttctgggacaataaatctgagaggatgaaattcaattgcttggatttaggctgggtgtgtgatcataatttcctgtttcgaatatctggcgagagtttggaatttggttgacaatattttacttgatcttatgtggtctttgtcactgtctgtcgatatatctttgtcaaatgaagctatgtttatgggtcttagatgttttgctaagccagcaagccctgtgtgtttttggtctgtttggtcttcatctccaattggactctgcatgagcgtcaccaccagtgaggtgtattcagtggcgtttgtttgtaactaattgcggtcactttttaaattcaaattaaaatgatttctgctagcaacattattatttagtggagttttgtaggattcatgttgctttgctttgttgtggctttacatgaggtgtttaaagcggcagttggcatgcttctttttgctccaaagcttttccacccttaataattgctattttgaaatggaacagagattgggctggggttgacaggatttggcattttt

SEQ ID NO: 86063 - DNA, 935 bp, Citrus clementina
  Intron number 1 from transcript clementine0.9_008962m (loc us clementine0.9_008962m.g) derived from phytozome v7.0 (c hr-ID scaffold_3; pos 5280777 to 5281711 reverse strand)
gaggtggaggtcccgtgtcgagttccgagtgctaggtaggtattgtaatttaatttgatttttggttccgctatgtgggtgttcatagatttttttcactattcatctgtggtttacttagagtgctcgtctaaattttgtttctagcataggcatagcttagctggctgtgtcattcttgtttaaacatttgaaattcgaatgtctgtacacactttgatctgagatttaacttctttgaaattttgcattcaaagatggtaaatttttatttttttcctgtagtgcaaactgaacttcagagggttcaaaaattacgtttttgaattgaaacccccaggcctccttctttttgctacgaaattgaagggaaaatttaaattaatatcaagttggtatatcagctccttaaactgtaaaagtcgaagattaacaactctgctgttgtttctacctaaaattttcaattttctctgaagtgaaaagaatggaattgatgtaaagaatagtcatcaggtggggtcctgttgctgttcaaggcttttgttgtaagtatcatgtggtcaatagataagactgtagatttctttccaagggtatccgatgtttcatatgtggttggtctagctgctaaaaagaggacaccaaagaaaaccaatctcaaatttgactacaatgttcactattttactaatttttatatcgttcaagcatgtaaaaccatatgctatttgctttctcattcttccgatgtgtttcaaagggacatatgcatttcacctgccaatttgcaaaaataaagtttgcatatgtgtggcatagttcctgtagaaccttttttcttttgtgaataatgccattgtgtttatatgtatgactatagctcatggttacaaattttcagtgcaagtgtatttggcgtctcagcagaatct

SEQ ID NO: 86064 - DNA, 511 bp, Citrus clementina
  Intron number 1 from transcript clementine0.9_021698m (loc us clementine0.9_021698m.g) derived from phytozome v7.0 (c hr-ID scaffold_4; pos 6233954 to 6234464)
agaggttttaagattttgttcaacttcaatcgaaggtacaattgttttttgcttatttatttgttcatttatcgaaatttttcctttttaatggtttgatttaacagtcaaagggggaaaaaaaaacatcgtttcttgtagtgcatcattttcatttctagactctacaacgattgaaaaaaatgtaagatcgaagtctcatttgcctttcttctctttcttggcgactgaacagaaaatcaaatcatacccatcttttaattttgattgcatttacatctgaaattgttatttcacttaaaaaaaagaaaaggcaataggtttcaaaatttctctggaatatcctttgattttcatttggaagccaccgtggggaaattatggatgtgggttttatttatttatttatttatttggggtaggggagtagcaattctttctaacaataagtagagacttttatgtttgatccaagctcataatctgcaaattttgcttctttgatttacag

SEQ ID NO: 86065 - DNA, 295 bp, Citrus clementina
  Intron number 1 from transcript clementine0.9_022732m (loc us clementine0.9_022732m.g) derived from phytozome v7.0 (c hr-ID scaffold_10; pos 1198545 to 1198839 reverse strand)
ggtaaatttcacttctcaaattattgtgggttttgctagtacgattcttttcttggcgagttattttttcttttgagggatttgtaatttctgattctcgcatgctctcggttttcaagcttttgtttgatttgatttcttgggaagaaaggaaagaaaaagaaaagaaacttttgactgccggtctaacttttctatattataaagggtatgtttggaattgaggttccaattctcttcacttacatttctgatatagttttacaatttcacagtgtgctttcatcagagtcgg

SEQ ID NO: 86066 - DNA, 828 bp, Citrus clementina
  Intron number 5 from transcript clementine0.9_016205m (loc us clementine0.9_016237m.g) derived from phytozome v7.0 (c hr-ID scaffold_2; pos 848859 to 849686 reverse strand)
ttgtatctcccggcaaagttgtcacctgattccaggtaactcttatcctgccaagtttcattttcttgtttgttgtaaaatctgtttattgttccattccaactttggggtgagtgtcctgttattgactatcttaatgttacaaaaaagattttgttgaaatcaaatgtggttttgctctgtattatgtcttagatttagtatattttttcttgtattgtttgtatgtagttgtttgtatatctgtgcatttggagcagaagcatttgttttgtattaaacttttcacatatttctgctaaggtagttattactttaatgtggatgttgttagtgtttccatcaagaattagcagttcgtgccttcgagaattcaggttttgtgatacatcatcaattgagagggatttagaaacattttccatgtccaatatgtatttattacttgtcctctcctctaggttaacagtctgttcgaatttctcatgacagctcctcttagtcatgtccagtagacttctatggtgaaaatttcatgtgcaacttttccttatccgagaatattaactaatggcaattgtaatgaacagataattttattttgcagtttcctgttaattgcctcccatatctattcattttctcctattattttggttattgataacttttacttgagtggatactcccatgcactcatattatgatgaaaaaagacctaaacatccgatatttttcttcatgcatactacattctcattaagaccataactttatgcggtacaatttgcagggagggtgatcttccgctcattgtggctattgatt

SEQ ID NO: 86067 - DNA, 625 bp, Citrus clementina
  Intron number 1 from transcript clementine0.9_014255m (loc us clementine0.9_014272m.g) derived from phytozome v7.0 (c hr-ID scaffold_4; pos 6386842 to 6387466 reverse strand)
ccttgatctgggggtggtcttgtgtcagcttgatagtgagtgttctaaacttaaataatgatttttatgcataccaatttgatttgttgagatgatgtttcttttatctggatatcatttacttgacgtattaatttgatagtctctcaataatagttcttttgtctatagtgcttattaggaatggaattatggaaatttcctgttgttattgtgtgtgattaagtcatcactgtaggaatcttgcatatgttggaattacgatttgttccattatattttttttagttatttcagctaagttttcctcaatggttatgaaaggaagtgctaccatatcatgatttggattatttagttattttccaatcattgtttcaaaagggtcaactcagatatgaatcaggttttttttttccacacattaagtttgggttgattttgaagaattgtcttgtatatgttttcttcctgttgatttgggaattaggactggaaagtaagaggattggctcgatacggggggaacttaaatttgaattgttcataattttgataaatatttggttgtttatctgtccctctttgtgaattgtgattgtgatcttaatttttgttatgctag

SEQ ID NO: 86068 - DNA, 755 bp, Citrus clementina
  Intron number 1 from transcript clementine0.9_015627m (loc us clementine0.9_015627m.g) derived from phytozome v7.0 (c hr-ID scaffold_2; pos 4496813 to 4497567 reverse strand)
cagaagaatttggggtaggtaataatcagtcttcagtgatcattgatgtacaatgtggtttatgggcttggatgtgtcagacagtgatctgtgaatccttttagttattttcttttctccctttaaagcagcatattagctggtccaatacatgaatgatgcatcaaagaaagacatcagatcaaatgtaaacagtagacttctatggtactttgctcaaaacaaggacccatattacgactttgtcagtgattttaaggatcagggaaaataaaatctatgacataagagtgttaggcttgacccatgctgccttgcagtttcagctccttttcatttctaatttcacgtctccatttggggttttcacgtttggggttactttttatcatctgctagaaaagagagaggtctttcagtaattttcctattttactttcttctgaatggctgctgcactgatcttaactgtgatgcagttcagtagtcagtgacctggctgtaattgttgaaagaacaaactgttatattttgtgtgctgactgctgatgagcagagggagttgtggggccccactcttgttaatatccctatatgcatgctataaaatctgcctgtttttgctagttattaaatcaaacaaggatttttcagtggaacatttttgtgcttacaccctgaatgaagttattgtattggtcccttttattctgctttcagattggatccactgagtgggttgaagaaaaccttgt

SEQ ID NO: 86069 - DNA, 666 bp, Citrus clementina
  Intron number 1 from transcript clementine0.9_003262m (loc us clementine0.9_003262m.g) derived from phytozome v7.0 (c hr-ID scaffold_2; pos 4589514 to 4590179)
aagtgttttcttcaaccaccattccttccttcctggtcacaaaaggtatcaacaatcttgttattaatgtttttagtttttgcttgcactgttttctacaaaacaattctgggtgcaacactcgctcaagctcactcgttttaatgaagcatttctcctcctttcactccagtcatgtttgagtatttcaaagacttttttaattactttttaatgaatttgatcattgtaattcaatctggttatatatatttttcttttttttgggggggttcttttctttttctttttttttatttaaaaaaatcatttctattatgatttgcttcgaattacaagcctccattatggctttcacctcatcggaaaaaaaaaatattacatcattagtctcttcatttttccaatctaatcaaattcttttgcttctagttgagttcagtttgtcaaattaaaactgcttgagtgtgcatgtccacgtggagtgaggtatattaattaattatctttactatatatgaacaattatgccatttaatgttatgttcagttacattttcggttaagctgccattttcagaatctcattgttcttacataattaatacaaaatgtccataagaagaataaaatcttatttgtgttctcatgacgtcagtgcttaac

SEQ ID NO: 86070 - DNA, 767 bp, Citrus clementina
  Intron number 5 from transcript clementine0.9_024627m (loc us clementine0.9_018097m.g) derived from phytozome v7.0 (c hr-ID scaffold_10; pos 1394340 to 1395106)
caaaggcttgctacgagaaaatagagtgagcattggtaaatccagttgttaaaggcattcaatcaccctttttataactttctaatataagaaaaaacatatttcatgcccatttttctttgagttgataattgcatctggaacttcaaaattttatttctgttagtagtgtctggttttggtagctctccaaaggaagtaattttctgcttgcatctaggtgggtagaaggtgatgctcttgatttgcctttttctgattgcttctttgatgccattaccatgggatatggactacgaaatgtggtagataaacgtaaagctttagaggagagtttccgagttctaaaaccgggtattgtctagtctccctctgtacgtgaatttaaaaaaaaattatccaattaaaacagatgcatgatcaaaattttacattcttcattggatgttcaggctctagaatttcggtccttgatttcaataaaagcactcaaccatttactaccgcaattcaggtactcaataaaaatgaccactcaataaaaatgaccttgatgacacgtgccctttaaaatgttgattttcactctctttctgatttgagatggaaatttatggtctatcgtttacacttattattgaatgttgttattctaataatttcttttgatctttatggtggttggatatggtgctcttgtagttatatatcagatgcaaacatttcaagttatttgtttattcttttttcattttccccctcaagga

SEQ ID NO: 86071 - DNA, 819 bp, Citrus clementina
  Intron number 2 from transcript clementine0.9_002735m (loc us clementine0.9_002735m.g) derived from phytozome v7.0 (c hr-ID scaffold_105; pos 3993 to 4811)
gttgatagagtttgtgctgacattagtcgaaatttacagaagaagaatgggactattagcatatacagataataaattaattattcattttctattattaggaaaattgtcataacaaaaccaaaacgatctaagtgcctgtttggtatggcttatttaatgggtataagtgcttatttattctcataaactcttatcataatttttgttattgtttggttgttttttagtagagtttttatagattaaataagttattttatctctaatagaaaaaactcaaattttgagcttttgtgagtaggggttgaattttttttaaatgttaaaatatttaaaatatcgtctacttatttgacaatcttttcttattctttttataacataacataacaaaacttgcatattaaaatattttcataaatttttaataaaaactcttattgacaaataaacagttaaaatttcttagataaaagctcttctgccaaaatctttacttaaataagctttacttgaaaaattgtaccaaacgaaacctaaatcttataaattaacctgctaggtgggtcctacagtaatttgggccgaactctgggttatcgcaaggattcagcccaactcaatccagatcagctgcctgtaaccgcgacgacttgtagcacaagccgcaatgcagtgattacgaagggaataggatctacagtttcagacaaacggtgtattggttactgcattgttcatctgctataagctattaaataaataatcttagagctgttataaactataatagtagttagttttccatcccaggag

SEQ ID NO: 86072 - DNA, 624 bp, Citrus clementina
  Intron number 1 from transcript clementine0.9_033689m (loc us clementine0.9_033689m.g) derived from phytozome v7.0 (c hr-ID scaffold_24; pos 1569652 to 1570275 reverse strand)
aatttagtactctgttttcttatttcttatttctgttatgcatcttttttctttagggcatttggattctatattaatcctagctggtgctgagatagatatgaaggttgtgattaatgatttttttgataagaatgtgttgataaataaattttgagaatgcgttgttaattaaattttgatactccattggtacaaatgtataagtgattcaaaaatctttaaagttaagcagaattgacattagcgtgggagactttttttttttttctaagctgttacaaaaacttatatttggatcttattatgatcttatctgtactgcattttgaaagatcttatgcaatgtaaggatttttatcagtaaaacattatgaaaaggttagtacaactcagcttagcactgaatccaaattcaattagctagcctttaattaaaaccgaattagtaccgccaatcacattttatatttcactccatgtaagcgcacatgaacatggagcccagacatatcctagctaatgatttgaatttgctttggctatggattgaaaatcctcaatcccaaatattcccgtaaacactatgttacctaaatcctaatcttgcaggaaaagtagcgg

SEQ ID NO: 86073 - DNA, 657 bp, Citrus clementina
  Intron number 1 from transcript clementine0.9_035579m (loc us clementine0.9_035579m.g) derived from phytozome v7.0 (c hr-ID scaffold_2; pos 2412753 to 2413409)
ggaagccctctcaacataaactctctgaacctgaggtttgactttctctatcttttgtctcttttttattgttacctcggaagcaatttttcttcttctagttgattgtggtctgttatgaagaatgcgattcaacgatttgcgaaacaatgttgccagtataaaatttttgttaaccaattacccccttaaggctgattccgcaaggggttcttataattcagttgactgatttactttgcctgaggagtgaagtaacatttcaataattgtgtgtggtcggaccgtagctttctttagccgcaataaagagaaacttcggagccttgtatttcttttggcttggtgactcttcgattctgcttctactgaggcattttcgtgcaaaacttgcctcagatgggtcgtatgtgccaataaatgtacgcttgccctaattgttggtgttttcggttttcctacattgtacctatgtttgtcattggaagatgctttatgtcgctcgtagagcccctcagagaagctagaagtttactttgtcatttccttcacataataaaaatattcggcttggtatcttgtattacatttgcatttgtagatgtttgattttcagattacttgattgtgtgctgagaagtttctgttgttggcagc

SEQ ID NO: 86074 - DNA, 1002 bp, Citrus clementina
  Intron number 1 from transcript clementine0.9_016824m (loc us clementine0.9_016829m.g) derived from phytozome v7.0 (c hr-ID scaffold_2; pos 4114264 to 4115265)
ttagagaattgaaagggggtttctgggaagacctggtattttcctctttggtttcaatccagcttggttggttatagatatctgagatttattttatgacttatggaagatgaatttgatataatttcttgttcggctctgtttgcatccagtttattctttatctatgttcatgctgtcattttggtcttttcagttggttatgcaaattcctttgttgatggaggaattgttccctttgacgtggtttttctcttttttcttctactggtcattcaaacatggtttgaaggcagcttagttcttaatttggaacgtctaattcatttttttatcattttaaattcattgattggatgggaagagagaagaggaaaatttaccaacttgaaatgtgcaaagtgaatctgcaattttgctattataatctttgaataaaacaatagtagtctttagttctgattgctacactttgagaatggttgttgaggattcgtactgcaccctgcttgtctggtgtttcaattctataattaatccgccttctgtgttttccttccagatcatactgacaaaatttgaaaaaccaacaagattacagagcagtacatagtcgtcatcctttttaaagctcatatgttgaaataatgcgcttagagattcctggggagtctgaattgcccatactgcccaatgagaatgtcattcttgttttgttgtctatagatactgaaacagactactaataggttttgtcaattgctataatctgctcaaggtcctgaagcctttaactcgggggttggtcaaagatcatagaaacaacttattaactcttttgcttataactgtgatcatcgtactaattgtatttgctgctattttcttcttttgcatttagaagtttaaacattaaaaggaaattgcagtcggtgcatgttggtctttcacatgtaaaattcaatctttattttgtatgacagaccaacgggagtgaagttt

SEQ ID NO: 86075 - DNA, 667 bp, Citrus clementina; identical to SEQ ID NO: 78787
  Intron number 5 from transcript clementine0.9_008200m (loc us clementine0.9_008200m.g) derived from phytozome v7.0 (c hr-ID scaffold_4; pos 7204447 to 7205113 reverse strand)

SEQ ID NO: 86076 - DNA, 991 bp, Citrus clementina
  Intron number 1 from transcript clementine0.9_008200m (loc us clementine0.9_008200m.g) derived from phytozome v7.0 (c hr-ID scaffold_4; pos 7205706 to 7206696 reverse strand)
aaagaaaacgcaacttgttctgttcgatcaagcaggtcaaagcctctacatctcactagtttcttctcctttcttttatttgaacgtgttcttttatatttcctgtttgttcctcgagaaaaagaaaagaaaagaagacagaactcgtacttttaaatctgttagatgaataacctcatttgagctcagatttgaaattttgactctctcgtgcttttcctacgttttctcagcaaccaaacagaacttgcacgaactcgtatgcgttatgtagttaattgtttatttgtttatgatttttacgttgaagagtatattattgtgaattgaattcagagttcgaatcttttatgtatttttgtgcttctttttttttaagtggagtaaattacaaaaaaaaaaaaaattgactggaccagagctaagccattcttttagagagattagtattgctaaagctgtgtctggattctttgctgctggatttctagtgatgaaagctgacatgtatatatataaacagaaaattctgtttgcttatatgtttatatttgtttgtatgttaagtctttaacttatattacactgccttattacttgcagagttatagtaaggtctgttatttgttactgttgagccaaaatgcattctaagtatcaatggggagtgtcaaatatcgtattaatcagataatcgtgtccatttgatttatgaaatcatgttttcatacatatctaacataattttgttcgaatagctccaatgttgctaaacttatgacttggagagtgaaatgagtagttagagatggtgaaatctcaatggttggaaataggaagttttattttttcttgagatcgtatataagttttgttaaaaatttattgttgcttttttcccccaattttgacatcttataaaagttttatgcatgtctattgagaacttatcgttgtttttgaaactgtgaaggtacatacctgaacaacg

SEQ ID NO: 86077 - DNA, 447 bp, Citrus clementina; identical to SEQ ID NO: 81848
  Intron number 1 from transcript clementine0.9_004430m (loc us clementine0.9_004430m.g) derived from phytozome v7.0 (c hr-ID scaffold_3; pos 3739723 to 3740169)

SEQ ID NO: 86078 - DNA, 865 bp, Citrus clementina; identical to SEQ ID NO: 82567
  Intron number 1 from transcript clementine0.9_012028m (loc us clementine0.9_012028m.g) derived from phytozome v7.0 (c hr-ID scaffold_3; pos 3553003 to 3553867 reverse strand)

SEQ ID NO: 86079 - DNA, 792 bp, Citrus clementina
  Intron number 3 from transcript clementine0.9_003736m (loc us clementine0.9_003736m.g) derived from phytozome v7.0 (c hr-ID scaffold_41; pos 491084 to 491875)
aacttgaccttcggtatcatcttaggtggtgctttgcttcaagaaactttcttgtgctgcatgcttgaaagttttcattttataattctgtattacatttgtctcatggtaacaaacttaaatcagcacacatagtataatctagtgcctgtgtgttgtatgacattttcactcttccctaaaaaactaacataaactgtagacttttcattcttgcatgaagaggaatatgcctctcatccctatttaaagttattgactgttcttgtgacaacataaaatagtgatagttcatgaataaaatgtatgcttggtgggattcttgaatgctctatcgaagttataggctgggtgctgtaattggatcagtgggttgtggacaatactgagatagatccctgatcgagccttattcaaagtttttacatgtatatttgattcaaagattcctatttgactgtttggatgttgataagcatataacagaggatctaaataaaatttcatgatccatgcagattcaaaaggactttcaaatctgcactcaacaaacagtgtattaggaaaatatgatacaactgtaggcataaatctttaaaattatgatgaacattttttttaattactatgctgttgtagtgtatacttttttttttaaaattattatgccgtagtcatataacagccttgttctgatttaagtttttttcaaagcacccaattgtactcatttgattctgtcattgtcatgtgtcagtcgagaaacgggggctttaaatagaataatcgatc

SEQ ID NO: 86080 - DNA, 364 bp, Citrus clementina
  Intron number 2 from transcript clementine0.9_028153m (loc us clementine0.9_028153m.g) derived from phytozome v7.0 (c hr-ID scaffold_7; pos 635546 to 635909)
ggccaaaaatctatcaagaatagccccaatccccggtacattaattcttcattttcttgaaatttcgatatccttttttttttgttggggggggggggggggggggagttattaaatgaacattcttttggtagttccttagaaccaaaatttagaatgggcttttatggttggtaagtagatgtgttatgtattattttggacctgagcttaatcactaatgcttaaatgtcattttcttcatttaattatttgctgcttttgctaattgccatcgcttatcataattagtgactaatcaccaatccttttgtttttttttttttgctgaaaacagaagctactacaagtgcacaaacccaag

SEQ ID NO: 86081 - DNA, 733 bp, Citrus clementina; identical to SEQ ID NO: 82025
  Intron number 1 from transcript clementine0.9_009633m (loc us clementine0.9_009521m.g) derived from phytozome v7.0 (c hr-ID scaffold_3; pos 4632541 to 4633273)

SEQ ID NO: 86082 - DNA, 826 bp, Citrus clementina
  Intron number 1 from transcript clementine0.9_021221m (loc us clementine0.9_021221m.g) derived from phytozome v7.0 (c hr-ID scaffold_10; pos 2434943 to 2435768)
ggacaagcggatagcttccgagacttgagtatgattccgtcattcttttttacttctcataagtcatacatacgttgttggtcatgattgtaagtattttgtatgcttagatcttatatgttgggcttatgcttctttgtccttcttgattttgagtcaacaacttttgtttcccctagcatatttgtgtatttctattatgatgactttatgtattgagtgtcttggtgggaatcagtatgcgcctgagcttgcttggttatgatctatggcagaaaaagtagccagctttctgagaggcacatactcattgataatattgtcacttgtatctcgggagtttatttaagaagtatcactatagaaatgagttttagattttagaatatctgctgctgaatattgcaagtacttggtagttctccgattgttgaaatgttttgttactgaatttatatgtttttttctttctttgataatctcataaaggtaaaattcttatggcaattgaattagcaagcattatagatgtataaatcaaatgcgcaatacatgatagagaataatggattttgtgtcgttggtaatttttgttagaaaatatttgcaaaatgtagtccataacttcaatagattgtcttctcttcagcaatatgtttgggtcacagaataatttccatcttcttttattgtagaaatatttggcaacttaattttctatactttaataaattgttttaccgagggtttatgcttgctactgatctggaatatgcatattttctttacaggtaacacagaggaagcctttcttgattcccatccc

SEQ ID NO: 86083 - DNA, 654 bp, Citrus clementina
  Intron number 1 from transcript clementine0.9_002913m (loc us clementine0.9_002913m.g) derived from phytozome v7.0 (c hr-ID scaffold_2; pos 6945639 to 6946292)
aagacaattctctgtttttgctgtggccgctgaaggttcctctctttcccttaagtcggtgttaattattgcttcgttagatcaatttcctttatttggattaatttcggaataccctttatttaattcttcaagtttcagcgcaaaatttctttctctcttttttttttgtacactatcgtaatggtattgaagacgcgttttttaatttattttggaaaatttggctgtaatatattcattggtctaaaaaataataatgttactcagagtttaaacaatataaaaactgtagtaagtagaaggtggtattcagaattacgttttgtgatactgggaaattattgcaatgaatagttgtaacacaagtaatatgcattcatcttactttggagtactggattcttttgttgatattatatggccgtatctatcatggaaaagcaaaggcgtcattatggtattgaaatttttgatctttattcttctgcaacagtgttatttttggattcttactttaatgtttgcttgtaagaggatgagtttttattttgatggttgttttggtttctgggtttaggctaacagcagaagtggatttcatttatcttttttgcagagtcaaaacgtgtgatccccttgaaagattatcgg

SEQ ID NO: 86084 - DNA, 978 bp, Citrus clementina
  Intron number 1 from transcript clementine0.9_032396m (loc us clementine0.9_032396m.g) derived from phytozome v7.0 (c hr-ID scaffold_4; pos 3785100 to 3786077 reverse strand)
tgttgaacgatttctgtgctcgcatcgaaggcggcgcccgcggcgttccaccatccccgccgttgtctgcttgagtagagtacttggtacttaccgacgctgcagctgcatcacttattgatgaagattttcatttaacctgattaattagaccaaattagaattgcatgcttgagctccgcctgtgtatttgttagttagtgggaaataaagggttgattgatgtttttttaattttgattatttgtgagacttcctatttaataagtagtgtggtttggaatatgacaaatctcatttaaaaattaagagatatcaaaatcaaattcatcattacttatccccaaaactaaagctatctttggaagttaggattaagtgtaggattgaattaattattaggataaaatattaatactatgtttgacatactcacttagattggactaatggactaaattcaaaattttatcctaaattatgggattgctaatcctaattttcatgtgggtttagttaggactagataatgtcaagaaaaatatttgtccatttataatatcttccataatttattgcaccattttatttataacttaaaaattatttatttattgtttttaattaagtaatttttttattcatgatttacttaaaagttattaatttatttattatttgaataattttatttaatgaaatgatatatctcatttgaaataacctataatttatacttctttatttgtgcgcgtatatatttcttattagttttatttttaattaattataatatttcttgttaaatatctataaatagttgatatttaaattcaaatattaacgtaaatactatttaatttcatatatatttaatttagcataatccaatccgatactataccaaatataagttagcactatatataatccaacttaatctaattcattctaatttagtccaattctaataattag

SEQ ID NO: 86085 - DNA, 660 bp, Citrus clementina
  Intron number 1 from transcript clementine0.9_029934m (loc us clementine0.9_029934m.g) derived from phytozome v7.0 (c hr-ID scaffold_31; pos 1292870 to 1293529)
tggcgtagaggccctcttggccccaaggtcagtaaattattgcatattattgtcattatttctatttgtagacttgaaaacagttattctttgatgcattcgcatacatacaaagttacggtgcaaaattagttttttggaaaattttctggatgctagtgtgtgtgtgtgtgtatatatatatatattaaccggatcatttcttggaatcttttcgcatctgttggttcaaaatacatatgccaagaatataacaaataaaagtatatatacattcaaagcatccaagattttcttaaactatacagcgaataaaatttgacactattatggagtccaacgagaatttgataattatttttcttatcaccaatattaatactcactaataataaatgtcatctgccatatcatttgtgatggaatatgcacaaaaattattcattaagtatatttatatcttcgagaaagattaattatgagtagttacattaaatctacagttttgatacgttaaacttgcacatggacggccaatctcgaaacttgtacaacaccttgtgcccatgtacgtaaattagagcttcaagtagtgtttttaatcctatgaatttcctattttcagaccctctgcaacgcctgtgggatcaagtacagaaa

SEQ ID NO: 86086 - DNA, 884 bp, Citrus clementina
  Intron number 1 from transcript clementine0.9_011378m (loc us clementine0.9_009618m.g) derived from phytozome v7.0 (c hr-ID scaffold_24; pos 997771 to 998654 reverse strand)
taagagaactttggggaggtgccacaaagcaacaggtaaggcacctcgtttttatgcttgctgcatttgtctagcaatcaattcttgtacaaatgctcatgttgccactgctacttgtaaagtgtcaatgcaaagtttttcagatttaacttcagggcctatgtggccttttggttcaacctagggtgaaaatgaggagtacttcttaaatcagatttgaatatgataaccttcaaggctgggattggagtaactatgatttcagctatgaatgaatttgatatccacaagcttttaggcctacggtgtaaaactgatatgctacattaaaataggacaagatggagctaagcctatgagtattggtttgtataaaacctgtagtaatttccggcatagtgtttgtatatactataagctcacgccaaaatttattgaagccgggtttttttggaaccataaagcaagcattaacaaatttggccctccattgaacgaaaaccagtgaacttgccaatttcctgtcttaattaaaaaccttaactctattcctaagaaacaaattaacggctcaaggttgtcttcatattccttcttgcttttgcatctagatttctttttaagaattttgatcatgccacctgttagttataccatagttgctttcatttattttcaataaacttacaattggattgaatcttctcttttcagggaaaattgatgatttttcagttgaaaatgatgaaaattgtttaccttctagctcagttgtagtaaaatatccagtcaaaggtacatgccttatgaaatcagctactaaatcaccagtatttgaactttatccaggaaaaatacttcaccccttggcaaaaatcaagtta

SEQ ID NO: 86087 - DNA, 542 bp, Citrus clementina; identical to SEQ ID NO: 83698
  Intron number 2 from transcript clementine0.9_034201m (loc us clementine0.9_034201m.g) derived from phytozome v7.0 (c hr-ID scaffold_3; pos 1303905 to 1304446 reverse strand)

SEQ ID NO: 86088 - DNA, 635 bp, Citrus clementina
  Intron number 1 from transcript clementine0.9_034201m (loc us clementine0.9_034201m.g) derived from phytozome v7.0 (c hr-ID scaffold_3; pos 1304450 to 1305084 reverse strand)
tcattgaatcctccttctcgaataatctgccacgtgtatgtttttctataaatctcgagcttcatttttcttcttttggtgattttattttattttatttgttgaaaggggtgatttttagtttaatcatgctaaagttgtttattttgtaattaaatttgatgctcagtttggttgcttttatgttcgttgattttaagatcactgttgtcaatgtgttagtgcaattttggttttccgaaattcatgtaactggagcatgctatgcgtttataagtagactgtttattgcttgaaagacgaatagatgcttttatgctcgttgatttaacatcactgttgccaaaatgttaatgcaattttgattttctgaaattcatttaactggagcatgttgtcaattgttgtacctttataagcagaggctgtttattgcttgaaagacgaatagtgtaaaatgttaagaaatcgtagttatgtaaaatcctactttttgacaattgcagtgtctttggtctttgttttacttgttatgttggtttaaattgatgaattctcttctcttcgtgttagtttgatattttcccctccattgtgcaggtgtcagaagcaattttcgcagtatacttgccctc

SEQ ID NO: 86089 - DNA, 936 bp, Citrus clementina
  Intron number 1 from transcript clementine0.9_012609m (loc us clementine0.9_012609m.g) derived from phytozome v7.0 (c hr-ID scaffold_113; pos 480284 to 481219 reverse strand)
tatcttacatctgcccttttgttgcaccacctaaggtgaggagagtctctgctttttcctacttactgcgttttgtttggttggcaagaaagttctaactgaattctgggtcatatactttcttatgtgttatgtgtttcgtttaattgagttttgtgtgtgtgtgctttttttatttttatttttattttttgggttatttgttgtgagtgtgaagaattagttgttttggtagtttgatcatattaagtgcaagtttaatggtaatcccatataagaattaattcttttaaataataataatcatcatcatcatcaatgtttctttataatctgtatggaatccttctgcaacttgttctttttcagaattaatttgggaactgtgtgattagaggctggttgcttcttgttttctgagttgagtaattataaaactttcctctgattttttcattataaattactaaacatttttcttcccctttcgatatatatgtttttgtatttatttctttactcgatctgatttagaagctggtcaaacaatgaagttcatatataaattccagtataaatttaatagtaataaaggcgaactgcttatctgagcctgcctagacagactctggaaattgtaaaaccaaaatagaattgaacagttttcctcttgttaagacttaagcatggatgtatatgggatacacatgtcaagtagtttgtggttatgcgcataaattttatgtttgctttctttcttcttcttttcttttctccttttaacggagaaactagcagatgtggatggtattaaactattgatgacactggcattgttttttggtgaatatactcttattggtcaaatgatgaagtagtctttgatttatggtttgtacagggcagagcatttatttgggttgaagcattggctca

SEQ ID NO: 86090 - DNA, 558 bp, Citrus clementina
  Intron number 1 from transcript clementine0.9_002814m (loc us clementine0.9_002810m.g) derived from phytozome v7.0 (c hr-ID scaffold_3; pos 7166092 to 7166649 reverse strand)
tgatagcttcttatttgcaagatttccttttacaggcatgtttctttttcctattttaatttgaatttgattatttttggaatttagctctgcaactgttcaagttgatattaggatgaatgcatgttggtgaagttgcaatctttgattttagtctttttgtttccataatgatgaaagattgcactggaggttttttttcccctttttaatatgtattttttttttcattttggatgatgacaaagagatgctggagaattggaatgatctgattttacaaggaattttttttagttgagtgcacttcagtaatttattgtagtgtaatggttatttgcgcaggcatattccatgtgttgctttaaagtttttatatgtgctcataccacctttgcagcgcaattgaagattcgcacaatggcatgttttcacatattaaatcctcagtgctgttcttatgtaatttttcagcagtgtgccagttttaataatgtcaactttgatggttccatttgtgtagctggattttgaaggcgcaggtccagtcgacactgc

SEQ ID NO: 86091 - DNA, 530 bp, Citrus clementina
  Intron number 1 from transcript clementine0.9_005579m (loc us clementine0.9_004500m.g) derived from phytozome v7.0 (c hr-ID scaffold_3; pos 1440559 to 1441088)
aagcaattcattcattacttggggccgccttcaaagttacttccctctttttcttggtattagtactatgagaaattgggaatgggcgaaatgagtagtatattggcatagaaattaaattactgagagccacagaatagaatttgcattcagaaaataattttttcatgaacactctttaattgtgcatgaccccacgtttttcgtttcttcttttataaaagactaacatatagtccacctttttgagttctcttttctataattctataattcagtaagctttgcttttacagcgcagtaaggaccttgctgcatataactgaactcaatgtgtgatattttgtacaaccaaattttgttgacagaatacaactggagcttcttttctgtgaaggctttgcttcttgtttgttgaccattttgtctgttgatgggctttctttccggttatctaagttgaatttactgatttttgtgcttgacaatggctagtgctgctcaaaaccaggagggggtgccagaaatct

SEQ ID NO: 86092 - DNA, 623 bp, Citrus clementina
  Intron number 2 from transcript clementine0.9_005579m (loc us clementine0.9_004500m.g) derived from phytozome v7.0 (c hr-ID scaffold_3; pos 1441136 to 1441758)
gcaattttctggtcattatcagctgcacaacaagggtatataatctttattttctttttttttttttcctttttcaagtatttcatttctactgtccaatatcttttggtgcaattttgttcttctttcaacttctatatacaattttggtttctggagtcaacgaatgccatctttttggttaaatttgctatatttgatacctataattcactgatatataccgctattttagaagaaagagctcacatttttacctttgtattgccaaatttttagaccgcataacccaatatctggtaccacattctgtttttttatgaaacttgaggaaatgaggttgttaatcaatttactcacctttaaagtgatgttgccagagatgggaatcaacattatattaccttacagagacttttttgtagcaatgggaaaatgaatagtgaagctttattttgttttatctttttgaagtgtaaacggcctctaaaagttttccttttttgcctaaccaactcttaatggcctacaattggtctatgtaccggctttctattaccgttctttgtacttaccttgagataataaaaaaacaatggttcctagggttctagagtggggtg

SEQ ID NO: 86093 - DNA, 812 bp, Citrus clementina
  Intron number 1 from transcript clementine0.9_024184m (loc us clementine0.9_024184m.g) derived from phytozome v7.0 (c hr-ID scaffold_4; pos 1388006 to 1388817)
gttatattgtcatcaaaaatcgtccttgcaaggtcttttctctttttaaataaaaattctctttttttttcttctgatttttttggggtgtcaagttttggtttttcttttgtttgtaatgaatttgaatctgggtattcgttggtcagatctttgatgggttgttttttgtttttatcacaattgaatgtatatgtatgtcaatggggttttattttattcattttatatgctatttagtgaatttattggcgcttgtgaaattttgagtagtgaattttattggcgcttgcgaaatattgagtttcaattgtggatgttgatggaatcctcatatttgctttgtcggtttgattttggagtttttttttttaattcagtttgattttggagattagattttataaaacatgtagattacgattgtagtttggtagcttatatgggtgaatttgaagcttaatggtgacacgtagtgtttttaaatcacaaatgttcatgatctgattgtagtatacgagggtgcttgagggaaacgtgtcaaaagaaatgcggtaaaatgaccttgtatctttgagagaagggttgctatgcaatcattttattagtacagtatagtaattgtctaacatataaaaggagattttatataaaattgttcctctttgccttttgcctgactgtgttggattatatcgtctctaatagtacagttttacaattccctgacagccacaagtattcaagtttccatctttttcccttcactctaaacaggttgttgaagtttccacttcaaagactggcaagca

SEQ ID NO: 86094 - DNA, 604 bp, Citrus clementina
  Intron number 1 from transcript clementine0.9_019239m (loc us clementine0.9_019239m.g) derived from phytozome v7.0 (c hr-ID scaffold_10; pos 2068384 to 2068987 reverse strand)
ctttgtaagtttttgtgtgtgtgtgttgttttttttccttaaaaagtttgtgttttgagtctgattttgaagctttcttttatggctaaaataggtagtttttgtttgtccataaacttgatcactttcatgatcatcataattaatgaggaagtaaaaaagaatttagtgcctaatataggtattatgttggattttgatttgtgcatgcaattaatgagtttttggaatttatgtgaagacatgccaaatgggaatttggcatatatgtctaatttgggagctttattggctgtatatgaaaataactgcaactttcctctctttttgtgtggttgattcacaattgatgaatttgatatttacagtgtgattctatttagcttgtcgagcaaaagtgagtttgcttattgtatttgaggaagcaaagttggttttttctttttccctttgcttatttggtacttatcattgcatttggatgattttgttcaaattgtaaaggaaaatgttgacattggtttactcagctgcatttattttctctaactacaaacctggggctgtagggctgctgcaattccaagagcgaaaggtggtgcac

SEQ ID NO: 86095 - DNA, 780 bp, Citrus clementina
  Intron number 1 from transcript clementine0.9_025759m (loc us clementine0.9_025759m.g) derived from phytozome v7.0 (c hr-ID scaffold_4; pos 1922764 to 1923543 reverse strand)
caggttggggtggcaaccgcggacactgaaggaaagtgacatgcataatttttataattaagcagttgcaattgcgtaatttttccagaaaaaattggagtagcttttaagggatatgatgatcactattatgaaaaatgaataatttgatggttaagcagccgagtcatggtattgtgtttgaaattttgtgttacgtcttaaaaaatgttgttcgaaaatgttaattgagtatttgtgttgtttgttttcatttacttcttggtatctactattaatgttaatgttgtccatgaagatgtcctttctatatatatgtcaattccaataaatttatacaattgcaggttatattatttaatatttaagcacatctattcagattctttctttctttcttttttttcctataaagtgataagcaaacacattaggaaatgatctgtagttgattagtagtagagttatggtgcttagtcatttgatcttgcgtgtagcatacatgcatgcttcatgttttccaccatgcagtctcatcttaaatgttcagtatatttacggatggttgatccattaattgctgaccgtatttacttatttgatccttttgcaagccaccagtgactgttctttttgattgagtgacaaacaaggcttcacaaatttttatttggtggagttacggccttgacccaaaaaaaaaagaagctttttaattctctctgcacaaaaaggatactaaagcaacctctacttccgattgcagattcagaaaagcac

SEQ ID NO: 86096 - DNA, 574 bp, Citrus clementina; identical to SEQ ID NO: 79894
  Intron number 2 from transcript clementine0.9_021604m (loc us clementine0.9_016683m.g) derived from phytozome v7.0 (c hr-ID scaffold_119; pos 283534 to 284107)

SEQ ID NO: 86097 - DNA, 426 bp, Citrus clementina
  Intron number 1 from transcript clementine0.9_000067m (loc us clementine0.9_000067m.g) derived from phytozome v7.0 (c hr-ID scaffold_24; pos 3241147 to 3241572)
tggtacttttctgcttagtttattattcgtcattatatctgatgtaacttaatgcaaggtatttagtggcaatatatagatcttgaaatgctgcatgcgacaaagtttgtttggaaataggtatagaatgttcttgcattattcatcaaaatgagtatgggatatattacatctcattgttcccattctcacaactgatattattgttctttgctgggtccttttttttttttttttgtgtgtgtaaactctgttaatcatagcactgtcctctctcccataacggtattaagctgagcaagcaagcaggcagcttaattttccacatacatctgaaagttatgtttgcttgagatttctctctctctctctcgctctgtttgatttcatacttattttctttcccatcatgattgcaggaaaaaa

SEQ ID NO: 86098 - DNA, 458 bp, Citrus clementina
  Intron number 1 from transcript clementine0.9_022655m (loc us clementine0.9_022626m.g) derived from phytozome v7.0 (c hr-ID scaffold_3; pos 4099483 to 4099940)
aggttcattttcttccccttgttattgtttatttatgggtgatcttgtctcttgatcaattaagttatattttagtttgctgagaattggtcggtgactgaaagttgaaacttggatcttgatttggaaaattagaaatcgccgtttaactgagttgtatttgagtaatcttattaaccatatggaatatagcttttcattttcttgattgatttgaatttttcatttttctgaattgaaaacgacatattcctgtcttggtccctgactggttcccgcggaaaacaatcgagggcagaagaaatctgaataatcttgtgtaatggaagaattggaatttgaaataaagtctatgatttgctttccacgaacacaagtacttttccattttgttgcaataactctttcttgaatggacttcagagattggttcaacatcagccaacacagtatcccac

SEQ ID NO: 86099 - DNA, 477 bp, Citrus clementina
  Intron number 3 from transcript clementine0.9_036045m (loc us clementine0.9_036045m.g) derived from phytozome v7.0 (c hr-ID scaffold_154; pos 15065 to 15541)
cactatcgttgatcgtcccgacatctacacttaaggtaattctctttagctatttgtgtcttttgtttttccgtaagctgttgattttaatattttttaatagaatttaactgaaatgaagtaaattatgttagagatcaaagcttgaagtgctatgaagagaggcacttaattgtcattttacttgaaagaagcttttagatgattaaaatgctcttgaagttctagtttttgctaaaattcactcagaatggaccttattgtgagcttgtacggttattgtagtacttttaatttaatttttaagaacaaggattgtgattgcatatgagatttcgtcttgaaggagtgaaaagaaagaaattcccgtgattttatgcacaaacaaactgttataattaaagtgtttttcatactagattgaattgcaaattttgtagttctaacaaagaagtgctgttaattgctaataggaat

SEQ ID NO: 86100 - DNA, 751 bp, Citrus clementina; identical to SEQ ID NO: 78524
  Intron number 1 from transcript clementine0.9_005126m (loc us clementine0.9_005126m.g) derived from phytozome v7.0 (c hr-ID scaffold_4; pos 2356167 to 2356917 reverse strand)

SEQ ID NO: 86101 - DNA, 638 bp, Citrus clementina; identical to SEQ ID NO: 83749
  Intron number 1 from transcript clementine0.9_003674m (loc us clementine0.9_003674m.g) derived from phytozome v7.0 (c hr-ID scaffold_3; pos 674907 to 675544)

SEQ ID NO: 86102 - DNA, 652 bp, Citrus clementina; identical to SEQ ID NO: 85685
  Intron number 1 from transcript clementine0.9_014383m (loc us clementine0.9_014383m.g) derived from phytozome v7.0 (c hr-ID scaffold_2; pos 5548182 to 5548833)

SEQ ID NO: 86103 - DNA, 457 bp, Citrus clementina
  Intron number 1 from transcript clementine0.9_020417m (loc us clementine0.9_020417m.g) derived from phytozome v7.0 (c hr-ID scaffold_7; pos 3823192 to 3823648)
caagcttgccactcttctcatttccgacgttttcggtacctgacccatctcagtatcatgtccattcacttcttgtattttcactgcaaattatgacctgggttgtgtttatttgggcaaattacatctgggctgcttttgttttagtctttttggcttagttttctgtgtgtatgtttcactgtttttgccatttcttgttttcactagttaattttgtttctctcacttcaatttatcatcagggttgcttgtgttaatgtatcttttgattggttaattagggtgtttgtcagttctatttgtcctccatttcatttcgtattgactctacctattttgttcacctttattcttctgcctctataagcttctaattctttcttgtcttcgccttctaattcttactttgtctgccttctaattcttactttgtcttcgccttatcttgcaggtt

SEQ ID NO: 86104 - DNA, 1034 bp, Citrus clementina
  Intron number 1 from transcript clementine0.9_011430m (loc us clementine0.9_007632m.g) derived from phytozome v7.0 (c hr-ID scaffold_7; pos 4755678 to 4756711 reverse strand)
tgagtggtcttgttctggatttaaagcattaaaaggtcagtcgggttttcagtttcaactccgtttgttttgttttgttctgttttatatgtgtgtatgggtatattgcttcatttcgcatctgtttgattgatttgtttattattgtgggttagcttaatttatactcgttcaaaatatgtatatacctgtgtcacactgaccagacaattctcttatcttatgtccaacctacgtctgtgttcctatttacattctcttgcataaggctcactgttctgttaaagagaaatttggtttgagagagaaggtatcacttctgtgttcgtaatggaaaacatgtcttagctatcaaattctgatgaagcatatgatcattgaaatttgaatgtcacaaggtacagtttgtggtattgttgtaacataaacaaggctcaatttacgtccttctattttgcttggaatctataacttttttttttcaaatatctcaacactaaataaggctctttaaaggatctgacttccgtaggagtcaagaatattatgattgctaatgctttcatcagtctttcttatattttcttgatgtaagcttcatatccttagaccattcttttgtatgatttctgtgtatattgtttgtcatcctttactctgattttattgaaagattcattcagatctaaaatatgttgttgaatagaatatggttggatgatgaatgttcaattgtggagctaagaattcgattgatgatcttcatttgtctatcctatttgggaacttgactctaaatggattctcttggtgttctatagacgtgctttgagaaaactactgaggagctacgaatagtagtctctaagtgtaagtgctttctttttttaaccaatccttggaaaccattgatgatgttgttatgtcactcaactatgcttatctctacctcattaagctgtctattattttcatgaattttttatactaatataatttgttagtttcatatactgcaaatgttaatgccaggg

SEQ ID NO: 86105 - DNA, 814 bp, Citrus clementina
  Intron number 1 from transcript clementine0.9_020820m (loc us clementine0.9_020820m.g) derived from phytozome v7.0 (c hr-ID scaffold_4; pos 1277741 to 1278554)
tgcagttatcattccagcgatcgaatctctcaaacgtaagacttattctgtttctctcttgtctctgcgtgtgtgtgcgcgtttgctactccttgtaataattataataatattggatgagaaactggggaattgaaatggcggttcctttctctttttattttttatttttttttagtatttgttctgagctctaattgttccatgcaaaattcaaatgtgtatgttttgtttgtattatgttcatgtataacaaaaccccatttgctaatttgagttgttttccaaacccaatgaaacaacaaattaacaatgccgttggagttgcagcttcgtcgacgagagttgtgctcaatgtgttcgatggaatgtctaactgcacttattagcaagatgatttgggctatttcattattaatgttacttattgtcaatcgttttcattatgggttatttcatattaattttattgtttttagttattgtcaatcttttgtttttaattattgccaatctttatcgccatgggttattttcattattaattttattgttcataattatacccagaagattatagtatgagcttatataggaaattatcataaattttctaggtgtccaattcgcaagaccctgttgtcttcctgtgaaacttctatcattagccttggattacgtttattttatatgattgagttcttggttggaatttactttgataaagcttttgtgatgtactaatgataagtttgtgctcgtgttctcttaatgaacagtcccctgaattttcatcataactattgctcttagt

SEQ ID NO: 86106 - DNA, 798 bp, Citrus clementina
  Intron number 3 from transcript clementine0.9_019539m (loc us clementine0.9_019539m.g) derived from phytozome v7.0 (c hr-ID scaffold_2; pos 7024190 to 7024987)
agcttccaaggcctccagctaccagcagacgtacgtgagactcattacacttcccttcgctttacttcttcctttctttcacattttattgcgggaatgtttttagagcttcaacattttcaattttgcaagaaaaaagaaaaaaaaaaaaagtgcattggtcaggcaacaacatagtgttatttctatccctaacaaaggtttgatacacacacacacacacacacacacacagacgcacatatatattgttaaatttctcactttctatgttcgttatagatgttgtacttgctcaatgaatttaaaaaaaaaaccagaaaaagaaccaaccgatctgcttttttgatcactactaacagtagtcaagggtctttctaaattgtgttaagttaaagaaacgggacctttagtacattaagttatagacacaaaaccttttattatgcctgcagtttcgaccttccctcttattttatggggccttgattaatttgtcaacaagttttcttcatttattactagccctaaaaaactgcattaatgtttctgcgtgaaatcaaactaacaataatgctttctttcaagtcattctcgacaatttgggcccctttttttgtagggtttgggtgagcaaaataaagcttatgctataccaaaatatagttgtagtaaaaaaaaaaatctatgaatagggccttgatagatgatgattttagtggtgttactgcgtctaagtctgtgtgtgtctgctcatttacagcaccagagaagagacaaagagtcccctctgcgtac

SEQ ID NO: 86107 - DNA, 194 bp, Citrus clementina
  Intron number 1 from transcript clementine0.9_014007m (loc us clementine0.9_009589m.g) derived from phytozome v7.0 (c hr-ID scaffold_4; pos 5676572 to 5676765 reverse strand)
cgcacaagatcccgagccttttatcaagagaacaggtttttttttttttcttttttttttgtccctgccatttgaatatttgtacttgaagaaatattattggtgggggtttgattttgctttgtttataatgttgtgtgagattaaccgcgtatgtgctgatcgatgatgagtgatgactttgaaggaactct

SEQ ID NO: 86108 - DNA, 561 bp, Citrus clementina
  Intron number 5 from transcript clementine0.9_020918m (loc us clementine0.9_020918m.g) derived from phytozome v7.0 (c hr-ID scaffold_31; pos 2102480 to 2103040)
gaccaggcatctctgcactggactttgactgcaaggtgaagtgtcaaatttgttgtctgtagaactataatttctgaaattgacaacttcctgctaaaaatgcctgtggctgtcgtgttttgtggttgtttgtaatgtgtttatgtctttttcattggtatcttttttatttggttttatattgatatggttcttccatcacctacaattggtccatcaaaggttctttcgagatattattacattttcaataatcttgaaacaatgtttaaagatatcctgtaattctttattttagaaggaaaacagtgtttgaacttatatggtcaattccttggaactttcagccttccttttttattgaatgtggactttgtttggagaaacattgtggaatgttacttaatttctttgaacttttagccttatctttttcttttaactggttgtgctgacaaatacattttggttttggtcttcgctttgaagcttggcttttacttaagttgttgcaatatttcttcaggggatttacttggtttctgctacgagatctgggtg

SEQ ID NO: 86109 - DNA, 153 bp, Citrus clementina
  Intron number 1 from transcript clementine0.9_019586m (loc us clementine0.9_019586m.g) derived from phytozome v7.0 (c hr-ID scaffold_85; pos 402060 to 402212)
cagacgggctggcttgattaaggctttaacagctggtaatggcttaatattttcttctctttttatttgaactaaattaatgggtttgttctatttgagcttatgattattttttcttgttaattttaattttaattttctgggttgttgcag

SEQ ID NO: 86110 - DNA, 528 bp, Citrus clementina
  Intron number 1 from transcript clementine0.9_002991m (loc us clementine0.9_002970m.g) derived from phytozome v7.0 (c hr-ID scaffold_4; pos 6077751 to 6078278 reverse strand)
agaccgcccaaaagctcctctatttaggtatataaatacatccatacgagacttttacgtcagggttttgtgtgaatgtatttccttttttgtgtttttcttataaagttttgttttttattttgtttcttgcatctggttactgtgcaaaaaggttcattatttagctgtttttctatatgcattggggttttatgcgaagattaatgagtttcatatgtgggttttgtgtgtttatgcagtgaattgaggcctttttgcaattgtgaattgtagaaaaagttggtgtattttagtgttatgtatgcatatgtgtactcgactgtgtattattggagtttcagtttacatgaatgcattgtgtatttaggttgaatgcattgtgcatttagggtttctctgttttgtaaattagaatgtttagcaatttgtatattgattttactcattgttttacaacagattgtatagttctcttttaatagttggatatgatcagtttattgttgtcctcggcagatacatttc

SEQ ID NO: 86111 - DNA, 371 bp, Citrus clementina; identical to SEQ ID NO: 83484
  Intron number 2 from transcript clementine0.9_004458m (loc us clementine0.9_004458m.g) derived from phytozome v7.0 (c hr-ID scaffold_3; pos 6231006 to 6231376 reverse strand)

SEQ ID NO: 86112 - DNA, 653 bp, Citrus clementina
  Intron number 4 from transcript clementine0.9_013881m (loc us clementine0.9_013881m.g) derived from phytozome v7.0 (c hr-ID scaffold_3; pos 3472833 to 3473485 reverse strand)
atattcttcgtatgtgtaattatgcttcagattgccaagatgagaggctactatatatttgacattttgagctgcaataatagttgattctctggcaaacttcatataattatatgtttatgggaaaaaaagtaaaataaaatcaccgtatgctcaaataaggaattctcctagttccgcctcacaattcagtatctgatatagttctgttctaaggagcatagattcatttagttatacaaattgatggttgccatgttaattatatatcttcatgtttctcatttggatgcattatggtgtgaccttgcgaattttattttgatgttctgatattgaatgattggacttgcaaatccccacttggactttgttgtgtgacttaccggtaatgcttctgaattgttatattacttgcttatttgtcaatcagttaagcagtgttgtctttgctattgtggggatagtttttactggccaagataatttatagtgcttgattgactgcagtgagaattctttcctcactgccctccctgcttggcttagttcattcaccaaaatgataaaaaagtggtaaatttaattattgatattacctatttattattaatgcagggaggaaaggtgtaaaaggagctcagcctggtcct

SEQ ID NO: 86113 - DNA, 810 bp, Citrus clementina
  Intron number 1 from transcript clementine0.9_013881m (loc us clementine0.9_013881m.g) derived from phytozome v7.0 (c hr-ID scaffold_3; pos 3474204 to 3475013 reverse strand)
tcgttgcttttctctatatctcagctagctttcatgtacggatccatcaattgaacttctgttatgagtatttttattttttaagttttgcaatatttgagcaacattcaggccatcaatctgaaattaactagtggcggcttatgccctacgaaaattttatgctcaaaaaattaatgttattttttttttaattcacgggaggctgcaactgaattatgtgtttctactgtaattttgaatattattttatttaatatgcttttgttattggttcgatctagaattatggtggctgaattggattgattgaactgtagcttgataacgtgaactattcacaatttccattgcttagattttgaaaagtatactgccatgttttgctttaacctggctgccactattgcgtattcttctacatagatcagcccttcttacctgtgtacatagatttcgttaagagttataagcatgcatggcatgtttggatgtcccatcaaattgttgtatatgcgagaatgtggttggtaatgaacttacagctatttccaattagtttcagaattttgaaacggtgggaatactttattcacaactcaatcaaatgatttacgcactctaatcggatgatataatccattcttttggtgatagcatgattgaatatttgttgaggtcttctgttagaaaaggtttaatgatcatcatctaatcatcaacatcttcaaattgtttattcggctgcttctaactaaattaaattggaaattttggaatcagagaggggcattattgtggcagtgaatc

SEQ ID NO: 86114 - DNA, 946 bp, Citrus clementina
  Intron number 2 from transcript clementine0.9_033829m (loc us clementine0.9_033829m.g) derived from phytozome v7.0 (c hr-ID scaffold_3; pos 4443423 to 4444368 reverse strand)
acttacgacccgtgaatatctcaaaattaataaccaagtttcttccaaggcttaatcattcctgttcaataaccatgtttttttttttaattttttccaccccacataattaatagatctctggctttggaaaagcaacatggcttcatcatgaacatgcatcgatctccaataataggtactagtcaaaattggtttaattcaaattgatttttttttcttttttcattatattcacttcgagaaataccatccaatacaacaattttgcacaaatatattttggctgaaaaagaagtttgttttggcttataaggtggcagcttaaggatacattaaatagcgaatcaatgcaattactaaaatcagatgtcttctcctttggggttctactcttacggctgttttgtcgaagatcaatgccacaggactacagaagtttgatcgagtgggtcagtaaacatttatttttcactttcatacacgctggagaaggccataaatgtgaattacaaatgggacaactttagtgaaaatatcccttgtatttatgaatcagtcttactgaaatggctttattcaacgccttcagctgtcacaacctattttttttttttttcccatttagcaaactgactttaatcattgcaatttgtttgacaggctcggccattgatgcttcaaagaaaatttcatgagttgttggaagaagatttggatttttcggacatgcatggaatttacagggtaatggctgcggcaactcaatgcaccatcagtaagccaacttcacgaccctgtatgagcgaggtactgtaattgccacgcaaccaattcatgtatatatatatatattggcttatttttttccttaacaattaattatctctgatcaccattcatccatccaggtgatttccattctaaaaggggaaaacttcagtgg

SEQ ID NO: 86115 - DNA, 859 bp, Citrus clementina
  Intron number 1 from transcript clementine0.9_028622m (loc us clementine0.9_028622m.g) derived from phytozome v7.0 (c hr-ID scaffold_31; pos 1568383 to 1569241)
aagtattgattggccaataggaagtggaagccagggtctgttcttgtttgttgttttatgactcgacaacttgggatgccatgccattaatggactccaaaccagatttcgaattatcctaatttttgtaagccacatgttgacaaatagctagggtctaatgtatcatcatgattcagtaatacgtctgatactaatacttcattcttatttttttgtttttattacttttaattagttgtttctagacaaatccttataatctgagataaaaatttaaaaataactaaacgatctttttctcaatggaaaaaaagaaaaagaaaaagaatccgataattctaggcttagaaagttcataacctaactaattgataatgtgacattatctcaaaggatcataaaataagttattaaacttttatcaattttcttctatatggaatttgtttgtatatgttaaaacaaattttatggataactatatgtttagttgattaaatctcttgagttgaaataagaggtctaatgttccaattttaatcatataggtggaaagaaaatttaatcaaaaattcttttgtacataaaaaaaattcaattatatgttgaagatggacaactttcatccacatagctcttataattctctctagtggatgttgccatgttgtcactttatgagatacaaattaacttgagcatcataatgttgtttactttttgaagccaaagcctcatcattttgatgacgctaaattataaaggacaaatcactaatttactaaatgaagagaaatgccctttgtgttttctgttaattaggcgaatttcttatatttggcagataagataaaag

SEQ ID NO: 86116 - DNA, 986 bp, Citrus clementina
  Intron number 1 from transcript clementine0.9_003540m (loc us clementine0.9_003540m.g) derived from phytozome v7.0 (c hr-ID scaffold_41; pos 1323499 to 1324484)
ctggttctatccactatcctcgcagcacccctcaggtaaccaaactccgacaactcctttttttttttttttgccattaatattgtattaaaaccttaccaagtgaagtggcattaattctaagtttacttaattatctttcttcttgttgagtgttaatggttcacaaaattcaggaattcagaataatgagagcatttcatgcaaaagccttgcctgctcgtttaagaatagcaacaccttagtggtcagataaaattgttacagatctagtctcattgcttttagaaacggtcaggtagacctttccatatatatataagttttagttacctcatgtaataatgtaaggtatataattctttcacagccgtttgatgaaaatccaacagttgtggaaataacatgattttattactttacatttctacaatcattgaatttttatcaaacagttgtaaaaaaattacgtaacttacataataataaggtaacaaggtccgtatatatattaaattttagaattcgtatgagcattactgaacacagaagaaagtctatatatctttaatatatatatatataaaataaggagacttccgcaaatgtttggtcaaactacgagtgttattattattttccctccagacaaatactctttatagatacaaaagataagactttttgggtcggagaaagtcgataggtctttatcctactcctattacatcacgggcaacagaataaaatgggtacccttttgataagactttcctttttcacctgctccttaatttttcaactttagcagctcacggtcacatgcagctcattttaattttttcgacgttagttcgacagaatatttgttggcctggctttgcttttggttactgactgatagaaaataatacaaagcatacaaaaaaaaaatttgtctgcaaatggtcacgagcaagattgaaacatcaatttgatgaatgcag

SEQ ID NO: 86117 - DNA, 356 bp, Citrus clementina
  Intron number 2 from transcript clementine0.9_030662m (loc us clementine0.9_030662m.g) derived from phytozome v7.0 (c hr-ID scaffold_58; pos 415731 to 416086)
caggagtctacaagtgagtgccgtaacaatttggctatgtcatgttgttatggggtcatgtgattaattttacttggactgtagagcttgtccagactcacatgctagcatgtttttttcttgttaagagtggttgatgaaaatgtgattctagtttttgttttttattgtgtctttttcttcctgatcaaaattctcttgaagtactctagttgatgaactgtcgttttgtttcttcttgataccaaactttgaattgtattttcttgaaattgaatcattaatacctcttttttttttttttttttggtgtctgtccagagagaaggttaacataccaccattcaaatcattca

SEQ ID NO: 86118 - DNA, 594 bp, Citrus clementina
  Intron number 2 from transcript clementine0.9_028749m (loc us clementine0.9_028749m.g) derived from phytozome v7.0 (c hr-ID scaffold_141; pos 298585 to 299178)
cacttacttggtgtgtacaattggtaagtgacctatttcattctagggtttcgattctacatatatacatcctgcaactggggttatttttgtagccgttgtccgtgtgttaattccatgtaataatgttttatttaatttatggccatattacatgtagtacattgtaaaaataattgagtaactaatgtacactgctcttcttagctgaaaaaattggtaaattcctgcccccgaccttcgtttcatgtacagtgaccaaataagcccaaataaatttcatattttgtttacagtttatgaacatgcaatgtagttggatttgtaccacgcacatgcagttggagggttagtgttgcattagttcgtgcattaacacttatgtccaagtttttcatagattctgtgttaatgaaaaaatcataattaactaattcataccctgttatttcaataatgaacatctccttccatgccaggctgggatacaactttgatcatgagtcattcagcattaagggttcggaaatcaaagagatttatgcaaaaataaactgaggttaaagcatataggatcaacgctttacctgattc

SEQ ID NO: 86119 - DNA, 540 bp, Citrus clementina; identical to SEQ ID NO: 81205
  Intron number 1 from transcript clementine0.9_035244m (loc us clementine0.9_035244m.g) derived from phytozome v7.0 (c hr-ID scaffold_2; pos 8169914 to 8170453)

SEQ ID NO: 86120 - DNA, 261 bp, Citrus clementina; identical to SEQ ID NO: 80808
  Intron number 2 from transcript clementine0.9_005859m (loc us clementine0.9_005859m.g) derived from phytozome v7.0 (c hr-ID scaffold_10; pos 3696981 to 3697241)

SEQ ID NO: 86121 - DNA, 649 bp, Citrus clementina
  Intron number 1 from transcript clementine0.9_022991m (loc us clementine0.9_022991m.g) derived from phytozome v7.0 (c hr-ID scaffold_3; pos 5755541 to 5756189)
tgaaattagaggcttgtttgctccaccaccttggggtaattttctgccttgattttcctatttataatgctcaaataactgctatctttatcagtatgtgtctgtgtgtgcttttggctcattcaagcacgctgccttatcaagttgccctagggcacttacttggcatactaatttggtttagttgttccgatatgaaatttgctgacaagcaaatgcaagagaattgaatactatcttgtttctgtaattctttacatttacaccaaggttgtctttcttgtgtcaagttatctgtgggtatttgaggtgagccgtgtgcaatatacatgttgcagtagtggagttcggattggttcttattttcttatcaatacggaaatttgcttaacttcttatatcataatacggtcaagtttatttggatatagtcgtcgtatgtttgtgtgtgtactaactttgatactactcagcaaatttaagtacactcttcgttctttctgttggggaacaacaggagcacaacttttatttttggcatctctgaagtcacttgcacctttgtggcagtaatttgcaaaatcagttattttagcattgattttgagttcattttgcaggtgacaaagtgccgccatcaccattttgt

SEQ ID NO: 86122 - DNA, 811 bp, Citrus clementina
  Intron number 1 from transcript clementine0.9_002021m (loc us clementine0.9_002021m.g) derived from phytozome v7.0 (c hr-ID scaffold_4; pos 2214570 to 2215380 reverse strand)
ggtgagatgagaattgtgataatgttaggctaaataatcaaaagacaaaagatgtcaaagacttttgtttatccctttatttattggtttatctatttttctatatgttaatttggtaaccatttttgtttatttcttttcttatcatgaaagcttaagaaattaaacgaaaatgacaagaaataaatatgattttactatatccacaccaaacagaactttcaactaaaaaacttatttgaattcattatgtatgaagatcacattagatacttgcaatttgtacctcttaaatgtatttacctataaagcttacatgtataggacggtattgttgaccataaagataatgactggattttgtgaaaattactctacccatttaatttaatagatattgactccgtcgatgctctgaaggtcaattccaattaaatcaataatggagtgaagttaaattcataataataataataataataataaaataatgacgttttgctggttgttagagtaattaaatctcaatagatcgtaagaagttgacggagctcaaaatcttaattcagtatttcttgaaacaaataattgagagatttttttttctattaatctagatattatattagctataacatgcaacaataatgcacaagttgttgctactcaaacaatttaaagattgtggaaaactaattttaggttatgtgtaatttatagtcaatataacttcgcagctgctattaatctaatacatatatatatatatattgcagctgtggatttactgaagaaatttcaagtgcaggcc

SEQ ID NO: 86123 - DNA, 689 bp, Citrus clementina
  Intron number 1 from transcript clementine0.9_004635m (loc us clementine0.9_004635m.g) derived from phytozome v7.0 (c hr-ID scaffold_3; pos 1979577 to 1980265)
cccctacttgttcacctcatcctcaccctcgccaggtactactcttattttgacacagacacaaacacacatatataaagttagtgcttgctgggtttcttttttttttttttttttaagttttgggtactaataagtattaatggttaacagttatttgttgacgagagattattatatactttcggtttttttgaacggaaagttttacttgctttcctatgatttacaattatgtaagtggctctagagtcttcccgttatcttactggcctcttttctctggatctttttagtaatgcatcgagttcattttggtggtttgtgttccttccttcattactcaaagactaatgtcagtttaataatcaattgtttgaatttgccaattcaatggtttttgtttgtcaaaacaaggataatggagtgatatgatggaggcttatttggccatatggtgaaaaagaagaaaactgaatctaagtaattcagaagttcgatttttttttccccttttttcccttctagctgtggtgtttagagaagcgaaaagacaagtaaataagacataaaatgtgaacttggagaggaattaccagtatctatttcagtagtttgatactgttaactaatcatgacctgcaattcttccagccagagagtgctagtggctcaaggaggcacctcag

SEQ ID NO: 86124 - DNA, 737 bp, Citrus clementina
  Intron number 1 from transcript clementine0.9_027428m (loc us clementine0.9_027428m.g) derived from phytozome v7.0 (c hr-ID scaffold_24; pos 2577985 to 2578721 reverse strand)
agatagaacgagagcatattaaagccataatcttggtaagcaatatcaaattggcaccattaacgtatctttgtcaatcaggatgctttatactatgggtcgagattattaacagtagaacaccgatgaactggacctcccggttcgggttgctttttttttttttttaacactgatttccggtccttgatgcggtctttaaagaattgaattatttggtcggtttttataattgaaaaattacgaacacatagaacacatagaaagggcaccgagggttttttaattactagctagtttaagttatcttgttttgaaattgtaacaattatttgcattttgtttatttcatttttgtctccattttagcttgtttattgactgaagaatcctatttattttgcacgttaaagggcatgtacgtttaaataattctttaaaactatatatcataacttcaacttttaggtaaaccaatgatcctctttatgtgttgagcttatgtattatcaaggacctaaatcctctcttcgtgtgagctttcgcatcaataaatatagatatgtgattgatagtaaataacggaatagttcttgactaaacatgactgacaaaagcctgtgacaaaaggatcaatcctcaaaagattatgaaaacacaaacaagaagattatcctgattcattaatagttctaaacattaatttttgtgatacatgtttactttattttcaggac

SEQ ID NO: 86125 - DNA, 996 bp, Citrus clementina
  Intron number 3 from transcript clementine0.9_001052m (loc us clementine0.9_001052m.g) derived from phytozome v7.0 (c hr-ID scaffold_3; pos 1759282 to 1760277)
caggtaaggtttaatacaaatttatactccaatagatatcttgaagtataaacatttctctcttcatgtgaattgatttgtatatcattctcccttagtaaggtttcttgtaaactatttctttttctccttcagcaatgaatgcatggtgcttatttatgatatgcatttccaccaggactattcagcctattctggtggtgtttgagcctctaatcttaaataaggtttacagaatttgacattgtttatacggatagagaactgctaagtattatatattggtccttgtgagtgggttaggtcacctttaaactctattttgttcgccaatcctggaaatttctgtggtaaaagtcatataccttttctacaaggttaaatttatttaatgattcatgtattcccttgggtgagaaggaaattagatattggtaaccaatttccaatagaacttccacatcctcttcttacattcaggaatgaagaatttggttcagtacttacatgatggatcacttggatgcacatgcactattcacttctgtcatgttttctgtttatgattgaatgaattgtggtagccataattaatgcagtgcacctctcatagttgtcgcattctcatatcttcatagatgaaagggacaaaaacagtgagtgcttttttgtcactctatagacttttggatatttcttttgttggatttatcactttaaagtgtcatctgcgtggaacttccatgtgtattggaagcactccagattattcgttccaactgagaagtgatctagttgtttgctgttccatggattttcaagtgatgctgtgccttcatgatattacatatactgttttgtcattggctgcaagtttctgctgtttgattgcaccaggattttgctgggttttggccttcaatcctcagttttaaaggctgtatgttctgatctgctaaattgtcaatatttattatgcagattctgggaggcgtt

SEQ ID NO: 86126 - DNA, 759 bp, Citrus clementina; identical to SEQ ID NO: 79908
  Intron number 1 from transcript clementine0.9_021915m (loc us clementine0.9_021915m.g) derived from phytozome v7.0 (c hr-ID scaffold_4; pos 7686875 to 7687633)

SEQ ID NO: 86127 - DNA, 923 bp, Citrus clementina
  Intron number 2 from transcript clementine0.9_020220m (loc us clementine0.9_020229m.g) derived from phytozome v7.0 (c hr-ID scaffold_146; pos 205712 to 206634)
cctccgtgttcgttcgccatcgtcagccgcactaggtaatttcaaatttacatacattttgtagcaatttgaaatggtgtatgaatgggacaggtctattataatttcaaatttgtataatagctgtttataactcaaccgggtatggccaaaaggactcgttgaggatgttttattggtaattgatatttgtttttcaattttttgcattagtgatctggtcattagaataggcaatttagaaactgatctggggattataaacatgactggtaataatgcccccttttcttttaaatttgcaatgtgttaggagtcgaagccgcatccaaaataccaaacattgtaccgtgcagaaaatattcatactgctgatactaaggtcgaacctgaattgcaatccaaaccgaaaatttacaaccaaattttcaatctgaaccaatccaaaaatttaaatcccaaaatttcagttcggtttgggtttgagcttcaatccaaacgggttgaattccccaacccgaacattttggaacccaaactacgtcactcggctcacgtgcaaccctgccccgttatgttatggaagaatttaaaccaaacaacccgaaccgaaacccaatttgcccatcccgaactagaatgcctatgtggtgagatactttggccctccatgcccttttggggaaggatcctacttaaaaggtcttacaaatcatattatcgagagattgtgttttgtgtaattctgcaatttttgtttagcccttgatcagaaatgaaatggatttttatcagctgagatctatataaattttttttgtcatacaattacgcctcttgtatgttctaaaatcacatgattgtttaacatctgtttgattcttttttcttttttaattctcaaattgctgtaggattttctg

SEQ ID NO: 86128 - DNA, 691 bp, Citrus clementina; identical to SEQ ID NO: 80708
  Intron number 2 from transcript clementine0.9_007587m (loc us clementine0.9_007587m.g) derived from phytozome v7.0 (c hr-ID scaffold_2; pos 6559005 to 6559695 reverse strand)

SEQ ID NO: 86129 - DNA, 834 bp, Citrus clementina
  Intron number 2 from transcript clementine0.9_003345m (loc us clementine0.9_002644m.g) derived from phytozome v7.0 (c hr-ID scaffold_3; pos 7510763 to 7511596 reverse strand)
gctgttttcgttagattgctacatttctgctcttggtaagctattttatctctctttccttgcctgcactcgaaaaagtagccgtatcaaacattagcgatgtatgctcttttagtccgtacaagctgaaaatttaaagggttctttttgtgtgtttcttgtatcccctttttggttctttaaattaattattatgaaatttggcaaaatagtgagacttttaaaaggcaaggaaaaagaaagtaaaaacttgtatttttgtttttttttttctaaattcaatcttggatgcaaactgtggaacttttgtagtattcgatactagtagtataggtcatgggtttattcttgtatttagaaatatacctgtagttcttacaatgcatgtgggttttattttgggtaattgttgaaattttgcctggaaaatttcttcttttagatttaaggtctcattctagtaatattttttggtaccaaaatgaaggcaaatatttttttgatctctttatcataatcaaaagcatttttaaggaattgttctttacttgcctaagtttatgcaactatgattttgattaaataagaactatttcagctcttaactagctttctttcaaaaactgtcgtattgtttctattgatcactttttctttttgtttctgtttttttggtttaattcctattattgtgtgtcattgaaaccgttggatgaaattatacatgctttatagtttcaagactcttgttattcacttttactgatgactgaaatattgttggtaatttggtgatcagaaggccaatttaggggaacagttagtctgtgatca

SEQ ID NO: 86130 - DNA, 244 bp, Citrus clementina
  Intron number 1 from transcript clementine0.9_013531m (loc us clementine0.9_013531m.g) derived from phytozome v7.0 (c hr-ID scaffold_2; pos 5213730 to 5213973)
caggtatttactttgttcacattatgactttttggtcactcgcattgctgttcaattttgaaagcacgacagtttataaaaaaagaaaaaaacaaatttgacagttttattgtaaattctgcgggggaattaaccagcagtttatgtacattttgcctttggaagattaatatgatgatatttgtataatgcaattatgaaatttgcagggtcgggggtacagagccaaacgacgtcggttggg

SEQ ID NO: 86131 - DNA, 765 bp, Citrus clementina
  Intron number 3 from transcript clementine0.9_016441m (loc us clementine0.9_016441m.g) derived from phytozome v7.0 (c hr-ID scaffold_10; pos 2830150 to 2830914 reverse strand)
ggtcgggaacagcgattttgccagcagtgcagcaggtaagaatagcaataagcttgtaaggatagaaataactggagtgcttctggaatcatttttgccttcctgttgtttaatcattctctataatgcaactcaatttaatttttaccaaggtatattcttcagtgtacttagattataagatttgcataagacggatgcatctattttctaaactatgtttagtacagattctactagcttgattggaaccaaagcaccattagattcagataatatttctactacatacccttgaatttccctccgggtaaattattatttgctgtttggcatttcttatgtcaatgatcctgaaattcagaaagcaaatgatttctttagtcacctccagattgtttgaagaaactactttgttaccggagttaaccaagaagtagaggatggcatctgtttgttattttgaaggttaaattatgtgtaagcagctgaatatatttgcagaaaatgtccttaatagccaagtctagatgagacaggatctttattgctatttgattctcaaaggcatttatggtagccatcaactatctgtaattctatcagattctccatgcagtggactatgcctcataaaactgagctgcataaaagatgtattatcagatttgctcctcaaaaaattcactttttgtttatctatgggttcgtaaagctaaatttctattgaataatttatcagatttcactcattggaggagtttg

SEQ ID NO: 86132 - DNA, 623 bp, Citrus clementina
  Intron number 2 from transcript clementine0.9_016441m (loc us clementine0.9_016441m.g) derived from phytozome v7.0 (c hr-ID scaffold_10; pos 2831250 to 2831872 reverse strand)
tggttgatttgtgggattctcaggttactttcatattaactctttttcagctttcttggtttttgtttttgagataatatgcattttatgaattcatacaactgagtttatactttttgggtttctttggactttgcctggaaaatataatttccctagttttggcagtttttacagttcacagatatctatcataagcatgtttatgtttataacttattcaaggaaaaaaaagaaaaagaaaaagatatctgtagttcactactgaataaaatttttgtttacaacaaaaactagaaaatggttgttggtgtcgtagcttttcttaattaagaaaaaaatctctaaggctaatgtagtgacgagtatacatgtatgagaattttaccataccctttttcctaaatctagtagttatttaattctttaaatgaggtttcttcatgttctttaaagggaacatcagaagtctttcataatgttaataattgattaacaataagagtaagaagcttagacatgaatttgtgtggttgatttttattcttgctgcaaagattctgaaatattatgtgatattttgactaggagttgagcgtgaggagataaaaaagaagtacagg

SEQ ID NO: 86133 - DNA, 727 bp, Citrus clementina
  Intron number 3 from transcript clementine0.9_014701m (loc us clementine0.9_014600m.g) derived from phytozome v7.0 (c hr-ID scaffold_7; pos 4378479 to 4379205)
tcaggtgatcactacacaccattctttctgaaagctgggaaatgtattgaagattaaaaaaaaaaattgaatcttgttatatagtgtatgatcttgttggaacggtaaaaaaagctttgtctttttttattctagataggaatgtaaatgtatatgttcgtaggatggctgcaatccatgctggctcgaacaagtgctttacatttgcctactttttaattgaaaaacaattaggtagtagtgatgttgtgagggatacttgatcctcaaaacatatttacttggtaatttgatgaatttatacttaaaaacaggtctccacctttcctatggtcagtaatgatcccttgtgaattgatctccagttattttgaggcgttaaaaaagcatccttatcttgctcaataatcaatataactttgtttttagttgaaaatgacggaagtttaccgtacctatcttaaacataagaatacctatcatttcatttttactagcttgtttgatattaacgcaattccataatgaatacaatggcttagaaaaaggatgttaacaaaatagaactacgaagggaaattctgctgagcgtatttactcagctatgtgaatcttcctttattaataagagaggattagttaatcgttttctgtgctcttatcacttattttttctgagctcagtttttggacttttaactaagcaggcttgctgctttgagttgga

SEQ ID NO: 86134 - DNA, 914 bp, Citrus clementina
  Intron number 2 from transcript clementine0.9_008855m (loc us clementine0.9_008855m.g) derived from phytozome v7.0 (c hr-ID scaffold_4; pos 1394682 to 1395595)
aaggaactaaactgaaggtgggaaactgaagctgagttgtttatttttgagttaactgcttaaatagtgatttgctcagttgaatagatagtttagtcggtgcttgtgggattctttgtagcttatactgcgttgagaaatggtttcaacttattagtttcatgtttttccaagaaacggaagaataaagatttaaacttgaagtggagtaagtactggctgcggaatttaatgtttatttagtgctcgtttgaggttggggtttagggtttaactaaacctcagattaggcttatggaaaccatatttagggtttaactactctcataccttgatagttttctctttttgttggctacacgtttctcctgtttaatcatgttagagtatgtgcctggttactctatgtacagggttcttctgtcttgtgcttttgtttttttttgtttttggcattgatgtttgtatgtgctttcatattcttttgaattcagcacattttattactctattggtactatgtattttggaagtgagaaaagaaaatgggcatatgctaactaactaatgcttttttcggagaaacctatttttaaatgcgtgtgaggcgtgcacctctcatcctattctgagcgagctgaatgttattataaatgttggctctaagtcataactgcataagccatgccatggattggtcatgaggcacactcatcatcctccacatgccatgtttagcattgatttagatgcatcttcaataatttaggtaaagtatatataaatggaaactccaactatgtttacaagccaatccggtggcttgtgcattgatttttttcccgatcttattattcttttcatcagttatttcctgtttcatccttattaggagcaggttgaggtgtctcaac

SEQ ID NO: 86135 - DNA, 493 bp, Citrus clementina
  Intron number 1 from transcript clementine0.9_019485m (loc us clementine0.9_019485m.g) derived from phytozome v7.0 (c hr-ID scaffold_24; pos 641885 to 642377 reverse strand)
taactgcaggttcagtttttgttgtaacaggtaagccgcttaatcgtcgacatatattatattagaggcgtcaagttagccgtacaacaatttgcatgttatcatgttggcattaatttttataactacgcttaaatgagaatacactcgtgacatattttacacttggtgtttgtgtactacctatgttgtatagaagattttctcatctgatataagcgggaatttgagtattaaactttgtttcattgaacgagctagtatccttattgattcattaccctactcaaccttaagaataccttttttctctacctaccattttttttttgtgggggagagggggggggggggggagggaagggggtgtatttcttagttttaaaaatgattaatattgcatgcatcttttgcaactattagattatttgatttttttttttttcttcttcaaatagcaggaacggagaggttaagcattagtgcaagcacc

SEQ ID NO: 86136 - DNA, 661 bp, Citrus clementina
  Intron number 2 from transcript clementine0.9_003780m (loc us clementine0.9_003780m.g) derived from phytozome v7.0 (c hr-ID scaffold_4; pos 1669824 to 1670484)
caagaaaggtatgtgatattggcaaatttatatgctttttttctttttgtaacttctgagctgttttaatgtgtaaatgtgcattttgtttaaatattttaaaatttttaatgacataatttacatggagtgaagaagatatcagtgtttctattattaaaaaaaatggataaaacacttagaaatggctttttacaagtacttgatacgtgcttttccggaaagaaagtgctttcttgtaaggtatttgacaatgtgctggtttaaaaagttttttgtaagtgctttctagaaaaataattcataagtaatttctgaaaaagtactcaatttgaggagttttgttggatacattttttactcaaaagaagctttctgcaaaagtacagctaaatatactccttgtttcaattgtcaatactagctgttttgctctggaaatatttacttcaattactttgaccttttatactctctagctgtttttcacaacccatcaaacacctgtattattgtatcatgtatggtaaggtcttcaataagtgctgcaaaatgattaacattataaatgatttagttttagatgtaattgtgtcctatcaatttggcttattgatcattttcaggtattaaaggagcccaagtttgtttatacggtgga

SEQ ID NO: 86137 - DNA, 887 bp, Citrus clementina
  Intron number 1 from transcript clementine0.9_026199m (loc us clementine0.9_026199m.g) derived from phytozome v7.0 (c hr-ID scaffold_24; pos 2104669 to 2105555)
gaagatcgtaaggaggtatttgtttctccatctctctccaactgtgtttctggctttttaatttcctcatttggggtgtttgtttgctgagaaagtttatataggaaagaatgagaaaaatttatatcttttgagtttttgtttagcatgttagtgaacttctgatgaatttgctaatgaaagagcttttttgtttcttttttttttcctttaaagcaagcattttccaatttcggatgattaaaaatccagctttcaaagaatatgagtttccagttttcactttcaggtgggtttaatttggttgaattacttgaaaaaattctaagctttttttctttttgggtagaacaaaaaattctaaaggctctgattatatcagtttagcatttttcttaagtttttgtatatcttggtgatgttattagttgtttttaattgactttttggtcatataaagtgaaattcctttgtaaacacttctcttaagtgagatgttcaaagaagcaatcattttactttgtcaaagctgagaaacagtcaaagctgccactttttttgattttttttgcctttatttttctccttagatatcgggatgtgtgctaatggatctttgcattcataggttcttttgcttctttcacacatgcaaactgtctttgtagtccacagacttcgaatccttacaaggagtattaaatctttaaaatacttaaaagaattcattgatcaatgatccataatggttcttgaagtgataattaattacagtttgaagattatgacggggattgctttgaaacttaataaccacttacgttcattaaaaaaaaaaatgttttcttttaatgtgattaatgttttacgttcttttgtatagaaaa

SEQ ID NO: 86138 - DNA, 904 bp, Citrus clementina
  Intron number 2 from transcript clementine0.9_013178m (loc us clementine0.9_009531m.g) derived from phytozome v7.0 (c hr-ID scaffold_4; pos 6328886 to 6329789 reverse strand)
gaatttggacactgcaggtgaatttgtcaactttatttgattccaggattgttatggattccttgttcttttttaggataacatctgttcagtaatgatgctccctcaatatctttcaataaactttgaataggataagcagtttatgggaattgctttatgagtgattaccatagatataccacaatgctctcagctgtcccatctagacatatgatggctagttccacatgtgtgcacctcttctcatctagcctataatttgattttgaccatgttttgactacttgaccttgtctgcactggagcactcctcagaattttcaaattatttctattgatgtactttgatattgactttaagtagtaacagcaacatgttttgagggtagaggtattttgagcatgaagtaggagggatcctataagatactaagaaaaatgtggaaaatgaaaagtaatacccagactatattttagggctcatgttagtagcaattagaatgcttctaatttgatgatataacttctttcccaagtatttcactttggaaataggtaggtggaaaacgttcatggaacatgaatggtggcatcttacataagcaaccaatagaaaataattgtagtctagacacggacacagatatgggtattcatagttgactatgatgaaattataggtgccttttttaatttatttttctgaatggaattattccatggaataagtggtatactgccatttcctttcaaagctgtttctagaattctgtatcatactgcatgttactatggcttgcattagcagtaagcaatataatcataactgtgtaaacttcttcctgattcacttttactgaatatagcgtgagggaaaacccttacctgaagcttccctacc

SEQ ID NO: 86139 - DNA, 710 bp, Citrus clementina
  Intron number 1 from transcript clementine0.9_016814m (loc us clementine0.9_016814m.g) derived from phytozome v7.0 (c hr-ID scaffold_4; pos 3620038 to 3620747)
aatcgaactcgccaattcgagctctgttgatcgaggtgcgttttgtcaaattctgatgattccacttcacagtcgcttggcttttattgtaattttcattttaaaattacattttattttttgtagtgtttctcgtttttaaagcccggtgtgaattttcgcagaaattttctctgtggagaaacaactaattttggattatcattattgttggttcttgtatttttttgtttttgtttttgttttagggtttagtttcttccctgttaataagaattcaataaatttatttttttaagggtttctgatttttggtatgtgtttgtggtatgaagaagactttatatgattattttggtaaattttatgattttctttttcaaagtttagatccttttgttgtcagactcttatgttgttaattaagttttgggtgaaaggatttaatttgaacttgatctgataataatgacaaataaagcttatgcgtttggtcttaatgatatttcttgttttggttctgagatagcacataggtcttagttgtaatattcttaagtactagctcaaaataagaagttaatttggtatgtggaaaatttaagtgaagtatagattctgtctaatattaagttttatgcttacattcttaccaacattgaaacaaccatggtttcaggttaacaggtgatttcagtttggagattctg

SEQ ID NO: 86140 - DNA, 549 bp, Citrus clementina
  Intron number 2 from transcript clementine0.9_030255m (loc us clementine0.9_030255m.g) derived from phytozome v7.0 (c hr-ID scaffold_4; pos 3481129 to 3481677 reverse strand)
aggagtgacagcacttcaacaagtgtgttctttctgtatgttatttattataaactcgtgttcctataaaatcagatcgcctatctacagttagttcatttttagatattgcttattttttcccaatccttacataacataacatttgatatgataagaaaattctaatatatatagacctaaaactgcaattcttccttgttggaatcttcttttggctcttgtcatctgtctgttcttagagatgctaatgatctcatctcaccataaataactggtttggttgactgataattcatgtgtcactcataaatgctgcctttgtattatatatggtatgtgacttctgtatgtattctcttgcgaacaagatattcctagcttgtaagcttgtagccttttttgagaatgtgcgccagtgaaaacagatgagaaatgatttctttgaagcttatgggatttacaggaataatattgtcacatctacctttgttgggttacatgtttctgacctttaagtgatgataattttagatacctggaggaagg

SEQ ID NO: 86141 - DNA, 344 bp, Citrus clementina
  Intron number 1 from transcript clementine0.9_030255m (loc us clementine0.9_030255m.g) derived from phytozome v7.0 (c hr-ID scaffold_4; pos 3481777 to 3482120 reverse strand)
ctgtgaaatgaaagctctactgtttggtagaggttaatttcgacaaagtagtaacagtaatatagattttttattaaaaaccatgctgtaaaatcaccttaactttgaaaccaaagttgcaagtgtttgccaacactttacagctgctgccagagagcaatgccaaatggagcctattgctaccaccttttgttttgatgaggtcaaaaatagtttggaacttgttcagcattacttcgattacacccatactatttgctgttttcaagttttcctcatatgcctttgctactcttttttttcttttgtttttctttcttccccaactgcagtttagtagaaaa

SEQ ID NO: 86142 - DNA, 820 bp, Citrus clementina
  Intron number 1 from transcript clementine0.9_017668m (loc us clementine0.9_011792m.g) derived from phytozome v7.0 (c hr-ID scaffold_85; pos 343470 to 344289)
aaacagaacgataccaaaaggtggtcatctgcaattagaaggcagcaattttctaagctttctcattaattttcttttttttttaaagagttttgaccttattgatgatgaagaaatgttatctttgatttgcaaatcatgaaccctagatcatatgcctcttttttatcctcatttgggtcaaaatttttttcacttcccacagtggtttttaccccaagcttgagagtttactataggcttaatttctaccagaaaatagacccatcgggagagaaaaacgaaaggatcctgtcaagacaaatataagacaatagattttccagaaaaatttctgacagaaactgttcccaaatcatgtataagttaatagggttttgattaatttgtcttccttttctccaaaattcatagcatcatgcatgaactctcacttaactgtccattgaatgcttcttctgccacttcttataactacaaaaacagattcttaatgtcggattagtttttcattgaagtccttgatcttttctaaaattactttacttcaccacatatctcttcattttcttctttatctttcttttctctaaaattagcaccaccatgcatgaactttctcacctaaatgtcaaaattgaatgcttcttctgctacttcttataactccaaaaacagattcttaatatctgattagtttttcattgaattcctcgatcatgtctaaaattactaaacttcatcaaatatttcttcattttcttctttccccatatttttttcaggcagaaatatcactttgccgtgtgtacaagagacc

SEQ ID NO: 86143 - DNA, 668 bp, Citrus clementina
  Intron number 1 from transcript clementine0.9_029366m (loc us clementine0.9_029366m.g) derived from phytozome v7.0 (c hr-ID scaffold_4; pos 1953373 to 1954040)
ctctttcaggttatcaccacgctcaatgcatccttttttttttaaatttgtcataattttttcaatttccaaataattattaggctttcatttgtttttgtgaaagctgtattcatgagagaacatgaattattggacattcttgtatggcacgtgatggatggtatttgattaatccacaacttcagtcatgagctattatatacaatcactttatgtgtgtacagttgttcattttttttggcacataaaaattattctctgttgctaacttcaataatttgttaaacatacaaacatataagtaagaaattttattttattttgcccgttaaggctgaagaacccacattaagaattcttattttcatccataaaatttttctccgatgaatcatctttattttgttaaaatatgagccgataacgtggcaaagttcgagctgatgaatttttttttttttttttttgtcttctttcaactatttgcacacagaattaatgtttgcattttcaccaagtgaggcatctcatctgagaaaatttctctgtttgtgacatacatatacaactttaaaattctgaatctttaagtgaaatgatcctcacggttttcttttttacttttttttttcaaactccaggaataggcatactatcagttccat

SEQ ID NO: 86144 - DNA, 565 bp, Citrus clementina
  Intron number 2 from transcript clementine0.9_005243m (loc us clementine0.9_005243m.g) derived from phytozome v7.0 (c hr-ID scaffold_3; pos 3261052 to 3261616)
aatctcttgtccctgccccggttggtagtttttttttttttttttaacttttattttgaatgtgtaattgatctcggggggttcactatattactaaagcaataaatattaagaaagaattctctagaatttctccttgaataatttatcttctctaaaaaggcactcctgtagcttttagaatttgtcagcagttagagctgaagcaacattaaagttatagattttactagctctgttatggcttacgtaagtatttaggaatgaaacaatgcagttaaatgtttagcatggagattaagcatattgacagcttggaatgctgccgcaaaacatattctactgggttcaggacttgtgagcacaacttattttcaacttgttcggtctttggcctggcactggagtgcagagaacacttttttatgatgtttactattattatttgtttatttatttttctctgcactctacagcacttatattatagtctcactattgttgcaacatcttttattgtcgtcttatagatcttggctgctctggatatcgtccgtcaaggtgc

SEQ ID NO: 86145 - DNA, 723 bp, Citrus clementina
  Intron number 1 from transcript clementine0.9_015374m (loc us clementine0.9_015374m.g) derived from phytozome v7.0 (c hr-ID scaffold_3; pos 213806 to 214528)
aaaccctctcagagttcttgtcactggcgctgctggtacgctttttaaacactcacttgtgtcaataatctcacacatgtattttatttatttcggcctctcaggttttcttgtagtgaaaggatagctcgccatccatgcatgcatgcttttctttggagtgaggagatgtttatatattttttgtaatttcttgtggtcttcattttggtatcaggttcgcttcatgttgaggtgtttgtttatattcttaggttgaaatgttattatatataactgtctttgcacgtccatgtaaaagataggactttgctttcttgattttggtacaggaattagttgtttctgtaaagtcttaaatttttttgtgaaatggaatatttttacatcgtactgtttcagaaaattctggttgttttgttctgtgttgcgttgttttggaagatcattagacacatgtggagtttcctagatatacccaaggagccctgtagagtcttggttactggtgctacaggcaagctagctctgaagaaaatggatttgtagattttattatttttttttaatctttcatttcctgtttgaatatgcaccattggctatcaatgtgggctggattctagaattgatgccagatttcgtttttgatatatttgtcagaattttaagtcaaattctaacaactggaaaaattaatttgatcaacagggcaaatcggtt

SEQ ID NO: 86146 - DNA, 258 bp, Citrus clementina
  Intron number 1 from transcript clementine0.9_002177m (loc us clementine0.9_002177m.g) derived from phytozome v7.0 (c hr-ID scaffold_2; pos 4403076 to 4403333 reverse strand)
tcactctctcttcctctgtgccgccgcgaacagcagtaagctttctcttctctgtttgtttcccgttcaaatcaggaataattttaatttattttttgtatataatacggaatttattttgtttaatgtctcgcagtgcgatttagttcgttagggtacgttgttttgcggtagattttgatttttcttttcctttgggttttgttttgtctcatcaaatcagatttctgatttcacgcatctacaaggaaagaacaa

SEQ ID NO: 86147 - DNA, 690 bp, Citrus clementina
  Intron number 1 from transcript clementine0.9_021406m (loc us clementine0.9_021406m.g) derived from phytozome v7.0 (c hr-ID scaffold_3; pos 5512479 to 5513168)
ccgccccacctgcacttgacaaagatctcaaaaaggttacgttggcgcatactataatgaagacagttatatatgaatatatgatcttaatttgtgctagtatttttatatatttttttttgtcaacatggtttcatggatgttctttcaagttattgtgattctgaagctgagtaaaaatgaagttcgtttattagtaacaggattcggtttcagttggtcgcatgcatgttattctttctccttgttgagggaatgtcggagatttacattatttggtcatgtgaatttgagaagtatttatactgaactgacgttgatagtcaatcccttgagatgttttatatatacaccaagtgtttcctggcaattgcatagtttttgggagaaaggtcatgcttacactgaattacggctttgtaaatctactagtgcagttttaatcttatctgatttgtctttaacgaggcatttgaaatttgcctatcatccaaattactctggctgaagggctaatttggatgatagtgcaagggagttcatccaatatattttgattgtagaattttggaatttgataggtgactcaggacattgagagttttttcataactattttctcttaattctatattccatgtccttgctgaaacaggttgttcaaaagacagctgccacatttgcaccaag

SEQ ID NO: 86148 - DNA, 392 bp, Citrus clementina
  Intron number 2 from transcript clementine0.9_029460m (loc us clementine0.9_029460m.g) derived from phytozome v7.0 (c hr-ID scaffold_31; pos 1664130 to 1664521 reverse strand)
cagcatacaattgattaccgtactactaggacttaccttaaataaaaatcacttatctacaatcttcaaacttttgggtccaacaatttaactaatatagtatcgtatcagaaaagtgatttgatagaatacatgatagactattaaaaaactgcatatattcgtgcaggaattgccacgagactcatcaatcaccgaagaaatcattgaaaagaaattggaggaaatattactgttgcacaggtataaacattatgtaaacaaaatttttaagaaaaatggatcgcgtccaacagataatttttccactttgatcaattaatttgtaaattgaacttaatctttgactttatacaggctattcagcaaaagaaactattcatcttagatta

SEQ ID NO: 86149 - DNA, 137 bp, Citrus clementina
  Intron number 1 from transcript clementine0.9_025970m (loc us clementine0.9_025970m.g) derived from phytozome v7.0 (c hr-ID scaffold_3; pos 2691514 to 2691650)
cctttttctttgtaaaggtcttccttctattccaggcaagaaaattaaagaaaactcctatctacggtttctctcttcttttgtttttgttttttgattattattattttcaataaagggaataaaaataattaaga

SEQ ID NO: 86150 - DNA, 725 bp, Citrus clementina; identical to SEQ ID NO: 82273
  Intron number 2 from transcript clementine0.9_029074m (loc us clementine0.9_029074m.g) derived from phytozome v7.0 (c hr-ID scaffold_3; pos 8270707 to 8271431)

SEQ ID NO: 86151 - DNA, 663 bp, Citrus clementina
  Intron number 1 from transcript clementine0.9_010993m (loc us clementine0.9_010993m.g) derived from phytozome v7.0 (c hr-ID scaffold_7; pos 5902869 to 5903531)
ctgccggggaatcgtctctgttaaatttttgcacggtaagacattttttttcaatctcttttgcgtatcctctcatttggttacatgaaaagtaagttagtggcttgtttgatccgctagacctagaattacatagaaatgatatatctctagaatataattgattttgagctttaagcatatgtttgtatgcgggtcttttgacttctcttgctccttgctcgtgaaacatgttgggtgtatttatatcccaatcaaattgatctgcgttttcagcacttttttttatggtttttgatttgaataacaaagctcgtgttctttacaagttatttttatgtactactgcttctagtaggtgttattgtattgaagttgaaccaagctccagcttctaggttccttattttttgttcactttataaacaaagaaattttatatattttttcagattctgtatttgtgattgtcatcttgcagtgaagtaacgcgaagccttgcttgtcggttctttgctttttttttggggggtgggggggggggggggggggaatggggtgggcggtgttactcaaacagcctatggcctattattgagttttactgaggtattgtcaacatggttagttgttgtggagcagggcagattgaacttgaaggtg

SEQ ID NO: 86152 - DNA, 975 bp, Citrus clementina
  Intron number 1 from transcript clementine0.9_014916m (loc us clementine0.9_014912m.g) derived from phytozome v7.0 (c hr-ID scaffold_3; pos 1371131 to 1372105 reverse strand)
ggaaacgcgttcgaccgttgactcacttcactaatgtgagtaaattctctatcttttactttctaaacttgttgcccacttggttttggagagaccatttaaaggaaaaaataaataataaaaatgttatctttgctgtctgttgttgggtttctttgatgttatctgtgagaactgggtttgtgctattgtatggcgtttacttgggtttttgttgccaaggaacatgcttggtgtttaaggctttatcaattatcgtgagttggtgagagagtggaccagtttcaacctttctggtctttgtcttcaagattaagcctttttccttgtttcttctagttggtaagctgtaaaatagccctgcattttgtcttttcttttaggttcttggctttagatttgaattcttttcctctctttctttgttaatgttcagggatcttttcttattttctgttatctaatcatgttttgcttccttttcctttgggttgtttagttctttcttgtttggaactttgaagaggctttgaatctgggtttgctttccttcttgattctagcgatttcacgtataactttgactgcattcttatgggttctgttctgtttctttgtcaaagtaatgtgcctgctttgagctttcttgtccggagtggtatcacattgagttttttacatgtgtgaacattggcggtgttggatcataattatttgtaatgtcatgcatgtcttgcatgtgaccctttttcatgttggttttaagaatctaagattcataccctctgtggtaagccttgttttcgttggtcacaaatttgaagtccaatagaattttcattgttctgacttcttcaatttttgaagtatttttcttattttgaacactggagccagtaaagaagtaccttagttttgcaattaattgtgtgtgagttgattcagagtaatttaagtttaggtttttcaaagtaa

SEQ ID NO: 86153 - DNA, 342 bp, Citrus clementina
  Intron number 1 from transcript clementine0.9_000273m (loc us clementine0.9_000273m.g) derived from phytozome v7.0 (c hr-ID scaffold_3; pos 7612474 to 7612815 reverse strand)
gtcgccaccgaaacggttttcaaggacaaacccaggtcagtttttgttattttctcaaatgggtttccttcattttctttgatttttagctcccacgtcccctctgtctctctctccctctctcaatatttgtctccatgcctaagtgaaatatgaaaacaaaaataaagaaaaaatattttttttcatttaaaaagtgttttttcttctatatggatttctgtttttggttattaatatctgtgtggattttttgtttctatatgcaatgtgttcgtagattctatctccagataatactttctttttatatgttgtttggtttctgcttctcatgtacag

SEQ ID NO: 86154 - DNA, 502 bp, Citrus clementina
  Intron number 1 from transcript clementine0.9_014688m (loc us clementine0.9_012811m.g) derived from phytozome v7.0 (c hr-ID scaffold_7; pos 3243213 to 3243714 reverse strand)
gcgttttcttgatctcgttctccgttaatcatctggtaaatattcgcatgattgaatctcgtttttgctgttcgtttattgattcttgattgttcaaatacctctaattttctgttcaatcagttattacttgatgagtcgtttggtgtttgatttcgttgattgattgttgtgtttagatcattttgtctgaatttgatttcgacttttcttttttttatcttaagttttttggtagttttattttgatgaattaagctgtatcttgaagaaatcattgatttgatcaggataaatatcaattacaggtctcggagtttagctgaataacgatttgatgaagttgttaattattttcaataactagaaatctagaatcactggaaattaaaaaaaaaaaagaaatttgatataaattgaagatgtcttggtactatttttttattaatttttcgttgttttgtttttgacaaattttcttttgtatttttcagcaggtaca

SEQ ID NO: 86155 - DNA, 619 bp, Citrus clementina
  Intron number 2 from transcript clementine0.9_005398m (loc us clementine0.9_005398m.g) derived from phytozome v7.0 (c hr-ID scaffold_2; pos 9212821 to 9213439 reverse strand)
ttctttccttccagcaggtaattttgaattggctcacatacttaccaattcattcctatagttgtcagtactatgattttttctttttgcctgttaaagaagtccactgttaccttatttcaatcatgaatactttcaatggataataggctgtgtacgtagtacggttgtggcttaccacaagagcacgcacgtgtgtgtgtaaaattcaaactgaaacttcacttaacctgcttgtagctcatagtattagactggtagtacagaaatttttttatcagtttttagatggtagtgatggtaatgctatcttatcaatcattcttagtagaagatcctattggtgaataaatttctgattctttttaaaccctggggactatagtggggttaagtttaagatttgatccttactgagacagaagtttttgcactccaaggattgttgggttgctcagtgtgaattacatgggttgtttgtgtgacctgtttatcggtatatgagttattaattgaatgtttattgatcaatatcataataatagagtagactgcaaaagattaattttgggtgtctttaacgtcattccttctttttttcttttcctgtttttctcag

SEQ ID NO: 86156 - DNA, 549 bp, Citrus clementina
  Intron number 1 from transcript clementine0.9_009419m (loc us clementine0.9_008225m.g) derived from phytozome v7.0 (c hr-ID scaffold_7; pos 5918237 to 5918785)
tgtacgctcgatccccaggtgaatgatttttgtttttttctcttgtttggttaccgagaaaaacaaaactaacgattagaaaattttccgaattttcttttttgcaactagtcgacgattttgagtctgaaataatttctacggagtgttctgatttttttttttaattatatgacggtggatggagaaaatggacggttgaggattgattttgtgtgagcacggggagttgattgtgaaggatactttagtcctgtgtgtatctgtttgggtactgagaaattgagagaaaaaaagacaagaaaatcttcctgacatttctgttagcattactattgttattgttatttggtgattgatgattcattttatctaaacagggtgagttaactcaaaaggaactttctgcttggttaaactctaaatgaattttattttatttttctttttgtgtgtattatttatggagaaaatagacagtggatgattgatctgtgattttgtgtgagagcagggagagtgaacttgattggggagcatattgattat

SEQ ID NO: 86157 - DNA, 741 bp, Citrus clementina
  Intron number 2 from transcript clementine0.9_016413m (loc us clementine0.9_016413m.g) derived from phytozome v7.0 (c hr-ID scaffold_14; pos 1688634 to 1689374)
cccagtttcacgtttctcctggcgtttcttctggggtattaataaattttcttctctaaataatttgaaatattggatacaaaaatgttaaagaaactggagcctgatcgaatgcttacaaaaataattttaaaacagacttgtttcaccattttaatagatatttttcaatttacacgataaacaaacctattttatagttgttttgccaacattctgtcagataatttttttttaaccgaaattttggttcaatgtgtattatataataaaaaaattataaatttaggataaaatatagagaattaatggcaactataatattccacatcactagcgagcgagttcatagactgttttataaatcattggctctcctaactaagtagatgtgttttaagttacaaaatttaacaataaaactgtggtggattgtgtgcccggactgttatagctactttaatcgtagcagataataactaaaaatgacggaccaatcttttagtcttaatagctaataacaagaaatatataaaaatgacggacctaacataagccacgggtagagtttgtaaaaattaaattccgtaatcctttatttttcctaaaatttgtttttgactttgggaaggcctcgtcctatacctatagttccacccttgaatgtaatacgtacacaaacatatacattagtatatttaatacgaatgcttacaaattcaagcatcttcgacctgcagg

SEQ ID NO: 86158 - DNA, 779 bp, Citrus clementina; identical to SEQ ID NO: 82231
  Intron number 3 from transcript clementine0.9_014734m (loc us clementine0.9_014734m.g) derived from phytozome v7.0 (c hr-ID scaffold_3; pos 4160919 to 4161697 reverse strand)

SEQ ID NO: 86159 - DNA, 984 bp, Citrus clementina; identical to SEQ ID NO: 82536
  Intron number 1 from transcript clementine0.9_017022m (loc us clementine0.9_017050m.g) derived from phytozome v7.0 (c hr-ID scaffold_3; pos 1926482 to 1927465)

SEQ ID NO: 86160 - DNA, 556 bp, Citrus clementina
  Intron number 1 from transcript clementine0.9_006583m (loc us clementine0.9_006583m.g) derived from phytozome v7.0 (c hr-ID scaffold_135; pos 379055 to 379610 reverse strand)
aaggctacacggagtaagtaaaattgttttgttcgttgtgctaatatgcttgtgtatttgatatcctattagttacttagcctcattgattatgtgtaactgctgaaagtaaattaagtccaaaggatgtataataatgttgcattagaaggaaaaataatagcttcatcggtgggattttggctatggtacatgtaatctcgtcttgtttctcaagacaatcatgcaagtcgaattcagttttgttgttgagggcagcagagaaagttgatgatgagctgtattggatattcttacttggagctatgatttttgcaactaccttaccgttttcttcgaaaatctaattattttgaagactttgaggggtagtttcttttttaactatgaatccctagtctgaaggtgggtggtattatttgtggaaagactcaattcaaatgattaactaggccttgctttactaccattgatatgcatgtgtatgtgcaagtgtgatgtgcatatacttatatttttagcagtccctcttatgctttctggtttgtttgcagtg

SEQ ID NO: 86161 - DNA, 885 bp, Citrus clementina
  Intron number 1 from transcript clementine0.9_002786m (loc us clementine0.9_001212m.g) derived from phytozome v7.0 (c hr-ID scaffold_7; pos 6069412 to 6070296)
ccgccatcaagatacaggtcgggttcatcgaatttgaatttgaatttaatagtcattgctacattgctgcattgcatgtgtatgtgatgctatttgcatttgcccaagttgcaatgatcgttctagtgtatgtagattacttgttctattcactattttacgttggtatttttttttggatttattttatgatgaaatgtgatgtgaataaagttaatgtgtgttaattattagaaaaagaatgttagttgatctcaccaagaataatttataagaagcaaaatgaatatgtggaaggttttgtattttagtgacgcgatggtctaattttagtacggccaatttgtcatatcgagtgatgaacagagtcttcgcgattggcactggaggtgactaattatgtttgtcgttttactgtctctatctattttaaagttatatttggaaagacatttattatcgtaaggttgaagctacgcaattaggtttagtcaagtgaaccgaacattgaaaaccttgtgaaagtttcgcagatgctggtagttttctagcaatggacaagtttagtgaagtgtaatttcactttcttgtggataagctttatagattagtagtttgacataaattttctgtgaaattttggctcaatcatttacttcagaattctccaagttgtgattgctatctatgtgtatgtgcatgtctgtaatttattcatatcacgattataatttttatcttataattgtgggtgtcacaaggacacgcttgctcagtgtatggtaacttatataaactagttgagtgaatcttttctttggatgggcaattcaaatctttgtaatgtaatttttgccaagtgttaactaaatactatctacagaa

SEQ ID NO: 86162 - DNA, 217 bp, Citrus clementina; identical to SEQ ID NO: 83299
  Intron number 3 from transcript clementine0.9_022003m (loc us clementine0.9_022003m.g) derived from phytozome v7.0 (c hr-ID scaffold_113; pos 440996 to 441212)

SEQ ID NO: 86163 - DNA, 722 bp, Citrus clementina
  Intron number 1 from transcript clementine0.9_014650m (loc us clementine0.9_011187m.g) derived from phytozome v7.0 (c hr-ID scaffold_14; pos 639091 to 639812)
tctcttcagttcacaagggtaactgggcggatttggtaaagtttaatattttattatttattttttaaattatgtttttgatctttgtttggtgatattaccatctcctacagtatctgaaatcttaggccggtttctgcctgttctttgattttttattttgtcaaagatttaatcatttaagaatttttgcttgaattatgctcaatgtcgtctcattttaatattctattgaggaatctagtgaaatttaaggtttcactgcatattattgctgtaattcatttcattttgtttcacttttcttcaattcaaacattcaataggatatgcatgacatatgcagtgagaaaagattgacatggttcatcattcaatttcaccaaggaggtgagagaatattatattttagcggcagacggagctatttttctagtatctggggggattatgctaatcttttcgtggtgttttgggaattttgtaaatcattaaattcaaaaaagttaaatgcccggtttatcacacccttggatagagtttatctcttaggctagtttcaatctagtgttctgcacacaaacacacttatgcacttgtgcaaatattttatgcatgtgtttgatgacagaaactttctctggtttggtgatttattcctggtcctctagaataaaaggtttcttttatttctcggcttgttcaatacagatataagcaaa

SEQ ID NO: 86164 - DNA, 863 bp, Citrus clementina
  Intron number 4 from transcript clementine0.9_018988m (loc us clementine0.9_017079m.g) derived from phytozome v7.0 (c hr-ID scaffold_3; pos 4896678 to 4897540 reverse strand)
acattgttattgctgcagccggacaagcagtaactatgggcatactatagttcccgcattcctaattagaatgagattatacaaatatttttttgctgatacctttaatacctgtttgtctcatcttaaatcatctagcagttccatatatcttggcttaatttgcttactgaggtgcttcgaactgaattactgtgacaatgtaaaagaaacttcttgttggttgatggctctgtgttcttgaatatacatatgatataaactcgttcagatactctgaacattgtgaggcatcacctgtgaacctgagttgagtatctcatacaagcttattatggatctgttgacatgatgcaaattaatcaagtcaaatttcagcattctgggaaatagttgagattctactttcgcttctttgaggacttcaatttcatagatggtcaaaatcctcagccactgaatctcctatcaatcgacctctttgcatctacaccttctctaaatcttactttttctattttatttttgttttctcttaaatgctgattagctgaaggtggattcttttgtatatcttttgtgtatttagtttctgacctcatgtttcttcataaacttgtatcgtagaacagatggattaacgggtcatatgtatattcagtaactaatttaataaaattgcttaaaccttacgaaaacatatctgccaaccaaatgacattaaattttttccctctcgtacagctctttgttgattgaaagtatgttgatatgtttggtggaacgtgctaggttttgtgtttttaaacttgtttccttaacttgcagatcaagggaagttggatcaagcctggtgccgctgt

SEQ ID NO: 86165 - DNA, 949 bp, Citrus clementina
  Intron number 2 from transcript clementine0.9_002065m (loc us clementine0.9_002067m.g) derived from phytozome v7.0 (c hr-ID scaffold_2; pos 8248319 to 8249267 reverse strand)
gtgtcaacatcaggtctcggggatcgcattttgaagtaagtgaataactattgattcattcttttgttttcatgttttgtatctgtctaatgtagtcaattatcatttggttacatattggatcccgtatgtgtttgttttttgttttcctcatagctcaattgagattggtcttctgttactgtgaaaaagtgtcacgtctcttttgctgctttaagtttaagcatctttttcatgtgctgatattttaattgacttgtatcatagcatattgttgttgctgggattttgtcaaatatgttcttttagtggcaatactattgaatttaatttattttcacgaaagtttaatgtattcatttggtaatttttttttttttttggatattttgacttacagatgctgtcagtaaattttggttagtgatggtttgagattacgtatgaataaaaacagaaaaacagttatgctctgactttgcgacaattttctgcattattttgtttttgcatttttccagaccaattgggtcacagctaactgcctgctcttttgagcattattgattcatttctcttgtttgtacctgcatttccattctcatttgaaaattttattctcttttctgttttaagaaatgtaaccatgctttctctacactgcatataggtatatctcacacgtgtgtccgggcatcaaattagcattatgaaatttcctgaatttttctatatttttctttgtactaaataacatatgttataggagtttgtgactttccattcatattttgttctgaattgttgctcttggtgttgattttgtcgccagtatgattatccatgtgttattatttaattcaagctcttcaagacgtatggaaaagtttcatatgatatgaataatattgagatatattgatctctgtatttttattatttccccagg

SEQ ID NO: 86166 - DNA, 532 bp, Citrus clementina
  Intron number 1 from transcript clementine0.9_002065m (loc us clementine0.9_002067m.g) derived from phytozome v7.0 (c hr-ID scaffold_2; pos 8249970 to 8250501 reverse strand)
caaaattgcccgaataaacgctgcttctagttaaggttcttttcgccaaccaagcatctcctctttaacatcacttatttgtgtattcattcatttatttatattggagtggcaatttcccttcgagaattgtataatgcactgacaaaataatttcgttcgggtaaaattgaattatcgagaaatttggttttcggttatcaaaatttaaaaattattgattgctacgaggtttagggttcatctgtgaagtgaaatttgttaaggcttagtaggttgaaaactgaaaagttttaaacttagcaaatagaaactagcttttagtttttgacaagttagtggttttactgataagtgattggattctgcttcaggtcattaaccctagaactgatttttattcattatccacagttactgattttattatgaattagccgtaaagctttttttttttcgaattaaaatgtaataacgctatacgcttgaggtccgttttcttaatcttatagtcttaaattttgtagacaat

SEQ ID NO: 86167 - DNA, 736 bp, Citrus clementina
  Intron number 1 from transcript clementine0.9_004650m (loc us clementine0.9_004650m.g) derived from phytozome v7.0 (c hr-ID scaffold_2; pos 1671600 to 1672335 reverse strand)
tcctcagctcttctgctgccaccgcacaatcagaggtttttttctttttcggtttttgtacataatttcgagtctgttcataattattatttattctatagtctgcttgtacaatagcttccatcttttaatttggttcacagatatatatttttttttgttttttcagtaacataaaaccttgaccctaattgattcttaagctacgtgcaatcattaatcaataattcgtgttttattcttttagtagtttaatttcattgtgataaattggctgtagatgtatgaaatcgaggatcatttgttttcagtagctgaattaaatgaatactggggttttaattttctttctatttaaaattcttttcggtgtgtgtttgacacgtgcaaagtttttgctggttcaattcatcattttgtggtatatagcagtttaatagtgtatgtatagtcggaagatgaagttctaaagtatttcgtcatgaatttgggatatatatattatgaacatttattgagattatatattcttgtctttgacgtgtttgtttgagtgtaaattgattctcttgttattgaaaattcctttttgattttaaaaccgttaaattttggcattttttgtattattttgacgtggcttgctgattaaagtttggtaataattgcagattggaagactgaagggttcatacatatagaggtaattgattgtagtttgtcgtttctaagcatc

SEQ ID NO: 86168 - DNA, 376 bp, Citrus clementina
  Intron number 1 from transcript clementine0.9_002124m (loc us clementine0.9_002124m.g) derived from phytozome v7.0 (c hr-ID scaffold_31; pos 986855 to 987230 reverse strand)
aattaaaggtatttcatacgtttacatttgctacattgagtttatttattttttactgttttagttatttccgccgtttgtaaattaagtttataggattcaatagctgctattataatgatgagttcctactgaataattgtgattatttatttgttttaatgtctttgattaaattttgttttcatatgaaggttgttaaattaggtgttttgatattcacaccgatttttttttttttttaagaatttgctataattttggggttttgggatataatttgctgagaatcttaatttttccttcttctgtcaattttattcttgtttataattttgcagaagcagaagcgaagaaatcaaaaagagtaagttta

SEQ ID NO: 86169 - DNA, 633 bp, Citrus clementina
  Intron number 2 from transcript clementine0.9_015264m (loc us clementine0.9_015276m.g) derived from phytozome v7.0 (c hr-ID scaffold_24; pos 1016869 to 1017501)
ggaccgttaaagcgtgttggatctgtttgtcaacggtataattttgcttcaattttttagcttattatattttttttagttcattcgattgatttagtttttattattacaagctatgatctctattctgttttaatgagatgctgaaaacttttgttacaagtttgaaactgcaatagatttatagaatttctttaaatgattttttttacttattgtttgaaattgtaatcgccaatcaacatttaaaattaaatgattagctatggtcgccattttctctcattagtgtataaaagtttatagaacaacaagctatgatcgcacaattcgaatgattaattattacactaattatgtttgattgtactttattattcatttttattttttattttttttggcttactctgtgtcttgatgatgatgtattcttcttcaaagtacaaaaaggaaaaacaaagggaaaaacagcattgtttataccggcaggaaatgttgttttttcttatatttcttttattgtttgttttcaggtaatttttttgatagtgccgttggctgttgatgtaggagtataatatttacttgcatgtagattgactagctaggactctgctgatatattggaag

SEQ ID NO: 86170 - DNA, 896 bp, Citrus clementina
  Intron number 3 from transcript clementine0.9_015264m (loc us clementine0.9_015276m.g) derived from phytozome v7.0 (c hr-ID scaffold_24; pos 1017626 to 1018521)
gctacatacggtttcagttttggtatatcccttatgacttataaagattctgctttgtattatttcttagtattattaatttttttcctttctttttgcctgaacaaatctagccacttgacttgtgtttcttcggttcatagtcttcccagttctcaatacttgttaatgttatcgggatagatggatgagaactgaacgataatgcccattgaacgtggttgtaagagtatgctctaactatttcaaatgaataaataaaagaaaggaaaagaaaaaaacaacttgattcaagggtaatattgagtaacaatggtttgctaatgcatgacctacttgtcacttgtttccgttattctgttttgaagctttttcttccctcgtcgtttcttctttaggtgaaggcaaaggaaaagagtgttatgggctttcgatctattttagtctccattaacaaaatctggttcctctttgattccactggaccctgttgcattttctcctatttcgaatgtctttctatttaataaatttttcccagtttgtaatttgatttaattctttttcctgttcagttttttatttaattattttctgtgtgtacagatgtaatatgtatggatatatgcccaccatatgtacccgcttgtgtgtgtgtgtgtgtgtgtgtgtgtgtgtgtgtgtaagaaagatccatagaagcctgacctgatttattggagtatggcttctgaaaaggcaccaggactgtttgtatggcaacaatgtttgctttagttaaaactaaaaaatattactaaactgcacacgaacctcagcactctgtctaagctctgatattgttttcaatatattgtgcagctacaacgttaactggtctgcattttgccacaacc

SEQ ID NO: 86171 - DNA, 649 bp, Citrus clementina
  Intron number 3 from transcript clementine0.9_021501m (loc us clementine0.9_019733m.g) derived from phytozome v7.0 (c hr-ID scaffold_3; pos 5750119 to 5750767)
tgaaattagaggcttgtttgctccaccaccttggggtaattttctgccttgattttcctatttataatgctcaaataactgctatctttatcagtatgtgtctgtgtgtgcttttggctcattcaagcacgctgccttatcaagttgccctagggcacttacttggcatactaatttggtttagttgttccgatatgaaatttgctgacaagcaaatgcaagagaattgaatactatcctgtttctgtaattctttacatttacaccaaggttgtctttcttgtgtcaagttatctgtgggtatttgaggtgagccgtgtgcaatatacatgttgcagtagtggagttcggattggttcttattttcttatcaatacggaaatttgcttaacttcttatatcataatacggtcaagtttatttggatatagtcgtcgtatgtttgtgtgtgtactaactttgatactactcagcaaatttaagtacactcttcgttctttctgttggggaacaacaggagcacaacttttatttttggcatctctgaagtcacttgcacctttgtggcagtaatttgcaaaatcagttattttagcattgattttgagttcattttgcaggtgacaaagtgccgccatcaccattttgt

SEQ ID NO: 86172 - DNA, 715 bp, Citrus clementina
  Intron number 2 from transcript clementine0.9_012951m (loc us clementine0.9_012951m.g) derived from phytozome v7.0 (c hr-ID scaffold_2; pos 7526543 to 7527257)
ctctgcttactcccgtttttttcttggctcacatctcattattgttattgttttaaattactgacttagtaattacagcagtttcttagatctttggatgaatagtcttagaagttactcttgcgatctgggtgttctgaattttgtgctcaattgttcattttaatttccttgcatacactttctttattttcgttgcaattgtgtttggacatttgagtttacaggcgcttttattgaaaggacaaagctcattttgtggaaaagttttttttttttttttcactattcactggcacacatccatgtttgtgatgcttttctcagtttgataaatattagtttgctgttcattttttacgactactagtttcatttgcgggtcagatttaacatatacggcccttaaataattgatgaaattcctcaggtgtcacaattgaatgcattgcaagattagaagaattggtggctaataaagttaattaacaatttatacattactattaatgataggtgacacattatttggaatacaaactatctactgtgtatatatgtgtgtaatactatcattcaagagtaacaggctgaaatttttttttttaattttcttgtgtatcttcttgttaaaaaaaaattggtatccattgttattgactcatgatgactaattattatattcataatgtcctcacttctttagggtgttcgg

SEQ ID NO: 86173 - DNA, 828 bp, Citrus clementina; identical to SEQ ID NO: 82370
  Intron number 2 from transcript clementine0.9_024958m (loc us clementine0.9_024356m.g) derived from phytozome v7.0 (c hr-ID scaffold_3; pos 971959 to 972786 reverse strand)

SEQ ID NO: 86174 - DNA, 912 bp, Citrus clementina
  Intron number 1 from transcript clementine0.9_009511m (loc us clementine0.9_009511m.g) derived from phytozome v7.0 (c hr-ID scaffold_10; pos 3252170 to 3253081)
aaaaaccaaagagcaaggttagttgctccttttcttgttacaacatttttttcttgttattgttaagacagatttttgtcttaactttctttccttttcaggtgctttcttttctttttttatataatttttctctatgtttgttgagtgttattgtgtctctttgccttgtttcttctttctcccgcacaaacatacacaagttgattgacctgtaaagtgatttaattctcttttatataccaagtggtttgtgattctttcactctgaagttagcctggcaaaaagcagagtgctttagcttcaagcagtttgttaatcacaagcctccttcttcttcctttttttttctcccctggattcaaaatggctacaggcatgaaatgattagtgggatctttccaggtggttaattaacacatttttatctgcatggataccaccactgttgctttgccatatgatctttctgaaaaggaacttgttgtctattattgttagcaaaagcttagttagcaatttgggtgccatcatacaaatgataaattttcacaatgtttccatcatgtgtacggctttagtgatcatttgatgaaaagtaggctagctgccttttcttttacctttttatttttcattgcagaactcaaaagatacattccaatcgtttgcaagagaagtaattgtagttttggatggtacaatcctagcattattgccccaaaagttaaggcaaaattgaaacaagttgaaaagaaacagctttaccaaaattttcccattttgtatgtcttagtgctgaatccctgacaaaccaattttcttttcttacaatttgtcttagttgtatttctactgcaatttttatttacaatgacatttgtacatcgatggctgtatacttagcaggt

SEQ ID NO: 86175 - DNA, 928 bp, Citrus clementina; identical to SEQ ID NO: 80228
  Intron number 2 from transcript clementine0.9_022928m (loc us clementine0.9_022928m.g) derived from phytozome v7.0 (c hr-ID scaffold_4; pos 6452153 to 6453080)

SEQ ID NO: 86176 - DNA, 517 bp, Citrus clementina; identical to SEQ ID NO: 79530
  Intron number 1 from transcript clementine0.9_013903m (loc us clementine0.9_013354m.g) derived from phytozome v7.0 (c hr-ID scaffold_31; pos 159535 to 160051 reverse strand)

SEQ ID NO: 86177 - DNA, 555 bp, Citrus clementina
  Intron number 1 from transcript clementine0.9_004580m (loc us clementine0.9_004580m.g) derived from phytozome v7.0 (c hr-ID scaffold_14; pos 2756384 to 2756938)
aaacccacttcagattttcacctctttgatatcaggtaaacgctttcttacattacgttgcttatatatttttctgggtttcctttttcttttaaattttgtttatatttttccataaaatgaatgtaaatgtgtaaagtttgcacttttatgttattgatcatgtagaattacgtgcgttgtttgctttagttttaaagttgaatatttttgtttgaattgggttttgaaatgaagaatttttcactttttggctttgaaactgtacgttgtgaaatgatgatgcttagtcttcgttttaaaactttattggcatttgtagaattccagttttatgattttgattctttagttacttggtggagatactgaaacaatttgctccattcagttctgtgatgggtttattctctatttcttgaatgatttcagaagatatagaagcacttgagatgattttttagtatgagcattttcttgttaacctttctgatttcagttgtgttctttgagaccttaggtcgttgaattcaatcagagttcttggatttgtct

SEQ ID NO: 86178 - DNA, 995 bp, Citrus clementina
  Intron number 2 from transcript clementine0.9_004580m (loc us clementine0.9_004580m.g) derived from phytozome v7.0 (c hr-ID scaffold_14; pos 2757662 to 2758656)
ttcggaatttcattcttcatacacttcagttgcaggtaatacggttatttcataatgctaatcatttaaccctgccaataattatttaatatctttttgtgtcaaattcttgttttcctttactgatttctgtcaaaataatgccaatgatgcatccttcttctcatttcatgtactgtgcttttttcttcttgctggagtatcctgagagattgtgttctttgtactccatcaaatgtgtatgtaatattttatataatgtttattcagctgatgtttggtatattgatcgcttatttttgttataacttcacgaaaagctgcaaataatgtactcttatcaaattacatttatgttcttttcatgtgacagcccccactctccacctcccttttttcatattatccttcttactttttgattaccattaaaattatgctgattgatgcagttaatgcttgtttcatgtgttatgctttttactctcaataaattcttctgatagcatgtgatctttgggtgccatcaaatgtgtttggaacatcttatcattgtttttattttgcttatacaatggtacttatgtaactgttccatgcatggagaaaagtttatgttttactatcactggttggatatgtttacatgtctgcgtgttgctcttcttttaaaatcatgtgctatagtgcttggccaactttttttggtactataataatgcaatccatcatgactgtgatcagaatatcattttcaccacatgcatgtgaactaatgaattttaacatgtgcaaatgcatgcttctgtatgcacttgtctcatttatcaaagtgtgtcatactcatacacgtccatgcttcctttggttacaagtctattttacaatgtggcacacaatgtgaatggtctaattatatcaattgctcggtatactcaatgttttagatttacagattttaaatgattcttacatcgcagagctgggagaaaaca

SEQ ID NO: 86179 - DNA, 911 bp, Citrus clementina
  Intron number 1 from transcript clementine0.9_028737m (loc us clementine0.9_028737m.g) derived from phytozome v7.0 (c hr-ID scaffold_31; pos 44683 to 45593 reverse strand)
aggtactctgcactgtaaatgtcgttgtccattagcatacatagtatatatatatgtgtgtgtacacacacaaacatttcttttacgttaataatttgatgctccctttcctaataataataataataatttaatgctccatctcagttacgatctcgacccaccataatgtcatgcgtcacgtaccttcatctctgcatttgccgtcctcactttgttctcttgaatatataacatgctcagatgtgtacaatattagacgtgcatttgcaatagactattaaaatattagacgtgcatgtaaagctctctagtctctttgcaggtcatgtgtacaatgaaagcttcaaattcaatatatataattacaataaatcacataggctatagacgtgtagtacggggcaaatttgattttcttaataatttggtatcttttttaagtgtttttttatcatctaacctgcttatttaaagtgattattttgataacgttcgaatataaatatggatctcataatcccaataagggctaatgaaaaaaatttatgaacttgagaaacagatttcattgagtggggagagctgttcggtttcaccattgtatatgtagcagttaataatatacaataattcaattttgtttatatattttacatgatcataattcaaataattcaataaggatcttgatataaaatattgtttttttttttttttattaactgcataattgttaatgtgagagcttcgatcatggaagatgatggtccttatccatttaagtctatcctcaataagactaatgattacttactcggcaaatatgcataatcttttcatggtttactcaaaacttctattgatcttctctaattcttgcctaaaaaatatataaaaggatttgatag

SEQ ID NO: 86180 - DNA, 1041 bp, Citrus clementina
  Intron number 1 from transcript clementine0.9_004190m (loc us clementine0.9_004190m.g) derived from phytozome v7.0 (c hr-ID scaffold_3; pos 8770568 to 8771608 reverse strand)
tgcactgtacgtatctctctctctctctctctctccttttctttttctccccgatcactttgttttctttatatatacgaatgtatgtagaacgtagtaggttttgtataaatatctgttgcacacattatttgatgtgcatttaaatataattaatggtaattgagatgacacacaaagacaatgcaaaaaaagaaaaaaaaagagagagtaaattaatgaatttgccttgatccagttaatttgtgtgcatttagctgactgtaaggtggtttcgagtgtgtttttgtttggcaacttttcacacaaaagcacttttgggaagcactttatgtaatgtaagtgcctctaaaaactgttttatgtattactgccaaatgcagtgcagaggttacaatgggagggtcggttttatacctgttcttcgagacttaatttcaataggagattgaaatatttatgagaattatgttgttagcagacttaattcttttggaggaattcattccatcgtagaccactcaatgaatttggtcgattgagattatttgagtgcatgcttcaaaactggagcattaattctttgacataaatgggctttaacataaggcgcgttcgcttattccatttattcaagaagttggcactcaattttttattactagcctttagatggccagcagccttttgtagccctttctagtttctactaaagtggttatgtgcaatagttctattctgggttgcaaaattattgtgtcagtagaatccacatacattatgtacttttctgtatttaatttcaagaggcttagttatatcatagttttaggattataataagtctgtccgttaccatgttattggaatttttttttttttctaaattagttggacacattattggattggtcaataaaggaaagcatttggcaagtacttggtttgatattaacatatagttgcagtaaagcacattaacttgtgcatcctgaaattcttgcaggcaagtaaaggcttctgaggattcattggtggagg

SEQ ID NO: 86181 - DNA, 776 bp, Citrus clementina
  Intron number 1 from transcript clementine0.9_029522m (loc us clementine0.9_029522m.g) derived from phytozome v7.0 (c hr-ID scaffold_24; pos 170765 to 171540 reverse strand)
attccttcctctttgatttctctagaagcattaaagtgttagatctctcttgcaacaatttgtcttgtcagattccagaattttttgagattctatcattgttagaatatttaagcttgtcttacaatcactttaaaagtgaggtaccgagaaaaggagttttcagtaataaaataagggattgactgccagagaataagaagctttgtggaggtatagacgaattgcattaaccaacctgcatcaagaagatcaaaaatcgttctactcaaatttttgattctagtgattgtgatatcttttatcttaattgcatgttttgttattgtttatacttggagaagaaaacttgcacaaaaatcatctagtatgttgtcgatcgaacaacagtttcaaatggtttcttatgtagcactgagaaaaccaacaaatgagttttcatcttcacaacatgattggccaggggagctttggctttgtgtacaaacgaaatttgggtgaaaatgaactgaaaaatagaagtgaaggtaattaatcttaagcaaaaaggtgtaaccaagagttttgttgctgaatgtgaagcattgaaaagtattagacataggaatctcatcacaatgatcactgtttgctcaaccattgatttgcaaggggctgatttcaagttgctcgtttataaatacatgcattgtggaagtttagaggatcggctgcactagagcaatgaacaacttaaactaggaatttaaatctcactcaaagactaaacttagtca

SEQ ID NO: 86182 - DNA, 898 bp, Citrus clementina
  Intron number 1 from transcript clementine0.9_020113m (loc us clementine0.9_020113m.g) derived from phytozome v7.0 (c hr-ID scaffold_135; pos 218430 to 219327 reverse strand)
aggcttctcctgaggaccaatcacgtgttgatcaggtgattttattcatactgtttctttgagctttataaattgatatacctagcttgtttggaagcaaagaaagtagtatgagaaagtgagggaaaaatgaatgatgagaaaactttttatgaactaaatttggatgataaacagagaattttgaatgaaaagcaagaatatttaatatcacaataatattaagaaatgatgctgcagcttttacctttttttttgggggggtacttatatgaggggaccccttttattggcttgcgattaatatgtgtgtaatttggattaatatgaatcgatgcggcagttcataagtaatttggcctggtaaattagttattaatgtgtattagagaggttgaaaattttaattcattaacaattaatcggaggtaattaatcagatggtgagggagccatggctcacaaatgatactgaaaatttctaggcattagttgtactatactgaaaactaaatttaggagcaatatctagagttgtagatcggctatggttcattgcatgcacagcaagcaagggagagattggctcatcgttttactctttacaacatgcaagggagaggttggcttatcgttttactctgcacagcatgcaaggaagagattggctcatcattttactctacaatttctattagctgctgatttattgaagatgtatatataagttattccattttcaaaattctttagttgtgtcacttaagaaagaaattttaggatgaattatttctttaaattttatctatgtacttaaatttgtttgaaattttctgttgatagtgggattgtaaaacttcttttttcgatcagattgctcgcaaacttgaggcagtga

SEQ ID NO: 86183 - DNA, 981 bp, Citrus clementina
  Intron number 4 from transcript clementine0.9_024253m (loc us clementine0.9_024253m.g) derived from phytozome v7.0 (c hr-ID scaffold_3; pos 8728203 to 8729183)
ttgcagctatactgacctccatccaggtgaaacttcgttttgacttttcttgttcattcctgtctattggaaagagattctgtttcttgtttatcattgattgaaattggatgttttcactgtgcttaatttcttataattaatgcctgattatcgagaacttgcaagaaaattgtgcttttgcatcaaagaaagaagatactaatgatatgactggtaacttgttttgtccttttgtttcgtgtatatgtaattcctcccattttaaggaaatgaggagatagtttgaatggtatactcaactaagtcaaacatatgatattattggctaaatatatctaagagtatctgaacctaataagatcttagtgctcatgacgtccgaaagcatctgtcggcttacatttctgtaccgtgaaggcctttttgcatcattatgtatatttttttgttatattaaacaaagttaaaaagtgaatcttccatgtttgagacgatcatcaatatccaattttcaaaaaagtgttgttgtacgtaccatatctaatacttactaaaatgcattggaacatttccatatttgccttgtgatgacaaggattgcattgtttggttttcaggatattttatcctgttttgctatgtcgatgttagttagtacacatgttttcattaaattgaaatgttccttagtaccaggtttcattgattctgtcaccatatgttggccccctgtattatcttccccattatttcaaaactttattttttttggtgtaattggttagtcaattgctttcaaatatgttatgtatgcacttgccaacttggttttcaaatgatatttagtacaaatgatggttgatcttgaagcaaatgagcttgtgagattcgcagtggttgtatttatgattctaacatgacactacttatatgtctttaccagtcgctgctttgtgatccaaatccaaactcccctgc

SEQ ID NO: 86184 - DNA, 235 bp, Citrus clementina
  Intron number 1 from transcript clementine0.9_019943m (loc us clementine0.9_019943m.g) derived from phytozome v7.0 (c hr-ID scaffold_2; pos 5484817 to 5485051 reverse strand)
gtcgagcagggtataatctttcttctttctctctttcgttattcggaaatctgagattcaaatcccgctcacataaaactcctggaaaattttatgttttttttattaatgtaatgttactatggcagaaaattaatctgaattatataaaatgcagacgtttatatgataatatctttgattttttaaattcggagcagggattgctgaagtgaggtttagctacgtggcagat

SEQ ID NO: 86185 - DNA, 621 bp, Citrus clementina
  Intron number 3 from transcript clementine0.9_030305m (loc us clementine0.9_030305m.g) derived from phytozome v7.0 (c hr-ID scaffold_85; pos 307218 to 307838 reverse strand)
aggaggagatatccactttaggtttaactgtcaccctttattctgagctgaatcaattttcctgaatgtaattgattttgattgtttgaagttaaagaaatgatcagcttcctcggcaaatttcttggtaagcacttgattgtgggagtcactgaggaaaagcattccctagtgtttttttgtttttcccctcccctgaaattgcaatatacttcccttgaagagtaatttttgctttagcatttacacatctgtacagaagcaaacatggatcagagagatttagtgggcaaatacacctgtgctgaaaaattaatgcatattaaataccgtggtggttgttggaatgctccaaaaagtgttttcttggtgctcctgctccttttatacttccatagcattttaataactgggttgtttaaacgtcctgtacttattttctttacaaacgtctttgtattttttaaatttataaaagattgttctaattatattaatagcaacaaattgcgcaaactcgaatcttaatttcattctgcccctattacatatttacgggattcacctattatttcatcaaattttccattactaatttcaggtgtttgggaagtcactacg

SEQ ID NO: 86186 - DNA, 899 bp, Citrus clementina
  Intron number 1 from transcript clementine0.9_026452m (loc us clementine0.9_026452m.g) derived from phytozome v7.0 (c hr-ID scaffold_58; pos 488558 to 489456)
aagaggagaaagatcaatcagccgcccccccgccggtaatctttcacaactctctagtttttggttttgtgattgaattgaagaatataataagaattcgaaaaaactgacttaaagtttaattcgattctattttgttacattgattttttttgttttcatgaatatgtacaaacaagatcgaaatagcttatatggaaagagtgtaagggcatgaatttttaagccctttgatgagattggcaaatacttgagacagtctttgtgactttatgatcatttttttcttttttttccccctaatatcattatgtacgacattccaccactcaagggaagtgattttgcctatatctatatatattagaaatgttacaatcgaggattctggatttgttgaggttggaaaactattaaatcatatggtttaataacataatgatggtgaacacattatagcagacttgaactgctctttttatacgattgcaatagtttctggttcaaaattggtttaaacaattgtttcaatccagtgttaccagactttttcgagattatatagttcaagctaaatttacagagttagaagttgtctctagatcctttggaattgcatttactgttaaacatcgaggtctttacatcattggaatggttatgggctatatggattggacgttctttgcttcatgccatctgctatgtgggaaaaaaactttgtttcgcaaattaattatcaatttatcggcagcgttcctctacactggtgccagtaaactgttttgtcaatgtcaggtttctttccttgtacgtttgatgccgacaatgcaagttcttaacaatgcctttccctttctgcaggattgactcttcatctaccgcagataaaaccagag

SEQ ID NO: 86187 - DNA, 755 bp, Citrus clementina
  Intron number 2 from transcript clementine0.9_023656m (loc us clementine0.9_023656m.g) derived from phytozome v7.0 (c hr-ID scaffold_2; pos 6614903 to 6615657)
gaagagatagatcgcggcgggtcctgctgtaacaggtatcatattacccaaaccttatctggttttttttttcttatttttagtttggaaaggaagaaatgatggatttgatgtttattcgaggtaaaatgtagctcagcaacctcttgatttttattttatttttaatctgtgtcaaattctgcagtttggacggttcagatcaagtctagctagttggtgttaatttaaataataataataacaataataaatgagtttgtcttcgagacagtgccccggtgcgtttaaatttattatttgtcctcaatagttttgagaccgaagaagtcgggagagggtaattgcgtcttttcgcatattaaataaaatccttgtgcaattaaattatgattatccttaactagtgcgagttcttctggtccttcacggaatttgtctttccatttacgacaaccgcctcacaataaatcctgattttccatgtctacccaccactactgttgtttttaaccatgcagaggagggcactgtagtctttttacatgatgtcagtattcggaatattgggaaaactaataaaccacaatctatataatggggcgattatgtgtgtggagttttcatgtttgcgatttttctttcttattgactatttgactgctctgtttttcacgagaaagttttaaaaaactaaaagacactaattggcaattgcagagtccgagaagatccaaaaccctaattcggaaaaa

SEQ ID NO: 86188 - DNA, 868 bp, Citrus clementina
  Intron number 1 from transcript clementine0.9_016971m (loc us clementine0.9_014272m.g) derived from phytozome v7.0 (c hr-ID scaffold_4; pos 6386599 to 6387466 reverse strand)
ccttgatctgggggtggtcttgtgtcagcttgatagtgagtgttctaaacttaaataatgatttttatgcataccaatttgatttgttgagatgatgtttcttttatctggatatcatttacttgacgtattaatttgatagtctctcaataatagttcttttgtctatagtgcttattaggaatggaattatggaaatttcctgttgttattgtgtgtgattaagtcatcactgtaggaatcttgcatatgttggaattacgatttgttccattatattttttttagttatttcagctaagttttcctcaatggttatgaaaggaagtgctaccatatcatgatttggattatttagttattttccaatcattgtttcaaaagggtcaactcagatatgaatcaggttttttttttccacacattaagtttgggttgattttgaagaattgtcttgtatatgttttcttcctgttgatttgggaattaggactggaaagtaagaggattggctcgatacggggggaacttaaatttgaattgttcataattttgataaatatttggttgtttatctgtccctctttgtgaattgtgattgtgatcttaatttttgttatgctagatgaactctagaagaatataaactgattttccactggcaattatgtttataatgtaaagttaactccccagaagtattgtatatcatctgatatccttgacagtgactgtgttcataattctaaaggtaatacatcaatttctgggtgacatttactagaagttgggtctgaaaatgttgccgagtttataatttagtattgtaattggtttgcaggtctgagtccgcttttgctatcctcta

SEQ ID NO: 86189 - DNA, 610 bp, Citrus clementina; identical to SEQ ID NO: 80305
  Intron number 1 from transcript clementine0.9_024994m (loc us clementine0.9_022111m.g) derived from phytozome v7.0 (c hr-ID scaffold_7; pos 5214226 to 5214835)

SEQ ID NO: 86190 - DNA, 821 bp, Citrus clementina
  Intron number 1 from transcript clementine0.9_004721m (loc us clementine0.9_004721m.g) derived from phytozome v7.0 (c hr-ID scaffold_31; pos 1359040 to 1359860)
ctggtgatcccaggattgattctatccctcgtgaggttagcttattttatttgattgaaaaaaaaaatagtttttttttgtaatttattttatattgtaattttttagactgaaatttcacttataattgattataatttttccatttagattatcgacagaataataaaatgaaacacttcctaactacgatagtaacctttttataggtgacatcaatttattgaattatttattattttgtcctatcttccaaataaatgaatgacaccttattgagagaatcaaaataattatttgggcaaactgatgtggcattatatgatcaaaggaatgaaataaaatggtgcagtagtcactatgaaatttggtaattagaacttttttttaaatataaaaattagttttaatacctctatttggcacattgaattcttttcatgcaaaccattgtggcattatagcatgttgctacttgttgcactttatttattcattttatatggtttttgtgcttcctcattaggttgcatgaaaaaagtttgtttatttagtaattatttcttttatagattttttatttattttttatgggggttgaattgaatttaaactatatcagtagctaatcgggatagttggtttacctcattcatgtcgtttgcatgatcgtatttgagatttgtacattaatgaaagataagtggtagaggtttgtatgcgaattcaaagatctatcgtctatgtgcatgttatttttttgcagcctgatttgcatcttgattcagtgtcttcttttttaaataatatgtaggtattgc

SEQ ID NO: 86191 - DNA, 743 bp, Citrus clementina; identical to SEQ ID NO: 83762
  Intron number 1 from transcript clementine0.9_003754m (loc us clementine0.9_003754m.g) derived from phytozome v7.0 (c hr-ID scaffold_31; pos 992768 to 993510)

SEQ ID NO: 86192 - DNA, 974 bp, Citrus clementina
  Intron number 1 from transcript clementine0.9_029442m (loc us clementine0.9_029442m.g) derived from phytozome v7.0 (c hr-ID scaffold_4; pos 2920382 to 2921355 reverse strand)
gaaattggagataaattggttggatttaaaaattttcaagcaacaaagttaaacacgaaggtggatactagaaactggaggaaaatagtatttgttgcttgctagacttagaaaatttgtatttatttttttcttttttatttgagttaaacgacgtcggttttctttttttttttttaattttcaaatcgcgttaaatgacatcgtttctctcttttgtttaaaaaataaaacaacataattttaggtattcaaatgaaatgtccattttacccctctgacgtcagcaacgttctaatagcggttagatggaagtggacgagtgcaataagaggctaacttcaggtggcacactaaaaaagaaaaaaatgtttgtgtattttttaaaaaaggcaaaacaaacaggcggacggtaaataatttccctacttgaaactaaaaaacaaaacaaatcctttcatgtgtgacagttgattttagaccccaaatatcgaaatctaattacatgcttactatatttgagtcttctttcctaattttcattcataactgagattcaacaatattacagagctactatatatataaaaagaaagaaagattgcatataccttccctaagttactagcaaattttatttaaataagtgtagtcacctgaaaatatatcaaaatcgaaaaaagaagttgagatcttgtcttgtgctctgaatataatggccaagattattgtctcaaattttatccttttcttcattctccttgcattaggtaagtaaatacaagttgcattatctatttcccaataatgcttaaatgaagttttttttttccctcgtatatatacccaacacttttgaaaaacataattcttcaaatattgtcaaactattttccctgtatcatattacaataaaatttgattttttgattatatctttcagttactaattcaattaatcaatttacgtggaa

SEQ ID NO: 86193 - DNA, 662 bp, Citrus clementina
  Intron number 2 from transcript clementine0.9_020216m (loc us clementine0.9_020216m.g) derived from phytozome v7.0 (c hr-ID scaffold_105; pos 377239 to 377900)
tgtcgtggagaagaaaggcgttcctgatattataggtatatgattatgtttctttttaccttttttttttttcaatgtttgattcgttgttcttagcattcgacataactttaggtgttggaaatatttccgttgctaaactgattagctgggtttggtttagttctgctgatttgagaattttggctaaactcaaccgattcattatctgagttaaaagtggtgtaccgtcaatttttttatttatgttcattgattgaacaataaattataggtacgtatgatgatgttgcacgaatatgttggtagcatgaaaagaaatgagtatttagcagtttatgagttcaggatgatgaggacaagtttttgacttggaatgtacttgactcttgcctgtgtatgcatcaatatggtggttagttctcaatttgattttaccctctgaatatgcttgtatgttgattcaaaacatcatgtgtctgttctggttgtgaaatgacattttcttgaatgttcttggacactttgatgtagaaatatgattgcttgtgcaacaattagagagtattgattctgtccttttttttttttttacttttaatccttcataatgtgaaactgctttgcccatagagctaacttgaatgtatattcagtaaaca

SEQ ID NO: 86194 - DNA, 721 bp, Citrus clementina
  Intron number 1 from transcript clementine0.9_002662m (loc us clementine0.9_002656m.g) derived from phytozome v7.0 (c hr-ID scaffold_4; pos 5027029 to 5027749)
ttctaccgtccgtacgtttttcttgttttctctaggtactctgtttttctcttcttcccattcttcttcttttcgtctagttttgaattcttcttcgaggtcgaggatcgtgttcaatgctctagtctatcctgttgaattacttgttcatattttacgctgattttatttgaccacctctagaaactcagccttaaaaaaagctcctcagattcactgtttcctttgctagaattttctcccatgcttttgttggtggactactaaaaagaaaaaggataaagaaaaaagaaaagctttgatccaaaatttatccctggtagccacacaaagtggtagttcaattattatgcctacgctttaaagattttggtaatattttgtttggcactataccggccaaccagcacataagtgaatattcttaacaaattaagacgcaatgttaatttttaagacggtaatataagttgaacaatatggactctttgcgtaattaatattttaagacttggttgttgaaacttgaaactggaggtgggggtaggtttagaaatttttcgtcttctagatttttttatttgactattcggattatccataatccatttcttctctatataatgaaggttggttttggatagacagctatatctttacgttatttacgtttgcttggttccttgtgttgcagttgaagtttttgtttgtctgagaatca

SEQ ID NO: 86195 - DNA, 903 bp, Citrus clementina
  Intron number 3 from transcript clementine0.9_023962m (loc us clementine0.9_016759m.g) derived from phytozome v7.0 (c hr-ID scaffold_4; pos 6911401 to 6912303)
aaagtcgtcagatcacacaggtgaggcctctataattgacgtgtcctttttcaactcattatttgtccagaatattcattttttgtcttttcttaacaggtatatggattctatgatgaatgcctacgtaaatatggctctgtgaatgtttggagatattgcaccgatatttttgattatttaaggtttgtgaatttccattagaaaaacactggatactgtattttggaaattaagggagttttaagaaccacagaattgtaaaagttgcacaagtattggagggtctcatatagtgccagttgaatggtttgatttttcattcaatcagatggttgtaattatcaaattttatttggtacttgcacccaagagagtcataagttggagctactttatgacattttggtgtcatgggaaatttcaccattatgttattgatatttgaatacccttttatctgcctctatgtttagagctcatgtttatttcctttatcatttggcattcataattattgcagttgatatgttacaatcgttattatcgagttgaacaggtgccctggttttgtgttttgttatattttggtgtgtttggaagcaattgctagtttctgtattaaatctttttgtctatatttctccatatgttcttcctgtattattagttccctgaactctcttctttgaagtcattataacaggattgactaatttactagtttttccttcactaaattgagattatactctagtggccatttgcagccatttctttatgtttacgttacttctggatcaaactacgttcagtgattaatgttttccttttactatttctactgaagtttattcttttattgtagtttgtctgctctcatagagaacaagatttttagtg

SEQ ID NO: 86196 - DNA, 693 bp, Citrus clementina; identical to SEQ ID NO: 78628
  Intron number 4 from transcript clementine0.9_015922m (loc us clementine0.9_015922m.g) derived from phytozome v7.0 (c hr-ID scaffold_4; pos 2176181 to 2176873 reverse strand)

SEQ ID NO: 86197 - DNA, 820 bp, Citrus clementina
  Intron number 1 from transcript clementine0.9_012755m (loc us clementine0.9_012755m.g) derived from phytozome v7.0 (c hr-ID scaffold_10; pos 2462946 to 2463765 reverse strand)
cttcgcatttgtcgcctcaaacctcctatattctggtaattctcgactcgttatccttcatttttgcttgtctggttttcagatctctcgatggatagctcgataggtgtttgctttagattctatctttttttggttacagacattatttgcatagttcttgaatttaagatacccttatgctttgttagttgttatgccaacgcaaaatttgtcaaactttctactttctatgcataagtgggaggtttaaatctgtttattgaatcatgtattgatttcagatctgttcattgaatttctacgaggtactgtgtctgcgtttatggctttcttgttttattctcttgctctcttcgtttattgatgctgaatttatatagcttatataatgaaataaaatgataggtttgtttcactgtttttgtatgtcattttagtgtttagtgcgtagatggtgttttaaggtgccggtatatgatatctataatcaaatttatttcttcgaggaaatttgaatctgttggaggaattgcttttatgttgagaccaagatgattgtttttttttttctattgctttgaaaatcaaatttttgggtagaaattgaattgtcatttctttctgttatgcaactaattcagaaacttggccgcattgaaatggaggtcaaaggaggctagtgtttgctaagttctatggccttgactggtatgaatacggtttttgtttttcctatttaccacctgatattttttatatctactaacttttgtggattggctgctacttgtgatgattttctacaggtatctggcaa

SEQ ID NO: 86198 - DNA, 441 bp, Citrus clementina
  Intron number 2 from transcript clementine0.9_030090m (loc us clementine0.9_030090m.g) derived from phytozome v7.0 (c hr-ID scaffold_141; pos 202433 to 202873)
attttggggctgtgctacataagtaatctcagctctcatacttaacaattcattttcccatttaagtttaatttcttttcgaattcttctattttcattttgactgttgattgaatgaacaaattgatgaaataaacaaaaataagacaaattaatagttcagaaaatgttttggtttcataaagaatgtaacagaactctctcccgaatttgtatatttcggaatggcatcgttgagcacaaatcatgataatgctgtttgtttcaatctttgcttataaatgatcttaagctaaatatggtaaatttttgtttctttttgttatatttaccagttatatttaagtacagcgagaattaactgctaggtttttgtcatttattatatcatttttcatattttcagttttgttgttctgctacctattgttcaaagtggga

SEQ ID NO: 86199 - DNA, 701 bp, Citrus clementina; identical to SEQ ID NO: 85869
  Intron number 1 from transcript clementine0.9_017678m (loc us clementine0.9_017645m.g) derived from phytozome v7.0 (c hr-ID scaffold_3; pos 577058 to 577758)

SEQ ID NO: 86200 - DNA, 542 bp, Citrus clementina; identical to SEQ ID NO: 82944
  Intron number 1 from transcript clementine0.9_018705m (loc us clementine0.9_018705m.g) derived from phytozome v7.0 (c hr-ID scaffold_3; pos 5905782 to 5906323)

SEQ ID NO: 86201 - DNA, 485 bp, Citrus clementina; identical to SEQ ID NO: 81695
  Intron number 3 from transcript clementine0.9_007786m (loc us clementine0.9_007786m.g) derived from phytozome v7.0 (c hr-ID scaffold_3; pos 921081 to 921565)

SEQ ID NO: 86202 - DNA, 505 bp, Citrus clementina
  Intron number 2 from transcript clementine0.9_013140m (loc us clementine0.9_013140m.g) derived from phytozome v7.0 (c hr-ID scaffold_2; pos 3864691 to 3865195)
aataattaagcaattggacaatttgcatcagcagggtaagatgattgttaatttaataatatgtttaattgtatatgttgtaattaacgtagtaaattgttttgcatcaagctctctagtaattacacaatatctttgaaaatgttctctttgaacttttgaccaggttttaatgattttacttgatttcatactggataatggcaacaaatttgatgcatacttggttgccaagtaatagtaggtgcttacccacgtgttagttgttgtactttcaatttaagtagaggcacaacagttagaaacatgccccgtaagccttattttgtttcaactcatcgatttacaggttgattatagatgcttacttgattttgttgctttcttaataaggagcatgagagagttctgggtatcatatcccttttgttcttttctctattcctttaacccttctttttttaaatggtattatcagtacagaggccaagggagcaggttgctg

SEQ ID NO: 86203 - DNA, 681 bp, Citrus clementina; identical to SEQ ID NO: 83610
  Intron number 1 from transcript clementine0.9_005829m (loc us clementine0.9_005829m.g) derived from phytozome v7.0 (c hr-ID scaffold_3; pos 2488633 to 2489313 reverse strand)

SEQ ID NO: 86204 - DNA, 966 bp, Citrus clementina
  Intron number 1 from transcript clementine0.9_006525m (loc us clementine0.9_006525m.g) derived from phytozome v7.0 (c hr-ID scaffold_4; pos 5514455 to 5515420)
cttgttcatttagctttgactctttaatcaatcaggtaatgatttttaatcattctttcactttctctctccccatctctttcttttctttgttttgcttttcctcctttaatgttttgtaactctcaattttggaaaatatttatctttgataaattttgcaaattttgaggtaccactctcactctaataattctctttaaaaagattttatgatctctgtgttttctttttttggttttgtaatctgggttgtttttgtatttttaaaatgtcaattggcttatcattagatcttgattgatgggcaccataacttgaacaactggttttctatatatgtaaaggttcaatggatttgtatgattagtttccttcaactaaactttatcaatatttggaatgttgtcaatttttcttcatctatttagccatgtcgattttctgttgctacctctccacccctcttacaggataaaattttgggttttgttgagactttttttttttttttgccttcttcattttggaaaaaggtaaagagataatattgttgcattattgaattatgacatgttttttagatatcttacatgagtgttccttcgtctattccgagtttatctaatatgcaaccttgcgttgattctctttgcgtttatatcaaaccatttgataacctctagtcaaaattgcagctttatactcctgggtttctgagtagcaaaactgggatttttattttattttattttatttgttgtttctgggttatttttagtcttattacggaaacccacatgagtgcacacctgtatttgaacaagttttttgtttgaatataatcttccatcttatctgcagctaaatttcatctccgtcattggtcattttctgattccattgtgtactgtgtgaacgaatctttcaggcattaaaccctttgcggaagactttgattctacg

SEQ ID NO: 86205 - DNA, 850 bp, Citrus clementina
  Intron number 2 from transcript clementine0.9_032594m (loc us clementine0.9_032594m.g) derived from phytozome v7.0 (c hr-ID scaffold_2; pos 8087520 to 8088369)
ccataattttttccttcggattattgtgttcaaaagttcagcagaagtctcaaagagaggattaaaaaataataagtacttgtggatggttttcccgttgtactatatataatgatttttttgattaatttattgaagggttaatcccgtatctacttgcgattgcacacgcaactcatcgagattggttgggtcacaaggttaaaagattaaatcgcagaatcagtaggatgcttttctgattgtgcaatttgtgtatactacatctgattctgttattgggtgggtcttaaggttacgcattatttgttccattattgacttggcataaagtgtgccggtgaaacatgtaacttgaaatatccgtaaaactatcttattttctcttttctaataaataattcaaatgaattatagcttgtatcacatgggctgaattaaaatgctggctatgcatgggtgttactttggagctcaaagacactatttgtgagtagttttggttcgtggatttgtttgttaacattcatatttgcaattttggatgttttagccattttgctttcttgaatttcaatgaaagctaagttaacatgtagaagacggcagaattggtatgcttgcgtatttttgctcctagaatttgattgggaaaaggttttattgggacagagaagtcttttggatccattttggggattgaaactacaaattggcagtggaaattaaatttaaatttagacaaatatatttttagtaccttctagttggattacaattagcttatctttgatttttgattgctttgtcttcagtttcccactttattccttttcaacgcttatcaaaa

SEQ ID NO: 86206 - DNA, 876 bp, Citrus clementina; identical to SEQ ID NO: 82382
  Intron number 1 from transcript clementine0.9_005341m (loc us clementine0.9_005341m.g) derived from phytozome v7.0 (c hr-ID scaffold_3; pos 2362424 to 2363299 reverse strand)

SEQ ID NO: 86207 - DNA, 709 bp, Citrus clementina
  Intron number 1 from transcript clementine0.9_031673m (loc us clementine0.9_031673m.g) derived from phytozome v7.0 (c hr-ID scaffold_4; pos 714299 to 715007)
ctgccttcgccacgtgacaccgacatcactccaccgtgcgacacaccaccacgcgatctggtttgattttgtcctttaatggatttataatggcaagcttttcatcctaaattctaataattctgctatttattttaacggaattgtttttcaacaaaaactacttgttccttttttttttttttttccttctctcgagttactagaaaaaattcaaatttttttttccctgtgattgaggatgagagaaaaggaactgtatttagctgctagattattatatgagattcttgggaagtatttaagccctggaagaaaagagttaataagcgtttgggtacatgaacattgaggaatattactggagttgtattttagattgcctatcaacctggatgccactgtatttaaatatcaacaaagtgcatttgagtttgcaatcagctaaaatattcgtcacctttctcttagatatctgcttttcctgtaacgcctactaaagaaaattgtttcttgccagtggactgcagagtcagtgaatatggaggaaaagaaacaaaagagataaagtccactgcctgtgaaattgtccatggaatgtgaaattggtatatatgattgattaatttgcgattgaattttgtattacttgcagctttaattaaaatatgcagctgaaacaaattctcttgtgcctcttcatcagtat

SEQ ID NO: 86208 - DNA, 367 bp, Citrus clementina; identical to SEQ ID NO: 85711
  Intron number 4 from transcript clementine0.9_015307m (loc us clementine0.9_015265m.g) derived from phytozome v7.0 (c hr-ID scaffold_7; pos 4146550 to 4146916)

SEQ ID NO: 86209 - DNA, 832 bp, Citrus clementina
  Intron number 1 from transcript clementine0.9_008089m (loc us clementine0.9_008089m.g) derived from phytozome v7.0 (c hr-ID scaffold_2; pos 907548 to 908379 reverse strand)
caaggttcgatctttattaatttaatcaattaatcaattgcctcaatattttttaactatttgagcttcttttttttttttttttttttttaaagactcgatatggctgtggtaccgctttcagtttcaaccgtcaacgtatgttttattatgtgtttggtgaaagcgttaatggcagtaatgcttttgtaagtgaagaagcttataatggttcttcttttgggggtcttttcaactttaaataccgtaacggctttcattttttggctggattctgctttgattaatttgctttctaaatttgcttaacttctttgccattttttccaatataaaaattgtgaaactccaacttacggggcacaattaacaaagcatttattacacacgcatcgattaccattaacacacccatatggctaggaaccaatatgcatgcaatcttcatgtcgaacccactagtcattagcaaaagctgtcttttatgtacctcatgtaaaaaacatgagtaaataccctattgctgcatcttctcttcagttattcaacaagtaattttcttgtgatcatttccataaggagctaattaattttttattattaaaaaaaaatgccacctctttaggaaaagataaggataagttatagttcactctctctgctaattttgtaattcgaaatttgagttacggtcacgtaccattttgtaaatacaagtacgtacgattattaggctgctagaatctcgattaactgcgcctacctggggtaatttggtaatttacaaatcatgatttttttttttggggtcaattaattgcaggaaggatac

SEQ ID NO: 86210 - DNA, 281 bp, Citrus clementina
  Intron number 4 from transcript clementine0.9_018403m (loc us clementine0.9_018403m.g) derived from phytozome v7.0 (c hr-ID scaffold_4; pos 1576063 to 1576343)
gattacaagtatgatttatttctttgattctttttaaaaaatgacaatgtgtgcctctctccctctatatatatatattccccccccccccccccccacaattttgtctgagatggtcagggatccctgattgggaaatccactctcgtctgatgatttatttttaaaatcttattttctttaaataatttgagaatcacttctgtttttctgccttattatatatcctgttttaagagtgtactaatgctttttttacttcttcctcagtaaatatagat

SEQ ID NO: 86211 - DNA, 889 bp, Citrus clementina
  Intron number 1 from transcript clementine0.9_024956m (loc us clementine0.9_024955m.g) derived from phytozome v7.0 (c hr-ID scaffold_2; pos 3777384 to 3778272 reverse strand)
cagtttatcttgtttttgattggaagcttcagaaggttactgattttgttttttaactgatcagatgcagctagcatgaatcagttgttgtttgattcatggaatgaagttgtctgcatgtttggttttggaataatatttttgttgtttggttttcgaatcattttttgtgggctgttaagatttgcttttgcattttaagatcatttctttgttctcttttattgatatggttgcgccgaactggaatgaaaagagaaagaaggaacctatgatttgaatatgtaattctgactaggacaggggatacaaaacttcaactttgtccaaacaatatagaactttcttacatgtttgatgtcactcttctatttaatcatagattagaatttgcattttctttctttttaccgtgcaaccaagcagacgttaagaaaatttagatatgctttcatgggaaatgctccctaaaaagagcagaatggcaaaagataattcatgtagttgaccacctcatttttctgggctcaaagctatgttgagttatgtttattttcaatatagaatgtaagtgcttcatttgtatgcattttggtgtttataagagtgaacaactaatgcttttggttcacaggatataaatgtatgaaaatattttcaaattttttttttttgaatgatatggctcacatttatctcttctgtttgtggataatggttcacattggttttcctgtcaactataactgttgtagtacttttgtcctaatgggatttctttttctaacttaatgttgtttctggcctctaagtttatctgtttttgcattgcagtaatcattttaagttgccggaaattttttttgtgagggtgtttaaactttaaagt

SEQ ID NO: 86212 - DNA, 928 bp, Citrus clementina
  Intron number 1 from transcript clementine0.9_001689m (loc us clementine0.9_001689m.g) derived from phytozome v7.0 (c hr-ID scaffold_4; pos 3671138 to 3672065)
ccaccttctcttttttcatttgccttcttctgttggtaagtatttgtatcagccaattcgattactgtcaattacgcttcgttcatatctcaatttcgttactattacaatctggcatcgttttggtttgcgaaatgtgctcgccgagtattttattattcagaatcgaagaactaaatgtgtttaagcttgtatattgaaaccaacagactgaaatgtctctgttgattttttttttttcattttatgggatagattttgaaatataattgtcctagaccagtttaaggttcatgacatatgggtttttgattccatatttacgtatttctctaattaatgccgaatttctctaatttggcttctactttttattgaaaacttgaatttcagcatttgttttggatttttttttttcattagaaaatcagaacttgtttttgtttgagaatattatgattgcctagcatatgtctagtaaaaaaaaaagcttgtttgtgaattaatattccattttttaattgtttagttgaaaatgaaggtagattaaatgagtacttgctaacagttcatgtacatgacaaagttcaaattagaataaaacaagactagtttgagatacagagtatatctaacagtgaggatagagttatttctgttctaggtgtgtgcatctttttaaatcaaagatcatttcataaattttgatgttgtggaaatgaattttacagatgtttttcctgaacttcttgaattgaacttctatctttgtttaatgaacaaatctttaacttctcttggcatattcactagattcttaaagataaatggttttgaattgttttcctttgtctgaatcttttttccaagaaccttatagaactgattctggggttatgcttttattagttccaagcatccagctcat

SEQ ID NO: 86213 - DNA, 466 bp, Citrus clementina; identical to SEQ ID NO: 81997
  Intron number 2 from transcript clementine0.9_002784m (loc us clementine0.9_002784m.g) derived from phytozome v7.0 (c hr-ID scaffold_3; pos 8821541 to 8822006)

SEQ ID NO: 86214 - DNA, 546 bp, Citrus clementina; identical to SEQ ID NO: 85430
  Intron number 1 from transcript clementine0.9_005110m (loc us clementine0.9_005110m.g) derived from phytozome v7.0 (c hr-ID scaffold_2; pos 2311716 to 2312261)

SEQ ID NO: 86215 - DNA, 918 bp, Citrus clementina
  Intron number 4 from transcript clementine0.9_019526m (loc us clementine0.9_019526m.g) derived from phytozome v7.0 (c hr-ID scaffold_3; pos 8453606 to 8454523)
agacgctgttacaccaggtatattacatgatcttctgatagagcgagatagaagagcacggttagcaaccagatacttgtgactcattgcttaactgatatatattggttctattctgagtcatcctcatttttttttccctcatttattaatcattccctaacctgcacagaggctgcttaaggcaattttatgccccacacaaaatttgaaacttggccttgccatatattctaaaggaattcaaattacctttttatattcaaatttgtgctttattacaaatagtcgttactcaaaatcaattgcaagcattttagttttatcatgaacactaatataataggaatgatataaatttcaaaccataatagatgcataaaagttgaaaatgaaaaagagtaaaatttgaaaatgaacttgcaaatggtgatcatagatattattgggagaatagaagggaggagactagggctaaagaaatagttaggaggaaagaaataagtttttgtcttaatttttgaaagggataagagaaatttagcaaaagcatccaattactaaaattaccttcaacttcaaagattttataaacaaaaattaataaatgaaaaaagttttgactctttatcatagagcacaaatatttgacgagattgtaaagaatatattttcattaaatgcttgttaatagggtgccttaactcaacaggggctcggctcggcttcttcactttgtcatttctgacagttgtactgatgtgggaaaattggactattaagtagctagtctgtttttcctgcttgcttttcttagtctttgattcctctctatctctgttggagtagccataatatcaagccaaatgtggattatctcttgctaaccaaaacttccttttgttctttagaaagagt

SEQ ID NO: 86216 - DNA, 1039 bp, Citrus clementina
  Intron number 1 from transcript clementine0.9_030526m (loc us clementine0.9_030526m.g) derived from phytozome v7.0 (c hr-ID scaffold_24; pos 116837 to 117875 reverse strand)
accccaacataattcgcctttttgacgctttcccggtgagccctttaaatggaaatttcaagattcttaattgcctttcttgcgtttgttgaatttgagtttctttgctttgggttatgtaatttatttatatttagttcattggttttgatttttagcctggttgtgggatatccatttggttatctttgataaaggatcgttccgtatgattttgcttgatatgttgtaagagtataattgtctgcttaattttttttttttaatttcatttttggataagctgatggatacttgtcaagtgtttgctgaattgcatatgttaactgattgctcgacttagcttgggggtctgaaaatgtatttttagatttttctttaattattttggagataatagttgttaatttagtgtagatttatcttggaatgcagattctttaattcatcagtgttggttaagctgattttatcaattggatattccataactgaccattgtttttatcacaacatggagatgtgagctgcttattagagaaaaaggatggtcttaatgttcaaactatgttattttttcgtggttcttttattttcgtttctgacgatttttagctaacttattttataccttgaattggaaaatgcaaatgcttgatttagctaatcaattttataatttataccttgaattggggatgcaaatacttgatgtaagataagatgtgttggaattaagcatactttttggatttctattttcctgtccctcatatacatttttgttattaaatggtctggtggcatgcccattgcatgcaaattacgagttaaaataagcaatttcttgattgcccaaatctgttcgtacttaggcatatttgtcttagagctacaccattcccttaataaagaaagccgtataggttgttgcaaatgatatataaatcatttatgtaacgatagtactttgacaaattgaagttgactgcctccactgtcaggctgaaaattgtatattccttgtggttgagtttta

SEQ ID NO: 86217 - DNA, 544 bp, Citrus clementina
  Intron number 1 from transcript clementine0.9_035662m (loc us clementine0.9_035662m.g) derived from phytozome v7.0 (c hr-ID scaffold_2; pos 6429540 to 6430083 reverse strand)
ggtatgctatttacattttttgctaaattatatatagttttaataattattttcagataaaatatgactgaaagttagattttctacccactcatatgagcgtaatcgtttatcttcttgttatctaaaatattacacgaatgtacgtacaaaagaatgtcattcatttggttagattaataaaaaaataaatacttttttcaaaatagaaatgtgattacagtataaagattatcacacagtcggcagaaggaaaactatgtagaggcctgatccctgaaaccgaaaaattcaaataaagaaaagggacttcattgaaattttactctttttatattgtagttatcaggtttattgtatacacgttgtagccttacatattaaataatacgtttaaccactttttttgcggtttctaacattatgtgcacctctaaccaaaatcatagttgcattcgccgctgcttagaaatgtttcaccataaatgttttactgtatgttaaaatgttgttaactctggattcacaggtggagcttgcgggt

SEQ ID NO: 86218 - DNA, 444 bp, Citrus clementina
  Intron number 1 from transcript clementine0.9_004054m (loc us clementine0.9_004054m.g) derived from phytozome v7.0 (c hr-ID scaffold_4; pos 6442751 to 6443194)
gctatctaagcagcatcatcagggagactggtccagtatgtatcagcccttttatcagatttttgaattcctccgtatttgttccattgcatattgtgtctttaaatactgaacaatgcgaggattgtctctgaagtttgaataatatgtaaaggccaaagattataccctatgtttttctcattttcatgttgattgtttgttttttaatttttatgtcaaatatttactaataagagccacattttgaattcgacagcatcaccagagctggatgctctaacttggcatctttgctggtcctccgtatcagcaataacttattaatcatcatataatatcaatgaattttcttcatggtgttgtatattcttgcgaccattgctgctatatttatttagaatcttatgctttgatacctttgctattcagaatctcccaaac

SEQ ID NO: 86219 - DNA, 412 bp, Citrus clementina
  Intron number 3 from transcript clementine0.9_004054m (loc us clementine0.9_004054m.g) derived from phytozome v7.0 (c hr-ID scaffold_4; pos 6443461 to 6443872)
ggactacaatatcagtaagtatctgcaaatgaatcaaaagggaaggcaaagttatttgaaactttatatgtacaaagtgtgagatgtggtctcctctcttaaaattcatcccatgtttatagaaattcaaaaagtttcagttttttgaatattgacttggtatccctagcagacttgagatgatttcataattgttgcatttgtgacatgaaccgaagggtttgatgcagagattttccaataattatttccctatttggcttagttttacattatgttataaatctcacgtgcattttaacatataatggcaacaagtttcttgtttgatgttacatgttgattgtttatcatttattaccctgacattctttcttcttctgatgtgcagattcaatcgtttgtctttgtc

SEQ ID NO: 86220 - DNA, 465 bp, Citrus clementina
  Intron number 1 from transcript clementine0.9_000780m (loc us clementine0.9_000780m.g) derived from phytozome v7.0 (c hr-ID scaffold_7; pos 4273649 to 4274113 reverse strand)
ctttgattcccagttttcacctcctccagcacctggtaattgttctaaatttctatttttgttgacatttattctaaagttttgtgcttttagagtaaatttttcataatcgtcgaaaaaggagaaactcttattcaattagtttagattaattggtttccttttggtataatgatcgttaaaggagaagattctacattttgggttttgatttggtgtcaatgtgttgcttagtttgattattcacaactgtctactcaatcaggctggagaaaattgtgtacattcatttcagtgaagtggttgattttttaaaaaaaaattcaaaaaaaaaaatcatttgagcttttgattagtcggcaatgtaaaattgcatatgttgacaatatttgtatgttttgggttcttcccttgcgtgatagaataatgagtatcccttaaataatttaggtgaaaaagttgaag

SEQ ID NO: 86221 - DNA, 932 bp, Citrus clementina
  Intron number 1 from transcript clementine0.9_016909m (loc us clementine0.9_016909m.g) derived from phytozome v7.0 (c hr-ID scaffold_4; pos 6782422 to 6783353 reverse strand)
aggtaagtttagtttatagtttcattaaagctacaaacttttgttcttttaaaatcaatttttaattgtggggtttttagtcgtgtagttttgtttgctatgctatcaatttgatcaaatgattttaacagctatgaatttgatcaaatgatttttaccgcgttagcaaaatgtggattattgcgagatatcgtaaatgaaacattttgatgattgattcattgcggaaaagctatgaggcagaccagagaataaatgttggtgccaatgtaaggttggcttatctgcagctgactttcaggctaggcatctttcaattgaatgccgataacgcataatgttatatggagatgaatttttcttgcaattacattagagggaagtattgtcagaatactgtttatgttttgacagcagattttatggctgtgctgttctcctgtatttcaaacttttgatctgtggataattattctcgaattcccccggttactggtatacttccttggaacagaacacgaaatcgcactttgttgattttacctcacaaattaattgattttcgcaatctcagattagcattgatgggatgtggtatgcttttggatatctgctggactttgaagcatcattttttatagccaaattatgattgttatgctactgaaaagttgggatatagagccatatcgtctctagccctgctacttactagttgcttgtgctttccttaaggcattggttactagctagaatctcttttaataattgtttgttatagattttatttgctaccttgggcaattgctttcttatttgtggagtggttgttttatcgtgaatatgaagtgctttacaattttgataaacaagaagaagctcattctctaacttggctttcttgtttgaaaggttagaaaagagattgagca

SEQ ID NO: 86222 - DNA, 875 bp, Citrus clementina
  Intron number 1 from transcript clementine0.9_015335m (loc us clementine0.9_015335m.g) derived from phytozome v7.0 (c hr-ID scaffold_3; pos 8353431 to 8354305)
ttctggtggcaagtctggattgaccggagcactgagttagcattttttttttaatgaaatttttatctttcaattctatgttgtttctacttggtggtgtgatttaaaattttagagttatggcgtgccatggtgccatttgttgcattaggatcattattagttgtgcgtttgatgaagtttgcaactttttgaaacttttgttctagattcatgcattctaccttgatttcgtgattgctgtttggcatacctgcatctggcatcattgaaagtgctcagtgtttatgcataaaagtccttggtaaattgttttctgagcgttatgcttagagttccagtttttgttataaactaagttcttatgctattagcttcttcagaaccgtaaccaaacctatgcccaaaccaaactagcagtatttttacttgatattacctatttgttattttatgccacaaagtacaatgccatagtagttgtagtagctaagagtagagtttgttgtctggccttcatatcgggtttcagaagttctcttccattcttggtaacctcatcttgtatgcgttatttggaagttagtcaatttggattatgattgttctagtttatttcttttcatgaattcaaggaagtttcgttctttccattgagtattcttttgtcctactaatttttgcaatggcttaattttgtttgatgagtttgctatggagaaggtgcttttgcttgaaatactaatctgcaatttttatcattttccagtacgtctatgtatttttcaagtaatgtgtggggtctaataaaatgcttcctccttggcatatcatgtccagttcctgcagagaagaagggagagggaagatcaagg

SEQ ID NO: 86223 - DNA, 329 bp, Citrus clementina
  Intron number 1 from transcript clementine0.9_022180m (loc us clementine0.9_022175m.g) derived from phytozome v7.0 (c hr-ID scaffold_4; pos 5032610 to 5032938)
aacatcgtccaatcgggagctgcgttcaagttcaggtactgcttctgcaatttaattcattcattttcttttagcttaccttgtttctaattgcactgcatattttgatttttatcagtatatgtgaaattttacaactatattcgatgcgccatgaatattaatctactgcatataattcttgttagtttctttgctacttttgggtaatttaagatggttttggtttaatatttaattgaaattttaatttcctctcttattatatgttccggagattttttacctgtttacaactcttgaaacgtctcttcgtgaagcaatatctt

SEQ ID NO: 86224 - DNA, 991 bp, Citrus clementina
  Intron number 1 from transcript clementine0.9_031195m (loc us clementine0.9_031195m.g) derived from phytozome v7.0 (c hr-ID scaffold_4; pos 6542807 to 6543797)
ccctaactgacaacaacattaaagcagtcatctgggttagtatgtttattgttggaaattttcaaaataattgtgtcttatggtaaagacatgtcctattaattgtgccttatagaaaaggtacctttcactaaagacttgtctaattaaatgatgtcttgttgtaaggacatgtccatttaattgtgtcttgtagaaaaggtatccttttactaaatgatataacttttcatggcaacatttcacttagagatgcatcatttcatggtgacatttcatttgaaatggtgatggttcaatttagaccattgattaaaatcaaatctagatccaatggccatgaatgaaggggtatcatgaaagatgataacccaaatgaggggacacaagtatatctataaataggggtcatgtttaagccatttagacatgaaatgaatgatcctacaccactcttttcttagcattcatttctagtacgaatcacaacacaaaacacccatttcttttgtgcattcacattccaatatattgttttctgcaggaacaatatattgtttcttggtaggcttgcaacattcaagagtattctagtttgctttcgtcgatgcacaacgcaagcaaacaaacaagtgcttcattgtatcctggaggcgtatttgcttaacccatgtgcatcactcaattggtgggggcaaataacgtcttaaggaaagcgacatttgtaacgtgccttgaagcacacaaaatttctgcagtttcttcctacatatagagttagttgtaaacacattattttacataataaagttccaccattattgttgtatttctctacatttgtcattccccacaaaatttaccaccaacatttattactttccaaaaaaaatgtaaaaaaaaaaagataaaaagataaaaatgactaaaaatgatggggattaactgtttttcaggatatctttgtagctgggagtgacacatcatccac

SEQ ID NO: 86225 - DNA, 557 bp, Citrus clementina
  Intron number 1 from transcript clementine0.9_003395m (loc us clementine0.9_003386m.g) derived from phytozome v7.0 (c hr-ID scaffold_4; pos 1437067 to 1437623 reverse strand)
aactgataaattaaagcagaagccattttttcactgtaagtttttctttcttttgattttcttattcttgtctccaattttattaagatcaatacttattagttattaattgtttgttgcaggttttaattttactttaattttgttgcatgatagctgaagttgtgttagattttagtgtaatttcggtactcgagttctaaacgactgtgcttgtaatctatgaagtgaactgactttgttattagtttaattttattgaaaaaagttttttttttaaagttagtcttttcattgaagttatgagattaggtattcatagtggagaggagttgagaaaaaaacactgttgtcaatcttttggaaaacaaaagaataatcgtaagattagaatcaggttataattattttggagatctaagatatcgactgataagatgttccgagtgatggtaaaacatgggtttgactttttgaataattttgtattattcttgggttttatggaaagctcattctgtaatgctctgagtgagtacttgcagtgtgtgacatcg

SEQ ID NO: 86226 - DNA, 857 bp, Citrus clementina
  Intron number 1 from transcript clementine0.9_002475m (loc us clementine0.9_001879m.g) derived from phytozome v7.0 (c hr-ID scaffold_4; pos 6875957 to 6876813)
tgctccgtcaccaactcgatctattatttatcaaggttcaatttcattttgtttttctacttaatttatgataaacggttgcccactttttcttttcaatgtttaaaaagggtctcttttagcttaatttttgcattatttgttaggttttgttgttcccctcatctgagtttctcttaattatttctatttattttgtaaaagcttttgcttctagcttcagtttctgagtgtgctcctctttttttttggtgggcggcgttctggttgtttctagtccggaaattagtttttcttttcgagaaaaaaaaattgtatttttaaatgttatcatgctttgtttgcattgaatttggttaattggcagctagtagttgccaaagctcggacaaaatagagcccatgaatttgtttgattttgatgacttttctttaacatttattaactgatatgtttagctcattgttatttaatttaggtctgtaatagaaaaattgtccttattgtaatggattacttctcatcgaagcaaagccccctttttcctgattgggtggtagtgtttggtttttaattttcagccatgttgtagtttttctctggaaagtcagtagattgccatcctcaggaagaattgacgtacatttggcttccttagcattgtttttgttgattatggtgacttatttgttgaatttgacatcatcatggttagtgctggatatctcaaatattttcattcaacattgaatgttgagaatattttcttgtaataataatagtgttaaactgcttcaaatgtgtattaactgtaatttcggtactcttatatttgtcagaaactggtgtcatatac

SEQ ID NO: 86227 - DNA, 651 bp, Citrus clementina
  Intron number 1 from transcript clementine0.9_021112m (loc us clementine0.9_021112m.g) derived from phytozome v7.0 (c hr-ID scaffold_4; pos 1162230 to 1162880)
ctcgttccggtacgtcaacccaccttttttattgttattttttgtgattttttttttttaaaaatttgactctgtttgattcccgtgaaagcgcgggaagaaaataatattagacaatgcttgcaacgaaagtttgaaactttaagcaatacattatcaattttttttttaactgagaaaattaagttcaaaaggtcaattttttgttttgttttttagtcataaagtttttcttttccgggtgttattagaacttgaaattccattatattaggtattaatgtaatcagttatgaactgtgattagggagtggatagctgtgcttttttcttttcaagaggatgttttggtttcacgtttctggttttgatttatgcttttctcatgatttagctaattccccaatttaaaattgctgctattagtgcttgttacttgtaaggttccgttatatatatatataggcaatgtggtgattccgcaacagggagtgtggggtgggagacttttgaattatttaaagacaataggattttttttggatgtgcactgaattttcctttgttttgtcacgttctaaccatgtggtatttgtttctcccacatctggtaaagcaggaaaagctaaagcgaaggagatagagaacttt

SEQ ID NO: 86228 - DNA, 462 bp, Citrus clementina
  Intron number 1 from transcript clementine0.9_028035m (loc us clementine0.9_028035m.g) derived from phytozome v7.0 (c hr-ID scaffold_31; pos 1286851 to 1287312)
tggcgtagaggccctcttggtcccaaggtgagctatcgattttccttactaataaaagataattaaacaaaaatgttcttttcaaagggcaaaattgtcagaataattttgcctaggcagaactcaggcaattttgaacaaaaacaagaacattagagggacaaaaaataattgtctttttatagatttacagatgttgctaatgatttcactttaaaaaaaaaaaaaaaccgtttctttgctcctttttgtcctgtttcttaattgaatgtcattccgcttaaaatactaatcaaattgttttgtgttaaacttagaattgatacattaaaattttcatccaaattgttaattaaacttaaaactgagattatatttctatatcaaattactttttcattacagcttgaaataatcttgttttaattatttgtatgtcttcctttttgcagactttgtgca

SEQ ID NO: 86229 - DNA, 907 bp, Citrus clementina
  Intron number 3 from transcript clementine0.9_014479m (loc us clementine0.9_013461m.g) derived from phytozome v7.0 (c hr-ID scaffold_2; pos 6154660 to 6155566 reverse strand)
aatttcatatcagccactgtatgtatcctctactttatgatcttttgtttacctgcctgtaattactgcattgcttcaacatactcatcattagtatctgaaacgcagttttgctctcctctaatttcgatttgttaatgaatttagaatgatgtgatttgaatatttatgtgaacccaaagcctataattgaaagcccaaaggtgcaatagttgcatctttgaaaaatgatgaattttaggcgcttttatcttgtgaatgtgcacatgcgttctgatgttacaatgtttgtaggtgatatcagatagaggatttgagctgctatcgacaacttttatattcagtgttcttgtaagatatactgttacatcttttgctacttgaatttatttttattttcttgcatatggttctgttttgcagtggttgaatgaacgaatctacttcttgcactttaaattaacaaacgtctcttctggttactttagaggcttgtagaaaaatggtttccacaaaaagtatttgaaataaaattttcacatccgtgctcatctgctttttagttgatcacagagtcaaacctttttgactaaccagattatctaatgcaatatagaactgtcactttctgctttcaaattacagggtttttcgttttttcagtaatatttgttttggtggtaaattgatttccatttcatacttcagtacaagctcaatattgtgggcacaaaattaagttctgattgcaattgtattggtcatatagctgagcaccgtactaatatcatcaatcacctccttagttgttagcgcccaatttattattggcttattaactcaaattattttctgatttgctcttccattttcccttctgcttcatgccaggtaacatcggcactct

SEQ ID NO: 86230 - DNA, 794 bp, Citrus clementina
  Intron number 1 from transcript clementine0.9_001179m (loc us clementine0.9_001182m.g) derived from phytozome v7.0 (c hr-ID scaffold_4; pos 6651088 to 6651881 reverse strand)
tctaattttcgttgcgtgaaataatttttgatcaggtaaatgttgaaatatttagcgcttcttctatgcttcagcttgtttgatcgatgtgtatggtgatttttgtgattgtttgttattaatttgtcttttttaatgttaaatttgctttgttgaatttaatcgactgtggggtatctataaatttatgtgagattgtgttactaagagaagctggcatctgggtatttcttgtcattactattgtgattgaatttgtgttggtgagaggaactggtgactgggatccgttggtttgtgttgagtgaactgtgtatttgagagaatttaggcaactgggtgccgatgattaggcactgggcaagtaggttttatgttacgttcattcaaataagtttgcattgaggtgctggtttcgaatcagttggtgtagtttagctgctatcgaattcttgaaacattaccctctcattgtttctgaacatataatatcctctgtttctagggttggatattaggacttttgccacaagcttttgctggatgttttctttgtaaagttgtcattatggcacaagtttcattgttaatgtgcagctatgcttatccctttttctgttgactatttaataaatatattgttcaagcttttcatcttttactttcttggttaataactgtgatgcatgagtcgtatgcagtatttagtatctgattagggatcagatttacttgtactccctcattattccattttctttgtgttatgttttaatactattattttagcgtgg

SEQ ID NO: 86231 - DNA, 540 bp, Citrus clementina
  Intron number 1 from transcript clementine0.9_003251m (loc us clementine0.9_003251m.g) derived from phytozome v7.0 (c hr-ID scaffold_3; pos 4149298 to 4149837 reverse strand)
tggggaccttggcttattgcattccaaaaattaaggtatgaacaacatcgcaattcttatgcttttcggtttcatatacctgctgaatcttcagaatttcaaaatttgtatatttaaattgaatggtggggattttgacgcccaagatctattggagatatccttttcatgtacattgtggggtttaaagactcgctgatgatcaggttccaaggatatgtagtatgaacacatctaggttttatatttgatcacatctagattttaaggaacggtttctaatttggtagacatctttattgtctgatattatatgtgaatggtttttgatttatatgtgttcatagagactctggtttgatgtttcatctggtcattgtttgcggttgtttcacttgaaggaatgatcctttttttatctgcatatataaattgcatcatacaatcattattgtcaatttctttgtaaattcacctctattttgattttttttgctaagtttagccaggaaatctcctgaaatatcgtggtctgcattt

SEQ ID NO: 86232 - DNA, 859 bp, Citrus clementina
  Intron number 1 from transcript clementine0.9_018516m (loc us clementine0.9_018516m.g) derived from phytozome v7.0 (c hr-ID scaffold_4; pos 1949580 to 1950438)
agcagttttattccgagcacttgtcttctgttcaggtactttattactataactctacatatgtttatacataatttattaaaaattttggttgatttgtcccttctttagatatatatttttttattcttaagaaacaattttgggtgcttgttgattagggattttgctgaactttttttcatgcatgtggttctttgggctcggtgttttatctggttttgtaattaaaacttggttttgtcttgagtgttggagatctaatttttacattaattaattaagttattcagttttggatgcagtttgtaaaaattttgatctgggttttcaatatctgttcaaattatggttgtcaaggaagtacactaattagtggcagttccttctgcagttgttgttgggatttttttttccaccatgattttgttgaattattgtctattgaaatcatattatcaattagtttacagatgttgacttatgacctagaaaccaccataacgcttgctaattgggacccaagttcctgaagtgatactaatcaaaagtttgtttttggtttgcaaaattacacctttgctgacggctccctttttgttatagtcttcttgtatgttcaaacatctgttgattgtgggtgatactgtagagggactcagggaccacattaaattattgcgatgaaaaacaaactgttgtgattttactttgctacaaaatataaatcattgtctctttatgccttgaatttgtgtttctgctgctttattctctcaactttgttttcttcaatatgttgattgtggcttacctttcgtttactctgatatgcagtctggttgctgcaagccatcta

SEQ ID NO: 86233 - DNA, 441 bp, Citrus clementina; identical to SEQ ID NO: 79408
  Intron number 1 from transcript clementine0.9_035174m (loc us clementine0.9_035174m.g) derived from phytozome v7.0 (c hr-ID scaffold_4; pos 2064577 to 2065017 reverse strand)

SEQ ID NO: 86234 - DNA, 511 bp, Citrus clementina
  Intron number 1 from transcript clementine0.9_030198m (loc us clementine0.9_030198m.g) derived from phytozome v7.0 (c hr-ID scaffold_10; pos 5813967 to 5814477)
catttttggcagaggcggagccagcatcggaccaggtggggcacatgccccagctggctttcaaaattttttttgatggttttcttaaaaaaatatattttatttattatttatcaaaatgccccacgtaaattttaaaactctgaaagtgcccacataattttaaaaatatttcacgttgcccctaacttaaatgtctaattctaaataatttgattaactattataatatcataaaaatcaataaagacaaatgagagaacctttatcaaatgaaattcattaaaaaattaattaaaataagtaaaatcttagctttccgctttctctcgtctcttccatagttccatgaaataaagtgtggtgggtggactccatagcagattaggcgatttgcagtgctccctgatcgtcaccatgcgcgtgatgttttttaattctaattttttatttcattattttttctattttaaaattgctaattttattatatagcttaaatttgaagttc

SEQ ID NO: 86235 - DNA, 602 bp, Citrus clementina; identical to SEQ ID NO: 79903
  Intron number 1 from transcript clementine0.9_013989m (loc us clementine0.9_010971m.g) derived from phytozome v7.0 (c hr-ID scaffold_7; pos 5275073 to 5275674 reverse strand)

SEQ ID NO: 86236 - DNA, 687 bp, Citrus clementina
  Intron number 3 from transcript clementine0.9_024169m (loc us clementine0.9_024169m.g) derived from phytozome v7.0 (c hr-ID scaffold_3; pos 845526 to 846212 reverse strand)
agataagggagtccctcaaggtataatcaattgcttggtgcactttctagactacataaattatgctacagtttttgcctctttggttggtcgtgaatttatagttcatgaaacgacctgccctggattgcggaaggatcatccttatatacaattcacaacttaaaacacggcggaagcgttaaaactaataaactttagaatctctatatctctgtgttctctggccaaagacagattggcaatctttccactagtggacaagctagggtgcttcgcatgttcaagtgtcagggaatagagcagattatttgggtggtggagcctaagtcctgttgttctattggttagactataaaactcatagtttagtgttttggatatttgatcgtcatcttctttccttcttgccacttctccctagactgcattcacaagtatacttattgtcatagcaaggtttatttagcagcgttatcatgatctagagatatcaagcttccgaaattgggccctgaggatgcttgtgaagtttggtttgtttgatttatttgctacataatttcacgatatctaaaaaaaaaaaaataataaaataaataaaagattgcatatcgtatggcatcctttcggctgatgatattttaccaatgatcttgtatatttttcccgcctttttgcagcata

SEQ ID NO: 86237 - DNA, 573 bp, Citrus clementina
  Intron number 1 from transcript clementine0.9_015026m (loc us clementine0.9_015026m.g) derived from phytozome v7.0 (c hr-ID scaffold_7; pos 6091923 to 6092495 reverse strand)
acttcaattctgaattgggtactaaagtaagtgaaattttgttcctttctttttctttttcaattttggtgtttagtctttttttaaagatttgatatgataatgtgggttatgatagtgtatctgttcatgcgtatgaggctaaattgggaattatttaggttttgttcttaaagtttgatttttattttttatttttttttttggtttaaaggacaaaacttttgatatttatgttggtaaatgagcttgaattgggaataatgatgtgaattgtgcggaattaggtattgggtaagtttgttgattcattgctctttagggacattggggtgtttcgcctttatcttttatccaatggtgaatgcaacttgagccattttcttgggatattgataatactttggttttccaaattttgaacttacaaggaagacgggctgtcataaaatggttgatagtactgagatctttatctaatcataattcgctaaaatgcataacctttacctgattgttttttatattattatttcaggtaaagggaacagttttttgtacagataaccgtgg

SEQ ID NO: 86238 - DNA, 507 bp, Citrus clementina
  Intron number 1 from transcript clementine0.9_015667m (loc us clementine0.9_015667m.g) derived from phytozome v7.0 (c hr-ID scaffold_4; pos 3023873 to 3024379 reverse strand)
aatatcaaacgatccaaacgcagcttctgtgacaggttcttcttaatcatatatcgagtttttggtccttgtgtttgcttgtttttattgcatggctataaatacttcttgtattaaaatgccgctgccttttacttaattttctcagcaaccaaatgcagtgtaagctttgtttttagtattaacatttcattaaatgctaatatgatccggggtagctgcgttctattatatagagaaatgggtttctgttgaaacttgtaaagaagtgacccttatccatttgatatgtaacacatggttcatgttcgatcaaatgtttcaaataattttctctatgactgacactcgtgtgttgcgtgccaattgcttgatgaaatggtccagttagttaatgggaattaattaacaagaggcatggatttgagcttttaacgcatgtatttgttactcttttattaccaacttgcaggataatcgaaaatttgatatcgtttagtgctgaat

SEQ ID NO: 86239 - DNA, 374 bp, Citrus clementina
  Intron number 1 from transcript clementine0.9_023192m (loc us clementine0.9_023192m.g) derived from phytozome v7.0 (c hr-ID scaffold_2; pos 7148587 to 7148960)
ccagattcgtgttgttcctaattttcccaaaccaggtttttttttcttttccctatttcttttgcttcgtttgtttgatttgtgggaaaataaaggacatgcagaaaatgaagtggaaagaaactacaggttgtcaatattagacttttcttttggaatcttagaattacaaaaagtgtccgctttctcaagttctataccaagtgcttaacttattaaaaaaatcattttttttaatacgaattcacacagtctcataaattcgcctcctccaagcaaagagtttctgtgtgcatatgtgtgtttttagttttagtttttgcataactctttttctatatatttgagttgttaatgaaaaaatggcaggtatc

SEQ ID NO: 86240 - DNA, 834 bp, Citrus clementina; identical to SEQ ID NO: 85491
  Intron number 1 from transcript clementine0.9_026449m (loc us clementine0.9_026427m.g) derived from phytozome v7.0 (c hr-ID scaffold_7; pos 4906925 to 4907758)

SEQ ID NO: 86241 - DNA, 805 bp, Citrus clementina
  Intron number 1 from transcript clementine0.9_030270m (loc us clementine0.9_030270m.g) derived from phytozome v7.0 (c hr-ID scaffold_2; pos 1826905 to 1827709 reverse strand)
aatttgtcttcttaccccggtaagtatgcatgacttttttactttgattattgactgtacaggttcaatttacggcgcactcgtttgtttattcaagcaatattcatattaataacaagttatatataatacaagaaaatcgaattaagggtatatttttaagggttatatctaaaaagttaaacaaatttaggataaaatgtcccacttttaattggtgagtgaactctttagtttgtaataataaatggccaaaatgaagaaagaaggacgatagaaacggcagtacatgctgccgttttatgcgtctttttctctttttcatttggcccacaataaatattaaaataataattaaaaataacattaaaaaaagagaagaaatctctctttgtacagacattatcccttacatttcttaataattattttaaactttttgcgggccataaagaagagtgagaatgacgcatgtaacagcaacacatgttgtcgtttctgtcgtccttctttcttttttttttgggccgtttaacagtttatactgccgtttctatcatcattcttttctctttatgactatttaatatcactctttcccaacgctatttagcggcactctttgccaggaagcatatgtttattaaatagcaaagaagcatatggttattaaatagtttagctgttctactttaaaaattgagcccatactttaaactttaaaggcagtaaaatatacatactgactaagacataaattgtttcccgtaagagggcaggggacgtagcattgccagaaggaaaa

SEQ ID NO: 86242 - DNA, 168 bp, Citrus clementina
  Intron number 1 from transcript clementine0.9_011324m (loc us clementine0.9_011324m.g) derived from phytozome v7.0 (c hr-ID scaffold_10; pos 4398172 to 4398339 reverse strand)
tccaacaaggctttcaagaacgtgctctccttcgcgtaagacatatgtacatgcatgaagaatcaaaatcactcatgcatggtctctttttctgtttgatttgttataattattgattagttcaattgcatttgtctaatgacctggtttggtttttgcaggttgagc

SEQ ID NO: 86243 - DNA, 1008 bp, Citrus clementina
  Intron number 1 from transcript clementine0.9_019612m (loc us clementine0.9_019612m.g) derived from phytozome v7.0 (c hr-ID scaffold_2; pos 4509276 to 4510283 reverse strand)
tatctctgcgtcagcacgtaaatcggtaattttcattcttcagatttaatttttgttgaattttgaacaaatttcattttccccattataaattattctccttttcttgcacgagtaacaacttttcgatctttttgatgcgtattactgctcaagtaatttgttgaagtagctcaaatttaatattttctttacgcacgcttcgtcatttgataggttacaggtaccactgaatgtaattcgtaatatttagttgataataaccttggtgatattggtttcttgatctaatgaatttgatagacatagaactgtctagttaattctccacttcaactgcacaccaaaacaataattaccatttaattttatgtcttatttatcttcaaaatgcacaatgcacctacttaaattcttctagacgtacatatctcataggtgtggagtctactgtatctattctgccactcgagctaatgtccaacctatctgtaattgattttcatgtttttgtgatttacataagtaccataaacaatgcttaaaaggtggttttgaatcctttgagaatgataacgaaagtgaattctttaattagtttggaggttgtgccgaattagcatgtaattcatctgaacactagtcttcaacattctaaaatgtctaatcctgtgatttttgtttttttggttctttgggcctgtagtctagtgggaaattgttctagtgggattggaatagtttgctggtttgaatcttttatagtgaccagtgatatagctagtaacatgtattcttagttggtgttcttcaaccacttagtaggattcattgatacagggtatctctgtgttgacatgacatgtatgcatatgaaattgctgtttagttgaagagcaacgtctttgttttaggttgtattttatttgtgattctagaggcatttctattgcagtatttaatgtttggagcctattgcctaatgtataacaagcaggtctataacta

SEQ ID NO: 86244 - DNA, 650 bp, Citrus clementina
  Intron number 1 from transcript clementine0.9_003521m (loc us clementine0.9_003521m.g) derived from phytozome v7.0 (c hr-ID scaffold_7; pos 4938989 to 4939638 reverse strand)
catcaatcctcctgtcaattctctctcttttggtaactttttttttctattatattttagatcttaaacatttttattttcttttttcccttatatttttggttggctgggttgtttcatttgttttgtgtttctttttgtatatttatatacccatttggcgtaatagctttgatttgctgtttttgtctcacgggttattattgatgttgttgtaaattgttctaaaatgttaaacgattcattttgcttgaaaaaatttgagtgcagtgtggagccttgttatgcttgttaatgatttcacttgagaatagcaacaatttgggtggaggctgaaattctccactttggtctttgatttagttcagaaatagacaaaaaaaaaaaaaatcaaatcgtagttcaggagattgattatagattagaattggatcccatttcaacgttaaattttgtagctgctagccccttgaatcatctggacagtttttttcttcaaaaatcattgttgttaatattttttaaaaagaacattgtattagtaataattgtgataaattgtgtaactcttctctctctctctctctctctctctatatatatatatatattcagtgttattcagtttgaaagagaactacgagcaagcc

SEQ ID NO: 86245 - DNA, 683 bp, Citrus clementina
  Intron number 3 from transcript clementine0.9_010687m (loc us clementine0.9_010687m.g) derived from phytozome v7.0 (c hr-ID scaffold_119; pos 180546 to 181228 reverse strand)
cgaaattcttacgtttgcagtttgtgcctcttgaggtatttactctctttcaagataaaattccttgtagttcttcaaatatttctaggtgaagcactggtttaactgtaattttataataatatatgtatatgttgctagaattatatcctattcaaggactagtgtgttaatagtctggcaatttggtaatttagtaaatatttgttcttaatatacaagggaggtctttcattttatgtttttggttttgagtatgtatagggctgaattccttattaaaactgttcagatgtttctcttagttcatttgtttaaatattattcttttctgtcctgctttctcccccactcccccccccccctctcttggtttcagtaaaactttcatgtgcattttacaacctcattacaagtagtggctgaatttctagactcatttacttcaaattacgaagagaaaataataaatgcttccattttgcaattgttttaatcccatatttataggttattgctcatctgacaaattccgaagtttttttcacagcttttctgaaaactactgttcatcttttttatttttttaactgggtttactgagaattactgttaacattttttattcttctttccatatttattcagctgccgcagcagcaaaattcatttgactgtggcct

SEQ ID NO: 86246 - DNA, 966 bp, Citrus clementina
  Intron number 1 from transcript clementine0.9_022279m (loc us clementine0.9_022279m.g) derived from phytozome v7.0 (c hr-ID scaffold_7; pos 4022234 to 4023199)
cggtttcctaattacagatttcacttgtatttcaagtttgcttagttatcttttgctgtttttctaatgagtaacgtcccgttctttgtttttttttttttttaaatttttttttattcattccaaaaaaaaggaaagagtataaatatagaagcaggtcggaagctaacttcaattgaatataattgtttgcgggtgctgatttgattgactctttttggtaaattttgtccttgataatcggcacttaatatgtttgatgaaaaacctgaaagaactgccgaggtcaatgccaaccaacgagtcttcattaaattcataagatagatttaattgtgccaagtggttactcaaagtaaaacactggattcacgaataagagaaaagacaaaaactagagttattggagaaattgaaccgaggctttttttcttgctatatttacattttctttaagttcagttataacctaaggtctattcaaattaaccataattacttcctattgcctgatgtgatattcaatggtcgtgacaggaatgatcttgctcccaacattaattccaatctaagcaatgtttgttctattaaggttcagtgctaccttcgaggttgttgtgcaggacggggacttgagctgttttgaaccatccaagtactcctctctatgaccacggccatccttgctgattttctccaggtcagttgtcttacttttccgggcaattatagctgtaacttgttgttagactctcttgttttaagaacaatttacaatatgaaatgaaaatcttagttgcgtcataagtaatcatctacatgccaatgcatacctatgtatctttttgtgatggggtagtacatgttgctagtaatgtataccacatataattatgttcctctgcaattaattatgtgcattattatgcagattttaactgagggccaagtactactgcaattgaa

SEQ ID NO: 86247 - DNA, 683 bp, Citrus clementina
  Intron number 1 from transcript clementine0.9_006769m (loc us clementine0.9_006769m.g) derived from phytozome v7.0 (c hr-ID scaffold_7; pos 4361013 to 4361695 reverse strand)
attcgggtcctttatcttctgccagacccaaatcggtaattttcttcttcttttccttactttttatttaaataaaaaaattaattctagcaatactttgcagagcttgatgtgtgtatatatatatatatatatatatctgagaaaagtatatcaaatttcttttggtcctatgaatttaattttgtttgattttggtgcttgcttgtgtttttaatagaaaattttcagatgtgtctcctgtatggcgaatatatgttttatgtataagtgggtaccgtaacccaaatttattaacctctacttcggtttagcttaatcttgaggtaactccaggttccatgctttataaatcatattattttagctagtattggattgggttacattgatctttaaccaaaatcgtcagtaaacatgtcctaaagtaaaattaattattatgaataagacataaaacagaaattacaattacagttgtgatgacctcagactctgaactcataaaaaactgattatcgcttgttggaagttatgcaaacaataggggaacgaatcaacgaaaggattgcaatatataaaacgagtaatttattcgtcaaattctgttaaactcttaggacactctttcatagattctgtttgattgattttaacagtagttcttgtgtcgttgcagcttg

SEQ ID NO: 86248 - DNA, 1066 bp, Citrus clementina
  Intron number 1 from transcript clementine0.9_012051m (loc us clementine0.9_012051m.g) derived from phytozome v7.0 (c hr-ID scaffold_7; pos 6121051 to 6122116 reverse strand)
actcagtttcctctgaaatctcctgttttgaatcggtaattaattttcatttttcttgaaaagttttgagtttttgcacatgggtatcgttgattttagttttttatgaagtttcttgatttatttgttattgagtatttgggaattgtatgctagggaaattgattgatagtggttcccccccccctttttttttttaactaggttagggttatgtgtgtaaaattcaatctttgtgactgatttttttttttttttttggcttgagctttattaatgacttagggatttgccgcttgtgaatttttgtatttttattttctacctattatttactgggcacgagattttaaatattgtatatgttgatttacttgcatagacctcctaccttttgtgggttttaagaacttgacaagctgttttattagttcaaaacttggtagtttatacggtttcttctatgaagcaatcaattgaagcatagttgttagtctgaaaatatttgtgtgtaactgcctcttatttgattcaagtggcatctagctccattaggattgaaatgatactcttattaccgtagatagtctcattcttttctaactttggttaagttgtgttatcattgatgctggcaacattagaaagagaatcctttatatctgagatggctgagaagctaccgtttgaacttggggaaggaatcacggaaattgtggacgtcacatgacgaagttatcttcttgaacatagttttttgaaaggaaaattctctgctaaagaatcttttttcatcctaacaaatcatgtgatgctagaatgactgagaaatgatgtgttatggttgatcatattaaattgtaatgtgttggtcaagcaattggagtttgcaatttcacgagtctttgtattcttccttgtttacagcgcagcttgttggtccttttttttttttttttcaagccttgataattatgtggttttgagaaccttgagatattgactaatccctcttcctttctggtttataggttgtcagttgttcagagaccgttaaaagtactgt

SEQ ID NO: 86249 - DNA, 616 bp, Citrus clementina
  Intron number 1 from transcript clementine0.9_003033m (loc us clementine0.9_003033m.g) derived from phytozome v7.0 (c hr-ID scaffold_4; pos 1102827 to 1103442)
aaaatcccggcattgtacgtttctttgagttctttaaatgatattttgcattgaattgtgtattttttgtccttgaataagatttccaatgatcagaatggacagtaagatgaaaatgagaacaatgcattattttatgactagtgtctgaaaaaaaaacaaaattacattgggtgaatgtggttgtgtgcttattcttctgagatattttttaacttttatagttatgatgttatatgtatggtccgtttgaggctcaaggcaatataatagtggtttctttacgtgcaacttgatgaaattatttgatcctgtatgatagaacatgttgcatatgattttattgtgttgtgctgaatgcttttttcttgccatctctggttcatgtatgttatagagcaattgggttttactcacataacatgatttttgcttggcaattttgttttgtaccgtacggaagtatagctttccttgattttatttattgagttatgtggattacacttaaaataagcagtttagagaatttccacaattgcttgtatttattatgctctttttttttttaaatggtccagaaacccattaggaggggtgtcatagggcccacact

SEQ ID NO: 86250 - DNA, 537 bp, Citrus clementina
  Intron number 1 from transcript clementine0.9_009915m (loc us clementine0.9_009915m.g) derived from phytozome v7.0 (c hr-ID scaffold_85; pos 182556 to 183092 reverse strand)
ctgctctgcaattgccagtctgttctcttatcctttcctttattttcttctccttttagcgttttcgttttgcccatcacctgtttgatataatgtgccttctttggttggtttagtcgtgtttttttgtttcttgcgtattttgcaattgctagccccattttgttacatcttcatagagctcgctgtcaaattttgttgctgtataaccaaaatgttacccacattttttttccctttttatgctctaggacttttaatccatgcttgttgttgaatggattaagtgagtgggtatttgctacatattacttacccacaaaacgctttagctgctctgcttttgcaactaagcaaaagcataacagttatcaattatcattaccctaacatttcaatttgaacctcatttcacaaaaattgtttcatactatgaggtttttaaattgaatccaaatttgcaaattattgaagtttgatttctaacttgaagccagcgacccgtgtaattttaataggtggccgagaactttgaac

SEQ ID NO: 86251 - DNA, 737 bp, Citrus clementina
  Intron number 2 from transcript clementine0.9_033458m (loc us clementine0.9_033458m.g) derived from phytozome v7.0 (c hr-ID scaffold_2; pos 5674694 to 5675430)
cctagtgatccttatctaagggagcatctccattggtaaactctcactcataaatgttatgtctaatgcattttatggtaattttgtcactaaaaccttttaaagatccacataagtaattttgtcacgaaaaccttgtaaagatctacataaaaaatttaactctttttttttttttttgaaagataaaatgaacattgttgcttagcttgcagattcaacccaatgaacagatattgctcatacccaaacattacgtacttgcaaacatatggacccatgtagctagtttcagcatatctatcattttgattattttcatcttcaattacaaaataattgtgcaatgttatttgtgatcagctggatgcatccataatgtttgtgtctaaaacaaggcctatagttattctataagatctgaacttgtgttgaacaaaaaatacaagatggtgattggtgactatcgaaaaagaaaaagaaataattaaatcttaatcatatattgtcataaatgcatatgttacaaatgatccaaaaaaaatccgacacaactaactaaaccagcaagagatgtattttgttagagcaaaattaatgtacaaaagcaaaacctaattttgaaatttgaaagatatacaaaaacatataaatagtgaaaactagctaacagaagggtctgatgtgaactatataactattttacaggattgtgacagacattccaggaacaacag

SEQ ID NO: 86252 - DNA, 611 bp, Citrus clementina
  Intron number 1 from transcript clementine0.9_022884m (loc us clementine0.9_022455m.g) derived from phytozome v7.0 (c hr-ID scaffold_2; pos 4466776 to 4467386 reverse strand)
gcgcttcgttttgccagccttaagtaccagttcaggtagtgtaacccccaagtaccagttcaggtagtgtaactaccaaacaaaaaataaatagataaataactagaatattaatcgctagaagaaggccttgaacctacgaccttgtggttaacagccacacgctctaaccaactgagctactccagcgagttcgagtaattctttaatgtttttttttgtatgatagaatcgttggctattggctacaccgatttgcttaattaacttgtaacatgctccaaaatgttctttaattccatgaaaatcatttggttttattaacagttctccggaatggatgagtggtagacagtgcactaatcaccatagttagacagtgttgtccagtcctcaaacccacatttttgaaatgtgcattaaatggtaaatgaatgtctgcatcacatgagatcaaaatttgttagtatgctatagctttcagtatgtgtttgctagttcaaatcataaaatttgcattagatctctaaagcggttttgatttgatagcattttatgcaacatcttcgatggtagaatctgtgaggaaatcccaagaagaaaattcagcg

SEQ ID NO: 86253 - DNA, 559 bp, Citrus clementina
  Intron number 1 from transcript clementine0.9_008276m (loc us clementine0.9_008276m.g) derived from phytozome v7.0 (c hr-ID scaffold_4; pos 1003336 to 1003894 reverse strand)
tttatactggttgccattctacataaggcacacaggtacttgtttctacttctaatattaaatgtatgcttgcaaggtgaatttcaaagttgcttgttggtatctgttgagtgacattttgtttgatgcatgagttagtgtggcaatatatcaacttgattgggccattgtagagagtctctcactggcacaagtgatggtgtaacttttgaactttgtgaaactgatgttatacaattagttgggaccttggtcgaggttcagttgcagcgccgtagataatggatctggatattgaaactgttttctttacctggcatctaatattattgggaattagtgtcattcgctaaaattgtcgtggtaatgcttcggctttcttttgattgctccatcatatatgatgcatttatctcttatattgctttccttactgaagaacattttgtttgtttggaacttgttagaaagctatctgattatttttagtggtgaatattcattgaactcttgatgaaatgcagctgttgctggtgtgcatttgtcacacaaaactgct

SEQ ID NO: 86254 - DNA, 677 bp, Citrus clementina
  Intron number 1 from transcript clementine0.9_010963m (loc us clementine0.9_010993m.g) derived from phytozome v7.0 (c hr-ID scaffold_7; pos 5902869 to 5903545)
ctgccggggaatcgtctctgttaaatttttgcacggtaagacattttttttcaatctcttttgcgtatcctctcatttggttacatgaaaagtaagttagtggcttgtttgatccgctagacctagaattacatagaaatgatatatctctagaatataattgattttgagctttaagcatatgtttgtatgcgggtcttttgacttctcttgctccttgctcgtgaaacatgttgggtgtatttatatcccaatcaaattgatctgcgttttcagcacttttttttatggtttttgatttgaataacaaagctcgtgttctttacaagttatttttatgtactactgcttctagtaggtgttattgtattgaagttgaaccaagctccagcttctaggttccttattttttgttcactttataaacaaagaaattttatatattttttcagattctgtatttgtgattgtcatcttgcagtgaagtaacgcgaagccttgcttgtcggttctttgctttttttttggggggtgggggggggggggggggggaatggggtgggcggtgttactcaaacagcctatggcctattattgagttttactgaggtattgtcaacatggttagttgttgtggagcagggcagattgaacttgaaggtggatctgagttgcaa

SEQ ID NO: 86255 - DNA, 315 bp, Citrus clementina
  Intron number 3 from transcript clementine0.9_017334m (loc us clementine0.9_017334m.g) derived from phytozome v7.0 (c hr-ID scaffold_7; pos 4475565 to 4475879 reverse strand)
ctgttccattatctcctaggaggtgtcttggacaggtatgattatctctctctttttttttcgggtgtgtttatttgtatcattgcattcatagtcctcctttgaaaaatgaggttattaaaatatctttatgaacttttttcaccagaactttctgaaattttgtcacaaagctttggtttactgaatactaaaaccaaatgggtctatctgtttttaattcttcaaacaggggaggtgtatgatagcattccttagttatgtctattatttttctttctcataagttccgtttaactttttgatcctttcaga

SEQ ID NO: 86256 - DNA, 242 bp, Citrus clementina
  Intron number 1 from transcript clementine0.9_027852m (loc us clementine0.9_027852m.g) derived from phytozome v7.0 (c hr-ID scaffold_14; pos 610731 to 610972)
aggaatttcagggtattggcgtcaccattattgaggttacttcattactcaattatctcgatctcgtttggttttgtttcttctttttttttcttcttttttccccctttaaatgcacgcgtgaaattcgaacctcagccctcttatacttctttttatgagattaattttgtgttgatctaattggaacccttcgatattatttataataatactgttgaaattaaaacagggagagctag

SEQ ID NO: 86257 - DNA, 685 bp, Citrus clementina
  Intron number 1 from transcript clementine0.9_007627m (loc us clementine0.9_007627m.g) derived from phytozome v7.0 (c hr-ID scaffold_2; pos 6058930 to 6059614)
aagtctctaggtatacagtgctctaattttattgctttgttatttatttatttttctttaggcttctcccttttaacaaattcatgccctaatactcaatttttgtcgttcctttaatttgttagattatttgtcacttcttttttgagttcttttcttgttactagtgaaaatgcatgactcatatattatcaatactgtgtttgtcgatggctttgtttcctggttttggggctaggacttaaaagaaagtgactacaccatctattaataagttcactttcaggacccatgtgttaacttcacccttttccggtttaccagaatggcttatctctcttctcttacatagttcaagtactgactcgttttcccctttgaaaatgtgtacccttcatttttattgccaatttttctaatttttgccaaaaagatgacagtagctggccgtttgatgattgagtaccaatctgctagttctagcttagccatccgtatctacagtcccctcaaaactctctctctctctctctctctctctctctttttggttttttttttttcaagttttgttttgttttccacttccatctacggttatcattttctagctctagattgtcatctcgtttcccttttgtgtcgattatttttaatttttttaacttttttttttataaggata

SEQ ID NO: 86258 - DNA, 204 bp, Citrus clementina
  Intron number 4 from transcript clementine0.9_019992m (loc us clementine0.9_016239m.g) derived from phytozome v7.0 (c hr-ID scaffold_7; pos 196383 to 196586 reverse strand)
cattctgtaaatccaaaggagttcacctgtctgtaagttggcaattcttgatgatcttcttctttttattttttttttcttttaacattttcttgtttattttgattgggaaaattatatttactttgatatgttagagagagattaacttcttctacattttgctcagggatattccccattgggttctcccggcacaaggtg

SEQ ID NO: 86259 - DNA, 488 bp, Citrus clementina
  Intron number 2 from transcript clementine0.9_000188m (loc us clementine0.9_000187m.g) derived from phytozome v7.0 (c hr-ID scaffold_3; pos 4049414 to 4049901)
tcttttccattaagttataataaattagtggagaggtatatatgcgttttcttttatttcaatttcagtgaaagatcagtctggaaacttatggtaatatgctcctgattttctctatcatttattggattgtctggcatcatgcgatcttctagatccaaaatatttcactgattcaaagtggagcagcagacatgttattttgggaagtaatttaaaagattttccttaaaataaatccaatgagtaattgatctggtgacaaatcttaaagtcggagttggtgagtcacttttcaagtctgaggtgttgctttacttaagtgataacttgagtgagattcatgctttttcagagtctattcagactacaatgcaaattttgtttgggtttgtgctttcttttcttcatttttgagtttatttcatgttgtttcttgtaatttattgatttcccatttttataaatctcaggtatcctcacattga

SEQ ID NO: 86260 - DNA, 733 bp, Citrus clementina
  Intron number 3 from transcript clementine0.9_000188m (loc us clementine0.9_000187m.g) derived from phytozome v7.0 (c hr-ID scaffold_3; pos 4050007 to 4050739)
gttacttggatctggctccttttcacttctggaatgtaagtgatatgtcataatgatttgcttcagtcttatgggagtttcttttctttttcttttttttttaaattttgattcttccataaagggttgtaaatcttggaccaaagttaccaaagttgacttgcatcagaccttgtggttgcatttggacatgcttgcttaatgtgtcctccactgctctttctttttctctctgtatcttagtaaacaattattgtaattatgatattagaaatgacctaaacaatggtttggatctacgataccaatttgttccaaattcctaatttgttgagagcgagagtaccccaagagcatcaatactttattacccttatagctgtattatagtttctaaatggactttattttagctccagatgttacgctcttttagcgaagaaagttgataataacagaaaatcctgagagcacaatttattctttcatctcgttgtagctaaatatcggtaaatgaaagaaaatgggaaaaggtataagcttatcacaaaggacccccaaatgactgtacttgggctgatgcatcatatggttttcataacttcccttgcgcttataatataaaaccttttctgcctttatgggtgtttattatgagactgttcctccttttctgcttttataggtgtttgcctaatccattttccattctgttgttgcaggtgatagaagt

SEQ ID NO: 86261 - DNA, 890 bp, Citrus clementina
  Intron number 3 from transcript clementine0.9_023522m (loc us clementine0.9_023522m.g) derived from phytozome v7.0 (c hr-ID scaffold_4; pos 3873604 to 3874493)
tctctttgctcttcctcaatctcaaaaggaagcaggtaaagctccttcaatccatttctgctttcatgatcacattgtgtgttaatatgcttacttgaagtgcccaaggatctctgaaactatttttccaagttgtatctccagttttgtgtttaattagtcacttctttcgttatgcgtcgggattattttgccggctttttacaattgcacaggacatcctttaatctctactagtaatacacttttaatattaaaacatttcatgttcccttttcctttttttttttttcaataagcttcatggtctgatacgagaaagacacatgtgctttgacaagtatgaggataataaaagtagatatctttgctgtgtcaacttccttctaattctaatacttttagaaggttattgcactgaaactggcacgcagccttagtgttctattgacatagttctgtttatgtcaataacatcacagcttgaagctttatctttgactttcattttcctttttcttaagatctctcataatatgatcagatgacataattccttaaattcttaataaaaagctgttgaggttaataactctatgaaaagtcccaatattagttcatgaaagctacaatactacaaatcatctttaattgctctctatgcaagaaatgacgctaagagttgctggatcagaaaatcatatcgaatgttgatgtttatgtgatcctttgatatgtttgctttgagtcttctgcacggtaagtggttgacatgtgatttttactggcgacattgactttgtggatcttgaatcttcatttcctgttttttgactttcgaattccaaaatgcagagctattcaggaattatctgaagcagataagagag

SEQ ID NO: 86262 - DNA, 386 bp, Citrus clementina
  Intron number 2 from transcript clementine0.9_014018m (loc us clementine0.9_014018m.g) derived from phytozome v7.0 (c hr-ID scaffold_7; pos 5793002 to 5793387)
gaggtggaattctaaatcaaactggcaagatcttcgtaaggattctgattcatttttctgaagaaacttaatgtgttttaagattcaaaagtttacaggctatcagatacctacaattagaaatctgccgaggttttgcttaaatagttctattgcggctaagtttgagtccacagcgggcccagatctgcctacaaacaaaaatttagaagaaatcgttgcccacaagtgtctttgttgcttacaagaagttgcacacattaattcttctctcctatctactatactacaaatataacagttagccattggccaattaaatgcattaaatctgtctaatatataaaatttatgtaattttgcatgtacagggtggccgaatcaac

SEQ ID NO: 86263 - DNA, 354 bp, Citrus clementina; identical to SEQ ID NO: 82036
  Intron number 1 from transcript clementine0.9_001303m (loc us clementine0.9_001303m.g) derived from phytozome v7.0 (c hr-ID scaffold_3; pos 4379225 to 4379578)

SEQ ID NO: 86264 - DNA, 570 bp, Citrus clementina
  Intron number 1 from transcript clementine0.9_024903m (loc us clementine0.9_022726m.g) derived from phytozome v7.0 (c hr-ID scaffold_2; pos 9217314 to 9217883)
caattgtaattgctctgcactctctgtatctctttttgtatcacatttctggtttttttccccttctttgaaaaatttcatgtgtgaaaaatttattgaagctacattggaatatgtttgtagtcgaaaatttaggccattaatgtacttatgtgaatcgtaactttgctatttcttatggtatattcagtttcctgtaatggggtctttttaaaaagcgagttgtaatcaaatagtggagcttgattgatcagggattatgaatgcttcctctaccaaaggatctttttgagagtgcttttggtagtgcctaaagcgcttttaagtagccaagagccattgtgtctattggtgttttcctagagatcttttgacattagaaagtgctttttgaacaaataatttattggtgtttttgcaagaagaacaattgacttgaaagtacttttttgcaaaatcactggcagcacaccttacagttaatgatcgcttgattgaataggaaggttggtgttgaaaagggaaattgcaattgattgaatggttgtttgctataggttaattcagcca

SEQ ID NO: 86265 - DNA, 504 bp, Citrus clementina
  Intron number 1 from transcript clementine0.9_024786m (loc us clementine0.9_024786m.g) derived from phytozome v7.0 (c hr-ID scaffold_14; pos 2803572 to 2804075)
gaagttgaagtaccctttatctctctctctatctctttatttatctattcacccatgcaggtttttggattttgattatgcaacttctctgatgtgcactcatattcttgtttcattttgatgcttgtaatttaatattttgtgatggaacgaatggcaattacaagagaaaagaaatggatttttttttttaatttaataagtagtctataagcaacccaattctctgcggcccatgtgagcatgtgagctgagttcgaatctaagacctgttatacttagtagttgaattaagttgctatggttagtttcattttcccatttttcttgtttaactgtgctgtgtctaaactatattgttctgacgttgaatatgatggatttagttctgaagctgatcaattattttagtggaaaaaatcactttcatttgggtctaggagatgattgtggatttatttgtttgtttctgtcttgcagggtttagtggattctcggtttaga

SEQ ID NO: 86266 - DNA, 988 bp, Citrus clementina
  Intron number 3 from transcript clementine0.9_024786m (loc us clementine0.9_024786m.g) derived from phytozome v7.0 (c hr-ID scaffold_14; pos 2804368 to 2805355)
aaaattaaaggaggaacattgtaatgtagttgtttgggtttgtagtcatgtacaaaccgacaaattgaattgttcttaaatatatatctaacaaatatagaatatacttaactacttgtttccaagaatctctctaatgaatttacgagtttcatcttttaagtttaataaatacagaatacggggaattgtttccttttacgaatcttttgggtcaacttctgtgtttgctgcacgtggcactgtggtaaaataagcagggacaaattaattggtgattttgtctttttcttttaatgacgatcatttaagtcgggtcaatgttgcaaagttgttgaaattgctactttagcttccagaggtgggaggatcatttggcttgtcgattcataagaatcagttatccaaggctaaatcctacatttcttttatctttgttatgcatacaacaacagtctatgatgcaaagggcatgctaacatcttgagtctagtctttttaaaattgagttaccattttcctgaataatcagagtcatttgtgtaatgaagtaatttgttttaagacactaatttcaatttatatgctttgattttgggagataacaatttgctatatttcaaaagaaattgcagtcctttttttctttttaaagctgatatattcggatccattctatggtaatttttctttaaacggatttagtaacatcgaaagggaagtacgaacaaaaatgttgtcaacaggacggattgtgtcaatgtcagaaaagagaaaattcagttaccttgttttgcttttgacttggtgtagcacgaataagttaactacataatttgttcctcaatatctctgttcttcatatgtgatacttatgcttctttgatcatcctattgttatagaggtggtttgatgcttgagcttactcatttttctccatctggtggtccagcattggtgctcatcaaattgcacttgcgtgtggtg

SEQ ID NO: 86267 - DNA, 154 bp, Citrus clementina
  Intron number 1 from transcript clementine0.9_034323m (loc us clementine0.9_034323m.g) derived from phytozome v7.0 (c hr-ID scaffold_2; pos 7341973 to 7342126 reverse strand)
tcgttcagtctctcgccgtcgtgatccttctcccagtttcttccccgttaagttattaattaaatgctcccgaaatatcccagtttctttcctggggatacaaatgtttgattttttttttcttaatgcatgtttggttctgcattaattgcag

SEQ ID NO: 86268 - DNA, 441 bp, Citrus clementina
  Intron number 3 from transcript clementine0.9_005075m (loc us clementine0.9_005075m.g) derived from phytozome v7.0 (c hr-ID scaffold_85; pos 372530 to 372970 reverse strand)
tgaggtaagtttaatagatgagtttctgcatattttgtgatccatgagtgtttgacttgacttttcaatcaaaggttcatgatgacaaatttttgattaggagcagtcgatttttatgaaatttaaattcatttgaatgagactagaatggtgtaacatgcatattcatcaaatacaacaatttgtccggtgaaaatggaaaaatttctgattttacatgtcgtttctaatatgattgcagaattttagtttttacatcaggttgagcttttctctgtatttctgaaagtttgttatgtacggtgttgattgaaaagcattcctaaggtgttgtatattattgctagttcttgtctaattttggtgcaaaaatttgaatcctttcttggtgttttcttgtggctagatctggattgcatcctttagatttggaggttggaa

SEQ ID NO: 86269 - DNA, 682 bp, Citrus clementina; identical to SEQ ID NO: 79239
  Intron number 2 from transcript clementine0.9_006706m (loc us clementine0.9_006706m.g) derived from phytozome v7.0 (c hr-ID scaffold_4; pos 6974419 to 6975100 reverse strand)

SEQ ID NO: 86270 - DNA, 714 bp, Citrus clementina
  Intron number 1 from transcript clementine0.9_019911m (loc us clementine0.9_019911m.g) derived from phytozome v7.0 (c hr-ID scaffold_7; pos 162126 to 162839 reverse strand)
ttgaatctgagattgattgcgcggagcaacccaccgtcagtgcttgctttcacttctttacattttttctctgcccatttacttctgttgtagtaattgtcaaatttttttcccctttctgggatcccagaaaaaggttccattttttaatgttctcttgaaatttctttgcttttaatgtgtttggtgttaattaacttctaagtcactgtataatatcagattactgatgtgtttctagaagctgtatttcaaattttatacgcggtagtctgagcatgtgaatttgatgaattgattagttgtttgaattgtagtatttgtgatgatttaattagtagttggcattaagaagagatgggcggtggtgccgctgtatgaagattacattggttcattgaatcatttgtaggaaatttttgatgtcttgaaatgtagaggtttattttttggtaaagttcattgaatcatttgatagtttgatcggatccaggtaaatttcttccaagttagtgcaacgaaatatgaaaatgcaaacagatgtttgtgctttccttttctttgtaactctcatttatatttgcgcgtgtgcaactcttttttatggtgggatgatgatcgttgtctctttctttaagtcatgttgctgatgaaatatactacctgttaccattttgatcttattttactctcgtcttctgataatacaggcag

SEQ ID NO: 86271 - DNA, 707 bp, Citrus clementina
  Intron number 2 from transcript clementine0.9_019171m (loc us clementine0.9_019171m.g) derived from phytozome v7.0 (c hr-ID scaffold_3; pos 9171883 to 9172589 reverse strand)
aacggtcccactgtaaggcccctttcaaaagatttcacctttacatttttgtgtatggatgcatgcatgcacgagttattacattttagatattttagttcatttttgtagagttattgtttgacatggaaacatgtttataaacttgtttaaaatttggtgaaaatagaagcatatataataacacattgatacatattgttgtgttttgtgaaagtgttgtgggttttttaattttaagtttctgtactttttttttttgttcggatatttctaatatactggcaagttatactgctctgcacaattgtatttttccctaattttcttatcaagtgatttgataattgatcttagactgttttatggatggcaagatgaattggatatggtattgccaaattaaatgtcatgttacttgggattaatttttttgcgtacaaggcaaaatggtattactcatactgtatatgtatatttgaatgcgtgttttgaaatgttggtgatctgttgaaaggggggaaaaaaaaacagtaagcagaacactaggtgtgggcatatgattattgatgtccatatattttattatatgtacacattgatttgtttacatattgacattagggttcctttaattttatttttaatttttaatttttttaatatggtgttaatttgttggttggttggactttgggatggaagca

SEQ ID NO: 86272 - DNA, 635 bp, Citrus clementina
  Intron number 3 from transcript clementine0.9_027259m (loc us clementine0.9_027256m.g) derived from phytozome v7.0 (c hr-ID scaffold_10; pos 2428980 to 2429614)
caatttccagcaattcttgaacatagaactgggtatgtcttatgccaatttaatttgttatgtccaattcatttggtatttcatatgagatgttacattggattttcttgcattcctttactccattcgattgatgaatgctgaagatatgtttgtatatctgtgaacctacatatgtcattatttgagaacttactacaaccgtcccttcggatggcctcccactttttgccctgagttcctctctggcattttctctgccaagctttttatcacttgggggcaatatactcccctgaattcgtgtagtaatagagggtaagcattggtgtttagttgctaaggcaatatcaggcctttggtcctttgacttacccctttttttccaaaaagaaaaatgaagtctttttgctttatttaacagaacttcattatgagttgtcaatcaaagatttcacgtagctatgttcagaaggggttaatgcttttatgagatatttacttagtttgctttagtatgtttgatttcttgatcaccccattgatttgctgaaatttggtggcaataggactaacaattataaaatgctaatctgacaggtttcgtggtttcttctggaaagcagctaggattg

SEQ ID NO: 86273 - DNA, 708 bp, Citrus clementina
  Intron number 4 from transcript clementine0.9_014071m (loc us clementine0.9_010925m.g) derived from phytozome v7.0 (c hr-ID scaffold_10; pos 1612713 to 1613420)
agaacttatttgaggtgtgttgactaatgaaagttagagctaattagatttgtcaaggatactggctggcagatattcattgttccagtgtaactcatagtcttgtcagaaaaatttgtgcttgaggacttgcattctttatgagtgaataaaaataatgtagtaccgatcaagtttagagtgtgtaaatttgttgtgagtagcaaaatccatgtgtagtcaaattctgagcttcgagtgaacaataccatgatggaagataaattttgctgtttgatgtatgggtcaacgtcaccaccatgtaaacattgtcatcgaacacagtctcaactttttcatatcatgaaactaatgatgtagacgaagtggggtgatcacagttgctgcagtggattccttccatattggttactccaacttgttttcttactgcttcattcttttggagctatttctcatgaaaattagtcctgtaattggactcttagccagatttcatgtgtttatgttggattcttgtgtgacctgatctgtttatttctgcattctttctttatacaatggtgtgggggactagtccaacctgtacaaatttcaagaagtgtgcttccatgtccaaaatttatttcgttgcttgggtgtgctagttatttctatcagtcagctgtagctggagactaacgccactgatttatgtttttcagtggt

SEQ ID NO: 86274 - DNA, 1027 bp, Citrus clementina
  Intron number 1 from transcript clementine0.9_006028m (loc us clementine0.9_006028m.g) derived from phytozome v7.0 (c hr-ID scaffold_4; pos 5137821 to 5138847 reverse strand)
acggcgactcagactcaatcgagtcacccgttctggtaacctttcaatctctttcgtgcccattagctgctgtattttgaattctttaccgtggaatctgggtaatgggtattttttttttgttattaaaatatgtttttaaaaaataaaaagtaagtatttatggggcttaattggtgcttgaagctggatgactgtattaattcagcaccttttgttttattctattttattgtgttgtgctgtggagtgtgctgtggagagaaggcgtgtagaatgattggaatgcgtgagtctaagatctttcatgttgatgagattttcgtttcaaatttaatagttgtgaagttatttacatcgagtgaccgtcatgtgtgtttgatgattttagctattgatggcttaatttatgatgtacaggtagttgggtcaagaaatgtagctcaatttaattatgtgtaattctttttttgtctttgtgacacactacgtgtttatctaaaactctcagaattctgtgttttagaagcatgtcgatgtcaattcaagtaaggtgcgcatgtgaattaattgaacttttagctttagcaagtttattggtgattctctctctcagaggtggctgggttttgtctaggctagtgatgaatggtttcatagtagtttttatcctaattagaactattttttggccttccttttgtgtgactagtatttgtgtttagcagctttaaatatgttgcttgtaaggcacagtctactcttttttttgggaaacatattctttataattattgctggtttattagactagtatcaattcaattttgcttgtatcattttcaaactctcgaaattatcgagttacgaagatgcagagtaattgactaattgcatagatggaaactgatgcaaaatgatgttgccatggaaataagttttaagtttaaacttttttttttgggtgggtaactaatcaaacttgcatcccattttccataaatttgtccaaaatttaggggaagcc

SEQ ID NO: 86275 - DNA, 766 bp, Citrus clementina
  Intron number 1 from transcript clementine0.9_006625m (loc us clementine0.9_006614m.g) derived from phytozome v7.0 (c hr-ID scaffold_3; pos 1997377 to 1998142)
taagaggcgaagagaagatatcaagaaggacaacggtcagtttttttttttaatttcttggaatttttttccaattttcctgtatggttactgtttgtttggctagatatttgtggataaagatagaaaggagggtggttttggccaattgaaagtttgcatctttgttttgcagctgtgagaaacctgaggaaagtgaatattgagatttgagatttgagctgtaatttgtttatcaaaatttgattttgttgtgcctgaaaaatgaggaggacgtaatgcagtctaaattttgagttttgttgtttggtctcgtaaaagctggtataattcatggaagcatataacccacagtgtccaatcaatgtcattttgaatgaagaattctagttgaagctttgatttgattttcttttgttctaaaatattgttggggcgggggatttgtgctgttcatcatataaagctgagttaatgtagcaaatactttgtggatgattggctgcaaaaaatgagttctcatatgttatattagcctattttctgttgtgggaaaaagatttaatctgcctacgagtctttttagggcttggaaaatgtgtaagaataaagattgtattacttttttattagtgaatgtttgagcctattcataagcatgggggcctttccttgcttccctggcatatgatatggtttgatgttgattggcatttacaactaattttcaggtttggatctctctgcttgccctgaggagcagatt

SEQ ID NO: 86276 - DNA, 338 bp, Citrus clementina
  Intron number 3 from transcript clementine0.9_006776m (loc us clementine0.9_006776m.g) derived from phytozome v7.0 (c hr-ID scaffold_4; pos 4666444 to 4666781 reverse strand)
gtttgttgatagtgtcaggaggagtaagattcagcgtgttattttaagttgtagattacaggatttgatatgggcgcaagttttcagaagataattaccttagttactgaactacagttgtgccctgccattgatgattcatgttcatattatactcattgtggaggggcatcattaagaatgggtgttcttcacatggttttcagagaattttctttttgctttcgtaatgtaaggagtcagaattttgtttcccgaattcttctaatgcagaaacaacttaatcgaattgttttgttgcagtgagattgagcgaatcactctacactgtcaagagt

SEQ ID NO: 86277 - DNA, 846 bp, Citrus clementina
  Intron number 2 from transcript clementine0.9_008497m (loc us clementine0.9_008497m.g) derived from phytozome v7.0 (c hr-ID scaffold_2; pos 3395488 to 3396333 reverse strand)
tggtctctttgtggaagagcattttccttcacaaggtgtctgtttatttatttgtaaccatttctatctttattcataaactagggaggcaaaagaaaaagtaattaacttagtgtttgttaacgccacttgtttggcttgtttcaattagtcaaaactaatgcagtgggagatgtgactaacagttaagttactagagtttcaaaatcgtgtgttaaaccggaggtgctttttctttttttaaaaaaatgctgcatttggctttggaattactcaattttataattagaattggaattggtgtatcaagacaatttatctgaatcttccaatgagtttctataaaatattgtgaagttttcttaccagaagaaactttagcttaagttctcttcaataaatattaggttaataatttgatctatcatgaaggcaatattttggctttgggaaaacattgataggttcatttctgttttcatgggttaaacatggtgaaatcctatctgtcccagcaaatatctttgacaacatctttcttttggagtcctattaatgtttgccagagtccacataaatttattgcttatacattagattgtatctttaaaagtgtctaataattgcattgaatacttgtgtatatgttttatgattatgttatgtatttatgatgtctcaaagtaaactttcaggttgtatttagaaggttagtcacttcttctcttgttacctctctatcctgtctgattattctgaagtggaccatcattctgaagtgaaccatcaactcacttttatctttatgcaggagtcaacctgcgttacccgagaaactcttcttct

SEQ ID NO: 86278 - DNA, 583 bp, Citrus clementina; identical to SEQ ID NO: 81556
  Intron number 1 from transcript clementine0.9_024449m (loc us clementine0.9_024449m.g) derived from phytozome v7.0 (c hr-ID scaffold_24; pos 3091192 to 3091774)

SEQ ID NO: 86279 - DNA, 1038 bp, Citrus clementina
  Intron number 1 from transcript clementine0.9_014375m (loc us clementine0.9_014375m.g) derived from phytozome v7.0 (c hr-ID scaffold_14; pos 1084895 to 1085932 reverse strand)
gccttaattcaggacaaggcctttctcgacagctggtttgtccactcaatcattttaatcctctgaatttttctttttttaagttagggtaaaactacatggggttataatacaatttctctttctacgccttcagatccaatcatgcatttcttccaagtcttaaatcataatcgacttcatactcaacttatttctaaattcaggtcatcgaaaaagaaaaacaaacgtgttcatataagtgagcgataaaatatagaaggttcactctcaaacttataaatcattattaaatatacttctagtcatatcaattcaagaacgggtaaactattgttggtggtgttttaattacttccagctacagaggatatgaggaaaaatgttttctttcggaggtatttttgtcttttaattatagaggacatgagggtaacatatatgaaaaagacaaatgtattttgttctattaaaagcattaattgagtagtttcttcagttctgatagaaatcctggaagaacaaaaatttcttaacttcatccgtagaatttcgctaaattaaaagattcacttggggtggtacgatcacttgcctggagagaattagaaataaaatcttttaggaaaataaaaataaaaacagaaggacctagctatatgtaaaagtactacaaactacatatctcctaatttgtgacgttgctaaaatttagcaacccacccgtatgataatattaccctgatttccatttctttgctcgttttcgtaaagatatatgtgacagttatgagttaagatataacataaaattttctatggcaatgaatcctctactcatcttatctgttaagggattttatgaaagtatgaaacgtatacatcgtcatatatataatatagatatatccctttactatttttgtttttatcaaccactaatcattgtatctaacaaagttaagccaaactcaaaatgatgattgattaactggtcatgtaggtccgaactgaaagaaactattattgaaggaggag

SEQ ID NO: 86280 - DNA, 978 bp, Citrus clementina
  Intron number 1 from transcript clementine0.9_014970m (loc us clementine0.9_014970m.g) derived from phytozome v7.0 (c hr-ID scaffold_2; pos 9139022 to 9139999 reverse strand)
gttgacgtcaaaggtgagaaattttaaagaacaaatactgagaaaatagcttctcaaaaaaaaaaaaaaattacagagaaaatagcaataataagattcagagtaggtttaataggtgagtttatacaggtgacagaatttgaaggtttttattaccatttctcaaactatggagagtggcgaattgctataatcagtataatttgagaatgaatgacaaacaataattaatcaatcaattatttttctattcagaatttaggaaaaaaaatattaggagtggataaaactcagattaatttttctataatatacctcggccaagtctctagggctcattcaaacgggggcggatttactataggaagtctccactaggaaaaaaaaatctttaataattaatttagttttcctaaaattctcaataaatttttttgaagcacccactaatttatagtcaagcctgcaatacatgttacacttaaattctcatactccaaatttttaaattcaagtaaaaaagatgggctttcaaactaaaatcaaacccataaatattaatattaatattaatttaatttttagacgggccacaaactcattaataatttttttattaatcttactttttccaattccaccactaatccagggcccatcaaaaattcctaacatctttttatttttattgtttacatagaaaaagacttatttaataacattgataacaaaattgtaatacaatgtatcaatatatgaatactagtaaaagacaattgtaaatatatattgtagtattataaatcttttaaatttatatctttattactttttgaatttttttatattaccgttgaataagccctcagtgaatcactatatatgctgtctccgcccctgttcaatcatatgtcgatttgtctgcattttccatctttgtttcgcttcttttcaggtagatttctaaatagagaatca

SEQ ID NO: 86281 - DNA, 868 bp, Citrus clementina
  Intron number 2 from transcript clementine0.9_033441m (loc us clementine0.9_033441m.g) derived from phytozome v7.0 (c hr-ID scaffold_24; pos 3669601 to 3670468)
cggccgctggctttctgccctgagttgcttaagaagtacttgcctcaaaatgagataaaatttatttagaataattcagaagatgatggagcagaagattgatgaagtttgttttgcttgggttatattaactagctaattgggttgtttcattttatggtgattgtgatctgtgtttaattattacctatcattttcttgatggtgggttctatacgtgtcttttgggacaattgatgtattaattagcgccgtggtttgtttaattcattacatgtagtttggtcactaattgtggcttaattataatactgtcacgacttgatgaattcgggaagctagtgagaattttttttttccctcctaatgtatcagaccaaattgtcaaaataatcgtacttgaagattaaccatcatgtccattagttgagataaaattaatttaaataaagtaacaagctcattttagccaaattttgactctgaatgtagatttattggcagtgaataatgtgctttgcccttgtagctgcctgagttcaagtaattaatacgagacccttgtttttaacaaaatattgataatttgcacttgcatacattcaaatcctcacattttattgaacttgtagcaaattaagtaataaattttgttctataataataccacctaattgaaaaattatgtagtgtttgttttcgaattttttttcacttgagacaatcacaagtcatttgatttatttaatctttttcaatataatataattgatttttattttaatcaatcatttatacatctctttcggtctaattattaaactaatttgcagattagtctccctaaaacgacgtcgtgctttgagac

SEQ ID NO: 86282 - DNA, 817 bp, Citrus clementina
  Intron number 1 from transcript clementine0.9_006861m (loc us clementine0.9_006861m.g) derived from phytozome v7.0 (c hr-ID scaffold_4; pos 2132640 to 2133456 reverse strand)
aacgccatctctaccagcacctccaaatttagcaggtatcacgtttgttaaatgcccttttgagttttccttttaatagggtatcaaaatttccttttttttttctttttttttggtatatctgatatgtgtaccttgttgtgtttgccatgtgaaaaaatacacttcctttgatatactagtgaaagaactggaattggagttaagtatctaagtagattgtagcgtgaatttcaatattgtcgagttcgactgatggaaaccttacttgttggtttagttagtgatagggaactgaaacttgggatgctgagcaatttgtggaacaaaatcagcctgtccttacaacaaaagtatgtgtcagttagattgtacgtgctttctaggtttgtgaaatagaagggctgaagtgcggaggagagaaactgagtgagaagatggggagatgctgaaatcatataggatcatgcaagtagttggaatgaatgcaaactaactattcatgttttttctttggaggctatccggagttgtgctaattttccacattattcgggcttgtttcagagtatttatctgtttgccaacataatgttttacaatgtccatttgaattgagacatctaggaaatcacacattgcatgtctactaaaatctatagtgctataatttgtgctgggttgttcaagatcagataaaaacttttcttatgaatattaagttttgtgcgcattgcatctggcaatatttatcccacgtgttgattcaaattccttctcagttgtgagggttcagtttttgatcccttgggtatca

SEQ ID NO: 86283 - DNA, 572 bp, Citrus clementina
  Intron number 3 from transcript clementine0.9_014125m (loc us clementine0.9_014125m.g) derived from phytozome v7.0 (c hr-ID scaffold_4; pos 3485324 to 3485895 reverse strand)
gttacagatatccctgttcaagttcttctcactgggtaaactaattaatctctctctttttgcatttttctttattatattatataatccatgcaaaatgattttgatttaaatgtgaaacttcatttgctattatgtttgagtggtaatttgtttgtaaagctattacaaatttgcagaaacatgtcaaagttattattgatgtaattgaactgcccgtgttcacctaccgtttactgcagcctattagatgtttcaaaaaactttaataagttcctaagaccctcatagacaataagttttctaccaatattatgttttctgaaactgttaatttttgttccagcgctatttttatttataaaaaatatccttatgacattggaggagataacgaactctggagctgttaatgggttatatttgttggcatttgttcatcatgtttttaacctgtgtgcgtgaatttattctgatttgaagaaagtgactcgatgtttctggcagtggtttcaattttcttttgtaatttgtgttaattagggtgtgtttggagatatcagaaggatcgt

SEQ ID NO: 86284 - DNA, 786 bp, Citrus clementina
  Intron number 1 from transcript clementine0.9_021970m (loc us clementine0.9_021970m.g) derived from phytozome v7.0 (c hr-ID scaffold_4; pos 3720284 to 3721069)
ctcagcccaccactcttggctccgtctggaatcgggtacctttttttttttaatcttttaattcgctgaataattggcttttatttcagttagatccaacattaagataagaatccactgtggaagtatctaatctctggggataaatttgtaaagttacgtacacaagctcataatttgttgcaagtattatatgtagatgtctgtttgttgcgttgcaactatggagacttagttcttggcaacagaaaatacaatattaattatcaaccatgaatttttattattatatatggtggtatcctatcttatgcttactacttagtagcacgttagacaagaattgatgtgagttttatgtatgatactgagagtatctttgcaggcgaaggttgtggtgcaattatgtaatatatgttggaactatattctgtgtgtatatgtgtgtgttgaagtaaatagatactcttgctatgtaatgtttaatcatccgattagttttgtggaggattggaacaataaattattatttaaacttacctttttaataaaaaaatgaatgctagacattatgtaggtaattcttatgcattaccaattagagatttttaggctatcttcaatctttatcggggtgaacttttccagtaatgttggtcgatttttgatttgctaattatcaaatgagattttggtcaggatatataaattggttgcttattttttggctgtatggttggattttgtgtaggctggaacctgggaggagaaaagccttaataagtg

SEQ ID NO: 86285 - DNA, 637 bp, Citrus clementina
  Intron number 1 from transcript clementine0.9_010861m (loc us clementine0.9_005321m.g) derived from phytozome v7.0 (c hr-ID scaffold_141; pos 194373 to 195009)
tgtccggggagcctctgcctcctctcattcacaaggtaaaaacagctctttaagattgattttgttttgtgttacataattggagttaaggttatgtttgggattgcaggtgctagttagttcaactggtaaatgactgggatttaaacttggcttactataatggtgcttataaaaaatttaataataaaataaattgaggtatggtggaatggaatcactagctattaagtatatcttggtcggtgtggtttattctaaatctatgcaaccaaagggaccattgattagagactaaatcatcttttcttccaaatctatgcagccaaatggaaccttaattacagaatgaaaacatatgcataaacattttagtgttattttgtgatgtagtaagctgctactattattatttttctgtttttcatttgatatgagtaaggatcagacagattgtattacttatgccatgtaaacgtgagtgatttcatattcttgctctgttttttgtagaatcaaattagttatttgtatcagttagctggagctggtgcttatgttgcattgggattttaggttaaatatatgaaggaaatattcttttctggcagtaatactgaaaggacgcttgggaaaa

SEQ ID NO: 86286 - DNA, 730 bp, Citrus clementina
  Intron number 2 from transcript clementine0.9_005551m (loc us clementine0.9_004500m.g) derived from phytozome v7.0 (c hr-ID scaffold_3; pos 1441136 to 1441865)
gcaattttctggtcattatcagctgcacaacaagggtatataatctttattttctttttttttttttcctttttcaagtatttcatttctactgtccaatatcttttggtgcaattttgttcttctttcaacttctatatacaattttggtttctggagtcaacgaatgccatctttttggttaaatttgctatatttgatacctataattcactgatatataccgctattttagaagaaagagctcacatttttacctttgtattgccaaatttttagaccgcataacccaatatctggtaccacattctgtttttttatgaaacttgaggaaatgaggttgttaatcaatttactcacctttaaagtgatgttgccagagatgggaatcaacattatattaccttacagagacttttttgtagcaatgggaaaatgaatagtgaagctttattttgttttatctttttgaagtgtaaacggcctctaaaagttttccttttttgcctaaccaactcttaatggcctacaattggtctatgtaccggctttctattaccgttctttgtacttaccttgagataataaaaaaacaatggttcctagggttctagagtggggtgatgggtactataatggagacatcaagactaggaagacaatgcaagcaatggaacttacacctgataaaataggtttacaaaggagtaagcaactaagagagctttac

SEQ ID NO: 86287 - DNA, 852 bp, Citrus clementina
  Intron number 1 from transcript clementine0.9_028477m (loc us clementine0.9_028477m.g) derived from phytozome v7.0 (c hr-ID scaffold_4; pos 4321954 to 4322805 reverse strand)
ctcaggtagcacgtcctattaataccgtctaatgtgtacaaccccccgtgggatgaatataataaatgtacatgtagtgactgaataccatgagttgtgctaaaaattatgtgaccctgagtttgaagaataataattaatgttctgatattactttgcaatcgttacatttattcgttctcttaacagcttaacttaattgattggcaatatataagacatgcttcatttgagataattataatatgatatttaagaataatgatgacaattatatgtaaggatgcgtgatcggtttcaaattcaattggtgagcaatattttattcaaaattattctaaaatttttatttgaaatgaagtatcatgaaaggtgcattaaattgatttataattatatgatcccatattattcacacgacgagtaccatattactatcagaatgaatattttcagtacaaaataatttatttatttatttattacgtaatagttgttctactctccttgtaccacttccaaaagattttatcgaaatgatacatttcaacaataacatatctctttttgatctgtaattacagtcatgatagttgactttcgacttcaagttcttagattatcagtggtaccttagacacagtagtttatttaataacaaaccgacttgaacacgcatattaagtacttatgttcatcattctaacatatattattttacatattttaagttcaaatgtattagaattcaggagagagatagatcgactatttcttctttaagcggttgacacctcatcatctccatttttttttttaggtcaaggttaaatctctctatatattttgcga

SEQ ID NO: 86288 - DNA, 467 bp, Citrus clementina
  Intron number 1 from transcript clementine0.9_016805m (loc us clementine0.9_016805m.g) derived from phytozome v7.0 (c hr-ID scaffold_24; pos 2128761 to 2129227)
tctttagaaggccaagactcctccttgagcttgaggtaggtgtgagtgcgaatctcgttcaaattccgcaggctttaattttgaaaataaaataaaataaaaaaatcgctgacgctgagtcagctctgttcttccttgaatttcaacgcatatattatattgcgtttagagaaaaacgagttttatattttcctgcattttctcatcatccaaacagagcatttctgatatattcttagcttataaagtgctcatatatcaaaaatttcatttattcgagtttgttattgatgtttaagttcaattgaatcgagtcttacattcaatccaagagaaaattcttaatattattcgttcagtgattaatttatttgttttctttttcggtgaaattgaacaaaactgcagttaatttaaaagattcattaaattatttgtaaaataaagctgcttttttgaggtgaata

SEQ ID NO: 86289 - DNA, 455 bp, Citrus clementina
  Intron number 1 from transcript clementine0.9_016949m (loc us clementine0.9_014310m.g) derived from phytozome v7.0 (c hr-ID scaffold_7; pos 4544205 to 4544659)
attttgaattgatacattccttcattattttgtatgttattaatcaattaattgattgttcttccagatcatggggcagaaaaaatggttaatattgttggtgtttatgtgtcttttcacattctcttgtgctagaggtaattcttaaactcattaattaaagttttcttcaattttcttttttatgttttaactggttaggtctatcatagtggtatcgatattaattaatttattttaattggcttgttaattaattaattaattattgggttgcattgcatttatgtttgagagagggatggatattttgatgtactggggatcttagctgccttattgggcttatttgtagcttgagttgctagggtcaaattcttgcatatcattaaaacaatgttttgttcccgtttgttgcagaacttagggttaaacgccatcatagtccccaggtt

SEQ ID NO: 86290 - DNA, 863 bp, Citrus clementina
  Intron number 1 from transcript clementine0.9_013203m (loc us clementine0.9_013203m.g) derived from phytozome v7.0 (c hr-ID scaffold_3; pos 3154865 to 3155727 reverse strand)
cttctgaaccgtattcaaggtttgtgaagttgaaatttactcttttttcttaaaaaaataattttttcatagcaacttttcataatttatttgttgaaccatattcaaggtttgtgtcgttgaaattacttcttttcttttctttttttaaattttttcacagcaattttccacaattataaattttctcctttgtttgttctcattctgctaatgccagtatgaaactcaatactgtgccattaataattgttaaaattaaaacttaacaatgagttgataaagaaatgcagtattattatttcttactaagaagaatctaatgctttgataacacatcgaggtgtctatgctttttttttttttttgacaggttgattttattttattttattaaagtttttgagattaatattaccttgagatgaatatactcttacttagtatcagagggctatctcgggaaagaaattgtgaattcaagcacagtctatggtggtaaataagatggtttacctttttgtctttaataagtcaatttatgtccatccaagagattaaatctcgattatttgattgtaagtgatatcttgattgtaagtgatatcatgactgtggatggccttggagcattaacattccattggaaatctgaagaccttcagagttagttgtgggaattatctgacacatgatagtgaagatctatttatatgatcctgcaatttgttttgcttgaaggtttgtctagccattttagtaagcatgcaataaaagatagaacattaccatttgaattgttgaactaacagaggactgctctcccaggccaatttccttatcaaggatatcacttagtgata

SEQ ID NO: 86291 - DNA, 457 bp, Citrus clementina
  Intron number 2 from transcript clementine0.9_028322m (loc us clementine0.9_028322m.g) derived from phytozome v7.0 (c hr-ID scaffold_7; pos 5468917 to 5469373 reverse strand)
gcaagcgggctttttctttgttaccacttggtaagatatttactatctcattttataatattttgctttaatattgcagcaagttggaagaattatatcaaatcatttgcgtattattattgcatttctagtagcatttgtgaccaaaaacattgattcaagatttgcaaagcgttactcttctcacaaaagaaaatggcaggcataagttttgtaggaatctttgcttttctcatttgtctgagaacaaagaaagccaaagctttgaagcaagcctaagaagccctttgttggcattgtgtttcagctttactttaaaagtacagcggctatattgtttgataagcgaattcacagcaattgtagattaaaagctacgacgtcttaatcccgggctctaatacagttccggtttcttccaggatttgttttgctgttggggagattctgctgttaa

SEQ ID NO: 86292 - DNA, 623 bp, Citrus clementina
  Intron number 1 from transcript clementine0.9_003387m (loc us clementine0.9_003387m.g) derived from phytozome v7.0 (c hr-ID scaffold_31; pos 1619508 to 1620130 reverse strand)
acaaacaaaagagaattttctttactaataagtcagtttcagattttaattttctggcttatataattgtaaaacttatattcttctcggccgtcaattttcttttctttttccttttagtttccttttttcatgaattatgtttatgcacaaaaaaagtcaggctagggagagaaaattaatagtaatgtgagaccttatgattgccttgcaaatgtaacttataaaagtaaaaagttaaaaccaaaaataactcctttcatattatgatattccatttcgtcccatacatgtaaattagaatttgctttagtttatttccagaatctaaacacaggactttatgtttaaatttgttttgattccgcgatgagttaccacatgacctaagaaacttgaagttgacagccgaaataataaaattatatcgaagattatttttatcaaatatatgttgtgtagaccaaattttacaagattccctggtactgtcaagtttcttctagtaatttttttttaataatatcgtatatagtcacattcatcttaattcttaattgatttttttccccttcatttttgaattagtcatacttgccctcacaaacaccgaacggattaaa

SEQ ID NO: 86293 - DNA, 616 bp, Citrus clementina
  Intron number 5 from transcript clementine0.9_021686m (loc us clementine0.9_021686m.g) derived from phytozome v7.0 (c hr-ID scaffold_85; pos 258179 to 258794)
cttctgatcttaagagaaaagctatcaattatcaggtcaatttcaaatccttttagttgccatctctctttggtttattttgctttgcattggtaaataaagatgatcagactctgcttatagcttcttttgaatgtacaagtgacatgactaaatccatggaatttaatgctaagtttcgtcgacttcgatggtttatcctatttattagctcgatcatgcatcattaatgtgcctctcaatatttagaaaagaaaaggtggaagtttttcgaagtatatgtactccctatacagcatctggaaaatgtaaatagcttaaatattagtgcccaaacagataactttctatagcttgtttcaggaaacatctattaaagcaatcacgacgtaataagataactctaataatccttattttcctgttctgaagatacctatcagatgtaaatagatgatccattttccattacctttatgttttggtcttggacttgctgcatccattgctctatgcaattttatcagaagtttgtgtcagatttggagaccaatgagtttccttttgtgctccatttgcaggctgcaaatcttgtttcctcaagcatacagccttt

SEQ ID NO: 86294 - DNA, 517 bp, Citrus clementina
  Intron number 4 from transcript clementine0.9_021716m (loc us clementine0.9_021716m.g) derived from phytozome v7.0 (c hr-ID scaffold_10; pos 436363 to 436879 reverse strand)
tcttggcaaacaagaagcctcttacatctacagtaataactttacaaggcttccttatttggtagtaaatggacttagttggacatgtatagtcatcctatggctattctgtgatcaaccactaacagacttaattctggagatggcgacacttcctgctgtcattaaatgctgcaatgccatttcttttgtggccagttcgaacattctatatttttaccatttaagatgaattacgtttggtgtttaattcttttaaaattaaaaatgacaaattttcattgagcaatttagtgcaatattaatgtttttgaatttcatctagagaagataatgaaaattcctctacaaatcactaattggaagagcatatataaatctgttgaaggaaaatgataactttttgttgtccctttattttccatactgttttgtctgctattcatgcttaacaagttgtttctattgcatgtgaatttttaaccaacctcatgctattctgtaatgtaggaggatt

SEQ ID NO: 86295 - DNA, 833 bp, Citrus clementina; identical to SEQ ID NO: 78301
  Intron number 1 from transcript clementine0.9_001183m (loc us clementine0.9_001182m.g) derived from phytozome v7.0 (c hr-ID scaffold_4; pos 6651049 to 6651881 reverse strand)

SEQ ID NO: 86296 - DNA, 959 bp, Citrus clementina
  Intron number 2 from transcript clementine0.9_023386m (loc us clementine0.9_023386m.g) derived from phytozome v7.0 (c hr-ID scaffold_31; pos 2107368 to 2108326)
gctggtaagttgtgaaatgaatgtgttttctttgacttatatatatgtgtatgtatgtatgtatgtattctgaacacatttgttcatatcttaacactgcatcatgctttgctaaattaacacgtaattttcttagcagttttaaaattcaacacatcatttacaatgaattatacaattaaaagacaatgtattgctacaggctgactcactactaggatttggaaatcaaagtacgttataaaagactacctgaattagtgaattgtagaggttaatgctacccaacaagaaatcatatatttgctagaatctttctgcaattctgaggttttagaattctctttttcttcagcttgttgaaacataaaagaacatgttgatccagaatgagctatagaggatggtaaaaattgattgctccctgtggctggagaatatcgaactaggaaattattcataattttttgttggcgtgtcaagcatttctgacttatttagcaatcaggcacacatttagttcttgttttgaactgttttttcaaactcttgaaacacttgctgacaacttcgacattcttcgtaatctaacattttgactatgtcatgccagtgataaaggtggagagacaaattggcattatcttataccgtctctttttcatagccagtataatcatgcaatactctaacttcgtgatgtttcaaaatttgattgttcatatgtacaagtcttaaattttgccctatggaagttatgattaactttcaatgtttgacatgtttatcaaaggttctgcttgtttcttatttatataattagatttatcacagtggttgacttaagttgttagcaaatgataatatgagatgatatgtttctatcataattcatatgcttcattttaattaaaatctcccttacttattttccatgtgatgcaggtccggcgttttgg

SEQ ID NO: 86297 - DNA, 711 bp, Citrus clementina
  Intron number 1 from transcript clementine0.9_009774m (loc us clementine0.9_009774m.g) derived from phytozome v7.0 (c hr-ID scaffold_10; pos 1634831 to 1635541)
ttgtttcgcttaatctttcgcgcaacctcttggaggttaacaaatgattttatttttatttttttatttcatttttaaagcggtgagcgagcttgtgattcactatcttctgtaatgtttgtactgctagaagctttagttgggctgggtcaattaactatcattactttgtagtggcttgattgccatgagtgatgcttgaatttattgtgaattcaaattgctgcttagtttcctttattggatattcgtctataatttcaaatgttgacatgaaaaatcattgttgaattcattttatgttttgatacatgatagagtgacattaatgatttttttatatttctagttagaactcgttaagtttgtcctgctgttctcttggagcttatttaattaattatagttagctgaagtccatattatctgttcgtcagtcagatatctcacttaaggtggatgcttttcctgaataaaatcttgttttggttgatgaaatatttctttgttgtagagcactttaagaacatgttggtcattttcaattataaatcagattcttctgaaccatgtatgaattgtgatatccttcatttttcactgacgaaggaactgtgtctctttgatgataagagaaacatcttagcaagtagaatttgtagcatctgttgacatggatcctttttaacttatggttggtttaaacaggcc

SEQ ID NO: 86298 - DNA, 404 bp, Citrus clementina
  Intron number 2 from transcript clementine0.9_023231m (loc us clementine0.9_023231m.g) derived from phytozome v7.0 (c hr-ID scaffold_7; pos 6224968 to 6225371)
gttaggggagatcgttaccaccatccccaccattggtatgttttcttttacttttgaattgaattagatagctatgattgttcttcttatgtatgtattaaaattaatgtgtgaaaagaagaatccaatggctggactattcactgctgcttcagcacttgtgctagggtaatttaatacaagcttaggttctaatgacatttttaatatctaatatttggttatttcactttctgaattgtttttcgagacaagatctaatactcttgataaatttggtaaattaaaagaactcgatgatgcaacacaacagaattcatcccttatgtttattattttcacttctcttttattatattttcgtgtcatagaatgattctttttatctgttatgacaggtttca

SEQ ID NO: 86299 - DNA, 509 bp, Citrus clementina
  Intron number 1 from transcript clementine0.9_026659m (loc us clementine0.9_026659m.g) derived from phytozome v7.0 (c hr-ID scaffold_3; pos 4859777 to 4860285)
cagtagagagagatccgctagcgtagcgagcagtaatacttgcttctcttgattgaactcctgtactgatcgccgaagtcaaatattattttcttcgtatttggttagagtaatcggagtgcataattagggtttcaagaattgcttgatttaaaatgtacttatgaaatgattcagatctgttttcactctgcaatcagtgattgtttttttagaagaggggtgtatggaactcaaaattaggcttcgatattttttatttacgtcttcggatatggtgttgcgtgtaattcatattttacagtcaaaataattttgcttctcgaagtttcagccttaaagcttgtgagtttgtgttggttttcagttatttttgttaaactgtttcggttttctagttgttgtccagtttggtccgttagatttgaggaggctgtgataccatcttgatcttgttagaatgttttgtctgatatgctctaactggctacttttttggcaggacggac

SEQ ID NO: 86300 - DNA, 528 bp, Citrus clementina; identical to SEQ ID NO: 82262
  Intron number 3 from transcript clementine0.9_026659m (loc us clementine0.9_026659m.g) derived from phytozome v7.0 (c hr-ID scaffold_3; pos 4860639 to 4861166)

SEQ ID NO: 86301 - DNA, 776 bp, Citrus clementina; identical to SEQ ID NO: 83137
  Intron number 1 from transcript clementine0.9_025433m (loc us clementine0.9_025433m.g) derived from phytozome v7.0 (c hr-ID scaffold_31; pos 193974 to 194749)

SEQ ID NO: 86302 - DNA, 624 bp, Citrus clementina
  Intron number 1 from transcript clementine0.9_033046m (loc us clementine0.9_033046m.g) derived from phytozome v7.0 (c hr-ID scaffold_2; pos 2922057 to 2922680 reverse strand)
ggtacttgctttgcctttgcttctgttgtacttttgtttttgtgggcttttagttaatggatgttgagttatatttcagtcagtttgatttctctgcatatttttcatattttagtattagaagaggtatttaatcaaatgaagacaaaaataactgtcggccaaccgacaaactcaccctagtttgttgtgcaatgattctctctctctctctctctctcgattttcactggttctgtggttttttcccttccacaatgtaatttagttctgttctatttatggatgttaccaacattttagcttttaagaaaccgacacaaagattctgaagtttgtttcttgcttcttactctgaatttccaaggcatcttatttggagaaatgcattctgaatggagaaatttctccaaatttatgagatgtggttccgtcttgctgaacgaacattgtatttccttcaatggtttgcgagccattatgttatttgagcaaacagaattagcaatatggaatcctgtttctacaggattatagttgtaggactctagaatttagtctaggtaatgttttaccattgtaaaaagtatcaagtcttcatattgttgcgtttatagtctgaag

SEQ ID NO: 86303 - DNA, 786 bp, Citrus clementina
  Intron number 2 from transcript clementine0.9_011618m (loc us clementine0.9_011618m.g) derived from phytozome v7.0 (c hr-ID scaffold_3; pos 8089457 to 8090242)
gtaccccgaaattcaccttttagagctactctaaggtatttttcccttttaacttgcctgtgtcactttagattccttttttattttgtattggtcatttcatggttgtgttgatatagctggcattagaaaatttgagtaaggaaccttgatggtttatttagttcatatttttcgtagatgttttgatggtgactactgataatcaagcactacaatttagaatgatattctattcactataactttgctggaatattattgcctataaacttgtgagctttacttgatcagaactggcaggataaatgtttcagatcttgcttctaagtttcttgccaatattggaaaatattatcaatcactcctgttcagttgtacctttagtttcacaggtgccttgtaacacatattataatgatcatatgcttttgcatattctgagcaacatatatttatgttgtgtgcctagcattgttatcactataatttgttcctcaagaatgatttttttttcttcaaattgaaagttaagagtttatgattgtgccaatcttatgtttttattgcttctacagttgtaggacattttaccatggaagagatcaagttgtccggctctcagttaataaaaattttgagcttagatctcttggtgttgaaaatctgaaagtccacccttatcctagggaatcttcatcaaggtgtagttgcttggggtttttgataaaccctgatggtgcaacagcctctgactgggttcctgttggtgatcaggtactcctg

SEQ ID NO: 86304 - DNA, 499 bp, Citrus clementina; identical to SEQ ID NO: 83632
  Intron number 3 from transcript clementine0.9_011618m (loc us clementine0.9_011618m.g) derived from phytozome v7.0 (c hr-ID scaffold_3; pos 8090330 to 8090828)

SEQ ID NO: 86305 - DNA, 790 bp, Citrus clementina
  Intron number 2 from transcript clementine0.9_024226m (loc us clementine0.9_024226m.g) derived from phytozome v7.0 (c hr-ID scaffold_3; pos 6042997 to 6043786 reverse strand)
cttggtggtacatatttctgtactcttatcctaaggtatgagaacctcctactcctactattcttttgttcatttatctcatatttaagttaccagctaaccaaccacaagctactctgcttaatgaattttctgtagtttatgcttgattatgaattcctgttttattttgttgatgttataattgatgattgagcaccctacacccttcctttttggattactcatcgttcatttggaattgtaaacactggagctctagcctctaattttcaaatcaatggttggcatcttgtgtattatagagaaattggtttcaaggctctagcctctagagatgtcggcaaatacatctttcaaataaatggttggcatcttgtgtattataaagacattcttttcaaggctctagagatgtgtttttcttaatgccactgcaaggcattaaggaactgtttggcaagcatgaccaagtacctctatatttgattatatgaatttaaaacttgattttacatttactgaagttatttttgcaaggtattacgacttaggaccatttttctttgcaagaatatgcaattaagcaatatagtttttgtcaggccatggcattattgaatgttgccgcttgcaacacttgcttacagggaatgacttctatttgcatttttcgtttataatgggaattttgcagctaaatatatgtcgatggttgacgtcctggagattttctaggttgtattggatcataattttttctttttccttttgtcaggcatatacagat

SEQ ID NO: 86306 - DNA, 613 bp, Citrus clementina
  Intron number 1 from transcript clementine0.9_024226m (loc us clementine0.9_024226m.g) derived from phytozome v7.0 (c hr-ID scaffold_3; pos 6043859 to 6044471 reverse strand)
attctgtttgggataccaagccctcctggtgagccttttctttgcattcctttttttttaattaattattctgtttctttttttttccttctctcttttaaactttaattcacaaatttggtatttccgctttgagttgttgttagtggatgtttggagtaaattatagtatagagtttacttggtgggttttgatggaagttacaatctgcctttttatagaacagatcaattttacatttttactttacaaaattatcaatttagtagcaatacttgttttaggtgattcacacttgaaagtgcctataaatacatgtgttggcagcgttatttttggtggcctactctcgttttgtaacatagttcgattgagtagtgcttgctacacagtctacacttaatgaaatgtgagatacagatagggatagccctcgtataaatcatcctgtcatatgtgaaagtgaaacttgggacacttgacagttaatattttatagtccaactttgtatgcataacacatttattgaatttgatttcccttctcatgtttttatttattttgggttgcggctaggtgtcagccgtggacaatagtgttaactggggcat

SEQ ID NO: 86307 - DNA, 870 bp, Citrus clementina
  Intron number 1 from transcript clementine0.9_025512m (loc us clementine0.9_025512m.g) derived from phytozome v7.0 (c hr-ID scaffold_3; pos 4646857 to 4647726 reverse strand)
atcaccgtcacttctgacagcaacttctctaagaggtactttatttgtttttttttatgtgctctttttaatctattatcgtgttgacgtttaaatattaggattttatttagggtttaggaaactagatcgcttaaatggtgatggtgatggtgatatgaactcagatgaatccatgtatgtagataaaccctgctttgtaaatcttgctgttgtaagaagtttttatttgatgctagtggaaccgctggtgattggaaacttgtgtactgaagttaaagtcaaccatatgcttcagtgatggcaactatgtagttaggtgacgattgatgttattttggaattcaacatttctgataagcatcttggttttgttggctttcacattgacactcctcgtactcaagtggttttgtctggacatctgtgttgcaaatgacagttttatttgaggatagttcttttctagccatttcaaggagaccttccattagcattacaatgatgttgtcatttcattaagggttccttttctcgctggtccatccaatctggatagatgtgtgattgactgattgcattgtgatgggccagctgctttatattgtagttagggcatcataacgttattttgaattttcaatgatagttacagtaatggtatagtttctcataattttatttcaatggagattttgaattgtattccttgagaagttgcatttctttttcgtcttcacggtgccactccattgtcatgttcaccattcctatattctaatttcaggtatcctatgcccggtaaattttcatttttgtcattaattgttttcaggtatcttaaatatttgaccaagaagtacttgaaga

SEQ ID NO: 86308 - DNA, 488 bp, Citrus clementina
  Intron number 1 from transcript clementine0.9_026586m (loc us clementine0.9_026586m.g) derived from phytozome v7.0 (c hr-ID scaffold_10; pos 2490416 to 2490903 reverse strand)
acatttccgctctccacttgactcttcgtatcacggtaagtgcgagccttcaaagccctctccttcgcgatttttaattatactattagtagttttgtgattgtattaacaaatttcattatccttagaacattttgttttgaataactctgtttgattgatcaaaacccgtcaaggaaatgccgtttcttcggccatgatttgccctttttgggcaaaatatcactatatcgctgctctttctttgaatttgaattacgtagttttttttttaattctcttcagcagcaaacagatccttagggtttcgtctgtaacttaatattttaagatctacatgattgaaatgaggttttggttgtctcgttagagtatagcgattcaattaaaatatttttttatcttgaaagttttcttattttctaatttctatcatagtggatttaatttttttttttttgggtgcatttttaatggttcaattgtag

SEQ ID NO: 86309 - DNA, 968 bp, Citrus clementina
  Intron number 1 from transcript clementine0.9_031244m (loc us clementine0.9_031244m.g) derived from phytozome v7.0 (c hr-ID scaffold_10; pos 4158798 to 4159765)
cactgcgtcactcttggtggtgagttcttttcttttctttttctatggtattactattacatttctctttctttttcttttttttttgaattaggatcttgttgttctgtttgagtttagctgaagagataaaaaggaaactgctataaagatgtgcgctttctattgtattcttgcgtttcgtgggaaattattgatacccatttcgttaatttctttttttttttcgatttgataaattgatggtagaatggtacgcgcgcgcgtgtctgtgtgtttgattttttttttttaaagttaatttgtgcttcactgactctacacgctgagttgttatataaaatttaaaactttcttttgttttgtggttaaatatctcctctttctggttaagacgatcaaatatgaaattattgattaaccatgttgttcaatgtagcatccggcattaagtcacttcactctactactagaatactttcattattcggctgtaatgtggtgattttcgaacttgtattgcaattatgctctgattttgaatctatcatttccacctattgtcttgattgggaggtattggaaaattatgagcttgggacacatgtggacccctacaaggtcctatgacgcatggtttgacacttttgccttgcaattcaactataaagaaagctatgagttgtcatgatggctctttcttcactatcacatatctagttttaaattttcaagcagttatagaagagcactgacttgcaaactaggaaatctatgctcatttttgtttttgccagtaatctattcaggctactttgtttatcttctttggtgggagggaggggagtgcttactacctatgttggctattaatgggagaatatgctttttgtttttgaagatttattaaaaagtgtttcgcttttgtctgtctggcaggattgttttttctcctttgtggctatttc

SEQ ID NO: 86310 - DNA, 846 bp, Citrus clementina
  Intron number 3 from transcript clementine0.9_015843m (loc us clementine0.9_013984m.g) derived from phytozome v7.0 (c hr-ID scaffold_2; pos 7414065 to 7414910)
tacaaagtaagcaccattttttttttctaatttcattatcctcttcaacatttaacattataagttttgtttttaacgatatcctccatactctatatatactcgtgatctaggactcactgtcttcttgttttaaaataaaaccgaccctgcagcagcagcatggccactctttaatggtgaaaaggatgtttcatttttttctgttttctctgtgtttctgcctttatggtctatgaagttcaaaaaaaataaataaacaaataaaaggaaatagtacttttctttaacgtgtttttgtgtcagtaacagtggcacccaattcgccgaaagatgaagaaatgtagagaacgcagattacaactcgctagcctcgagcttagcatgcatgaattaaaactaatccataattatctcagatttggtcaccatctaattttttctttttactagtcaattaatactcgttaaaagtgccccttgtaaattaagcaatcatcgttcatcattaactgtaaagtatatataaattttgtcccttaaagtttgaattaatttataattatcatatcccattatggcatccatttgaaaaaatacatttttatcatttaaagaactttacgggtgggatccaggtgggaaaattattgaaattttccttataggcatagttgcatgaaaacaagcgactctagcgttcataaagaatcttttatatttatatatatatatatatatatattaatttctgccttttcttacttttggtcacgaaaagaaaagttgactgttgattgattggcggcaggactgtgagctgcattcaatagccacaagattcgg

SEQ ID NO: 86311 - DNA, 863 bp, Citrus clementina
  Intron number 2 from transcript clementine0.9_015748m (loc us clementine0.9_015748m.g) derived from phytozome v7.0 (c hr-ID scaffold_2; pos 5347283 to 5348145)
gccaatccgtggcattgcctaaacaggtttgactttggtaacgttttgttgatgcttgtgattggtaaagtcaattgctgatgaagaactaaagtcgaattgctgatgaagaactaactacatgtttatgacagttaattaaggattctgatatgtgttattcattggaatcaataagtattagaatttatcagaggtgaaaatttgatgtttgagcacgcatgaacctttatatgtattttatgttttatttttactgttagcatacttgcagtcgggggcctcagtaatgttactggtttggtaccttagtgtgcctttaaaaacaccatcagttgtcaacacaagttgttgacagtgttgtacaccctgcatcttgcatgtgcacttagatgggatagatatattatgtgaattttaattttacttatctgacatatcatattaagaaaagaggttgctttgtttcattttaactggaaacttttaagttttaatcatatttctttaactgtggcaataccgtcttgtaaaattaaaacttttttgttatgaatctcaaataacctatattaaagttttcaaatttcttggaaactagaaatgaagacatggatttagatgatgtgatcttggcttaagaataagttgaaagttgcctgatgggctttgttattcttttgtgatttctgatgtcaagatgaccgtgcatacaaagtaacatatggaatatggcaaattttgttattgggtgatctgaaaataatagtctgcaagtagatgataaaatttctgggcacttatattttgttttctgatgcagagcagctgtgggtgttggattctgtccctggaaaagtgaa

SEQ ID NO: 86312 - DNA, 254 bp, Citrus clementina
  Intron number 2 from transcript clementine0.9_014791m (loc us clementine0.9_014791m.g) derived from phytozome v7.0 (c hr-ID scaffold_2; pos 3789873 to 3790126 reverse strand)
tagcttggaataccacttcggaaaccttgtgtgctgtgagtgtatttgctgattgatgattgcccattgtgctttgtgtccagtggtagatgttttgggtaactcaaattataagaaataaactgattattttgtcttgataagttgacgtcttcctttcattacttttcttaaggatttctcagagattttcaattctgcttcttttgtctgaaagtttcaagggtgtgttctctcataggcatttcgagtgc

SEQ ID NO: 86313 - DNA, 959 bp, Citrus clementina
  Intron number 2 from transcript clementine0.9_033692m (loc us clementine0.9_033692m.g) derived from phytozome v7.0 (c hr-ID scaffold_24; pos 205353 to 206311 reverse strand)
agtgttcttgaagaatcacggcattttaacttttagtttgctgctagaaaaggctagcagaattgttctatccacgagagcaatacctactttaaaaaggtggcaggctcctcaagctgccatagcggaaagacgtttccagccataagaaaagaatgccaagaaaggaggctctgacatgttccaagttgccttacatggaagaagaatttgaagctattgtggatcgctaatcatggatagaatactgaagctattcaaacaaacaagaccgttgagtgaagcaaaacataaaaatccaaagctttgtcgtttacataaaaaatttagtcatcttatagcgcattgtcgccatatcttcagactaatcaagggaaaaattgcacatggatgattacaacttcaagggagggaacaagatatagatatgaacctactacctcactatggtgatcgagtagctacgatgattattgctgagtctattacaaataatgatgattcaatgacaaatgttattatcgagaagcagaaggctgaacatgaaatcctacctgataatgatcttacagtacgtgctctccaacataaccccaagttggacatggtctggaggcatgtgtagtagctatcaaagcattaataggggtttctacgatacggaccagagtgctatgctgcggaaacagaagtcaatcgagcttatctcaaatctaccaaagcagtcatcttttctgataaagatattgaggtaataaatcctaattacggacgaccattatttctagaagttgagatcaatggagtttcggtcagcagagctttagtggatataggttcctccatcaatattatttctagaacggtgttggaagtggccaaaatacctaccaaaaaaacatttctggcccaaatgttactatttttgaatttggaaatctgtctgaatctatagaagg

SEQ ID NO: 86314 - DNA, 895 bp, Citrus clementina
  Intron number 1 from transcript clementine0.9_015202m (loc us clementine0.9_009181m.g) derived from phytozome v7.0 (c hr-ID scaffold_3; pos 2466971 to 2467865 reverse strand)
ttttttttcccccttccctcaactcttgttcggttcgttctcttgctctcgttcaattttcttattgtgtttgatgcatgtatcatcatctggtggttggtttttacgctggcttgttgtggtcgcggtagctttatttatttaattatttttggttaactgaattagttattgagtcagatactgtgggtgtgattgctataagattttctaaattacaaaaattaaattggacagattttacataatacgcttgctatcttcggaaaagaattttattgttagttgcaaggcctctgtacttgattcctgtggtttggatttggatgtttggaatgatgatattatgatgatattggttgtgctttgctgctactgtgatgaaattagatcctgaattatctgtgttatgcctgttttggtcatttcttctggggaggtggtgttctgtttcttcaggggtgaaacagagggctgcttggtgtttggttatgataaatgatttgatttaacatatatcataagcctccaaaatacatttgcattactgacgatttttatttgggcttggcaacaacataagttcctcaaagaatttgatggtattttcaacgcaaaagtcttcgttttgggatttcgggatgaatattttgttttaattgctttgctttgctcttgattttcttttgttgctgtggggaagcagtgttgtggtagtgtgaaattatcactgtcttgtgtaacccataatatctattttagcttacgttttagtttggtcgtgttttattgactagaaggagaagcttaacagtttgtgcttcttaattgggatgaatatcttgaggtcatctaaagagtaagaaatgcttcttgacagataaatgtctccaga

SEQ ID NO: 86315 - DNA, 603 bp, Citrus clementina
  Intron number 1 from transcript clementine0.9_009935m (loc us clementine0.9_009935m.g) derived from phytozome v7.0 (c hr-ID scaffold_10; pos 1837110 to 1837712)
cagaaggaaataggaagctcttcattatttctcaggtaaccccatttacattctacgtttatttttaaaaaataaaataagagatataaggaatcttattttgccaatacacgcatacatacaatgatttcggaatttatttatttatttattagagattgcaatcatgattggaatataaatataaataattgactgaggatagaaatcacggtagtggccttcaattcagggtgcgtcaatggcccgaactaattatcagtactaaaaaaatagtaaatgaagacaatgaccctttaagccaatgttagcagggatgattaactaatttaatttgatctcatcaaaagtcgatgactttcttttaattgacccattgattgaactggaacagtggggcttttaacttcgagttttgagttgactctgcatttgatcaagtttactagctggggaggttacatttatgaataatgcatcatcaaactatttcaaattcaactgtaatatttttcttgcgtgtttgtttctcaatacaatacccactttcaatgctcgggttttccaggtagtgagagatcttcaacaagtaatcattttcaa

SEQ ID NO: 86316 - DNA, 502 bp, Citrus clementina
  Intron number 2 from transcript clementine0.9_028255m (loc us clementine0.9_028255m.g) derived from phytozome v7.0 (c hr-ID scaffold_3; pos 8211317 to 8211818)
ttgaggtaaaaatttcgatttcattgttctgttctgtattgaatcaatctgattcgcgtatatataattttctgtagtaatgccgtgtatttgctgaatgtgagacagtcagattgatcaattaaaatgcactattgattttgttggatcaaagttgtttccaatgttagcatgctagcttatcgatctagagacaaattcaaaatattataataatagattttattctgttcatcctatggattattcaaattactcgcgctagtcatgctgtcatgacctcctaaaggtgtaagctatgtaaaagaacagcggcaacactctactatcagcatcgttctcaattttgctcttccaaccatcttcatgatattgaaacattcgtttatgaatgtatgcttttagaatttgcttcctttctttaattattccactaaattgcagaaaactgggatttcttgctgcagatttttgaaggctaggaagtttgacattgacaaaa

SEQ ID NO: 86317 - DNA, 448 bp, Citrus clementina
  Intron number 2 from transcript clementine0.9_017421m (loc us clementine0.9_017430m.g) derived from phytozome v7.0 (c hr-ID scaffold_10; pos 154582 to 155029)
cagaggtttgtcttgaattccattgatttatttttgaaatattactagcttgttagtttgtggggtgcagagtgatgaattattgtatgttcttctaataattatatgcacgtttttccattgaatctgtagaataaagttggaaatcatgtcctttttttaatggtttcataatttttgaccttttcatgtatcatgattttcagaaccttttaataaccagtggaggctttttcataaagctttcttttgtccatcatcatttctttagctttttgatatatttattgggtaactgtttaaaggtaaattacgggtaatcatggctaaaacttttctcttgcataattgtcatagtttaaatttcttatatattttatctattgggaaaattagaattttctctggtgacacacactttgaatggttaattttatgttggcagata

SEQ ID NO: 86318 - DNA, 746 bp, Citrus clementina
  Intron number 1 from transcript clementine0.9_032918m (loc us clementine0.9_032918m.g) derived from phytozome v7.0 (c hr-ID scaffold_14; pos 1737149 to 1737894)
tgcggattgtgggagcaagtatgcatttcagaaaccctcttctgatatttccaataatattacagtttctccgttgctaatctgtattatctttgggggtacttaatttctgatgtttatgttatgatggatttgcagacttttgttgtctcttatacatagtatagtcttaaacaagttagtatttctctgaaacataagactgggggtgaacatctgagaaatgtttaattgctttccggtcaatatcttgtatcaattcagctaataacgtttaattgttggatctgcaatgttgttttgtcactctttgtttgggattacaattgccctgttaactaagtctattcaccttgatgctaaatatcacatctcagctgttctgactctgttatgtatatgtggtagtacaagaggagccctagtgagaaaaaggaaaatacttgtacagagcactgctcaaaatttctcactccacgttataccaagatcgttagatccaaagttatttttgttggcatgaaaatatcattttcttacctatctcttaattaacactgtgctcttcatttttacagtgcaagtatacacttacagttggaagttttggtttgagttttaaatttgttgttctgagcagttagatactcggttaaaagaagaaataatctgatattgtagtgttttatcatagaaatgtattcatttcagggcaccacggtgggcaagtgtgaacctcggaatat

SEQ ID NO: 86319 - DNA, 813 bp, Citrus clementina
  Intron number 2 from transcript clementine0.9_032918m (loc us clementine0.9_032918m.g) derived from phytozome v7.0 (c hr-ID scaffold_14; pos 1737916 to 1738728)
gaatccatcggagtcttggagtgcatatttcaaaggtataccgtgtgtactggtgtttattttatttttgcatagcatcaaatttagtaaatacttctagcattgccttcaattatcatcttgagaacattgtcatcaaacttttattagtttcattggattaaactgaacatgatagaaacattaggttcatatccactatgtgtaggagtaagctctgcacagacttgattcttggttatcgaaaatggagttcctatataattagttttgacttccaactttttggccactttcctgaaatattgtctatcgttgatccatgatgagatggatttaaaatattcattgcacttcacaatctattatgtattcaatttttccagctccctgctgttttcagcaaagtacaggctgtatgccaatatctttgtactttaggctgtaaaactttactttgttgtaaccggaaaaaggatttcaaacaatgaactaaacacataagaatacttgtttatcaaaagttcctctgtcagccctgtttcttatttgcttatgtaactcttggtcctcttcgcatgatttgcttcattcagcaaatgtaaattaggtacaaaaaaaatggagttgtgggttttatatgtttttttaattcaatatactcacaaaatttttccatttgttccttgatatgccaccagtttgagttacaactccattgggttcaatactctctttcctgttatcactaatactgattttgtgattttggaaataggtccggtctactactttggatacgtggctcccaga

SEQ ID NO: 86320 - DNA, 713 bp, Citrus clementina
  Intron number 3 from transcript clementine0.9_021616m (loc us clementine0.9_021616m.g) derived from phytozome v7.0 (c hr-ID scaffold_7; pos 485792 to 486504)
gcagacactccggtaactggtttttcctctgattcttttctatatacaaagctttgctattgaaagatatgaaaccatctttaattgaatactgtcaaccttatttattaattctggatgcgacatgcatatctttctagttttccccttctctatatatggagctttgctattgaaaaatttgaaactatctttatttgaataccgttaaccttatttattgattattcatgcgatatccacgtctttatttttttaccataggcttaaccagccaattattcaatgttctgtttcttacctctacttaacttttcatagataactgttatatatccaactttttatatgattacctatgttaccaggcatggcagaccattgtagcgcagagatagaaaatttcttttgcatgcttatctatgaactgttgttagattcaaataaaacaaaagttgggactgtttttgtcccattttaaacaaatttattaagttacaggatccgtattctatatatatatatatattgctgtgtatgcacatttacatgaataagcatttacatgcatgcatattaaaaggctggcaattttggtcttgtatttatttggaaatttggtcaacctaatttcttgtaaactcattgaatgtttacattgtccttttgtgatgtatttcaggtggtaaccttctgggagggagagattgttg

SEQ ID NO: 86321 - DNA, 808 bp, Citrus clementina
  Intron number 1 from transcript clementine0.9_014431m (loc us clementine0.9_011664m.g) derived from phytozome v7.0 (c hr-ID scaffold_3; pos 1721753 to 1722560 reverse strand)
ataatcagtttttcgatccacgatctattgttaaggtaagatatttaccatatttaatttattttctttattatgtgcatgattaaggtctagggtttgacttttgattgagaaaagaggcatgaattgaaacaagaaactttatattctgcatgattatgtcctagggtttttaagatctgaagttaattcctaatagtgatgccatgtttcttgtggaaagatctgaattttttttttgatctttttgttggattttttttttctaaattgatgcatgtagtttaaggtggagaaatggaaattatgcagtgcgttgacttcacgtttacagtcttttgatttgctatgacagtgtatgtgaaataaacaatttttttacctttatgtttcctgaatttgtatttattagaagcctaatgttcccctaaattgccaaaatattgtaagagtttagaaagaattttttttatttaatgtccccttattatgcatctaatttcttcgacttttactcagctaccaactggatggtcggggataaaacttttgccaaattgattttggccttcgtttccatatgataaagctcagaatgataaattaagttttatgtttgactagagctgtttaaatacctgctaacaaatatgtgtaatagtaattttcttattatattatattgtgtaacgatcccccgcctctcccccccccccccctttcccccaaaaaaaacaaaagattatgttgcgatatgatgtctgattgattttctttctttttacttctttgcagcaaatccatcaaa

SEQ ID NO: 86322 - DNA, 687 bp, Citrus clementina
  Intron number 1 from transcript clementine0.9_028554m (loc us clementine0.9_028554m.g) derived from phytozome v7.0 (c hr-ID scaffold_4; pos 5070661 to 5071347)
ttgcatttgtggtaacctttccattttctgttttgttttgttatgtttcttgagctctctatttccttttcccttcttcttcttcttattattattattactatttttttttgttggcaaaaggttttttcatcaccccatccaacacaatgcatacacaatatgtatttttgattttttaaattttaataagtgataaatatatgtgtgatgatatcaatttttaataatagggtgacgatgtgacggtgtcaataccatctaagacttttttctcatactgatatttttttcattaattatttaaataagaaaaaactactcaaaacctaattttgaaataaattcatttgataaaaggagaagagatcaggagaagctcacctgtgaaaatttatcattttcccttccaccaggaccaccacatgcatttgaacagtcgagcttgttgatttggtagagtagaaattgagtagtccgtcggctgcttttaagtgcaataattgtggctaccactgaacatgtgacgagtgagaatccaagcgtggtatttgtgaagtcattgttgcaatcttcacccgaatagcatgacggattaatattgatcataatgttcattccttggtgttatttatttaataaatgtttctattgttgatctatttttgtgcatagaattcggctcca

SEQ ID NO: 86323 - DNA, 636 bp, Citrus clementina; identical to SEQ ID NO: 82906
  Intron number 1 from transcript clementine0.9_010989m (loc us clementine0.9_010989m.g) derived from phytozome v7.0 (c hr-ID scaffold_31; pos 263597 to 264232)

SEQ ID NO: 86324 - DNA, 300 bp, Citrus clementina
  Intron number 2 from transcript clementine0.9_030642m (loc us clementine0.9_030642m.g) derived from phytozome v7.0 (c hr-ID scaffold_4; pos 1734015 to 1734314)
aatcacaaaataagaaaggaagacaaggttttcattttcttgcttgaatcttgtctttacataaggatattcttatgtttcttttgagatcggtatgtagcaattttattgataatagttttgctttctgttttgggttcctttttttggtggtggtttcgctggccattaattctactcaaatgcagtctatctcggtaagtaagttcatttcatgcattttcttgacatggaaataattgaagaaaattttcaaaggctctgattttcaatgtgaaatgaattgatttttaggtgctt

SEQ ID NO: 86325 - DNA, 487 bp, Citrus clementina
  Intron number 1 from transcript clementine0.9_029995m (loc us clementine0.9_029995m.g) derived from phytozome v7.0 (c hr-ID scaffold_24; pos 2246859 to 2247345 reverse strand)
gccacatcctcgtgctcaacgtcattgcttgcgcggtaaatttttcttcgattttttaaaaatcaaaataatttttattcatcattgtaataattttttttttgcattgttaaaattttttatttttagaagtttgatgttgaatgttacaagttttggcattggagaaaattttatattagcttcgttatcactaatttatcataattgcgtagttattaattgaacctgagggacaaaaatgaaaaaaaaaaacatgatgattacttgttaattttgattgatttatgattctttgcaggcggcagtttcagctacttggcttttcttctctgcaatcccgactcttctggtttgtaatttctatctttactgttcttcaagtgagttttggatttttgcaaagtttttattattatatttatttagtaattgatttaagtctaatccaggctctcaaaggagcagcggagtcactagagaagtt

SEQ ID NO: 86326 - DNA, 962 bp, Citrus clementina
  Intron number 3 from transcript clementine0.9_006313m (loc us clementine0.9_006313m.g) derived from phytozome v7.0 (c hr-ID scaffold_24; pos 967894 to 968855)
gacctggtatttcctactgaggggttatgatagtaatacatcaaaataaaacatgcttggattaagtgataccaaaatagttaggctttaattatagaaactgagttacttgctaaccattatcttccagatgttcaaaccttgatggttcttaaggaagtacagagtatttggtaccactttaaacccagaatattacagctgtagtgtatcaaaacctcctgtagagggtatttgaatttcaagttcatgtattgaagcaagaagctgattcctatgcattaatatgctatatggcattactgttggcatgataaatgctaatgtatccatgcataagtatgctgatttagagacatttgcttgcttcaccagcttggatataggtgacaatattatttaaagttcatggagactagcaaattgaggaaatgacattacacttacttattgataacatcagttgtcctatatctgctttagtttgatttcttaattacttgtaaatatattttacatgttttcatttcttatgtacatatctgaattatatttgagttcagtatctgctgtagttactgctataattttggccatgatactatgattgcttgtttcccaaattatgatatttaggcagttttttctcagcagtaactttttgcttctactttattattgaaacttgtgactttcattttttaactagaaaaagaaaaaaaattatggagttttgtggtgcacttgtatctcttcttctgagtgtctgtagtttgggtagcttattttgttttatatctttagctaactatttcaaggtttgagttattttttagttctttgtggaaataaaatggggttacgctaacaatcaagtttctccactgtgtttacctagatactaatgatttgacgacattcaaacagctacaagattgtcctgaaaaagaaaattttagcat

SEQ ID NO: 86327 - DNA, 660 bp, Citrus clementina
  Intron number 1 from transcript clementine0.9_023565m (loc us clementine0.9_023565m.g) derived from phytozome v7.0 (c hr-ID scaffold_4; pos 2086045 to 2086704)
acttgtcggactccgacaacctttgacagatttttgtaagttttttgagttttttgtttatgagtaattgttatatgcaatttgatttagttaatggcaaattggcaatgtatagtatcaagatcttccaaatataaagaattgcctaatatttgtttaaatttttttcttaaaaaataagataagagtgaattttgtcttgagaatgaaagatcaattatgttttatatttatgaagcgaaattaccaggataagtgtcgaaatgggagttattataatttagttatgttgtttgtaatttagctacaacaagtaggaagatctaaacagtttgattggaattcgaaaataatgaataagatagagcctttatttgacaggattagaatgggattcttctttgaagtagtacatgttgataaattgtctagaatttgaagtgaaggtatatgccatgggacaaatatggttgcatgtggttctgtatcaagaattcaattttttaatgcacctgtttgctgtcaaagatgggggttttactcctcaaagctggttttttccaggtgtttcccattaagctctgctggaatagcagactactgatatcttggtttgattgtgtaggaggaactcattttattcaatctgggagaactaaa

SEQ ID NO: 86328 - DNA, 454 bp, Citrus clementina
  Intron number 2 from transcript clementine0.9_008601m (loc us clementine0.9_006576m.g) derived from phytozome v7.0 (c hr-ID scaffold_4; pos 1901548 to 1902001 reverse strand)
gcagagacggagcttttctcctggagctcgagaaggtaagtgttttagattttaattttgccttctcttccaaacattttcaagtagtaaaaggtaaaaaaatggtggtgtttgatcatagttctcaaaggcactttaggataaaagaagtaattcagttgttttcttcgagaaacatttgaaaatcacttttctagaaagcactttttgagtttctagccagaaaagcatttgaagtgcgacaaaagtgcttttaaccgctagcattctttagaaagcactttcaaattcattccctgagcttttgtatataaatcactttttttaaaaaaaaaaaaattctgactatgatatttacttcgactttcaggttttaatggaagcctccgaagttacaatgcaactttaacccctgagcaaacattattacagattgtaaaagaagttaaacaag

SEQ ID NO: 86329 - DNA, 863 bp, Citrus clementina
  Intron number 1 from transcript clementine0.9_011884m (loc us clementine0.9_011867m.g) derived from phytozome v7.0 (c hr-ID scaffold_3; pos 1967895 to 1968757)
tgtaataacctgagtttatacagttgtgatctcaggtattgttgcttacttgttcccatatgatggtattttctccttgctttgcatgtaagctaagaatcattttaagatatgtcttctctgattttgatttatgggattttcttatttagttcttttttttgggggggggggggttgattattctgattttgttgttatttctgttgatttcaaattaattattttaaaaatcatagcaatggggattagatgttctcatttttgaggaattataggtctcataatgtggagataaacctttgtgcctgtacgtaatttgcattagaaattattttaatcatgaaaactttgagtcaaattattttagtattcctgtagtttggcccttatttccagtttgattgtagaatcttgatgttctaattgcagtttattgtgtatttttcttatatctgcttctggcggtaaaaagtataaatctgaaaactgatttatgtttatataatgcactggatgagctttctgtaatttttgctgctgtcctacaaaattgagaggtgtaaggtgttagcagggtttcaggattcttacataatttattttactactgttcttttttcctttgaattttaatatgccaagcatgacacttttctcctgtctgatgttatgtgatatgttgtcaagggatttgacttactttgacttgggatatattctttggtgatgattatctgatgctttcttaattggtgatgagaagttctcatctgttttcatgtagaactcgattttcttgttcttttttaatttgttaattttgtctgttgaagtcttttttaatgtactttctctagatt

SEQ ID NO: 86330 - DNA, 732 bp, Citrus clementina
  Intron number 1 from transcript clementine0.9_034211m (loc us clementine0.9_034211m.g) derived from phytozome v7.0 (c hr-ID scaffold_4; pos 5583959 to 5584690 reverse strand)
tgttgcctgttgcctactgctgctgtgaagcagtagaggagaagaagaaagaaactgaagaacaaagaagaagataaagaaacaaagatgaaacaaaaaacaaaaaatagagtagatgacgaagaaagaagaagaaaaggaaaataagataaaatatgaaaaaaaaatagaaggactagtaaaagataattggtttggtagagttttttaattagagtttatttaagtaaaatttttataaataattttttttttaaaaaaaagttgtttgattgataacgagagtttttattaaaaattataaaaattaagtttttaaaagttatgtcatgaataaaatgaaataaaaatattaaataagtaagaatattttaaatattttaatatttttaaaaagctgcacaacatttatttttaaaagcctaaaatttaaaggcatatttggtattattttcaaggctttgttttcatttttgttttccgagtataaatataatacatgttcggtgggttgaatccaaaaaataattataaacaaagaatttctcgaatgaattgtaaattaaattaaaaaataaatcccaagacaaacttcaaaagcaatcattctctatctcaaatcttatcccatccctctcgttatctctattcacacctctttcttctttgtggttgatacttctccttcaaccacaagccacctaaacttttcacaactctctctctctcttt

SEQ ID NO: 86331 - DNA, 452 bp, Citrus clementina
  Intron number 1 from transcript clementine0.9_001007m (loc us clementine0.9_001007m.g) derived from phytozome v7.0 (c hr-ID scaffold_7; pos 6236785 to 6237236 reverse strand)
tcacttccctttttgtctcctctacattgcctccggtaatttctcgccggttcctctcatttccactttacgtttcattcttttcgcttaattgtgtcaacctcagcttaaactcagcagtgaatttaaagaaataagtaacagaaaatagtagtaaattatgaaactcttaattcaataaagcaaatttaccacttcaattattaggattaagcatcttccaatagcatctgattaaaattttgttaatagtttgagcttaattttagggagatgatgacctgtaattccacgttgccaaaaacacctgcaatgtcttccttgatttagtggaaattgagtgtttctatttaatcagaaggttttttgaatttgctgcttgaatttgatgttattggcataattattatactataggaggtgaaaaccaagggctaagaattgctgctgcc

SEQ ID NO: 86332 - DNA, 866 bp, Citrus clementina
  Intron number 1 from transcript clementine0.9_015415m (loc us clementine0.9_015415m.g) derived from phytozome v7.0 (c hr-ID scaffold_85; pos 283518 to 284383 reverse strand)
cgtggactgatcttgaatattgcaagtctcgaaaggtaatctttttcctatcaacgttcctattttaattttttaatttttatttggttagtgaaatgtataattataaatgtggtttgttgagtgcttaacaatttgttttgagctgaagagaatgctgatgaaaatttgggtgattgcttgcttctgaattttgtgggtttaatttgtgaattatgagtgaaagatatgctcaataagtgcttttggtttaccaaaatcgctcttgaataggtcaggggcttgctttgtatcactttatggtatttggttgaaacaggcaaaagcttttcttgatagaagaacacttggtgctcagtatttgaagaagccaaaaagcaaagcacttaaagtgcttttatagaaaaagctttaaagaaccattttcacttgaaaaaacttgcttttgcaaaaagtaattaaatgacaaaggagatttgccaagtttcacttgcaaaaacttggttttgcgggaagtaattaataattatatgactaatttcatcaattaaataagtggatggatgataaatttctttttgcaaaaaagaaaaatgctggtatgatgagattataagatgatacgttcttcccctgttttttgatcctggaactgaaattgatgaaagaccaatctgcacacacacacacacacacagagtatctcgaagtgattaaaaatacccagttgtggcagctttttctctgtcgtatacatctgattttgtttatttcaagttttaggggatttaatttgtttgtgctgcatttgtattctcttgattatggcagaagtggtatccagtgtcaaagacattggcagagaa

SEQ ID NO: 86333 - DNA, 708 bp, Citrus clementina
  Intron number 2 from transcript clementine0.9_026214m (loc us clementine0.9_026214m.g) derived from phytozome v7.0 (c hr-ID scaffold_24; pos 3418790 to 3419497 reverse strand)
acgagtcttctgggtaaacaaatacacactctctcactctctctcttttcaacttaaataaaatcgaaatgcaatatgcacttttttatagttttggtgattaccgcttgtttgcttctttcatttgatagttcaattttatactttttgtttgatgtgatgactctaggttttctcttgcttaagttgttgcttaaatacaaaatgccatctcttgtgggactttcttagtttgtgtttcaatatggttaaaatgtgcaatatgcctacaccttgaataaccttttgtctacattatgactgtttctatgcttctttgtttgcttcttcaattaagagaatatttggattagacacttctatttttcatcggtaatgggccaaatacaatttgtttttgcttcagtctcatggttcctacacttctagtgttacatggggtttgtttgactggggcgttgagggaaacagcatgatcttgctctgagttacttgagtaattttcttttaacctggtcaaagctgttaccattttgacatatgttgattgaccattctggaggcttggcttcacaatagtgctatcattatggacataattagatcaaaattttatgatattcagtcctcacatatccagtagtactaaaggttatatcttgaattgtgccttcagttactattacagcagcagtttgggctattact

SEQ ID NO: 86334 - DNA, 903 bp, Citrus clementina; identical to SEQ ID NO: 79274
  Intron number 1 from transcript clementine0.9_015849m (loc us clementine0.9_015849m.g) derived from phytozome v7.0 (c hr-ID scaffold_4; pos 5571938 to 5572840 reverse strand)

SEQ ID NO: 86335 - DNA, 762 bp, Citrus clementina
  Intron number 1 from transcript clementine0.9_008193m (loc us clementine0.9_008193m.g) derived from phytozome v7.0 (c hr-ID scaffold_4; pos 6817614 to 6818375 reverse strand)
ggtacggggagatcggtcccctcccctcccctccccattgccatccctagtaaatacgctaaaaatgaaaaaaaaaattaaagctttgaggaagcaaataaaaattagacaaaacataaggtacgtgaccttaagggtttcgttacacttgcaattcaattcaattcaattctttctttcttcttcttcttcttcttcatttaacatctataacagcatatgtacttatttcgttagcatgcatataaataatatagctagtggtttcctatttaattatataccatgttcaaatggagaatatatataaacaactttcatatgcccaaccatctcattttcattcttttatttatttattttttcaattcttgagttcatattttgctacaaattttacagcagaggaaaggagttttttatggatagttttgcttccttttccaattattttcaactttcctactgcctaaccaacttctattatttccagttcctaaatttttcgtttgacagcttaggtttaatatttaccgaaaaagagaatagctttaaatatatttgcatacttaaaaacgaatgggacaatcaaatattaaaccatgtatttagagctagagcatgtagctttcttcccatcgtatacacgaatttgaaattttgaaatcttaagccggctgggtaatttaagactcgaaagaaaatcctaattctaattcttttttagaagaaaaaggaaatcctaattctggttggcgaagg

SEQ ID NO: 86336 - DNA, 417 bp, Citrus clementina
  Intron number 1 from transcript clementine0.9_002977m (loc us clementine0.9_002977m.g) derived from phytozome v7.0 (c hr-ID scaffold_7; pos 3983570 to 3983986 reverse strand)
agaaggtgatttcttaaccaaattgagagaagtcgcagctttgatttgcttgtgttttgcgaattcatattgcttaattgaattgatttttgtttgtacgctgatcatctttttaatttgctgagaaactttgcagtctgttcttagctgagaaattttgtttagaaggcaaaaggaaccgtattttcagtttcatggtttaaggtcttatttgttggggttgcaaatcatgttatttcgaacaattttgcttgttgatttgaacttggataattttttttactttaaaagtaaatggagtattttgtgtgccaatatgctagctgactgatggctaaattttaaggtgattttctctgactttttgattatcttttcttaatgatacagttcaaatacagatcttaacactgaagt

SEQ ID NO: 86337 - DNA, 884 bp, Citrus clementina
  Intron number 1 from transcript clementine0.9_031754m (loc us clementine0.9_031754m.g) derived from phytozome v7.0 (c hr-ID scaffold_10; pos 3808532 to 3809415)
gacacagtttgctactactactccttactggtaattataattttcactatttattctactctgtatactaaaggctaagggttattatgtaaagtagtaaataacttctaagaatttgaaaaagaatcctattagatagatgtcggtaataattttctaactaatttctaaggaagatattctctgaaaatagttttgacttttgagttgtaatcatacaatgtataatattgttattgtacatggcactgaaattacgtgataagaatttacatagaaaattctgaatgaagcatgtagcatgctttagtcttgtagctatgagtgatgcaaaatatatgttcatgtgtatgtgtatgaacttttttttttttaattccaactaaatctgatattgaggcatctttaagttgagtgttagtacatgaatttggacaatataatctgcaacatatatatatgtacatatacatatacatacatatatgtatataattattttctggtcagagattttaaagtgcatgaaagttttaaaactgcacggctttaaagacttacagttttaagctcttaaaactatgttgttttaaaattttctcatacttttctacactttaaaatttcgaactggaacatttctaatatatatatactctttaaatattgacctgaattaactatagcaaagactaacgaggaattcagaaacacaatagtttttactactcatagtcatcattttatttggaatagaaatatgcctatgcatatggtgctttgtttttttttttttttttaacaataaaaagttgtttatggaaagctcgtattatcatgaaatttgtggaatctgtctatttgattaggcgtctgaggagatt

SEQ ID NO: 86338 - DNA, 716 bp, Citrus clementina
  Intron number 1 from transcript clementine0.9_004331m (loc us clementine0.9_004331m.g) derived from phytozome v7.0 (c hr-ID scaffold_2; pos 4786126 to 4786841 reverse strand)
aaagttcgaagagtcaaacatttgtgtggcaggaggtatgaaagtgatggtattatgatagttgcatagttactctatgtttacaacctttcctattttaagctaatgacgttcgattttagattaaaaaatgcatgttttctcctctgtaaataaattgaggttggggtttctggactgattcataattatcaccctttcatcatcagcagaaagcaatatatatgttgttgcttgattattttggctatggcctatgctattgtggaacaaagtaggactgctaaattttgaaatgaaatgaacttgtatggttggcaatgctgaaactgttattcaactatacatatggcctttcatttagtctgcccaccataatatccttcatttttcctttaattactgatctaattcctgggtttaatgaaatttttagtgctatgtatgtttggccttcttctttctctaaatgctgcttatttcttttcctgacatgagtggcacatttctttctgtgcttagtgaacatgagcacggcagtttcatctttgccacatgaataattgagggtgtgtaggggttgttagttcaagttgtaccatcaaggatgatatggcaagttagtatagaaatgttcaatcactcttgtattctttttgacatttttctgtgtctttgcagaacccgtgaaagtggatattgaatttaagaaccct

SEQ ID NO: 86339 - DNA, 787 bp, Citrus clementina
  Intron number 1 from transcript clementine0.9_012423m (loc us clementine0.9_012423m.g) derived from phytozome v7.0 (c hr-ID scaffold_31; pos 1326501 to 1327287)
cttttcctcacattggcgcttccaatcgttcaaaggtaccattttttcttgcacttgaagttcattgtgagatggggttttgtgtttttggagatttatgtgaaatgtagtagtgggtttgtgctaagtttagagagtgtttgattggtgattaatttgttagatttgaaatcaaagttcaatattattttaggaaaatataaaagatcgaagtaaagttgggtactttttcaatttagtttttatttaaatgttaagctaatgtggctctataattaatggtacgtgtgattttaatttgtcctagtgtaattgtttgtggagaaaaatgaaaatgccggaaaattacagaagctaaatacctggattctgttgtgattgtattggttttgttgaatctgttgcaatttaatctgttatttagttgagaatgattgatttactctactgctctggttaatatgacagatataagttcataaatcataactgatcaatattgtttatgttttatccaatgtggtttggagaagttgatagttttaacttcctcggatgaatctttcatttggtcacgggccgaaaagaaataagaatcttcaacttctcttataggtctttttaattggatgtatctctgcttgcactgaaatctggattataaacaatctatgtctaatctagtgcatcatattgtaatttagcacagaaacactaattgtactggagctgctccttgtataattttacaggtatttattttcctctgcaagagttggtgcattga

SEQ ID NO: 86340 - DNA, 652 bp, Citrus clementina
  Intron number 1 from transcript clementine0.9_004514m (loc us clementine0.9_004508m.g) derived from phytozome v7.0 (c hr-ID scaffold_10; pos 1954721 to 1955372)
aaagttacaaacagaaatcaaagaacaagagaaaggtgaatacaatttgctcaagcgctgttagttttttaagctaaagggttaataaaacacacatcttcagaggggataagagtaagggtacctaaataaaacccgattcgattctgcgttttattattattattttttcttatccggatgttcttcagtttcattttagggaaatatatatgtaattttttgttatataaatgtaattttttgtttactgtatgatgtaatttgaaaggtttttaaggatttgtgtccttttgactttatgaagtgggtgttggagatttgtcctatttatgttatttttgcacttgtgggtagggtttctgtgtaattcatgtaattttaccaggcgggtgttgcagatttgtgtttttttgtgatgttataggatggatggtgaagtgtttcttatggttcttaaatgtattccttagtgggtagtgaatcttttgtattaataagtgttgattatgtgtttatacatatgaatcacattcttcttaaatttgagctatgttagtctttaatatgggtgatctttggctctaaaacctgttgatgtagagaagcagaacaattttgaatggtcttttatctttgttcacagttctgc

SEQ ID NO: 86341 - DNA, 299 bp, Citrus clementina; identical to SEQ ID NO: 82641
  Intron number 2 from transcript clementine0.9_020672m (loc us clementine0.9_020712m.g) derived from phytozome v7.0 (c hr-ID scaffold_3; pos 2404087 to 2404385 reverse strand)

SEQ ID NO: 86342 - DNA, 594 bp, Citrus clementina
  Intron number 1 from transcript clementine0.9_035326m (loc us clementine0.9_035326m.g) derived from phytozome v7.0 (c hr-ID scaffold_3; pos 3904626 to 3905219)
aaagtgctgtaagtcaacctgtatcacccttttttatgaatcataagaatggatatggatatctgataatttttctttatatatttgattcttttttcagctttatcattttggagtacctttttctcagcctattgctccagtgacctatatgtggaaacctttggacaagcaggatcgagaagaggatggtaatttcaatacttctgttggaggtaatgggtcatgcgaaactgagtgtcattcacactatcgccaactttggttatggattcatgcttcagcttttggtgagggatttggtgctctaaaattagcctgtcagaaacaggtaaagcacatgtagctggtttttgttagaacatctatatagcaaattttattgacgatacactagttcttctttagcaggcttgacctccctacctcaaatttgtggtcgtttgggaagcctttctgatatgattttgagccgcctgttgaaatgaaatattttcatttaatctaactgtagattaaatgaaaatttcttgtaatttattatttactcacgataaattttgttgtatgtttaatgtcttataatctaggtga

SEQ ID NO: 86343 - DNA, 438 bp, Citrus clementina
  Intron number 2 from transcript clementine0.9_033601m (loc us clementine0.9_033601m.g) derived from phytozome v7.0 (c hr-ID scaffold_24; pos 864338 to 864775)
tgagcaattacactcgggactggttctttgctcatgttactatgtacttgtataattatttaatcgataatgatcgatctcttctcgtttctgaattaatcctggagaccaaaattgttagatcggcctagctcttaataataaattttgcattgcgggaaagtagaaactaacacatttcaaccaatcacacagcagattatatttcaattggagaatgaggacaacaaaggaaattatacactccaattagccttgtcagctgctacatactctaatttgactgtacaaattaaataataattagcaactccagctagcattaattcaaaaccaataatcctcatcatcactgattcgtttgctgatttttttttcttacaataatggtataaaataataggttcagctcaatcctcaaagaaaaaggcgacctct

SEQ ID NO: 86344 - DNA, 888 bp, Citrus clementina
  Intron number 1 from transcript clementine0.9_000040m (loc us clementine0.9_000037m.g) derived from phytozome v7.0 (c hr-ID scaffold_3; pos 315155 to 316042)
ccaacgccgattccgtcttcagagagctctgtcaggttatcgtctattcatctttcaattatcaagtagtacttttgttgcattaatcatcaatgttgcattaatcatcaacatgttctctttacatctttcaaaaccctaatttttcctgaactgtaattttttcttgagtggtgcaatcatatgttttattggctttgtttgtttattgcttatcaatttcttgcaagattttcaataaacacttaaaattttgccttgttttttaaagagttttcttcaacattttaaaaaaaccctaaaaacgtgccagttttttgctaattaagaaacatattcactgcaagatatccaagaaacgctggatattgcgcctaatgaatatggaagcaattgaattgatgctttttttttttttaagatcaacattgaattgttctcaatttggtaacgttaaagttttcttgacttttatattttattaaatttatgccagcaagtttggtagaaagtggtgttgatgcttaactattccttggaatactattacgtcctttccgttttccgtttatataagaatatcatactgtgttcattgcacttgcttaactaagtggtgattatatgttcttggttttcgtttgttttgagttattgcaagattttcagggaacctgaatatgtgagtttgaatatcgaagctattgaattagggattaatgattttctcaaattatttcgttgatcactaagcttcatttcaaaacgtggatgatgaatcaggatggaatggctgtctcttagatgtataacctgcctatgtagtgctttaaaacttaattgtttctgacatttactttcttttttcttgttggtagttcattgaat

SEQ ID NO: 86345 - DNA, 332 bp, Citrus clementina; identical to SEQ ID NO: 85559
  Intron number 1 from transcript clementine0.9_017258m (loc us clementine0.9_017258m.g) derived from phytozome v7.0 (c hr-ID scaffold_3; pos 1125551 to 1125882 reverse strand)

SEQ ID NO: 86346 - DNA, 909 bp, Citrus clementina
  Intron number 1 from transcript clementine0.9_018656m (loc us clementine0.9_016538m.g) derived from phytozome v7.0 (c hr-ID scaffold_14; pos 716098 to 717006)
ctccggtcgagcagctttgctcatctcatcatctcgtgagttctcttctcgttttcattttctctttctccgtatctttttcccgatctagggttttttttatctcggaattcttactggaagcacctgtgattgtgtctgtaatttaaggtttgaaaaatgcttgtataaaatttctaactaaagatgattacataatcaacgagccgatgcctgattgataggataaatcttatgataaataatgaacttgccgtttttgtggaattttctgattttgtttggggtttttgcccattttacttaaatggttgtgcaatttctagcctcatattctttttttattttttggttctgtaattgacggtagttagaatgtgtgtgtaatttattgtttcagtgaactaattgatagagatattagctgaaatggttggaggaggagttatccaccagctcctgagaaagagacttcagtctcagtccactgtaagaatcttttccctcatgctgctacacatggcggcctcctgtgtttgttaatttggagtttttgaagtatcaagtctatttgagttcatttgtgagttgtatatgctgatgcagtcacttctgtgtcttaacgagttttctttgttctaatctatttgatctttgctcacgtactggttttatttactgtttctatgttgtgtgtgcgtccgccgaatgtaaaaaatggatgacataatgctaaatgtttcagactgtttgcaacttccaaatcctgccttttggttataaactgggaaatgtggcattgcattgggttgtatctctgcagtactatgctatgaagtaaaagacctaatagtttaagtatgtgatcatgcagggcttaccagtgttatcctttttcacgtcaaagaa

SEQ ID NO: 86347 - DNA, 543 bp, Citrus clementina
  Intron number 1 from transcript clementine0.9_023219m (loc us clementine0.9_023219m.g) derived from phytozome v7.0 (c hr-ID scaffold_3; pos 3659980 to 3660522)
atctgcaccaaggcaaaaaccgctctcttcctcaggcaagtcgttttactctctagttggtctcgcttaatcgtacggtctctagatcctgatctctccattttcttatttgattgatatctctagtctttcttgatctctatgtctgatctggccttgttattcttcgatctgcatgttaattgcgagccgttgctcgaattggaaacatttttgtctgtgatctcctcatttctcatcttatacaactttgaattatcgaaattacgtattgatgattaagatttaggtgtgttttatgtctttattgtatgatctaacgtaattgaggtttatttcgttcttaaattatttctaaatgatatttggttattttttcaattagatctaataattgcatttttgttaaccgaatcttgtggtgttatgtagatatggttggggctttcttttgtttgttagattttaatgctattgtaatgttggagatgtgtgaacatgtcatctgatctctgcattggttggtgcttgcagttgtgaaaa

SEQ ID NO: 86348 - DNA, 934 bp, Citrus clementina
  Intron number 1 from transcript clementine0.9_005818m (loc us clementine0.9_005808m.g) derived from phytozome v7.0 (c hr-ID scaffold_7; pos 4395357 to 4396290 reverse strand)
ggtcaaaaaatttcaaagcttgatacccttttaaggtaaagctttttttttttttgttcacagatcaagtttagattttgtttaactgggtgttgtctataagttgattctgtatctgggtatttattatggagctaggccgaatggtttttggattaaagttgagattttgggacccttttggggtttattgaatctgaaccgagttgtggattgtaaattgttgctataggcgatctgatcgagtgtggtttttgtatataataatttaaaatgaggctctgtgaataacttttattgaccttcaattcagtatgtgcagtaaatactgtgtcggttcaattcattgggttgttggttaaatgtgtatggatggatagatagagcttgataaatgagctgatttaaagactatcatatgtttcgcaccttcatttacttctttttcttggttatttaatagattattctttctttctcaacaattttattgcctgatttgttgacatgttaattcattattcatgattttactatggactggcctgaaatggagaatctctcattttaaggtcaagtgctctcttaagatactatatagtatcgtcgtgttaattcattattcatgattttactcaattgaaactgttttgccttgccatgttaagcatatgattgtaatgagctagttactgtagcgggagtattgccattctccggtttcttgttgggttgcttgagtagttaattagaatttgaaatatgacgctttgagttgctattatacagttcctagatggatgtctagtttttttctgcagaaaattcaaacttctgtggttgggatagttgactccttgttcttctctaaaagatgcagtgaatctttcatctatttttttagattccctagtggtcgtctggaatcacaggg

SEQ ID NO: 86349 - DNA, 961 bp, Citrus clementina
  Intron number 3 from transcript clementine0.9_025454m (loc us clementine0.9_025454m.g) derived from phytozome v7.0 (c hr-ID scaffold_2; pos 7288156 to 7289116 reverse strand)
gagagaagtgacataccaaatatagataagaagaagtaagctttacaccatattatttatgacattgcattatctggtttcattgtaaaaaggaagaaaaaaaatacatgatctgttcctacagttttgagcttcttcagtgacctctatttcatggctttgacaatatgagaaagaaattagagtgctgatttaggctacttgaacttgtttgtttatgtactggattaacacttgagctgcattatttgaaacaattcttggtagcaatctcatcaactttacgtagcactctcattcctttcttttctaaggtatattgatctcattcctctgtggtaaggggcagccagcagagtatggcaacctcttacttgtgctactttgtttgtaatattaccatagttttcattgttatcttatattgttcttcctgtttcatttagctgatcacatggctctgtcatgtgagtctgcatacatcctatgacagcttcttgcagctattttctttgtgggtcttgctagcttacagtttttgtatattacagcccataaagaaggggcgttaactggccctcatccagttaccccttttggcctggctgtacattacagtaaatgtaaggtagccatgtcttttttccatttttttcctttatatttgagattaaaacctaagacctaatcaaaatttagtcattcatttgtttacctgataatcatcatatctattacttctttttctttgtcgcatttctttgaaagatcattgtatttgtagaattggctgtcgcttcagtgtttatagttgctatcattgctgacagatggtaatttaaatgtccatatggactataacaactcgctacttgattctatcatactaataaggtttcctctttacctgaatgtgaaaattacaggtatcttgttccagctgacctgactgtaggacaat

SEQ ID NO: 86350 - DNA, 756 bp, Citrus clementina
  Intron number 2 from transcript clementine0.9_002567m (loc us clementine0.9_002567m.g) derived from phytozome v7.0 (c hr-ID scaffold_3; pos 179694 to 180449 reverse strand)
tctaatgtgagttttttgtcctagaatttggtcttacaaattaaactcagactattagtaggactaattttgaattgtatggatttatgcaaaattgggttgttgtttaatccttggcatttttcatggtgtatgtttcatttgacatatatagatatagagagagagagagagagagaggttatctaataatggatctgcactttagttaaaatgttggattccaattggataatatctacatatgttgggtcctaccgtgtgtagctattaaaattaaacaaaaaaaggaattcaatggtccaaattgggagcttgcactttataatgtaattttacaatgagaaaatctcttaattattaaagtaagggacaagttaaaagaaaaaaaaaaacacagtccgtattgaaatctgtgtttttttgtcttttaacttgtccttactttgttaaagtacgggattcccttgttataaaattattttatacaagtacgtaggaagatgaactagtaagcaccaatgccaaccatatagtgagcacctggacacgggcagcgtctgtgactccttgtggatggtgttaaagctgtggattaaccagatggtgagcatcatcgcctactagatcactctctctctctctctctctttatatacacacacactctcttatatattttcctcttttttccacatttgattgtcttgatggtttcaagttaaattcttttgcaggtctcaccattgcctttcg

SEQ ID NO: 86351 - DNA, 504 bp, Citrus clementina
  Intron number 3 from transcript clementine0.9_015222m (loc us clementine0.9_015222m.g) derived from phytozome v7.0 (c hr-ID scaffold_3; pos 4679034 to 4679537)
cttccacacactgctctcaaccttaaggtatagtttatttggaatacctatggttttgctttatgatgatgacattatgtgaatttctaaaggtttgtatacttttttggtcattctttgatcaactttgataaaagttgatgcagtaccaggataactgggaattacagcacatattcgagaaatctgaattagagagtctattagggtaaacaatatgttgaaagttgagtcagtggtgtggaaaattttgaagaaaaaccttgtgggatcgttaattatcttggatgcctgattcttagaacccacgacattcagttatatacttggtcagtcataggctacaagtatagaaagcagtgtcataacagtcactaattaattttcctgcatgaactctatttagttctaatctgtatgttattttttctgaataaaatgtttcttattctttgttgtatgtttgcaggagaagaaacggaataatctcaaggactttctgaa

SEQ ID NO: 86352 - DNA, 508 bp, Citrus clementina
  Intron number 1 from transcript clementine0.9_006104m (loc us clementine0.9_006104m.g) derived from phytozome v7.0 (c hr-ID scaffold_10; pos 1404868 to 1405375 reverse strand)
caattcagggcctgatccagttccagggaacggaggtgactttgattttgcctttttcttttttcttttccccccttttctgggctatcattttgacaagtgtatgaccttcctctttgagttcatatccaaaggttatatatacaagaaaccagttgataaaagtgaaattaagttggccagtactccaattcttattcccaaagaaccaaatcctaatttgttaagatttgtagactttgttttgtttcttgtaacaagatatgtgaaggtcaatttgatattttgtagctctgtgtttcctagaatatatataatttattcacaattgcaggttcattttttttttaaaatcaaatggatgaaaatttatattctctagaagttgtacaaacctacatgtgaaatgttttgtagtttgcttctgtgccggatacactttaatgacataatataatgttaatattttccaggagacaacaaactagctgtcatccttgcaacatct

SEQ ID NO: 86353 - DNA, 842 bp, Citrus clementina
  Intron number 1 from transcript clementine0.9_007866m (loc us clementine0.9_007866m.g) derived from phytozome v7.0 (c hr-ID scaffold_3; pos 579767 to 580608 reverse strand)
aggtggcgctacaaccttcaaatcagctactgttggtgagttttatcaatctcttcattacctgctaacgacgttttaaccatattaattccatatattcattttgattggtcaaaacaaaaaataacaactttgggctaataaaatcaattaaagaacatatatagtaaacggaagcgttataattgcctgacctagtccagttcagatgaatgcatggactccatccaacattgttttatttattacgaaacattattattgtaaacgtactaaaaacagggacacatcaaaatgaagagctttaaaaaagaggggggaaaaaagagatgccaagtaaaagttatagtaattgagatgtacatagattttgataagtcaaaaactgatcacgaagtagacgtgtttaattttgcatgttaactaattgaatatgtctatcacactgggaccatggattatagtttcagagaaatggcgatcaatttgcttaggtatagtttgctttaaaagcaagtaagtacatcaattatccaattaaaaattgtatcaagtcttggggcaaggtccattattatgattgttgttattatttttttaaacttaatttcgttgacaataaataacaataatatgattttacgcaaaatcaaaggttatttcaagactcagccattaagtcaaaaccattttaacttatgcaaaatctggaatttgataagagccccatggagatggtgtaagtttgaatgaaatgcagcagttactttaaactaaaataattacatgaggaatttcatttgacagctgttgttggagataacttcattgctcgtgacata

SEQ ID NO: 86354 - DNA, 634 bp, Citrus clementina
  Intron number 1 from transcript clementine0.9_004008m (loc us clementine0.9_004008m.g) derived from phytozome v7.0 (c hr-ID scaffold_3; pos 4408682 to 4409315)
ggcggctgtgtactcctctccttcgtatcaacttggtaatgaacctgtttgtgaatatcagtcctaacttttttactctatcgtcttctaagttgctgttttgggggggggggggggggggggggggggggaaaaacttttctttaaaaaacaaacagctacttttgctattagctttacaaccaaaagcatcattagagtgaattttgagggagtttgtaactatgcatgcttgatctccgacccctgggggtgatttttatgaactgtaaaattagtgcaattgtttttttctggtaatattcaggaagagaagtgagtttgtttcaaaaagtgttgttacctacctttgaataaaaatggtggttttttcatattagattttgtttttaaggttcaagggcagatctaacttgagggttatgaagaggatgattaaatcaacacaattctgaaagatgggtggatgctttaaagaatttagaatatatatgggagttatacttttttttgaaataatagagaaacttagacagtttgtagaagatgggaaagttttaatggtgtaattaactttagtatttcttagaaacactataaagaccaagatactgagaatttctgttgatgcaga

SEQ ID NO: 86355 - DNA, 565 bp, Citrus clementina
  Intron number 2 from transcript clementine0.9_005807m (loc us clementine0.9_005807m.g) derived from phytozome v7.0 (c hr-ID scaffold_119; pos 323294 to 323858 reverse strand)
tcctaagaaacaacgagcccttcgcaaaaacattggtattctcttaatctttattatcttttaatttttttatttttctgtttgtaactctgtctttattatattttttcgccaaaaatagaaaatttatgtctcatgttttgtatctttcaaagtgaagctgttaaaccttgcttaaatcataaaatgttaatttagtatcattcaattcaataaacttatgtttgtaatgctaaaggattttttattttttatttttttagaccgaattttcttgtttttaatttttttgatttacagttaaaatttttagagctttggatttaattcaaggcttaaagctatttaaatcttcaaatgaaaggcatgtgaaattaaacaagaatgttattgattaatttttgctcatgaaattccaatatttatgttctttgctgagtttcctggaatttattcttaggaaaagctaattacttgatgttagtattaaaaattgtttcttcttttgctctgaaattatttaattgtagattaccagcgaagggtggagttaattcaggacttg

SEQ ID NO: 86356 - DNA, 722 bp, Citrus clementina
  Intron number 1 from transcript clementine0.9_036066m (loc us clementine0.9_036066m.g) derived from phytozome v7.0 (c hr-ID scaffold_4; pos 6066374 to 6067095)
acttaggttacatcggcgatatcagttattacaaggtaaagaccaacaacaaaaaaagagcaaaccttactgcatacttagctgaaagctttgactttttgatgaacttagtttgatttgagatgaaatttaacttttttctgtgttaaataggtttagttaatgaagaatttattctaattacaattgaatttagcttctaatgctgcaagattatgttttagagctctgttttcaataagtttcatttctttttctcctttttcacatttgagaaattaatgtagtatgagctgtaagttagtactagtgtaatctttagaaatttaaacgttctggatttgtagtgctttagaagctgtactagcaattgtaaaagtgctttttttggggaaagtacttttacagtaagctttagaaatgaaaatgacaaattatgaaaagttggtgtggattggaggtgtgttttgaaacatagaagtaagtgtaaaagtgctttagactagggagtgatttggaaacttgcatttaaatgtgcttttggaaaagcgataagttagcacgacagatttatttcccctggtgatttttgtttgtgttagcatgtttttctttaatttctgctgttgctatgcttattgttctgaaattatgcttaaaacagattatatgtgttgattgcggcagttcctgtatccgtctgaagaggacttgtataagtt

SEQ ID NO: 86357 - DNA, 748 bp, Citrus clementina
  Intron number 1 from transcript clementine0.9_035252m (loc us clementine0.9_035252m.g) derived from phytozome v7.0 (c hr-ID scaffold_41; pos 204153 to 204900)
aactgctgaagaacgcaagtgtgcttgtctcagtaaatcttaaattctcaccttgtggaagaatatgtgaactattttcccttttttttgaatgctagtgtttaggattgcaatatacatttgactcttttattgtcgaatagacaatttcaatatatttggcctaataattactctatataggaagcatttttggatttaaatgattaaaaactcaatcacctttttgttttgttaaagtttacggtggcaaagaggccctcaaattctgtctgttttaatgtaggtggttcataaaattgagattgaggtataaagcttgtttataatattagtctattaaagtgatacacttgtgtattctatgtccttcataaagggtttcataaaatgttgaatctgacgagttgagcaatagcatatagctgttattagacttctcgagtatttctggtgtcatgaggcatagtgcaagtctgtttgtttttctgcatgttgttcatctgctttgtaaaaataaaatcattaaggaacagaaaaggcatctacagtgaagtatcccatcacaaaagatcctgcaaaaatctttaccaacacagaaacttttgcagattctgttgattacaaggaagtaggtaacattcgagtccatgatgcaattttgaattaacgccttaaatcaaagattagatgtttgtgactatttcatgcagtaacttcatcaggctaccaagcagagaccatatcc

SEQ ID NO: 86358 - DNA, 837 bp, Citrus clementina
  Intron number 1 from transcript clementine0.9_033095m (loc us clementine0.9_033095m.g) derived from phytozome v7.0 (c hr-ID scaffold_85; pos 105122 to 105958 reverse strand)
attctgccgattctatttccaggatcattgcacaggcattagagcatatttctatgttatttgctagtggctaagacattgtataaggaaagattaatgatttgctttatttccatgttaatgagttcaatcggttttgtcttcaattcttatttacttcctatccctgatcccttacgtggagacactttctcagagaaagttataattaagagaatctgatcctacaaattgaggtgcgacttatgggcctaaaaataaatgaggtttaggaattggtctttgaggtttcctttagatgagggttaactttcgcttatgattatcataagcaagtaaattagatatgactaaaaataggtgagaatcagttcttacataaacccttggaaagccaccatcattaaagagcatcccaatgtatctcttccatagacttggaagtgggaagtggagagaaaattccattgtggggagatggggggatagaaaatggctctgtttatgagcaatttcctcagctttagattaaatgtgacttggaaaggtcatgtagcctgaaaaggtttgttttttttatttttgatcttaagctcgagagaagattcaacattcaaagaagatatcgcagcatgaacctgtccccttcatggtattttatgtgtagacagacaataagactttgggttcgctaacttagatccttttctttgattgtaataaagatttttgttgttccctacaaaacaagatataaaagaagtagctactctgatcaattcattttcatacctttcgataggttggagtaggggatatatctggtgggaataaaat

SEQ ID NO: 86359 - DNA, 808 bp, Citrus clementina; identical to SEQ ID NO: 82291
  Intron number 1 from transcript clementine0.9_032695m (loc us clementine0.9_032695m.g) derived from phytozome v7.0 (c hr-ID scaffold_3; pos 860294 to 861101)

SEQ ID NO: 86360 - DNA, 911 bp, Citrus clementina
  Intron number 1 from transcript clementine0.9_024617m (loc us clementine0.9_024617m.g) derived from phytozome v7.0 (c hr-ID scaffold_10; pos 2272391 to 2273301)
cgccaaattcttcactgcctggtattttttttttcttccctttctcttcctctcaatcaattgggttgtttaatttcgattaaccttggaattcggatctggttatgatctgtttgttggttttggaattgtttgtttacgagatttgtgattattgccctgcttacatgtgaattaagttgtttgagaattctgctagcaatttttatgtttgaaaggtggtctttattttctcgatttaatttgtttatatgattcttgtaggtagagatcagttaaaacattgtccaaatttatttatttatttatttatcttggaattatggctttgctgagatcttgaaatgaataagaactaataattattttgattagtcatgaatcaaactcatgggtttctgctggataagcccgagttcttggggtgaacgctgtaattcttttttcacttcagaatacggtcataggcagcttgctgaattgtggggttcctcaagtcttttcttgttactttgaacagtttttatcatgtttggaatcaataatgtagagaatttgttggttatcaattgtcttttgcaagtgagacttttctttattttgccctttctcattttggtgctgtctaattattgcaaaaagcacctttttcctgggagtcccaaccgtctgtttcttgcgaaatgttatgcaggagagaatccgtgcctaggaaactttacctgataattatgcaaatggggaatttctttggtaaattttgcgttatgatcttagtaacttttagatagctactttcctatgtgtatatgcttacagctatactcatattggtgaatcttgcttttttgttatttaaattatcctgagaagcttaagctttgctagacttgcaggtacaaggaaagacg

SEQ ID NO: 86361 - DNA, 505 bp, Citrus clementina
  Intron number 2 from transcript clementine0.9_029775m (loc us clementine0.9_029775m.g) derived from phytozome v7.0 (c hr-ID scaffold_14; pos 203169 to 203673 reverse strand)
attacttgggtcctgagtgtccaaagcctttaaaggtttgtttatgaaaggcaatagttttcgataatttcattagtcattttgatcaagttgtctttctttggttcttttctgaagttttagactccttgaaggttggactattggaagtttagtatgaatataatttaagaatttgcctagtgaagaggcagctactgctttgtagccactaattttgattgggtcagtgcttttcactggaatttatgcagagtattattattattattattttctgttatacggaatgctgatcaccttttaggatctttaaatttgatggacgtaaaaggttattgtaagttgtcaaaccataaggagaatggaattgattattaaaatttgattatggcttgcccttaaatagtttttgaggatgcatgatattaagtactaacaatcacaataaaaacaaattttgtcagctgatcatttttccattcttttaggaaatccttcaact

SEQ ID NO: 86362 - DNA, 806 bp, Citrus clementina
  Intron number 1 from transcript clementine0.9_015098m (loc us clementine0.9_015098m.g) derived from phytozome v7.0 (c hr-ID scaffold_7; pos 3124417 to 3125222)
gagttttgcacttaacaggtatacatgcaaattgaatcagatcaagaatattttccccatatatatgttgcttctttcattaaaaataaaataaaataagggtatatctctgcattaatgcattgctttttgctacaacgtccctgactcttttttgaaaactaataaattctcattacaatatctttttacttttttttggttattctctaaatgagaatgagagcgttgaatcggattgtcttgtgctgtagtggttctctaaaaataatcaaacgaaaatttagttcaggaaatggaagttgatttatattctcatttttacagtttctttttctttcggcttgtttatcattttattattttgtaataaacttatctttaattaatttatgacaagatacatggactaaatctattacaaaatcttgttgctgaagaaaaaagaagcaaaacttttttagcgggtgagacaaaaaccaagtactagggccgtctaggcttctagctgtcctttttttttttttcttgggaattttagattttcggcttgttttaatttataatattgactgaaagatatacttaattgaaaagaagaaaacattcttcaaaagaataatcaatgtgtggagaaatattgagtacttgaccagaaaaagccagacaagatacaggagaaaaatatattttaattagtattttaattacttagttaaacacctttcttatctcatgtatagtactaatcataatgttttttggtcgcagcatattgcacacaggagagacacgttaccaggaca

SEQ ID NO: 86363 - DNA, 929 bp, Citrus clementina
  Intron number 2 from transcript clementine0.9_011912m (loc us clementine0.9_011912m.g) derived from phytozome v7.0 (c hr-ID scaffold_10; pos 2558028 to 2558956)
agcttttgatttccccatttttctattttctcctagtaagatttttcttactaaatttgctctaagcgctatttttcagttgtgttgggtcagctatctctcggggtttcatattttacgaatgcatgtttgatttaattagtattaaatgctgaaaatttcgagctggagtggcgattttttgttcgagagtagtgaatttcttgtcgttttggcctttcgtatattgtcacttgtattgaactggtcgggtctcccctctagggtttgagctttagcttttggttgaaagggaaaaacaaagggaaaaaaatattgtgttgtttgtctgctgattgtttctaagcggtttcagtaatgatcttgttgaagttgattttaataattttcgaaatattaatcattttttagcccctttctgctggttttgatgcttattggaaattctgaatgagctgttatagtgattggtttataccctctacttttattttatttttcatttgtttttaacagctgagtgaatccttttctactaattgtatctgtatatggccaattattatctctcactgtgcagaatgtttgctttgagttgatggtgtaacggagatatttattttatgtttgcactagaatttgtttttcttctttggcttttgtatgtgttctgatacatgttaagttgttaaccttggtgggatattatatattcctctttaccattaattatgtggcagatacattgtgctacatagttgctatccttatgctatttggatacttcttgtattcttagtgtttggacctacaaaatgtcgaaaactattgatatgatacttgggcactatttttccaattgaatatttattttgaggtgttctactgagtcagataggaagtgacagcctctgaacattgggacatcc

SEQ ID NO: 86364 - DNA, 513 bp, Citrus clementina
  Intron number 3 from transcript clementine0.9_011912m (loc us clementine0.9_011912m.g) derived from phytozome v7.0 (c hr-ID scaffold_10; pos 2559090 to 2559602)
gctaatcacatcttctgtcagaaagcagaaatctggtatactttcatcttcgtcgtgcatatttgttctatgtttctggaaagttcctgttcctgttcctgcatttaattatttaatttttttaaactggaaaagtgccatatatattttttttaaatatgaaactcaaaagtatattaattgagaaaaatcaacatagagagtggaccagtagtcctttaagcaaaggagataagcttttagtgctatgcaaaagtatacccaaccaccctatacaatgctatatcccctctcaatttagatgaataaaaagtgccatagtgttataacttagtacctgtatgtttagattttctggtatgcacacttatatatcctatccattctatcctttatcatggtttacttagacctttgcagcttatttccagtagatggtttcattttactgggtgagtgaatttaactgtttcatctcacaacaaattccagttagcgttctttcaaacaaaa

SEQ ID NO: 86365 - DNA, 598 bp, Citrus clementina
  Intron number 1 from transcript clementine0.9_009289m (loc us clementine0.9_009289m.g) derived from phytozome v7.0 (c hr-ID scaffold_2; pos 2425398 to 2425995)
agacagatctcaatcaccactcgagagccgagacggtaccgtttctttccctttctctctcttttcttttacccgtttcttttctttctttttttctctttttcaaaagactgacttttactgatttgagttgcttttgttttgtgttcgtattctctgttattattattatttttttttgtgtttatacgtgaatttgttgaattttctcaattacgttgatttcaagagttcaatgtgagaaacattatttagaattttgttcgcaattgtaaaagatctaaagtggtgatgatttttttttttcacgatattcattttttaatgaagaagaattggaaatttcgagtccttttaaaccgcttacaattgtttcttgcttttagtttcaatatctattatctaggcggttcaaagaaacatctttagaattcagtaacagtatcatatcactggcctccagctgtccagcatgtaattaaatttcccatttttaaattttaatgtttcgtggctacaataaaatcaattagctaattctgattgttttattcctttttcaggttagtgcctcggattttaggtgccggatttaata

SEQ ID NO: 86366 - DNA, 737 bp, Citrus clementina
  Intron number 1 from transcript clementine0.9_013224m (loc us clementine0.9_013224m.g) derived from phytozome v7.0 (c hr-ID scaffold_7; pos 5822648 to 5823384)
ctacgtttgtgatcacttgtttccacactttcaaggtcagcgtttagtttattttcgaatattgtggcaattgggagaggaaaaaaaaatgattgcttagctatgttagtagttttgtttgtagtgatcctattttgtggtttttgattagccacgtttgtaaggttgtcaaagttttgattttgattttgatttcgatttgggtgacatgtgcgagtttggattgcgaagctcttacagttgagactccacgcactgcttatttattgcatgatcacattgcttgcttttcttaactgacgatgtcaaattttgagttctgaaaatgccatttgtaccatgaaaattctcaagaggagaaacccaatatgatgcaattgttttgatggcaaaatcaaattattggattcagagataccgttttggttccttggttaattttatgttgagataacaaggaagtacttctctagtaatttgcaaacaatgctttaaagaattgggtcagttgtaaaaactagaatttggttgaaattagcggttttgatactttgaacacctttcagtgtattggatgattttttttttttaatccttcgtttttagttgatattttgtcttgaatcttctgggtttttttatttgaactttggaggaggaactcttcttatgttggcttgcttaggctttgtgtttatgcagcaatagcagctgagacccagggagttgtaactaga

SEQ ID NO: 86367 - DNA, 334 bp, Citrus clementina
  Intron number 1 from transcript clementine0.9_031740m (loc us clementine0.9_031740m.g) derived from phytozome v7.0 (c hr-ID scaffold_113; pos 53812 to 54145 reverse strand)
aggtaactttagtttgtaattaattttggattttttaatgaaattttatttaacttccatgagatttctttctatctagatattcaagcttcagtggactcgtaatgtcagaaagaaaaatggtataatggttgtcatcaagagatttgaagtgggttgttgtggtaaaagaccaagtatcttttttggtcgtgagagaggtggaaagtatgaaaaataaagaagaaagacaaccaaaaagattcaaaatcgagaataactagtacaaaaaaatgaggattttaaattaaagggtcgaaagttagacacttaaaacgactggatgctaaaggta

SEQ ID NO: 86368 - DNA, 1024 bp, Citrus clementina
  Intron number 1 from transcript clementine0.9_000371m (loc us clementine0.9_000371m.g) derived from phytozome v7.0 (c hr-ID scaffold_58; pos 80409 to 81432)
tcaaggcccatagaatgtaaagtttattgctttggcttgttttacttttatgcaatggttttgtatttctcttgtgagtattagttttttttttttttaaattttaattattgattgcggttcaatggtggtttcagagtttaaatgttgcatccatacaagttgtacacaaatttgggtttactttatgtgttagctagctatattatgagtgattggctaggagaaaaagtaaatactatgaagaagagactgtgaaagtaaatttgacttgatgtagaaaaggtgatggggatagcagaatgtatgtgaatttaattatatttggatgtggccttttggcaatcatgataataacttgatgaattttgcacatatagtaattgatttaaagatttatgggctacaatgtatgtttttggatcgaagtgaagtctgttaccaatgaaatgaacttgacttcaatagatagaagcaaacatattggataatctcagggagagaaatattgtggcatcttgaaacttatgttagcatggagctctaactaaatgtgtcaacttatgagaatacttctgaacatagagttttctacattgcttttaaataacaaccggacatattctagtttttatgaaatttgtttaaaaatcctgtcaagataggtatttctttttctgttctctctctttctctcttctggaggtcacttttttggaaaaatattaaggtaatcactaatttctaatgtctggagaaagaatgatataaacacaaaaaatcttggttttaccttactagtggaatggtagtattaattgtgggtctgatattgagttctattatttatttatttatttattttttcttttttgtgttggtctttttttttttgggttgccactcctggtttatttattactttcttaagtcatagtatagaccttttttttttaactcgtagaatagccaactaaaatttcactcaatttataaatttcttctgtgaagagcaggacaggaa

SEQ ID NO: 86369 - DNA, 1045 bp, Citrus clementina
  Intron number 1 from transcript clementine0.9_024377m (loc us clementine0.9_024377m.g) derived from phytozome v7.0 (c hr-ID scaffold_2; pos 5250694 to 5251738 reverse strand)
ttgcagaggaattgcttctaagctctttgttggaggtacttcctctctcagtcttaattttctcatttactttcattttgagtttaaaatgatcttgtcttggggtctaatttgtcactgctgcatttttacttttattttgttaacgcagtggttagaagtgcttcacttatcaaatatacaagttcttatacttggttattttacttcacggcagctcagttttgtcttttttgtgatcgtgcttttgcagccttattgctcgttatgtgtttgatcaattgcccatatgggatgttttggttccgtatgtttggtattagctatgcagtgtagactttcaaagcaaagctgctaaaatgttccatacttaccgttcgttttatctcacaaatgatttgatgaaatacgtacagtaacttcactaatttaccctttccttgccccacttagaaagttatgattagtggttaccatatactctgttttatttcacggcagctgtgattttgaagccactgaaccacagtcccaaagggagccttaatgtgactttagttgtgactttttgagttcatctagtggtttagtttcaatggagtgctttcgtggaaaggctattctagtagaagtgctttctaacaaagcacttgaattgaaaccactttctaagaaaagcagttatccttaggaaggtattttaagtttttttgttgctcaatacggcttttcagaaaggcagatattaagcgcttcatgaccaagtgactctttttgaaattgttttaatcaaactttacagagtagacacataaaaacttctggggatttgaagattctttttgacagaatggaaagccctctcgaaatgcacctcaagcttcaccctttgatttaatatctaccattagaaaacagaatggtggttttgaaatttatgcttcagcaacttcttactttgcacgtatacatttgtcgaaatcatttctgtccgctgtgttatgttgcaggtctgtcattctacacctcaaacaagggactatcg

SEQ ID NO: 86370 - DNA, 548 bp, Citrus clementina
  Intron number 1 from transcript clementine0.9_011972m (loc us clementine0.9_005321m.g) derived from phytozome v7.0 (c hr-ID scaffold_141; pos 194373 to 194920)
tgtccggggagcctctgcctcctctcattcacaaggtaaaaacagctctttaagattgattttgttttgtgttacataattggagttaaggttatgtttgggattgcaggtgctagttagttcaactggtaaatgactgggatttaaacttggcttactataatggtgcttataaaaaatttaataataaaataaattgaggtatggtggaatggaatcactagctattaagtatatcttggtcggtgtggtttattctaaatctatgcaaccaaagggaccattgattagagactaaatcatcttttcttccaaatctatgcagccaaatggaaccttaattacagaatgaaaacatatgcataaacattttagtgttattttgtgatgtagtaagctgctactattattatttttctgtttttcatttgatatgagtaaggatcagacagattgtattacttatgccatgtaaacgtgagtgatttcatattcttgctctgttttttgtagaatcaaattagttatttgtatcagttagctggagc

SEQ ID NO: 86371 - DNA, 1004 bp, Citrus clementina
  Intron number 3 from transcript clementine0.9_007221m (loc us clementine0.9_007221m.g) derived from phytozome v7.0 (c hr-ID scaffold_3; pos 5166566 to 5167569)
tggtacgctgatttcctttggcatcatatcaataggtatatcccaatctcaaggcttgttatgttatttcctgtttggtaataaaatattaatcataattgttatgtgaatgcagatgtcgcatgattgatgtgactggactaagtgcaatttgcttggtgttttgcacacacttacaaaatgttatatgttaatgcatacaggttgttctggtggcaagtggatttatcatgttatttgaatcaattaaaaacattatatcttactttatgaaatgtgttttcataattaacttccccataattctcaaactataaatttctcatgattgaaggcatgatatatcagaaggcgccttatggtatcatttttggctgtacttctataggcgttctctcttaagtttacctttcagcagagaatggactatccttttgacctgtttgttgactgttaaaagttttagaatccagaatctttttgccagagcatattatttgtataacaagtttcttaataactatttccccattttctggagtcgctcaggttctttcttaatgcataaagactagatgaataagattcctattggattgagacctagatgtatatgcagctttgacatttgatctatattctataataatatatgcaaataaatgtttttttcacaatcctccagtgatcattattagttcatgtgctggtggagttgtccaggatttgcatgttatcttgctcgctgtttcttctctcaccaccagaaacaaaagcagcttgataacactttgctgtatatatgctgaaatgactatctaaattttaaaggcatgcttacattttaaatcacaatttcatatcatttgttgccaagaaaagaaaaatattataattctcaactacctcaaatacatggtattattgataactttctgtcattctgatgtgtgccatttctaattctcctgtatcatggtttaacaggttcagctaaattattc

SEQ ID NO: 86372 - DNA, 654 bp, Citrus clementina
  Intron number 1 from transcript clementine0.9_013280m (loc us clementine0.9_009522m.g) derived from phytozome v7.0 (c hr-ID scaffold_3; pos 9005819 to 9006472 reverse strand)
gaagctagtatgtgatttttcggatttttgtttatgggtatgcatgctctatgaaattgtgtgatgatgttttgatgtaaagcttctgtttttagttgtctggagattctgttggacttgaattttgatgtcatttagtgttgtgcttttgggtgttgcttggtttccaaatttgtttgatattttttatgggttatttggttggctgttttgctattaccattgttgtgttaaaaaggcaatcaggacaattggaagcggtggattatctgcattatttgaaaatttttagtggttcaattttatggatattttgagctttttgtttaatacttgttgtagttaggggagaaaattttgaatttttggcttgtacgattgcttagtttattttgttttattgtatagttctgatacaaacagcacggaaacataaagcgtcctttttatcttcctccacttttgattcatagttgcctcagttaccaataatttgcttctggaaacataaatttttttataatttgttcattgttagatccatagcatcgcttttagagtgggtagggtgaacagaaaggttgaagagacttcactatatgtgtattgaacttttattttcttaatcacagaatctggaaacttctggttttt

SEQ ID NO: 86373 - DNA, 504 bp, Citrus clementina
  Intron number 3 from transcript clementine0.9_010952m (loc us clementine0.9_010952m.g) derived from phytozome v7.0 (c hr-ID scaffold_41; pos 1299807 to 1300310)
ctgccaaaggcatcaaatttatttgtgcatgtacggtataaaatgtattaattttaaaacaatgtttataagttgcagatataatcgaatttcccttttacttgattttaattatgtgtttatattactactatttattaaatatgtttttttatgggatattaatcgtgttattatagttaaaataaactaaaaagttagaaaacaagatgttcttattaaaatgccttaataaaccataaagcgccagacccgtctttgattcactgaggtattttatcaaacacagtatatagtaactaaaaagatgggaaaagggaaggtgggtttggtggtggcattggtattggtgtcttttgtcatttccacatctttcagtgatgaagagcagctgcaatggagaaaatctatgttttccaactgtaaggacgtcatcctcatcctcttcctcttcattgttgttcaatcatgtaggctcttcccttttgttccaagtccgtggaa

SEQ ID NO: 86374 - DNA, 838 bp, Citrus clementina
  Intron number 1 from transcript clementine0.9_004867m (loc us clementine0.9_004008m.g) derived from phytozome v7.0 (c hr-ID scaffold_3; pos 4408682 to 4409519)
ggcggctgtgtactcctctccttcgtatcaacttggtaatgaacctgtttgtgaatatcagtcctaacttttttactctatcgtcttctaagttgctgttttgggggggggggggggggggggggggggggaaaaacttttctttaaaaaacaaacagctacttttgctattagctttacaaccaaaagcatcattagagtgaattttgagggagtttgtaactatgcatgcttgatctccgacccctgggggtgatttttatgaactgtaaaattagtgcaattgtttttttctggtaatattcaggaagagaagtgagtttgtttcaaaaagtgttgttacctacctttgaataaaaatggtggttttttcatattagattttgtttttaaggttcaagggcagatctaacttgagggttatgaagaggatgattaaatcaacacaattctgaaagatgggtggatgctttaaagaatttagaatatatatgggagttatacttttttttgaaataatagagaaacttagacagtttgtagaagatgggaaagttttaatggtgtaattaactttagtatttcttagaaacactataaagaccaagatactgagaatttctgttgatgcagaatgttgttggatgtaatctgtgcttaatatcctgctttaccttatattccttagctatccttagctgtaagtatgtttctccttttggtctagatatatgttatatcatattggcatgattatatttctctttggagacatccgatattggcatgattatacctattctgcttattttcagattggttgaggcaacttttggat

SEQ ID NO: 86375 - DNA, 803 bp, Citrus clementina
  Intron number 1 from transcript clementine0.9_034396m (loc us clementine0.9_034396m.g) derived from phytozome v7.0 (c hr-ID scaffold_1130; pos 1355 to 2157 reverse strand)
aaaaccgaccccaagataacatcaagccaagtcgcgtaaggaagcctcccaaatggttcaaggattacacacactgagcatatatgagcagaggattcggtttctaacggctttagctatttagagaataattctttgttatagagagaggttgttatttagttttgacagctgtgagcatattcttgctgctataagtatttccatggttgtatttgatgggatatataaaattctggactcagtttcttcttcttctctgaaattttctctctattctctcttgccattcactcgtttctttaaaattctgggagcttgcacttgcttgaaaagtgtggaaaccttgctgttcggtgtgctcaccagcggcataacagcacatatgcagaattacaatattaattatatgaaaagtatcttttaaaatacccaaatattaaaaacaaggtttaatttgatgacataattaagtaacccattgattaatttgaatttagcttttaattaaataccttataaatcctgataatcataatgttttctcatatacatacctttgttagaataaacaggcgattatattatatataacaaatttttatttatttattggtaaagtattgcaaaattttaaataacaaaaatgacagtagaaattttattgaaatatacttttttatattaataaaaagggtaatgcaatatgtttgagagagtaaaattttattattattattttggtttaatttgtctcgtgctatatattgatgattaatgctataaataaatgtcgtcaggga

SEQ ID NO: 86376 - DNA, 921 bp, Citrus clementina
  Intron number 3 from transcript clementine0.9_020745m (loc us clementine0.9_020745m.g) derived from phytozome v7.0 (c hr-ID scaffold_4; pos 1406113 to 1407033 reverse strand)
gctcgttccagttccaacatctgccaaggattcaggtttgaggctgtaattagatatattcaactgtgtatctctattaaagtctctcttttgtttagttaatttattttaactcttggacactttgttgagtttcttttctgttgttcattccctatgatggtcataccacttgatacaaaacaatgtagttcttttttagaaatttaaaaaaaaaaacttgcactgtacccttctggctgggaaggtgtcccttcttgtttatgtacattcagcgggctgattgatccctctataaaatacatgttatttagttctaaggatgaaaaaaaaatgaaggctcttcgccttttgtccctcttttgatctctacttgggaaacctaatctcattttttcaagtttcatgtttcacatctcctttgttgggcttgtgggtacaacatttttacaaccttgttcagttttgttcatttctgaaagattgaaacaaatatgttttgcattgccttactttagatatggataatttaaatatttatctagctcggtcttcatttcaatgcagaatataagtgtgtatcttttgtgtttatgtttcatatggctgtttcctttatgtaccttgtgtcgggaatgatgacaaagcatgcttttttttttttggcacacatagttgttatatggcagacgatattcggattttcagagtcatttctgctaggcaacttgtatagttgtctcccattactattgtactatatactattagtgattgatatactatttattgctaaaattgattcttccttcttatttgttttgagctgtcaagaactctagcttgtattgggattcacataaagaaagtcattttgaacacagcaaaatgatttcatatttttgccttatcttgcaggtg

SEQ ID NO: 86377 - DNA, 933 bp, Citrus clementina
  Intron number 1 from transcript clementine0.9_023379m (loc us clementine0.9_023379m.g) derived from phytozome v7.0 (c hr-ID scaffold_2; pos 6875095 to 6876027 reverse strand)
tactgcttcgccgcattgcctgcttcggtagtaaagtgagtatcattcattttttgtgggtttggctgtaactttttatttgtttgttgatttgatttgttataggaattttgaaattttattactggtttgattcaagttcatgcctagtctttgagttatccgtcgtctcatttaatttgatggaaatgattctggggtttcttaattacattctactttgtgacttgtagttgatatttagggttgtaatctcgaaacataaaatcttgttagtgggttgaattttgggcgtcagtagctttctcattttacatgtttgcaatgcaaatgaataattattcacctttcgatcagtatctaatcttcatcatatgatagattaacaaacctagaattgatgctgcagccaatattatttaatgttcttgcatacacatagtcaatgattgtggtgccacaattttttttggggcacaatgcctatgttctggatgcttaggagttttctacagtttgaacattctaattttttggccaataagattatctgcggccaatattatttaatgttctaggaagagcttctgtctgtctgtgtacgtatttttttgttggctgccatttattgatgtgtcttttgtgcttgattaaatgggaaatactagctattaatatcaagtcactatttgagcatatggattcattaaaggaaggctagactatgtctaaaaattgtaatgaaattctatcatttggctgttaaatcaattgcctagtttagcatttaaacccttggtggagatgtgaagaaagttttgatgtctatcattggtatcaagagtgggaagaaattctacatttttatttgtgattagaaagataacttatgtggatctcttcaggtatattttgcctgggggttgcagtata

SEQ ID NO: 86378 - DNA, 708 bp, Citrus clementina
  Intron number 2 from transcript clementine0.9_017059m (loc us clementine0.9_017059m.g) derived from phytozome v7.0 (c hr-ID scaffold_3; pos 8784610 to 8785317)
tcagcggtcgccatactgtgtgccaagactctgaggtgtataactctcttatttttgcttacactcagcatctttctttgccttgtttttgctggtgaatagttaaaaattgtaattgtttcttgatttcttccctttgggattgggaagaagcaatgtgaggaaaagaaaggggtagagtgcacgatgccttcaaattgagaaaactcagtcttagttaaactttgtgaaataataaaaaaaggaatgaattcttttgaagggaggaatcactatcaaattaatatctacaacacttccatcatatcaattaatcacagagaaagaatgatgactcacctgaaagaatgatgactcacctactcttctttcttcttctccttctaccaaaaatggagtaatgattgcagtttagccatgacctcggcataaataatcccattttcacaattttatttccatgtgatctttttgatctggtgaaactccaaatgaccagttttgggttcttattctgatttatggttttcatgttagtcatagagctgttcctttgtgttcttccattaagaaaaacgttttgacttattttctttttattattccagggaaaagcacttctcttgggtatattattcagattcttatctttgagcatattgaattattgcagggctatatctttgttgatagggacggaaaacattt

SEQ ID NO: 86379 - DNA, 553 bp, Citrus clementina
  Intron number 1 from transcript clementine0.9_001629m (loc us clementine0.9_001629m.g) derived from phytozome v7.0 (c hr-ID scaffold_4; pos 4550571 to 4551123)
ctgtttgagctttggttctgtggattctgaaggtgagtgtttgctgttctcttctaagagagtactattcttatcttgtttggttcccgagaaatgctaggaaagtgtggggaagaaagtgaactattttggttaaatttctttcttttctttgttttttcagcactcgatcgcttacttcaaacgtgaaagtttccgtttttcataattttttccttgaaaatttctgtcttttttcgagtatttagtattttcgaactcttctctttctttagatatttggctgatactatgaagtccgccgtacacgtttaattcaagctttgtgtgttaagtgctccattttcattgtgaaagttttgagcttttcttgttccaagttcagggttttgcttaaacttaaaatagggcttaaaacataatcatctactgagtttggattgttatttgctgggtgtgcgtgtaattcattttttgcactgaatttgaatctaatgaatgctaatgttgtattgaaggagcaacattattggagataaagaagtcatttagg

SEQ ID NO: 86380 - DNA, 184 bp, Citrus clementina
  Intron number 2 from transcript clementine0.9_001629m (loc us clementine0.9_001629m.g) derived from phytozome v7.0 (c hr-ID scaffold_4; pos 4551206 to 4551389)
tcaccttcactgttattgcgctgtgagtatagttttttggagctttctttttcttcacttatatattagtgtttttgacttgttgtctttctcaatatactgtttctttgatgttaaattttgatttctatttctctttttcttgctttggtcgtttgtagtaatctatcaggtctaaatcttg

SEQ ID NO: 86381 - DNA, 477 bp, Citrus clementina; identical to SEQ ID NO: 82459
  Intron number 1 from transcript clementine0.9_024984m (loc us clementine0.9_024984m.g) derived from phytozome v7.0 (c hr-ID scaffold_3; pos 5343459 to 5343935 reverse strand)

SEQ ID NO: 86382 - DNA, 883 bp, Citrus clementina
  Intron number 1 from transcript clementine0.9_013968m (loc us clementine0.9_013769m.g) derived from phytozome v7.0 (c hr-ID scaffold_3; pos 8721414 to 8722296)
tgccgatcaattcataaagcaagggcaattcatctgtgagtacgcaggtatcggcaaaatggaaatgtatgttggcatttttgtaatatttgtttagagtttttgatgcttgtgattttaattatacatatgcctagttgcatctgcttgatgattatttgatacagtaagacttattattagatttagcgcgtgccgttgttggaattatatttctgctgtgttacggtagtatggaatcataagttcatagttttagaatgggattgtgcggatgaaggaattacatttgtttatttattttgaccaagaagaagaccaccttcagttcgtacaattctagttcaatggcagtattatcgaatcccatgtttcaaatcttatagtttttatcccttattatttggattaattttgcctaattggtaggcaaattttgttcgtctaatacagcttatattttacatctgctacgtggtagaatagagtctataaccactatgttttgcatctaccatagggctgtttagcttgccgttagccatatcttccagttcttatgactaccattatatagctgcttacttttcctgagttatagctttgactctctattgtattttctccattcaactagccattgttgggcactttgggtgatgtttttgatctttctttccattcttcccacatcacggggtttatgaaacattatggtaataactgattgctttgaattggtctagtgtgtaaaacattttcatttacttggatatttaagaaataattattgtttgtttctgtggacatttgttagaaattgtcttagttgatgtttgcttgaataggtgaacttttgaccacaaaagaagcaaggcggcgg

SEQ ID NO: 86383 - DNA, 993 bp, Citrus clementina
  Intron number 3 from transcript clementine0.9_022051m (loc us clementine0.9_019075m.g) derived from phytozome v7.0 (c hr-ID scaffold_7; pos 4995121 to 4996113)
actgcgagggaaatccaatcttctgccaaggtatgaggtttctatttgtctggctttgctaataagattattggttggataagtttaatctttcagatatttgaagaatactcagattggaatttttgtaatgtaattagacaggttccaaatcaatgtcttatattcacggttgtgtttcgtggcaattaaatagggcatttttttttcttttggatttagagagaatttatgcctatgagggaagatgggattattccattggggtgtatgcatgtaatgtgttatgcttttttaacacgagaatcgagtattattcaattgtatactgaaataattcctacttataatcagaagattggatactacttgtgtgcttcattatgaaacaataagtgtatgagcacattaagttatcttatttgatccaatttataatgctgtattttcctgtcatttatattttgtccaatatgtcagtctgcaggtcttccgtggacagtggctaaagggcaggacaccttcacaccaattagctctgtcgtaagaaactgaaagaagtactttgatgtttctatctctgctgaaactatgttgtgttgtactcaatttttaggctcaatattgaaaacttaattttaaatagttaggtttactctttgcaccagttctttgtttggccattcacagcactaaatgtggcattgggataggttatggaaaggaagtaattgtgcttaaaaatgacaactataccttgtttgttgaagctgaaagagaaaattggtgtttttctttcaaagcagacaagggtaaatctatcctccgcttggtgcaccctttacttgtatctgctagtagaaaagaagagaggaagagaattttattttcaattgccaattttgttctgtgtttactaaatacactcctttttgacttgtttaaaatatatttgcagctaccaaagtcagcagtgcctgaccctcacaactt

SEQ ID NO: 86384 - DNA, 680 bp, Citrus clementina
  Intron number 2 from transcript clementine0.9_020355m (loc us clementine0.9_020355m.g) derived from phytozome v7.0 (c hr-ID scaffold_14; pos 2200774 to 2201453 reverse strand)
caaagggagaagaggttctgtttcgaattagacaggcaagagttttttttaaaaaaattaattattggtgattttgaaacctgggatgaccttgttgtaatatttttgttatcagttggttcattcttcattttgtaattgggttacgaattgagtttgtttgaattgtattggtgatcttagaggttttattttattagagaatttagtgatgaaccagaaataacttcatcgtctggcaaattcgtcttttgctttattattgcgctcattcgtctggcaaattcgtgttctttaactcccatttgattttttttttggttggtcaaattgatatttactcgttcatttaagttcacacattaattctcaaccgtcttagttggttaattggatcctattaatagtctcaggataattataagtgactgggttgtgaaattgagttgtgactcaaatattgtactgtccgcttcattctgctttatgatgcttagtttaatatcttagacaatggaggaatcaaaactggagcatggaatgtatttatttccatagttgggatcttggagatgtttctttacgtgtttggtcattgagctaaaaatttaatctcacttagctgtgactacatttttttttactattatcaatgcaggtaattaattgtttctgacaaa

SEQ ID NO: 86385 - DNA, 534 bp, Citrus clementina
  Intron number 1 from transcript clementine0.9_014935m (loc us clementine0.9_014912m.g) derived from phytozome v7.0 (c hr-ID scaffold_3; pos 1371572 to 1372105 reverse strand)
ggaaacgcgttcgaccgttgactcacttcactaatgtgagtaaattctctatcttttactttctaaacttgttgcccacttggttttggagagaccatttaaaggaaaaaataaataataaaaatgttatctttgctgtctgttgttgggtttctttgatgttatctgtgagaactgggtttgtgctattgtatggcgtttacttgggtttttgttgccaaggaacatgcttggtgtttaaggctttatcaattatcgtgagttggtgagagagtggaccagtttcaacctttctggtctttgtcttcaagattaagcctttttccttgtttcttctagttggtaagctgtaaaatagccctgcattttgtcttttcttttaggttcttggctttagatttgaattcttttcctctctttctttgttaatgttcagggatcttttcttattttctgttatctaatcatgttttgcttccttttcctttgggttgtttagttctttcttgtttggaactttgaagaggctttgaa

SEQ ID NO: 86386 - DNA, 934 bp, Citrus clementina
  Intron number 4 from transcript clementine0.9_013724m (loc us clementine0.9_013724m.g) derived from phytozome v7.0 (c hr-ID scaffold_4; pos 1824491 to 1825424)
acctcaatcttggctgttcgcttaaataagaaaaggtatagcatagatttttgttttttttttgcatcttgcactaccactgattggtcgtaatctcttccctaaagggtatgcattgacataaatttttaagattctggcttgatgtttaaaggaatgttctgtctggctgtgggccttgaaaatattgggtgaggaaacatttatgcaggttatttaaaacagactagaatcccagtgtgtgccacgcattttatcgatcagcaaagtgaacaaatgcgatttttctattgagcagtaacctttcctttttgaatgactcaggttcctctatgaactaattgttactttgattgagtgaaactgaagtttgaatgatattcttgtcttactgctcttttgagttatttacttttcaatttagtgggacagttgctgcactgcagttgttaattaatttgcaaaccatttccttgcattagtgaacagtgtggttccttgcagagaacttaatccgttggtagatatatcaatctccatgtacaaattataagtgaaagttggcttttgtttgtgactttaagagcaagtctcgcttgcttgatagatggtggtgtagtcaccttttctctaatcattataaaagaacaaactcaactcatccttccctcttaagtttactacattctctttccaccttgagcttcaatttttaaactgtttatgtattgatgttattgcttgagatgcaaatttaattcatgatcttcagcgttgtattatatctttaattttttttttagtggatggagtcagcctagcctctttacatgaatcaatagaaagttaaatccatttttatatcattgacagctattttctctctttactgaatgcagacttgtcattgttttgcgagaaaagacatatatat

SEQ ID NO: 86387 - DNA, 419 bp, Citrus clementina
  Intron number 2 from transcript clementine0.9_006422m (loc us clementine0.9_006422m.g) derived from phytozome v7.0 (c hr-ID scaffold_3; pos 6168522 to 6168940 reverse strand)
agggtgattaatttgtctatatcctcttcaatttgggtggtttaggtgccaatttgggttctgggattgtaaatttgtagctttcatattttgaaaaaaataaaaaatgggtttttttttacaactaagttactggtgttggattcttctagactgtgggcacttgcattattcaacatctgcatgaccgcttgttttgtaccggaaatgttttggtttttaatggaagagggagtttctgcagccatcatgtgcagctcaagatctgctatttgttttcttcttcaacctcaaatctcgattaattgtttttatcccaaaaaaaaaaaaattgttcatggtgtttgagtatgctgagattgatggatgaagaacagctttaaccactttatggtcttttttttctttttcaggtggtg

SEQ ID NO: 86388 - DNA, 882 bp, Citrus clementina
  Intron number 1 from transcript clementine0.9_006229m (loc us clementine0.9_006229m.g) derived from phytozome v7.0 (c hr-ID scaffold_7; pos 5566031 to 5566912 reverse strand)
cactgtgtaaacgctccatcggcctcggttgcacggtataaagttcttatacacacacatacttaacatcatacatgtgcacgtacatcgtcaagaagcaataaacccgttcgtatatttgttttgaatgtttatggataattagattttaagaagagataaactgtattaagcgtccagactataaagactatattacagtcagtagaccgtaaaatgatatcaaaaagtgttttcggatttgttttatttgaaaaaaaagcgttttttttttagtatgtatttttatttttagaaaattgttgctaactttattgaaaatggaattgagtgatgatattatgctggcctattttcattttattaaaatttctcgcttgatttgccatatcactttactaaatcattttgtgtgcaataactatctaataaattgtgaggaagagtagtatctgttagagtttttatttttgaaactcagccctgtttctatttcttgtatcgcttatttccgcatttcggcacaaatttagttaccgttttgggtgcttgaaaattcttgttcagctctttttgtcccattgatttgtgtacttgatatttgactagcattagacatgtagaattttagcaattctttaatcggttttggttcttatcctcgctctgactttaaaaagtgacaagaagttcgaatccactaaatttgtgtagaatttttaggtagaaagtatattatggctggattataatgggtttgctgtgttcagtttgtttcatactactttatgctgatttggatgctgatcatcggttaaatgttatcttttctgttttttgctggcaggtagcaataattgcaccaaacattcctgcaatata

SEQ ID NO: 86389 - DNA, 214 bp, Citrus clementina; identical to SEQ ID NO: 82131
  Intron number 5 from transcript clementine0.9_010797m (loc us clementine0.9_010797m.g) derived from phytozome v7.0 (c hr-ID scaffold_3; pos 1412357 to 1412570 reverse strand)

SEQ ID NO: 86390 - DNA, 642 bp, Citrus clementina
  Intron number 1 from transcript clementine0.9_032523m (loc us clementine0.9_032523m.g) derived from phytozome v7.0 (c hr-ID scaffold_7; pos 150056 to 150697)
ctttcgtcaaggacgttaagcgtctcgttgttaaggtctctttactgccttcatttttcattttttttttggcttgtcaatgcttatagcatcgtgctaatttctacatctcccgtttgagcggcgagcgagttttttaaaatggacgctgattttttttttttaagattcagttatttatttttaaaacaatttaaatgtggtgcttattcattgtataattaagagcaagcttgttatacttcgaaaaatttggtcgatgatatctttgtttttaattgcttctaatattttatcatcttcattaggatctacctcccaggcttcaataattttgaattttagatcagagtataaaagtgcttaataatttttttatataaaaaaatagaaagattcaattgcttgttagctttattatatgattcagagtgaggtttcattgctgtgtatagcattggtaagaacgaattataagtaatcattaattcattttctaaggttgtaagattttgaaatgatgtgatttcaagtgaattttgaactgattcttcacatgattgctgtggtagctgatctttttttctttttttctttttttaaattcgttgaaggttggaacagctgtggttactcgaagtg

SEQ ID NO: 86391 - DNA, 566 bp, Citrus clementina
  Intron number 3 from transcript clementine0.9_032523m (loc us clementine0.9_032523m.g) derived from phytozome v7.0 (c hr-ID scaffold_7; pos 150925 to 151490)
caaaggcttagatacagaaaattggtcaatagcaggtgcttcaagtctcctttttctttaataaatcaaactcttggaattacatatttcatgtccattttctccttgcacattatatgctcatctgttttatcattgaatcttttgacaaatggtagaagttattttggctagctgattatgagcaaatagggaattcagcatagataaattcgaattatttggtcattacagtggaaaaaatttgagaaatgtagaatttgaaaattgtacatactgacacgtgaagacatttacagttgcattggcatctaaaatttgagttaacatctgcattaccacatgcataaatacaagctgtttgtctcttagcataaatacaaattcaagaaatgttgaatttggtatttttggatacacacaagcaacaaatttacttattctactttaaacggtactctgatttaaggttagtgactcagtgtcaaggaatatgaaggcatgaatgcctgtggaatgaaattaattctggttttgcagcttggctgatctccaaaagccgcaga

SEQ ID NO: 86392 - DNA, 568 bp, Citrus clementina; identical to SEQ ID NO: 85578
  Intron number 3 from transcript clementine0.9_021920m (loc us clementine0.9_017887m.g) derived from phytozome v7.0 (c hr-ID scaffold_2; pos 3972344 to 3972911)

SEQ ID NO: 86393 - DNA, 867 bp, Citrus clementina
  Intron number 1 from transcript clementine0.9_026378m (loc us clementine0.9_026378m.g) derived from phytozome v7.0 (c hr-ID scaffold_154; pos 22871 to 23737)
ccattcgatctgggtgaggatatttttatatccttaagttagatggcaagattattgtctatctcttttatctctttttgatcttttctcctttttctttatttcataatgagagattcacattaagttcatccttatcaatctagtttaattttatgctgatttcacaaattgtgaataaagtaattcagatatgttttgaatgtattaatattgatataagttgtaagtcggattattttctctctatatcagagtttgctttcctcaaaaattagtttcttactcatgaacgatgtttaatttttcttgtctcctatttctttctggatccagttgctagtgttttttcgggcctttaatgtgcactgagttcttaaatagttcattgcattcacatgtgcagcatgggtaatcagagctctaccccatgtgataggattgcatgtatgtttttagaacttgcaaagtgtaaaagcagttgtttaattttgcatcatttttggaaaaaagatattgatgtggaatggatcaaggctattgggtgtgttttcttttatttgtcattgcatcatgtcattgttcaaggtgtctgacatctacttgaactagatatttatgaaagattgtatgtaattggtcagctgcatcatagtcatgtatgattatcattacatagatttgccagattgtggtaggtttttgtaatatactcttttgattgtcaattgatatgctagaaatagattgtggaaccttgctgggtaacctcctttgagtcaatgactatgaactcattatatttggatttcatatgggaacttatagatgatgtttttgaaatgtgatatgaccctcaggcgtccc

SEQ ID NO: 86394 - DNA, 491 bp, Citrus clementina
  Intron number 1 from transcript clementine0.9_023872m (loc us clementine0.9_023872m.g) derived from phytozome v7.0 (c hr-ID scaffold_7; pos 3681842 to 3682332)
cgacacttcttctcgaactgggattttcattaaaggtgaaaacatacctcttttgcttcgctttcatcccttttttaacattttgatatcaatgtgttgtaatttcgaaatttgatttgaatgaaagagtaatgtgtttttgagaaagcaacatttgcagtgtttggttaaaactgacaatgattatatgactcaagtgctgcccccccccccccccccccccccgctcttttttttttgtctgaagaagcacttcagtagtggtttttgagaaagcttctatagttttgaaaagcacttgaagtgtttattagtggtcacattcatttgatagatacctttccaaaaaaaaatcttttttaaattaataattatcatttttttttcatatgttgctattcttctttagcttaggttatatttctctagaattcatgtgttttgagtggtcacgttctagggagaaaattgatgcaggactgccagaatct

SEQ ID NO: 86395 - DNA, 768 bp, Citrus clementina
  Intron number 1 from transcript clementine0.9_015657m (loc us clementine0.9_015657m.g) derived from phytozome v7.0 (c hr-ID scaffold_2; pos 4436707 to 4437474)
tgcgatttttcagccgattcactcacgctcttgaggtatcaatttaagggtcctttttttgaaataattttttttaaaattgttttggaaattactaattaaacgatgcgtttggttctcttgaaaagaaaatggagattttataatttaatttgagtattttgcattgcagttcaagaaattccgtgctcatagactgaatatttgtaatgaatttattagaaaatcttgacgacgcccatgggctccattgattttttagcaaggtttatttgcggttcattttgcaattttgagtaacaatttgtgccataatgaagtcatatgttacatttgcctgttctatttgaaggtattgagttgactgtttcttgaacttctcctggtttttgggagctgaaccgccaagctttagtatctgatctcttttgtgtatttctcagatggatcttttacatttatttatcataagattttagcgatgagttgtttttagctgtcatccaattcctaattgataatcccaatttttttatccgggcaaactacattcagcaaggagagggaaatagctgcagttatcaacactttttgctgttctactcaactatatttttggcgaagaataaaaatcattagctgctgatgctaattagacactgtattgttgttattaaactttttggatatttcatcatgattttgggtatctccaatgtttggcttcctaatattatgatctgtcccccctctcttccccagatatcg

SEQ ID NO: 86396 - DNA, 581 bp, Citrus clementina
  Intron number 2 from transcript clementine0.9_024961m (loc us clementine0.9_024961m.g) derived from phytozome v7.0 (c hr-ID scaffold_3; pos 7500832 to 7501412 reverse strand)
aaaggtattacttccgttcaatgttttgatttatcatgacatgacactattgttacttcttgatgagtgctaattttttgtgtcaaattgctaattgtttttgtttctttggtcatgacttaaattacttctttataagatattttttgattttcaacagtttgattgaaacttgaagattaggtgtgtctaaatggtagccgacatgaaatgaatgttgattttgcaaggattgtaaaattagcaggggaatatatgtttcctatctggaatgattgccaaaatatatttatgtcaacagttacgaatcggttggttcaattgtgatctatggttgagaacatattccttgtgatgtcaacttatttagtaaccttttatgtaactgaattgagtgtatttatatttaatttgcggattgcctgaacaaaaattagttatatcttggttttgatattttctgtgtagttgtagttgtcttgcattgaataaattttttgtggtttctaatatgatgtctgatttggcatgattgtgtgattgtaggatctgccataactggaccaattggtaaggagtgt

SEQ ID NO: 86397 - DNA, 682 bp, Citrus clementina; identical to SEQ ID NO: 85975
  Intron number 1 from transcript clementine0.9_003580m (loc us clementine0.9_003577m.g) derived from phytozome v7.0 (c hr-ID scaffold_4; pos 642267 to 642948)

SEQ ID NO: 86398 - DNA, 763 bp, Citrus clementina
  Intron number 1 from transcript clementine0.9_029353m (loc us clementine0.9_029353m.g) derived from phytozome v7.0 (c hr-ID scaffold_4; pos 7444889 to 7445651 reverse strand)
caccgattttgggtccgcacttctctttgaagagggtaatttctcgtccttgattaattaattagctacaattttttctaatatgcaaattgatcgtttcctttcctgaacccctttttttaactgttttcaagagttaagcttagatggtgagaatatttgttttttaaaaaaaagaaatcgttttattaatatgaaatctgacgcaatattatcatattaataataaaaaaataaaatcaactaacaccgtaatcttaagatacattttattttttaagatggattaaatatcaaatcattttattttgtgaaaagccttgacgaagcaaggaaaattatattaaaatagaaaagggtggtggaacttatggctggaaccatgagtgcatctaaagttgatattacaaaatttcttacgacaattgacccaacaatttccaccacccttaaccataagccaaatcaatcaccaaaaaaagcagacataaaagcagtgttattattcttgtcaatttataaataaataaatcaaaagaaaaagttttcaaattaatcaacttaattgccaacccattctagatcctaagctacatccgcagtgtctcgggctggcagtgaattgtattacctcgcatcaaactaaattatatagataaattctgatcttatctaagatataacattaattttaattcttgactgatgatctaatggtacacttccaggaaagttatatagagatattgtagggagcgttttt

SEQ ID NO: 86399 - DNA, 555 bp, Citrus clementina; identical to SEQ ID NO: 79567
  Intron number 1 from transcript clementine0.9_003840m (loc us clementine0.9_003840m.g) derived from phytozome v7.0 (c hr-ID scaffold_4; pos 5987804 to 5988358)

SEQ ID NO: 86400 - DNA, 608 bp, Citrus clementina
  Intron number 3 from transcript clementine0.9_019891m (loc us clementine0.9_019891m.g) derived from phytozome v7.0 (c hr-ID scaffold_4; pos 7170549 to 7171156 reverse strand)
aactactcgccggttgtgagagcattgagtggcaggtacccagaattatcaaaaaaatttcttgtattcatttctaattttagatatttatagcgtaattcaatgtgacgtgacaaatgtttgaaaacttggcttgaacttgttggcttgagattatctaaggtataaaattctggctcaagcttggtttagaaagggtttagtatgtagttcaattgtggcttgaatgagcttaataagatatggagcctgttcaagattgaactgtattgttatgtttcctattgcaatgtgtatgacatgtaaattacttttagtgcaacaagtctagttgatgagaattttgcttgaggccaggcttaaacagtgccacaaaagtttgatttggaagcatggcaagctcagttatagttggtgcacatattttctgctttaacttatgtactctcattaaacatcttagaggtggaatttcagtgataattgagtacttgtattcttagcaaagacaattggcgtgaagttttggcacaactgtatgtattgaattaaacttcttgattccaatctgcaatttctgagacccttctttcttgataggaaggtag

SEQ ID NO: 86401 - DNA, 349 bp, Citrus clementina
  Intron number 1 from transcript clementine0.9_010904m (loc us clementine0.9_009681m.g) derived from phytozome v7.0 (c hr-ID scaffold_10; pos 2996425 to 2996773)
tttgttcttcactgattcaacgactctttgaattggtgcgcattcaaaatccctaattttgttttcatttttcttttcttttcatctcttattgtgctcttgatctgatttcttttttgagatctgggtttcctttagttgattatagaaatgggaacttttgcattctggtcttttgggtagttgaagttgtgtaaagcaaatgatagtttttcttttttcttttttttggggaacattcatgccagccgttactgaatctacattaattgtgtgatattgattcggtggatctttgacttttcttattgcagattgatctgattggttggttgattacttgctgttg

SEQ ID NO: 86402 - DNA, 1018 bp, Citrus clementina
  Intron number 1 from transcript clementine0.9_017453m (loc us clementine0.9_017453m.g) derived from phytozome v7.0 (c hr-ID scaffold_3; pos 8417644 to 8418661 reverse strand)
gatttacaagctcaccaccaagaatacctgttctggtattatcatatacatcaacattttcccctttaaattctttttttctttttttgcttttatgtttataattatttagaattttgatttttttttctctcgaaattgattgcttttcttgcttcagttatactttttagcaaaacacatgtgcccatgtttcgcatctggggttgcccgagtttgaatatataataaataacaggggctaatgtttgatggttattgggtcccatcgatgcaaacctttgtaaattttttttttttttttttttgaatacgaaccaacgaacaaaaccgaactgtgcacacactgaaaaatgtacaattttatgaagaaaatatgtaaaaataaaatagatgcattagtcaaaatgaaatttagtttcagattgctgaattagggttttaagaatatttaattgttgtctcgtatgtagatgactggattttggggctaatgagagtttagattaggaactcaagtccatgagcatattcttggtaaaggcaacatttttacattcaattttcattgaaactaaatgattacatagacctgttactctgttaggctcctttacataatatgactggtaggatcctctgcattggcacgaagctttttgcttgaagaggttcaaatagttcaacacattaacccaaaaaaaaaaaaaaaacagttcttagttcttccttggtagtatgtataagactaatagagcaattgcacagatccatagttttgatttttaccggtcatggatcatttgaagtgaaatcccataatcaatttctttcaatcctaatttcatttatgacaagtagaatcataattttgatgatgcagtaataggagataatacctttcgcattattaaagtttcaattggcaatatcacaatgtcaatatgggcttttcaattatcagttttctttgtctttttgatcaggtctttcgctgaagactcaagaactcacagct

SEQ ID NO: 86403 - DNA, 1005 bp, Citrus clementina
  Intron number 1 from transcript clementine0.9_021790m (loc us clementine0.9_021790m.g) derived from phytozome v7.0 (c hr-ID scaffold_2; pos 4340455 to 4341459 reverse strand)
atttcggagcagattcgctggttcgtccttccgaggtttcttatctatctccttttctgttgttgtttttatttttttatgcttaattttaatatttccttgattctttagttttgagatcttatcggtggaaaattcaaaatttatagagattaatttatatgcttatctataagacgatctgtttggatgattctgtgatttatttgtactgattaaaattttgtacactcgttaattttaattgaaaacttatatctgatactatattttgttttcatttattacatattatttggtttagtttgatgcttttttctcgggatttgcagtaatataattatactaacgggctttgatttttttttttaattgttatgcgatgggaagttttgatgatcattatgccctttttttctcccctttataatatagatagtagattattgcttttgcacctaatggttaattttccagcatagtatgaagttttctcggagttccttgtgattatgcattggggatcatccaaagcctaagaataagtttgtgatataaattagaaataatatttgcataatagggctatttagtagagattgtgaaagtttttggtttttcgctagaagttataacattgggtttcaactttaatgtggagttataatgaccttggaagaaggaagaaagaagataagaaatatatacatttacctttggtggtggcatgtgattgttattgcttgtgaacttgataacacacgcacacatatatgtgtatacatagacgtgtgtgtgtgtgtgtgtgtgtgtgttgtatgtgaaattactgttactgaataatttgtgggatcatttggtcgatgtgagtgaaggaattattctaattgcttgtcatctgaattgtgggtgttgcctttcttgcacctgcacagaggttgctgcaattaggaatttgttatgttaatttgttgggctgattgtaggttgtgacatagagtgcca

SEQ ID NO: 86404 - DNA, 513 bp, Citrus clementina; identical to SEQ ID NO: 79983
  Intron number 2 from transcript clementine0.9_002891m (loc us clementine0.9_002891m.g) derived from phytozome v7.0 (c hr-ID scaffold_3; pos 7675093 to 7675605 reverse strand)

SEQ ID NO: 86405 - DNA, 860 bp, Citrus clementina
  Intron number 1 from transcript clementine0.9_002891m (loc us clementine0.9_002891m.g) derived from phytozome v7.0 (c hr-ID scaffold_3; pos 7675620 to 7676479 reverse strand)
tcacttcgtcctgagctttatttccgcttgtttaggtatcatccgttttttttttttcggttggctaagttttgcggaaaagaaattaaagtaaaagttttgattttttaatgtattgttttgtcttttatcaaaaaagcaagcgtgactcagctggcgttctgtacggttgaactcaaataagttggattcaggtggttctttattgtctaggatattgtttcattaatgcgaatcggtgacccagtgttctgggcagaaattgggatgaactgggaaccagatatcttgtgtttgaataacagcgggcgcgaaaacactgtagtttgcttgataagcgtgactgcagcctgcaggtgttattggtaacctagtaaagcttagtttagacttctagcatggataagtagtgtggctttgttatggcaaggcttttggaggtttctagatgtttaggctatgggatgcatgttttagccaatgaactgattgtgggcttgaaacacattctcaaaactatgaatccccgatttcttctttgtcattttctatctgagtggggaaacctttggtgtagtgttgagtccctaagtattcagtccggtcatctgcacattaatttaattttcttttctgatacatgagctgcaaagcaaagagtcattgaaacgcttttaaattgccttcacaagaattttgtttgatttccatgcactcattatgtggctcatttttaatgtaagatgcatggtctcgtctattataatgtttcctaaaaatgatgcatttaaggaaactaacttatatattcggtttgttttttagggcatccactattccatttaaacttgtctccttct

SEQ ID NO: 86406 - DNA, 612 bp, Citrus clementina
  Intron number 2 from transcript clementine0.9_004036m (loc us clementine0.9_004036m.g) derived from phytozome v7.0 (c hr-ID scaffold_97; pos 247854 to 248465 reverse strand)
acagagagaattttccggacaaagctttctttcaggtttgttttttcagatcctttatagttattattcttgttgttgctgttggtgatgattataaaaaaatacaacaatttgttaatgaaacaatcaaaagaagttcgtaatgaaagtgaacagctttgatgagttgaacaacacatactcttcgccttctcactggaacatagaatccagagacacttgacacaaaacagcatccctacttttcatgaatgaggaaacaagaagcatcctgaaatttctatgaaaccaaagcccaatggcttgagcactgaaaattgttaattatagtaacaacaataagaagaatagtgactttgaaccgaatatgtaatttgagttggttcacttttgataatgtcatgcatcatgtcagcaattgttagttcccgtataatcattaacaatatcatccgtttgatttgttgctttatcttgttattatcagttgcaactctatgtatcagttaaaagttattatcagttgctgctctatttatcagttaaaagtgttatttctatttctggttgttaccagggcaagcttgtaggaaaagaggcttttgttcgtat

SEQ ID NO: 86407 - DNA, 966 bp, Citrus clementina
  Intron number 1 from transcript clementine0.9_009259m (loc us clementine0.9_009259m.g) derived from phytozome v7.0 (c hr-ID scaffold_4; pos 4385012 to 4385977)
tcttgcatctggcagtagctgataaacaaacagaggtatgcttaacttatcaaatgagttacaattttaactgataaaatctcatttaccattaatctttctgtatgtccatgaatattaatttttaattttatgttcttcacgacctaatacagtagtttttaaaggataaggatcattaggttctctgtttcaaggtcaaatctacaacatgttaagttactgttcgacttatgtatataacttaagtttacaagtgttctgatcaacagtagaaattaagagtgagctaataattaaacctccttcggtagaaccaatatatccattccaaatatatatatatatgtatatatatatattagaagtgtttaaatctgaaattttaaagtgtgggaacgtccgaaaaaacgcataaaccatgcggtttaagtattttaaattttaaaatttttctaaatatttcccgcactttatgatcctgaactaaaaagctattgtatatatatccattcaatttaaacagaagagaaagttttacatgagtcaattcattgatttaaatttgtttcctctcattatataattggtatatcgcatgtcattgatatctcaaaatttgattagatcagcatacaaacgatcatttggtgtgcctatcccataaaaagcttcctgtttttacacttatcaaatgttttaatttactaaaattataatatactttagtttatggtattgtctccctccttacaacaagcgaagatcttttaacttaagctttcaagtttagtggaataatccatagaaagccatgggcattcttgagaattgaatgcagcacttggtgaatatatatatgacaaaataattaaaatgaaactaacttgttttattcggtacatttcttgtaattgtcttgaattttcaggccataaaggttttgacaactagtaccacgataga

SEQ ID NO: 86408 - DNA, 345 bp, Citrus clementina; identical to SEQ ID NO: 80303
  Intron number 2 from transcript clementine0.9_004386m (loc us clementine0.9_004386m.g) derived from phytozome v7.0 (c hr-ID scaffold_31; pos 135689 to 136033 reverse strand)

SEQ ID NO: 86409 - DNA, 685 bp, Citrus clementina
  Intron number 1 from transcript clementine0.9_007794m (loc us clementine0.9_007794m.g) derived from phytozome v7.0 (c hr-ID scaffold_4; pos 1092589 to 1093273)
atattggaatttcaggtaccttttccatctctttttatcctagattaatcaatatctttttgttatagagcaataagatagtaagaacttgaaatgtctgattggaaatttcactgttgcatatcttgcagtataggatcagaattataccctgtccttttcttttctttcagtttttttccctttttggttggttggttggcttaatggtttttgttcagaattacaactaattgaaacttgaaagttcaaatttttaactgcttagatcttccagaagattttttttttttttggtggttggggggtggggtgttgttggggaaggggaattagcctttgataattcggatccccttttcactttgtttagaatctgttgaattataccagcagccaacacagaggggatcaaaatatgggttctattcttatccaaaaagtaattcattgatattaatgacaatttacttcaataatgatattttagtcgtccttatcctgaagaagttatggttcaatcatattaaaaaagaatttactttttaacttctattagaaaccttgttttaaacttttagaaaataacagaatcagctgacaaattctatttgggatggatggatgcggggcatttcttcctgactgatagttcaatgattgattggcaggaggagttacatct

SEQ ID NO: 86410 - DNA, 951 bp, Citrus clementina; identical to SEQ ID NO: 85702
  Intron number 1 from transcript clementine0.9_022840m (loc us clementine0.9_022840m.g) derived from phytozome v7.0 (c hr-ID scaffold_4; pos 1613027 to 1613977)

SEQ ID NO: 86411 - DNA, 395 bp, Citrus clementina; identical to SEQ ID NO: 83709
  Intron number 1 from transcript clementine0.9_019748m (loc us clementine0.9_018378m.g) derived from phytozome v7.0 (c hr-ID scaffold_3; pos 3977368 to 3977762 reverse strand)

SEQ ID NO: 86412 - DNA, 914 bp, Citrus clementina
  Intron number 1 from transcript clementine0.9_005452m (loc us clementine0.9_003981m.g) derived from phytozome v7.0 (c hr-ID scaffold_10; pos 4427142 to 4428055 reverse strand)
cgaggtcgttgattggcttaattcaattgtttcaggttgataacttcctcctctttataatttttctgggattaattctgttgtcgttaaaaagagagagagagaagtctgggaatacgtttgttcctgtctgcctttcttcttcggcgtttaggttttcggagaacaaaagttttattttattagatccgggtggtcacatctggggtgtcttttgatttttgttgctttcaaattatatatattttttcccatctcataacttgcttcatatctctaaatattttttttatcgtatgactgtttcaaattatattaatttcagtcttataaactgctgtttctctccaatcgcaattttttcccctgagattttgacgaatctgggaaattttgccatttttttttctggttcattgtttgtgaattgttcgaaatagatattgaaaaaccatttatttgggtgttatatttggaaaggcgaatctgttttatattcttttaattttcagtacgaagttttgtgtgcttttgaaattcacattcgttcctacctcttggttatcctccggtttttgccgatcttcttgtgatttccctcctgtgaggtgtttctgaatttttttttgggttttctataaaattgatatttcaagtgaaatatttagatttagattcacgttgttatcagatatttttatttcctcaaaattaagtgtctttattttgttcttttttttcatttatttttatatgcataattctttttggtgtttttatgtttaggtatatttgttgggtggtgtgttttatgtgtagtggttcttagttgttgccccatttcctctccctggtaactgactatgatctggactgcaggattaccagtacaatttaaagagctggttgagatc

SEQ ID NO: 86413 - DNA, 541 bp, Citrus clementina
  Intron number 2 from transcript clementine0.9_024682m (loc us clementine0.9_024673m.g) derived from phytozome v7.0 (c hr-ID scaffold_4; pos 5618202 to 5618742 reverse strand)
cctacagaaggaccctcctgcttcttgtagcgctggttctttctttatctccttctcaatcttatttgtttttctattttcatttgtcattgaagactatatactcatagagttgaattatctacccactaatcactcccatgatggagaggcttaaagtttttaagataccaggtgaaacggaactttatttcttggttccaattccaattctcttcttgcagcactggttctttcttcatctccatctcagcatgttttcttatttttttctattttatttgtcattgaagatagatatatatatatatatatgtattcatgaagttaacttgacttatcaacccactaatctctcacatgatgagaggaataaaactttgaagatattaggtgaaatggaattttatttcttggttccaaatccgcttgcttttctaattatctaaacttttttgcctttaagtccatcacagctttgaattaatcttttggaactttgtaattttgagtgctgcctattttgcaggccctgttgctg

SEQ ID NO: 86414 - DNA, 618 bp, Citrus clementina
  Intron number 2 from transcript clementine0.9_019418m (loc us clementine0.9_019418m.g) derived from phytozome v7.0 (c hr-ID scaffold_2; pos 2814954 to 2815571)
aggtaacttggaatggttttaattaatattaatcactagtttctagctttgatgaaactgaaatattgtttttttttttttaagtgggcaattgatactgctcgtgttgtagtggacagttttgtcatacgccgtgggacgttactaaattgaatggtctattgaagtttttgaattgttttttaacataaaataatacaaactttgtagagtaacgttacctacaatactattaagtcacggggttgaagttgtccaaatcaacgacaagatgccaattggaattagtattactttttttctttggatctctctaagttacatgcacttagcattagcctttttcttttttatttttttcaactgtaatccgattggacagcgatggacaacagttttttcacttttgccttgtggaaaagtgaacgctatgcacgtcatatataatttaaagagttctgcttagcattagagaaacacgagagaaatttatcttctctttttatccacctactctctttttttttcttttttttttctctcatctttttctacaccaaatatttttctaatttcaatttgttggtggccacaggaccgcagccgacaagggaaaaa

SEQ ID NO: 86415 - DNA, 813 bp, Citrus clementina; identical to SEQ ID NO: 82431
  Intron number 1 from transcript clementine0.9_009220m (loc us clementine0.9_009220m.g) derived from phytozome v7.0 (c hr-ID scaffold_3; pos 2062984 to 2063796 reverse strand)

SEQ ID NO: 86416 - DNA, 727 bp, Citrus clementina
  Intron number 1 from transcript clementine0.9_034022m (loc us clementine0.9_034022m.g) derived from phytozome v7.0 (c hr-ID scaffold_7; pos 4845229 to 4845955 reverse strand)
ttggtctatcaagatctcctcaccggtaactcttcttctcataaccttctctgttactttttaattcgcctgctcttactgttttgactcgattttgacttgaattagcatcgttcttctgctgtataggctcgtaatttgatcagatctgtgatggtattgattatttttgttattatgttgtaaattagcgcttgctttgagatccgaattagatctataattgattaaactactcgtgtttgttatttaatttgtttataatatttatgcttttgtaattagacgagagatctagatagttaagtaaccgattcgttgaattgttggttgattaattttgcatatcagctaccgatctcatagccttgtcattactttaacttgatatgattgatatatgagatatatctattgaatggaattctgtacatgtttgaataaagagcacgttgttaacttatgtcgatgggttgtttaggtgatgagcttctctccgactcttttccctacaaggaaattgagaatgggattctgtgggaagttgagggaaaggttagtttcttgagttcataataattccaatttcctatcctacatgcgtctctctgtctgttgtttttgctatttatgaatagggtttttttttatgatttttatgaatattgagaggattcattttttttttttaaattgccccttcagtgggttgtacaaggagccgttg

SEQ ID NO: 86417 - DNA, 815 bp, Citrus clementina
  Intron number 1 from transcript clementine0.9_024757m (loc us clementine0.9_022100m.g) derived from phytozome v7.0 (c hr-ID scaffold_10; pos 1625803 to 1626617)
tctacctcattcacaacggcaactactggcaatagccgcagatcacagaatgatcatgaggactttttaagaaaaaagaaaaaagtacgcaaaagttaaatagaaaagggggaaaaaaaggaactcgaaaatatatagcgataacatatgatgatgatgatgatgtaatgggactgtaaatcgttaagaaggattgctttgctttctttttgatgctgcgtagccattaatgaattttcagtccaatttcgtttgggatatccaaaattttgtgatggtgagtttgatgattccttaattgtcatcttttcatttttttttttaatttttggatgtgatgcgtacaattttcatcgttccaaaacagcatccagtttcccatgtttattttttccacagccgtctggtttagttcattattgttccatcgacatcctctgttgtgttgtgtgtatttgcgtgccacgttattttccttatccttttgagctccatcgttgtgtaacacgtatgtcgttaatgcatgtcctgtccgtcgtcgtgctgctgtttttgttttggttggctctgtacaggcattgtctatgtatgtcatcttctctgttacttattagactttttgtttatgtatttatttattcaatgtcgacctacatgtcttttatccctatctcttatctgttcctccattatttgtttgtttgtttgttgattttacgtaaccgcctttttctctttcaatttactgtatttgattaatttaaatattgtcatttgcaggataatcaagtgtgaggatcaagccggaagcagat

SEQ ID NO: 86418 - DNA, 818 bp, Citrus clementina
  Intron number 1 from transcript clementine0.9_006547m (loc us clementine0.9_006311m.g) derived from phytozome v7.0 (c hr-ID scaffold_7; pos 3350514 to 3351331)
gttaatcgcagctgaaggcttcatatttagagagagtaagtgcgttaatgtctgtttcagtttcacctttttagcgatttaaacttatccgtaactattaatatttgatatttgaaatctgttatgtttctatttaacgtgttgaatgcttcattttacttcagatctgttgcacctaacgttaaagtttgaatctttgtgtcgattcttgttgttctgttaaccattggagatcttttgttacgcactgtacttgcttggtattgctcgtgcagtcttctattttcttttcacgttgatattttcttttaatcacattgttgtgtaatcatattcttgaaaattaattgattaatttgttgtattgaaatgagatgtcttcaaaaaatcaagtggtttctgaagtgaatttattttttctctacggaaactcttccttttgttgttagcactgactgggagagctttatttatgttcctgttgagactgcaattccacttttatagttggctttgttaaggttcatcgtttttgttagtggattatctgtagttggtcggtaatttgccttttcagttagtgaggtatattcattttctttttctaatttatcggtcagattgagaaagggttttaaggctgactgaggttttctttggatttaccattaggtggactctgagagagaatattttgttctattgtcatcactaagaattacaagctatctcattacttggggttggtatcccttgtgaagaattcaattactgagtgctgacaaatgttctttgacgtatttgtaggcttctttgga

SEQ ID NO: 86419 - DNA, 543 bp, Citrus clementina
  Intron number 2 from transcript clementine0.9_000538m (loc us clementine0.9_000538m.g) derived from phytozome v7.0 (c hr-ID scaffold_2; pos 1424414 to 1424956)
tgtttcgattcactcttgaaaaagttgctatccaggtaggtttgagattcagttaataacttgatacttcattttagttcttggaagttaatcattttttgccattttgtttatatatctatcgtgtcgcttcatcaatgcttccttctgtttatagctgaaggtggtgtgatgtacctagtgctaagaagccagatagaacagtagctgttaactgatgttgagtatgttaaaaattgaatttaaggatgtttgtaattgttgtgcttctgcttgattatgaaaacagagcagctaatgtgtttggtaaacacctcaatttaccttgctgctaatatttaccagccactcgtacacattgatttgctgctggggataaatagctgtaacacctcaatcaaatgtaccgttagtgttatagacttattgctgcaagtcacatgatgttctgatattgtcaaatcagtaatatataataaattgcacacttgcctttgtaaatgtttagggtttacattccagtgatttggacagttcacttga

SEQ ID NO: 86420 - DNA, 954 bp, Citrus clementina
  Intron number 3 from transcript clementine0.9_000219m (loc us clementine0.9_000219m.g) derived from phytozome v7.0 (c hr-ID scaffold_7; pos 4097387 to 4098340 reverse strand)
ccctttgacaattactcatctgcaggagtccacaggtaactgtctaacaaaaaattgtttggttagaagaattaatcatgttcggaggctttatggtttatgttttaaataaacgcatgtgtcaatatagtgttacctagcattgcaatatggcatgtgtgtgcaggcatatatacattcttgctattggtagttaatcccttcatgcgttcatgcatagatttgctttgtgccggtgcatgtatgctcttttgcttctgtcaggcgtgaactgccaaaagtttctagagaattctgggctagatggcataaacaacaatctctttgtaggattagttatgcaaaaaatggagagctgtcacatagtaagattagatatgccaaaatttcaagatctatctcatactcaatgaaaatcaaaatgttatgtagagttaactctgatccctcgatagcttctttttgtatcatcttagtagaccgtgagattaagaaataaaatggtgatattcctcctgttgtagtattttgcaccaccttctcaataaatggagagaagtattgccatgtgcttgtggcagcaaaccgctcttactatcaattactgcacaacataatgaactgggtgtagcaaatctcagtgctgcctattattttgttcaacaggtagcctaggatgacatctcattattgcttgattgccgtcattggcctggaccagagattttcattctggctgatggaggctttgaaccttgcttcttttttctcccttttttctcatggagtgataatgttgtgatagtatcaaatagtgggatttgcacatgcaaccataagctacatagcagagaatatcattgtgtttatcatcagcgaggttttacatcacatagtcccctactgatgtctcattttcactcaggcctgttgaaccacctcaaagactggata

SEQ ID NO: 86421 - DNA, 726 bp, Citrus clementina
  Intron number 1 from transcript clementine0.9_031133m (loc us clementine0.9_031133m.g) derived from phytozome v7.0 (c hr-ID scaffold_3; pos 3915595 to 3916320)
gaagcaacaaacagaaagacacgtaagctgtttgatttgaagttgagatgccctcttagctcctacttactaaaagaggaagtaaattaagatataagacggttgcaaggacaatttcctttcactccccccccccccctccccgcgtcttcgttaatgaatttatagctttgtctgtcaataatgcaaatgatctgcgtctacaattctgtcaatgctatgcatttcatgaactagaatatgtagtgtatgtgttctgtgttatagactcatcactcctcccacatgctttgcatggagttgcctgccattgtttaatgatttttttatatgcagcaaacagaagtacttggttgtgaagccatgctagctgctacatagtagtaaagaaaattaatgataggaaagagaaattaatgacgagatggcgcgggggaagggaaataattgtaatagtaaaacttatatcactgtattttatgtttgattttgtttatattacttattacgctgcaggacatctttttcattatcgtttctagtgttttactttatcacagtaacttctttgcttctagggagtatggacagaatgtcaatcctctttcctgaaaatgcacaacggctttatgtttctctagttttattttgaaatttagataatttagtgtttcttcttactcaagaccttattacgcaggataaacgtgacatttgttgataagg

SEQ ID NO: 86422 - DNA, 567 bp, Citrus clementina
  Intron number 1 from transcript clementine0.9_026255m (loc us clementine0.9_026255m.g) derived from phytozome v7.0 (c hr-ID scaffold_7; pos 1881917 to 1882483)
gccccctaataataacaacgccgccccgccgcgaggtagagacgatgatcttcaccaaggtttacctgattccgccagcttagtctgatagcataagtttttcggataaagttcaaatcacgagaaaatctcttaatttataatatttagaaaaaaaatatgaaatgtttaaaattgcgaaagttgagaaatggaaagattttgcaaacaatttcgtgaatggatatgagtttttattttttatcttttcttttcgtattttttttctttttgaatgctttgattatgaaattaatgggcagtagctactcaacatctgttgactattgatttatttttatatgctttggggatagcagtagcaactacgagagtgtttttttttatgctatctcaatctgacaactcagtcgactcatttaataatgttgaatgattaacaaacaatttgattcatcatcacatggacaggtgtatggtttttggtaataactcacgccaatgaataaaaacaatagggcatttaaagactttaattgttttgatcacagaaatcacacggtttac

SEQ ID NO: 86423 - DNA, 238 bp, Citrus clementina
  Intron number 1 from transcript clementine0.9_009227m (loc us clementine0.9_009227m.g) derived from phytozome v7.0 (c hr-ID scaffold_7; pos 6351895 to 6352132)
ttctcaagaaacagtggtttcaagccctccaggttagcaatttcaattcaattcttttttcttttttcttttttctttttttcatatttcgtttctgggtttttgatttgctaaataaatgctccaacaaatgactcttgaagagttacaaatctttctcactgtagccttttagtgatacttaaaacaacaataattgagtggtgctgtcattattggtatggattaggtgtttgag

SEQ ID NO: 86424 - DNA, 830 bp, Citrus clementina
  Intron number 1 from transcript clementine0.9_000422m (loc us clementine0.9_000422m.g) derived from phytozome v7.0 (c hr-ID scaffold_4; pos 5538696 to 5539525)
tcaaaaaaatcatcccttcaaaacaacatcaaaaggtttgtgtgccgtgttattgttcttattattattgttgctgaagtttcattctttttccttctgggtttgttttgttttgtttgttagttatttttttctaagggatcggtttcttccttccatgaagcttcttttgagttgtgatttcatgatctttgcttcaagcaagtcttctgtttttaccgaaataacggggcaaaaatatcaaaatctaagtctttggtcatgcgtttatactttgtactgcttactactcccctctagatttcttcttttgggatcagttttttaactattcacttccttgatttgtgcctgaaaattcaagtctttttaacttgtaagccataaaatttctcttttggtagtctttaactcagcttatacacactttcctgtcttatttttttttatttttctcccgatggcttgctgcaacacttaatcttacctttgcatctttatctagctattgccgtatgatttaaaaattttccaagatttgatttttgagtttgtgctagtgggttatggtatctcaaagttttgattttgaaaactttttctgggtttgtccacataaaataataatgctcttttttgcttgtgggggtgttttgttgttttgttccttgcttgatcaaatcaaaacattgaagatagcttcaaatttactcattaatctccccatcacataaaataacatccatatatggaaagctctagtctttagaataatctccttctgggtctcatgatcttattatcatttttgtgtatttctttcaggttaa

SEQ ID NO: 86425 - DNA, 1035 bp, Citrus clementina
  Intron number 4 from transcript clementine0.9_009222m (loc us clementine0.9_009222m.g) derived from phytozome v7.0 (c hr-ID scaffold_3; pos 7074497 to 7075531 reverse strand)
gaggctgaatctacggtaaaaaaggtccgattagatacttttacagtttaagtgtataaatatgctctcttcatttttcgctctcggatacacaatctgtgggaaaggtccaggctgaccttggcatggaactgaatctggctaattcatgaacttttgctatcatgcccatggccacgatctcagactggggactgaacttatttattcttttatttgtttaaatgttgaagggtagaacctaaattaattttttttttccttccttctcttccagtcgtattggaggtcttcaatgagctattgcgataatttttaacaaaactctttctgactttggaaaccaatttgtattctctacccttcgcttagtcattgcgtttgcatagtttttggtttatcagagatttagagatattgaattgaaattctgttcaacagcaaaggtttaagttatataagtatgtgatttcatgtatccaatagtaataatagatgtaaaatcaatgtaatattagcatccattatgggtacaaggaatggatttgatatcagtagtcagattgacgaaaaatagatctactaatgagaagtgcattgggttgcataaacttagaaagttttagacttagtgcaatttgatcttgctactattctcttctctcatacactacgacatacgcaaccttgatcaatatttgatgcttgcacccgtaacattttctatgattgccccattcatatttcaccctctgactgcagtcccaccttcatgatagaatagctggtagaggaggttctgcccattgtagtttttgtcttgatttctctgtatttttcttggttttaggatgagtatgcatgcattataagttcattattgcatagtccttaagagcagtcatatttcaagtttataggagtaggtactttcatgtattgagtgttagatgccgcttttgctgagggcctttgttttgtatcaaaagaaatagaattgatgtcagtccatattgtttataggtttctgccagc

SEQ ID NO: 86426 - DNA, 984 bp, Citrus clementina
  Intron number 1 from transcript clementine0.9_014596m (loc us clementine0.9_010748m.g) derived from phytozome v7.0 (c hr-ID scaffold_3; pos 8496417 to 8497400 reverse strand)
ggtgagtcgatctttttacttttgttgattttattttttgtgtattttagctcttcaatttagaatttttattctgattatagtttcagctgtaatccttctgcttcattgaaatgcagttggagttttcagttaatgaaactgtgtgtggttgccgagagaacggcttttgttttctgttgctttttagcttataagaaaaactttcagtgagtggaggtggtcgttaataataagtttacttcagaattttgattctttttcctccttccgcaatttctcagctaccgaaagaaacttttatagagaaaaaaaaaggaaaaaaaaatcaattgatgatttcggttgtggttttgcttttttttttttctttcgtttaaaccaaaaaataggaatacatattgttcaaacgttgagaataactttaaaatttaaattatttactattatcctattacagttttttttcttttttctttttttaatcatcagatttgaaattctcgatttatctcttttctttctgtccttttttttgggaaaattaagttcctgagttggtaagctggtgatgttatttatcttcatcatattttatgaaaaatatcaattaatttgtgttaatggtagtaattaatattcactgaccagtgattatcatatgaccttttgataaatttcttttaaatctctacactgtccggtatttgtaaatataaaatatattttattgttgctggaatcaacgaccggatccatagttttaagagtaaactggattaaagcaggctcatatcaagttgtgtatttcctcatatttggtaactctcagttgtgtgtttggcgcttatactgaaagatttgggccgcgtgagttttattgattgatgatctattttttgcagctatgtcctagatgctattggaaatggatttttgcattaaattgtcttctgtttgtgcaggagttatactgaaggactc

SEQ ID NO: 86427 - DNA, 261 bp, Citrus clementina; identical to SEQ ID NO: 78356
  Intron number 1 from transcript clementine0.9_017343m (loc us clementine0.9_017343m.g) derived from phytozome v7.0 (c hr-ID scaffold_10; pos 558952 to 559212 reverse strand)

SEQ ID NO: 86428 - DNA, 827 bp, Citrus clementina
  Intron number 5 from transcript clementine0.9_022796m (loc us clementine0.9_020347m.g) derived from phytozome v7.0 (c hr-ID scaffold_3; pos 505170 to 505996 reverse strand)
aatctttagaggtgcccaaagagaaatcatcagaggtaaacggtcccttttgactgtctttcaactttgatcgttgaagtgcctttatgaatgttatatgattgattgaagaatgattttataattttgagcagtattgatgtgtaatccttttttgtttcttcaatttatcttaaatgattccacgttgtgtagtttcttatataaaacagtgtgccagttggtgcttgtttcatgcttaatatagtctcccatgggggatgagtaccatgtcctgtttgaacttatggcgagtatgaaatgcgataacgcaatgataattcattgaccaaaactatggaaggtttgagaatggtgcaacagtaacatattccttttcgggttttcctgtgttgtgtgttattttaaaattatgatgctatatgaagatgttgttctgttgaatgataacagaccaggagagtttgtgagaactaggcccagatgcaggcttctctagttcatactttatactggtaatctttgtaggcagatctaatggtttgttatctatactccacttgggcttgcgctgaactaaggtgtaggacacatggtgctacttatcaatgttagatgtttcaagcggttgctgggcgagcatatctccttttgctgtgtgctttgtatgagttacagttttatcatttattttctaatgaatattatctttgaaattgaaagatatctgcgctacactttattgcagtagtgcattgttttttattattgctattgtgcattgactgtcagttttctaatatactaatcttcttcaggcttggtca

SEQ ID NO: 86429 - DNA, 723 bp, Citrus clementina
  Intron number 1 from transcript clementine0.9_021325m (loc us clementine0.9_021325m.g) derived from phytozome v7.0 (c hr-ID scaffold_31; pos 450169 to 450891 reverse strand)
gtctcttcttcttctccggcaacaaatttaaccgggtaattacaatttttaaatatttattatcataattatttctatagtttaatttcaattccctttttgcttagaatttttcccatgcttgtaatccatgaacaatttttattttaaaagtaatccacaaatctttctattccatcactaattttgcttcccgtatctttattaatcttacttctttttttccccattctttgcatcttgaatcgtgattttgcagttgattcggtccaagtattttctatttattcaattttttgtccatttaattagcatcgatgaacagtgattaagttgtaaattttgatcctttcatgctctaatcttaagctccgaattgatgaagcaaacccatgcttcaatttgcgtagatatatgcttaatgctccagtttgtgtagatatatgtttaatgaaggaataatgaggttatgttcttttattattattattttttgttttcttgatagattaaagtattttaggtaagttgtttgatgaaatgcctaagtgagtttttattgatgtcaaaatgaaggggtaagagtagttggtcagatctagtgataaaagtaatctgattaagtaggaaatatgcatctgagtattgaagagaattattgtttgtggacttggttgaagatttcattttggttgattgaggcattggtttttgtaggcattg

SEQ ID NO: 86430 - DNA, 1051 bp, Citrus clementina
  Intron number 1 from transcript clementine0.9_034449m (loc us clementine0.9_034449m.g) derived from phytozome v7.0 (c hr-ID scaffold_154; pos 108216 to 109266 reverse strand)
tgtgttcctgtcattggcagccaataacttgtccggtattattccttcctcaatctttaatatctcttccatcgtaacttttgatgtgggattgaaccaaattcaaggcattattcccctagactttggttctactctcccaaatatctaaaattttggcattgcttttaaccaaattactggagttattccaccatcaatatctaatgcctcgaaattggaatcatttcaagtcgtcgaaaataaactaactggggaagttccttctttggaaaagctacaaaggcttcagcatttcacaattacatccaacagtcttgggagtgggggaaacgatgatttaagcttcctttgctcattgaccaatgcaacgaggctaacatggatgcatataaacagtaacaatttcggagggttactacctggatgcattagtaacttgtcaaaaactattaaaacgttgttcctcaacaacaacaaaatatatggaagcattccagctgggattggaaattttgtcaacttgcagagactggatatgtggaacaaccaattatcaggtaccattccccctgctataggagagctccaaaatttaaagatattgggtttaaatagaaacaaattatcaggaaatattccaccttccattggaaatttgaaaatgttactgaacctatttttgaatgataattttcttgaggttagcatcccttcaagcctagggcaatgtgagagcttgatagaaattaacctttctaataacaatcttagtggcaccatacctccccaattcttcagtctctcatccttatcaatttctcttgattggtccagaaacaaactcactggttccctacccattgaagttggaaaattgaaaattttggaatttttatatgtttatgagaataggttagaaggtgagattcctagtacttttggtaactgcataagactggaacaattagggatgggaggcaacttattccaaggtcctatttcttcatctttaggatctttaagaggtcttagagttttggatttgtct

SEQ ID NO: 86431 - DNA, 790 bp, Citrus clementina
  Intron number 1 from transcript clementine0.9_024737m (loc us clementine0.9_023576m.g) derived from phytozome v7.0 (c hr-ID scaffold_3; pos 8624611 to 8625400 reverse strand)
cgtctctcccaacggctctgtttcgccctctgcttgtggtggagtctgtcacttctcttttatttacttttaatgttccattttttttttcaaattcaatttactcatttataaactgcaaatctattgtttactagccgtttatttattattctaaaaacaaatttattgattttatgaaatgcggtgtactctgatcttgaagttcttgttctgctaattttatgttttgagttccattaacattaatatgatatactaattctgtgttgtttaggataaaagcacattgtgaaaatttaatttagagccacattaatgtgattagcaattcatctattacctttataaaggcaagccggttgagttctttattaatactgtactaatgataggcagatgttttattaatatgtttgtttctttttattgtttcctctttccccttgtatgggttggatggaggggtccatgtaaaagtattaattactttttttttttttttaatcttccaattggaaagttttgtgaacaaaatatgagaggttttcttaagtatgaatctcccagctgcctgatttatttgctcgggatgcaattgcttgctcattcttgtgactgcatttgtttctcattgttgtggtggtcttagttttgcatgattgaatagattgaagtagtttatgccttttctttagcttgagattatattcttctttaaaataatttcgttgcagtaacacatcttaaaacatacttttattgcagtctgagtcaagttcaactggaa

SEQ ID NO: 86432 - DNA, 804 bp, Citrus clementina
  Intron number 3 from transcript clementine0.9_002533m (loc us clementine0.9_002533m.g) derived from phytozome v7.0 (c hr-ID scaffold_7; pos 638582 to 639385)
agcagaaatccgagtccaaaggtatgtcgtctccacattgttatgtgtgtttgtttgcatgtatttatttgaaggattaaatttctatttgaggacaatatatgctgggttaagttagtgatatttgtttatttttgttattctttctttttactttatcagttgttattgctgtttaaagactagctttacgaaatggtgattgtgtcattggtgggggatgtctcttttgtgggattttccattcttcatcactataactaaaattccatgattgcttagtttgttgacctttggaatttcttcgttgtatgtcacatttattgattgaagtggcttaagatgctcagaatggcctattagtttgccctctgaatgaactagatgctgggtagactctaaaatatattaattagggcctaatggagcttattaaggtagaacatgtgatttgattggttatgttatgtatgagcttatggctcgtgtatcatctttcaacagaagaaaataccctctggaatggttataaactagttttagtctatgagtacattttcagggataagtcccctgctccttttttttttttttttttttctcttttctgacaattttaatgcattttactatttaatttgtgtattgtggtgccaatttaggatgcacatcaaactctaatttcgtagagatgttttaatcactgttcatttcattgatggaatcagagcatattcttatttttccccccttttttgtgcctttacaggggactcgggtgctggtgaccagaacttcactagg

SEQ ID NO: 86433 - DNA, 439 bp, Citrus clementina
  Intron number 1 from transcript clementine0.9_016473m (loc us clementine0.9_016473m.g) derived from phytozome v7.0 (c hr-ID scaffold_14; pos 3716189 to 3716627 reverse strand)
cggggcgtagtcgccggtgccgacaaaatttcgtcagtattttttcttctaggacccgattgcattatttgtttatattccataaattttaatttttttggattatgatgtactcttgcggagtaaatcagtcaccttactttttttaaccagttagacattatgtatgtggatcacatttcactttgttaatttttttttagctttactcccttcgatataagattattatgtatgatgtgttgttgctgtataaacttgacttcccctgttggaaacacctgttgaccgaattcgtagttttgttcttcattcgtggtccattatggtcaaactatatgaccatttgatttttttcgtgtatcaaacgccattattagtctgttggttgctggatttgataggttggtcatcggctattataaagaaagcgcgcaac

SEQ ID NO: 86434 - DNA, 966 bp, Citrus clementina
  Intron number 1 from transcript clementine0.9_012593m (loc us clementine0.9_012593m.g) derived from phytozome v7.0 (c hr-ID scaffold_31; pos 186867 to 187832)
ttcagtttacatagtttcatcaaatccaaagtcaggtttgtgtcctttaaaagctctgttttctccccacttgttcaataattctatgtatctagaataaaattgtaatttaatcctgaaaatgagttagatgatcatgatatatgtcataattaaaatcagtttctcacatgcaaactgtaattccacttaacatacgctctgtttttttctgcccttcctttttttttttcctgggcttgttattttagaatctttttttataattcaaatttttctctggttttattgtattctgataactgatattcttctgttttttttttcaaagattcatttgtagggttctttattctagatattccatttttattctgcaaattaatgaagaaaacagaaatgaagaaagttcaaagcttttttcaatttcaatcaatttcccactgtaaaggtggtacattttcttctactctttttcagtgcaactggatacttgtcactatagtgcgttgattcttatctcaacagtaataagtcaatttaaaaaaaaaaaaattaatttatcgttttaaaattaattctttcacccttttgcctttttttttcttttttttttttcaacatatactgttttgaaaatttagaatttgcttttttatcccatgctcatacatatttttagttgatttttccatattttagcgtcacgttaatcttgataagcatttgaatttcattttaagaacaacatttttatatttgagaaacccattaattctgatatcacggttattttttattttaattctttagaatggtaaatttggttcttcaagctaatttattctgccttcaactgtttgatagaactgataaaaagaagatacaagaattcatccctactgattggatgattatatatatgatgttatgttgtcatgtgtttcttttcagaatcaccaaaag

SEQ ID NO: 86435 - DNA, 925 bp, Citrus clementina
  Intron number 1 from transcript clementine0.9_005239m (loc us clementine0.9_005239m.g) derived from phytozome v7.0 (c hr-ID scaffold_4; pos 5607149 to 5608073 reverse strand)
attcagctgagggaatctgggttcggattgaaacggtgagttttgtaaatttttgtgtttgttttgggtggcttcttggggagggggggggggtggcgcgtgaaattggaataaagtttgtgcttttttcgttttgcgcggtgagttgaatgcggatccgtacggtttatgatccgcattgtggagttgcaatgcggatttgtggtcaaatgaattactgtcgtctgaaatgcaagaataggttccgttttttattcattttcccaatattttaaggttttaagagcctgtaagattggtttttaatgctcactatatttaatgagcttcagttttttcgggtgagctttcttattattttattattttcctgctggctttgtttttgaagcagaaatgaagtttttgtttgaatttctgtgaatctgtgtcttgtgtgtgttttggttgaacaatgaagtgaagcacatgaaaatggtgaatttgatgaataatcaatatatgagagaaaatgaagtgtgtgtgtgtgtttttttttaatcttttaaatgggttagttgatttagatctattgatattcctggatttgtgaaaaaaatatattaaatatatgcataatctgaaaagggtatttgcttggtttattggggagttatgtgaagaagtaaaaaaatcctgaactttcacgggaaaatgcaattttgatttattaaaagctggtgaagttgtgcatgatacatgatatttcacaagaaagttgcttgcttcttttactgctttctagttcggctaatatatcagatgcagccaaatgggctttcttgttcattcaagagtttggtgatttaaatttagaatctctgtgctgcatttgttgttttgcttttgaatgctcaaggttctgtttttgacagaaagcacggac

SEQ ID NO: 86436 - DNA, 732 bp, Citrus clementina
  Intron number 1 from transcript clementine0.9_001769m (loc us clementine0.9_001769m.g) derived from phytozome v7.0 (c hr-ID scaffold_10; pos 2370460 to 2371191)
agatcacaggggtttcacctgctcaaaattataaggtactcaaatttattattttgatgtattctctgatccctttacactgactctctatgctcagcagcaccaagatttttggtaatttgacctgaaaaacaagtaaactttcaaattggaatacattgtctgtgtccaaacaaagaaagcattaatatgttcaagtttgattgtaaccatataaatttagctctgcacaattagtattatgttttagtttctggaaacttttatcaggattttctttgggatgagtaaaccagttgcacatgtgactcatacatatgtcaatctattccacctttgctatacttgtgaatcatatttgggttttgagctaatagtggacattaatttcaaatctgtatggatgacatcatagtatcgcagatttactgataggtgttttccttctgttttggaaactgtacttgtgtagctttgtacaatagcaattttaaataacattcttcaaataagattgtagaataaaacatattcagtgaaggatgtcacgagaagggttaacaggtaccctgctctatcttcgcttctagtgccagcaaaggaagaggtgaatcaagtggttggactacataaaactagtaatgttggttcatcctctttgtcatcaactaatctatcctcagacatgcatattcaggtgggtacagacacagatcaagtcagcttggagga

SEQ ID NO: 86437 - DNA, 837 bp, Citrus clementina
  Intron number 1 from transcript clementine0.9_018513m (loc us clementine0.9_018513m.g) derived from phytozome v7.0 (c hr-ID scaffold_3; pos 2460862 to 2461698)
tctctgttgccactgctaggcctcgcttctgggtaaggtttttttcgcttattatctttgttattattattaactttttttcttttaaactcatttggtggtaaaattttcctattctgaagtttttgagcatccaaaattaatcattttctttcctcactgatttctaaaatcttttttttttaatatgggattactttgattagtaatcttgctattgtaatttgcactggcccatgacttcttttatgcagtgcaactgtttaactagtgacttcttgtaatagcaatagaaagaaattttaaatggacgtcaactgctactgcaaaaaatagttttatttgttggccggaagtttggattcaagttttattgcagaggtccccagttataccaaaatgggcagtggatatggatttcactggcacatgacaggttaggttaggtgacacagttagccagccgatgctttaagtactagtcactagcgacaagttaaggtggtgctgttctttttagccttgttgaaagtaagaaataaagtctataatttgaaacaaaaatgattataaaatttgttatcatacaagatggatcaaatctacttaattttaaattaagtcataacataattaggcctgcctgccgtacgttcatcgtctttcaacattttgatttgctttatcattccatcttaatattcttttcctctcctgcttttggatattttttgcatgtatgcggtaatggtcatcccccaatttgcggcaaatcttataaactttgtgtgttgggagtaaaagtttctgttgttttgacaatgcaggcgactatat

SEQ ID NO: 86438 - DNA, 446 bp, Citrus clementina; identical to SEQ ID NO: 81523
  Intron number 2 from transcript clementine0.9_014515m (loc us clementine0.9_014077m.g) derived from phytozome v7.0 (c hr-ID scaffold_85; pos 421043 to 421488)

SEQ ID NO: 86439 - DNA, 374 bp, Citrus clementina
  Intron number 1 from transcript clementine0.9_029704m (loc us clementine0.9_029704m.g) derived from phytozome v7.0 (c hr-ID scaffold_24; pos 3209331 to 3209704 reverse strand)
gcccaggcggttcaaaaaccatcactctcatcgcggtcagtccagcagatgccatcaacctgataggttttgcattttgctcactattttgttgtaagtgctctttgttttagcacccagtagctaattcacttcttctctgaagcagggaagacgaatctcttccacctgatcaaggtatcaattccatggcatgaattaaccgagtaattatttggttgttttttgagatctctttgtaaattttacgtgtttagttactgccacgccaggcgtttgatatattaccgccgtgatattgcctttttgagtttaggaagctgactgtgattttattttatcttttttcatttttgtacttttagctcctgaag

SEQ ID NO: 86440 - DNA, 587 bp, Citrus clementina
  Intron number 6 from transcript clementine0.9_014458m (loc us clementine0.9_014458m.g) derived from phytozome v7.0 (c hr-ID scaffold_3; pos 636321 to 636907)
cttgcgatttcctttcttagctttgcttatatcaggtataaacttttacttctcccctagtccttattttcttggtttaactgataattttgtgtgaagaggaataaagattttgagtagtttagagtaatggaatataaccatatatatgggacaaatctcactctgtgatttgaaaccatgggtgattgtgatcctgctgcatgattaggatgcacaacatgtatattagcaatattaatatgcatgatctcctggtgaatgagaagggaggaacttcctactaattttatggtaagtccaggagatgtaactcaagtccttgatgcacttgatgaaaactttttgcttagctgttatttgatcttttctcgtgagactgctgcctcaatgtttcctttgttgaattgcaagtcttcgcatactagtcattctttggttaagaagagcgtcagttattcagtggttacttcaaacccctcactgtttgttctatctcttttggcaattattgtaaaggttatgatgactgctagcttgtctgtttcttaggtggtcacaatctacttgttcttgcgcataatctt

SEQ ID NO: 86441 - DNA, 498 bp, Citrus clementina; identical to SEQ ID NO: 81478
  Intron number 2 from transcript clementine0.9_008444m (loc us clementine0.9_008444m.g) derived from phytozome v7.0 (c hr-ID scaffold_31; pos 460008 to 460505)

SEQ ID NO: 86442 - DNA, 1037 bp, Citrus clementina
  Intron number 3 from transcript clementine0.9_032384m (loc us clementine0.9_032384m.g) derived from phytozome v7.0 (c hr-ID scaffold_2; pos 8009671 to 8010707)
tcgagcaaagattgctgttgccttttggagctgctgttgaaaaaatagcataacatgctattttgagagcacattttgagtgggtcccacttaacgaaagtggaaaatattgtgaggttcggattctactccgttgatatttcaatagtataattttattttctcaaaatggtgcttgggtgaatgagaaattgtctctcaaagttcacccttggagttagaaatttgaaaggaaatgaaacttatcccacatgggaaaaagaagcctatgaattagtgtatatatataaacacttaaccatgcatgggtaaggattataaggatagaggctctctctacacgtgcgtgcgcagggggggtgcgaatccaagactgatttggttgaattcgtgtgcgtcttgcgtacacaaatgtcagcccaaaatcattcatgcaagctaggcacgatttcaattccttttgaatattttttattgtaacagttcatgtgaattcaaagaattggtaacagcttttacaattatttatttttagctgttattcacgttttattttttgaattcaattttgaaatcaattcattgatttggctgttataacaattaaaataaaacatattgaattcggaaattcaatacaaataagctgttacatcctcacatgattataaaaagggcatatcctcttctgtttttaaatacacactggaaaaaattagcacaagcacacttgctgtttttctcttcatcttacttcggttttctctgatcgagttcactgttgtggttcgccggatattccagcctgtgcttgattggagaattgtacccgtttcatcctgggaaacagatactagcaaaccttaagcactccgtaaaggtggtaaatctgttttaaagagactgtttttgtgcaggcctcgggtttccattttttatttttcgtttcggtttcgtctctcttctggttttgctttctgttatttcttttgacatttccagtagctggttttcgttggttagctactgtttcattt

SEQ ID NO: 86443 - DNA, 1003 bp, Citrus clementina
  Intron number 1 from transcript clementine0.9_023969m (loc us clementine0.9_023969m.g) derived from phytozome v7.0 (c hr-ID scaffold_2; pos 4234140 to 4235142)
ccaagcgcgccatcggcgtcgagattaacaagcaggtcgtttcgttttctgtttcctttgtgttttttttttaaattattttttggggtttttttaattgtatttctggaaaaaagtggttccttaagatttggaaatgggttgagaacattttttgtaatttgggtttgttctgattttgtggctaatgggttctttttagcactagggtttgttgatatggtgtgatcggtgttattaatgaataactgttaggccagatctacttgccgtgcgtatttagttttgatatacttgttgatttttgattcggtgatggctttgtgttatttgatactttatataatgccttagatttatattggtttgtaatttgggtaacttaatgttgggtgctctgcgtatttgttgacccgatattatcaattttaagcttaatgtatctcttttctgtgctgactaggttaaatttttcatgccatttttgtttgacagcttcagatgtatatatctatgtgaattgcctgatgatttagctcgaaaatagctgttctgttgttgagttgattgataattatgttcgaggagaactgttgctgaacaaactttcactgtttttcctttatggtacgttgaaattgagtcttcaaaatgttggttgtgtaaacttcttttgatattggtaataacttgttggccagatgttctgtttgaattgattttctatcatctgaatggacaaagttgtgtttgtatgccaattgaattttgtttccttcaaagttttaatttgtcccttccattcacttgctctggggaggtactcattgatatggctctcatcatatttaatgacttcgtacttagtgattctgtattattgtaacttgcttgaattggttataattgtcggcatttgcgttttttgatgataaaaaactgaattgcattggaatatgcatctgtgaccaggttggtaacaggatcatcaagaagaggattc

SEQ ID NO: 86444 - DNA, 794 bp, Citrus clementina
  Intron number 3 from transcript clementine0.9_018234m (loc us clementine0.9_018234m.g) derived from phytozome v7.0 (c hr-ID scaffold_10; pos 278427 to 279220)
ttaaagttgatactaactctaatgtaagtctttgcctgttgtttgtttcataatcgtgccctgtctttaaccgtgagctatgttttaattttgtgttgtctcagctgcatgttacattttgtaccagtttttcaaaccagcacttatttgccaaaattggaatgatttagtgtaagaagtgttatcgatcaaaatatgtgtgtgtgcacgcgctagaattaggctcaggttgtggttgttgtctggcggctgtgctgccaaagcaagttgccgaagtgtatggtaaacacttaatcgcctggttttgaagcgcgggcaatgaattattatctaattttctaagttagacatattaactattcaatataactttgaaatgaaatctaccaaactaaaaagtcatgtttaccagtacctatcaactttcactttgcagttagggtttccattccatgagccatcaccaccagaataccaaaagaaggcctaatttggtgagagagaaatgagttgaatgattaggtttggttatattctctatggtgttgaggttctttgatattgagtgatggaaccttgtataagtttaactggaagcagtgctcccatgcggatggatttatgcttggttctttccctcatttctgaaagatgattttcctccttgcattttgtgcgtatgtaaaataatatccttgttttccacaagcaattgtgtttcattcctaatcatatgatatctttttcttttcttcccattgatgatgtgtagctttttacaaccatcactgtcg

SEQ ID NO: 86445 - DNA, 414 bp, Citrus clementina
  Intron number 2 from transcript clementine0.9_009348m (loc us clementine0.9_009305m.g) derived from phytozome v7.0 (c hr-ID scaffold_24; pos 3438252 to 3438665)
agcctgattttgataccccagtccttattgcagaggtacattttctttctttatattccatccgagcaaatttccttaatttattgtattttaaggattcgttttgattttccaaatgaatgttgataacatagtagttaaagtgtttggtaaatgcatacaagtaacacccacctaacaacatgtatttgactggtggtgattccattccacagaagctatgtgcctgaagaggttttggcaaattttttagggaggtttttaatggatttataaaatttaggagtgattttcaatgcttcttagggtttcatgggtgtgtttgtagttggaaaaaaaaaaaaaaagggtagctgaggtcctcaaaatttattcttaatatattttcacttgttgggttgtaggcagggataa

SEQ ID NO: 86446 - DNA, 745 bp, Citrus clementina
  Intron number 1 from transcript clementine0.9_002652m (loc us clementine0.9_002656m.g) derived from phytozome v7.0 (c hr-ID scaffold_4; pos 5027005 to 5027749)
gcattcccattctcttcattgcgtttctaccgtccgtacgtttttcttgttttctctaggtactctgtttttctcttcttcccattcttcttcttttcgtctagttttgaattcttcttcgaggtcgaggatcgtgttcaatgctctagtctatcctgttgaattacttgttcatattttacgctgattttatttgaccacctctagaaactcagccttaaaaaaagctcctcagattcactgtttcctttgctagaattttctcccatgcttttgttggtggactactaaaaagaaaaaggataaagaaaaaagaaaagctttgatccaaaatttatccctggtagccacacaaagtggtagttcaattattatgcctacgctttaaagattttggtaatattttgtttggcactataccggccaaccagcacataagtgaatattcttaacaaattaagacgcaatgttaatttttaagacggtaatataagttgaacaatatggactctttgcgtaattaatattttaagacttggttgttgaaacttgaaactggaggtgggggtaggtttagaaatttttcgtcttctagatttttttatttgactattcggattatccataatccatttcttctctatataatgaaggttggttttggatagacagctatatctttacgttatttacgtttgcttggttccttgtgttgcagttgaagtttttgtttgtctgagaatca

SEQ ID NO: 86447 - DNA, 776 bp, Citrus clementina
  Intron number 2 from transcript clementine0.9_010327m (loc us clementine0.9_010327m.g) derived from phytozome v7.0 (c hr-ID scaffold_4; pos 6935656 to 6936431 reverse strand)
aaccagctcgagaaggtcaatttttcgtatttctgattaatttcatatgctgtttgtgtaatcaaatttatttattttcttattcgaagtttatttgtgataagatggagttgatcatctagtttttgaattttgagagaagtgagtatggatcattgatgtgtttagccaaccaggtatgtttgttttttgagaaaacgagggagagaaaacgggtgtggaaatttttattcattaaatgtaatgaaaagtcacttctgattgtgtgaagccgatgcaatgttgggttgagttgtagtaatgctgcactagtactgaggctctggatcattattgagttacccggtgccgaatctgtatgtgcaaaaacaattgttgggatccgctttgcagcttaagctatttttgagtgtttctgctgcctgtaatgccctcacattgtttagaagattttagtttacagtgacgatttttttttggatagatatgaactgtttgcttggttgttatctaatgtttttaagaaatcgaatggtttatgtagttttgagctgtggagcttccttttggttatttcatttcattgacttttctgaaaatgctcaccttgtgactgttattcagttacatgtaaattcgaggctgtaaacttataatatatttattctcttccagatttatggttcctttcgtcactatgtatttttcctaattggtgagaatgataccggtcctttgcaggataagaagtcattgaagttggggcctgaagacag

SEQ ID NO: 86448 - DNA, 404 bp, Citrus clementina; identical to SEQ ID NO: 81930
  Intron number 1 from transcript clementine0.9_017419m (loc us clementine0.9_017395m.g) derived from phytozome v7.0 (c hr-ID scaffold_3; pos 3257958 to 3258361 reverse strand)

SEQ ID NO: 86449 - DNA, 896 bp, Citrus clementina
  Intron number 1 from transcript clementine0.9_032532m (loc us clementine0.9_032532m.g) derived from phytozome v7.0 (c hr-ID scaffold_7; pos 3345437 to 3346332 reverse strand)
acccaacaagattttgtggaagaagctcatcggtggtaagctctcgtcatggcccgccaagaacaagagagcttacccaagcctgaaatgttgaaacgttgtggaaagggacctcccaagaaaggtcaagggaagcgtgcagccaagcgcagcaagtagatattctacctctgaattacctgggaattggatcattaatgatttgaaagaagatatgcaactgatgttggtacctttgttttagcttgtggaatattaaaatcttatccctttttcgtgatattttccattttgtgcccagttactgatactgagtagagtttccatcttgaatggaattgaagtatttgttggtttaaaaaaaaactcatcatcaacaaaattttcaacaatacgagtggggattccagtggttaattacaaaattgatctattcataacttataattaaaaaaaaactaacactaaaagaaaataacccaaatacccacacacgggacatccaaacaaaatcaatccaaaatcaaattcaaaagaaaccattatgacttcatctctccagtctgctctcaacccaaatacccatattgtgaagctacctgctaccggctgccaccacgctgctccacgtcggcaagatagcacagtcgcaccacgaccgacaaccttgacccatgttagccttatctttcctctctcgaaacaacatcacgtcagctgcaccacagccccaccatgacagatagaggaaatcggagatccatcgaagctacaatttgaagctgcaatgcataattgctctggataagcaaggcctgagctcgccttgccatcgccatttcgctttctctcactctcacttcggcttctcagatcaaattgaggattttgttttg

SEQ ID NO: 86450 - DNA, 694 bp, Citrus clementina
  Intron number 1 from transcript clementine0.9_024673m (loc us clementine0.9_024673m.g) derived from phytozome v7.0 (c hr-ID scaffold_4; pos 5618778 to 5619471 reverse strand)
ggtaaacttatttattattattgttatcattgcggtgcatataatattttaatctggcactgcttgttgtttgattgtttatttttattaaggttttatttaaaaagatattttttgtatttattatttttttggtactgtctatagatctggagggtatattttatttgtccttttagaggtggtaataattggttgttttatgttttatgtttttttcaattatttttttggtgactgagaaatcaagggaaaaaagaatttttgtgaataatttcttgtgaatgttaatgggtgttgattaattgggggatttatgtattagaagggttttaaaaattgaaactactgaaacctaatttcttctgtgacatgtttggcagtgaatagggtaatggttttgaaactagcagttatgatacttttaattattttgagcaaaataattgctgcttgtttgtgttggattgaaatattgtcacctcggcaaaataattactgcttgtttgtgttggattgaaatattgtcacctcgtgttcatatttttgacattcacatttcaccatatcgggcaactatttttgttagtgttatttttgtttaggtctagataggattgggaaatacatttgtagtcgaactgaattgtgttattcttttggatgtcgttgcagtttgttgagaaattcccag

SEQ ID NO: 86451 - DNA, 997 bp, Citrus clementina
  Intron number 1 from transcript clementine0.9_033922m (loc us clementine0.9_033922m.g) derived from phytozome v7.0 (c hr-ID scaffold_14; pos 312161 to 313157)
ctggttcaattcactatccgcggagccctcgagaggtattatatatacttttgttaatcctcttcatttctttcgttatacaaatatgtcatgcatgatattgatccgtggagatattctaaagtttctgcttagaattttctttagccatatttcatttgtgattttgatttatattatttatttttgtatcgatgggtgctttaacaaaatgtcattttatgataaaatttggaataacgacaattttcatgaatgccagcctcgataccatcttgtaaattatattagttatatttgtatgagcaatttaaaactatgtgctacgtgttaatttctcgaacattttatgatctttattttgccataacttatcaaataataatttcattgaaaaaaaacacgtagatgccactatgagttggttaatatatactgtttaattaataaattctctttgctaaataactagatatatatgggctcctcgaaaaaatcggaaaggccagtgcgtttctctggatcttctctcctacacgccagtaacatatgtataacatctatgagattgttgaagcaatatttgtattttgcttgtggcttactccaatgtttcattggtaaaaaggaaaaaaaataaaaacattttcttattaatgtatcgtttgactttttgtattaattattgattaatacggaagtgcccttttgaactctatgatttaaaaattacgtaagtggagtacataagtttaaattactatgcatcatggagtatataagtttatattaatattaataattttattttttttatctaatagtcactaatcattgatataaattttacttcagagaaattcagataataggggagttcaagtagtgaaacgcatttattttagaatataacaagttttattacgtaagagtaaaacaaaatttaaaattgactatccattgatattaaaagaaaattgtactgaaattatatcag

SEQ ID NO: 86452 - DNA, 945 bp, Citrus clementina
  Intron number 1 from transcript clementine0.9_006524m (loc us clementine0.9_006524m.g) derived from phytozome v7.0 (c hr-ID scaffold_2; pos 2616296 to 2617240)
aacttcaatttcaggtatgatcagtaatttctctccttcttctttttttgtttccctttgtttggtagcttattttctgaaattcctttacgttgtgtttaattggtgagttttgtcaattgggtatttatttattttaaataaaacctgggagtttcttgtttgaatttttgtctttgttgttttgtgcgtaatggaagattattcaacaagctgattggttgtggttgatgtatgaattgcgtttttctgctgattttggatctgggtattttcctggaagtttatttttttattttggtttggcgacgattttgtaactttattgtcttcttttgaaggagcattaatgtttttttcggctcaatcttgagttgcagctatttaatttgtttaggtcaaaagcagatcatatttgccttgatatgtgtatctgatgatacggcgaagttttttatttttgattatttggaaatttagttttataattataaaggttagttaccatggaaatgtaaatggataacttattatacttgagtggaattttgcattaactagtcaccatgagctgcgctacaagtctgaacctatcaactgactccttattatctttgcaagaagtagggcttttatttattttttatttttttgtggtacaggtctctaagtgaacatgtgtttttcagttaatattattggctagttggggaattggctgattaattttattggcagatgtaaatcttagtgtgactcaactgtttgtgttgttagttgatatttttgtttactaagatttgcttgttgcctttcgcagcggttgtattcttttgttaatatgtttattggaattgctaatgtccgaggcttaggttgatatgtatgttctttgctttcctttgggcagaaacgcgctgaaccttgatacattctgaagttttg

SEQ ID NO: 86453 - DNA, 964 bp, Citrus clementina
  Intron number 1 from transcript clementine0.9_015821m (loc us clementine0.9_010270m.g) derived from phytozome v7.0 (c hr-ID scaffold_10; pos 765263 to 766226)
ctttgccaattcaggtcagttgtataattaattaatacttcatcatatgatgtagatattaaatttttgaagtgctagctttgaagaatagaatctgcacaacacggcaacaaaataatatcttttaaaattgtgttctgtggactaaatgtgttaagagccgtgacccacaggtgaggaagctgattcttggccgcttttgttaatttaataatacacaattagactggaacatgtgatacaaagtttcaacataataaaacaaaagttcaaattggcagtcataagtaacaaaacatcttttcaagtcaatatatatatatatatatatatatatatatgtgatttttcagcgtagctcgctgtaattgatgtcgatgattaggagctttaaaccagtagaccagcttgttattttgttgaaaagaaaaatcaaggacagagaaattaaacacggcgttaatagatgcttctgtgggacatattgctgagaagcaccctgtcattaattacttcatgaagggctgaaagtcgccacattcttattatttaagaatattttaatatgtccggctatttttaattttgtactgtaataatagttaaatccccagctgacttgctaaggcagatgctttgtccatcattatattttccacttttcactgtatgctctctctattaaatacatcttggctatgcgtgacgaggacatagacgaaggaaaaataaattttattttcatctagttaaagcataaatgctattgggtatgtccattcttaatttgttcagatttttaccaggcaattaattaattaagttgtgctgctttttaatataaatcgatcaaaattttcaagttaaaatgagcatatgtttttaagggtggcgtttatgcttaactctgaacacatgccactttcatgccaaacggttctgcctctttgcaggaattggtaga

SEQ ID NO: 86454 - DNA, 767 bp, Citrus clementina
  Intron number 2 from transcript clementine0.9_031930m (loc us clementine0.9_031930m.g) derived from phytozome v7.0 (c hr-ID scaffold_2; pos 8982674 to 8983440 reverse strand)
ggcagccagtttcaatctctctctccagtcgaacagtaaatatattgttctgctgattattagttactgatttggttttgatcctgtttgattgagtgtaggatgtaattacaactcattgggtgccggttggttgaatttttttccaactgaggggcagtaggttcagttcctctgggggacacctgcttgagatgttatataccagaactttcatgattatttgaggttgtaggatgtagctgtagttcccatttttttattcactgcaacagtgaaaacttctggtttttggaagaaataaaaatacttctgataggattgtatggttttgttcaataaattttgagatgtatgaatgtgcagagtgaagatgttctggtacttctcataaaattctactgctttttgagatgtatgtgcacatcagagttagctatattgttgagacatagcaacttaagtggagttatattgttgagacatagctatttaagttgattacaactttttcatcttattggtgtcatttgattgttcttaaagttaggtgttattgtgtgagatttcgtaaacaataaagtcttaacttgctgggtgaagaaagcttaaatttgtatcagctgcctgtttctatctttgttttctctcttggtccctctttgatgcatgttcatttatattcatcaagagcttagaagattgattctctagccccctcttggaggttgtggcatgacatgatttttttcccttacttctgtagg

SEQ ID NO: 86455 - DNA, 616 bp, Citrus clementina
  Intron number 2 from transcript clementine0.9_010148m (loc us clementine0.9_010148m.g) derived from phytozome v7.0 (c hr-ID scaffold_3; pos 7975259 to 7975874 reverse strand)
ccggagaggttagtgttaatgcttaatacgagttcaacaatttctcctcctgtactttctaacaaatcttaatcttccacgtggtgacggcgtaagaacagtagttagataaacaattttagttccgtgtttttttttttttggactgtttgaccgtctaagccgtgcgatcggatctgattttcatatagaaaatctgaatcgttaattcgctcacgttactctcactgttctctcaaccttggacaaaaataattgaccgtaaaatcaactaatcacgacttgacctccgcagccttcgaaaatatccctaaaacaccctcggtctgtacctattcccactcaattagaattagcgatattgcccgatacgtattttggaaatctagaggttagattcgtaaatttagtagactacaaaagtccaaatgcccgcattttggcggatggtcaccgactccagcaaacaaaattgagaattccattgggatgaaaacgacgtcgtgttcactctcatttttttttttcttttccaaaactctctgtcgcttcatttgagtaaaattgcttaatttgaggtttgcggatgtcttgtatacttgcaggattgaattcg

SEQ ID NO: 86456 - DNA, 524 bp, Citrus clementina
  Intron number 5 from transcript clementine0.9_024595m (loc us clementine0.9_024595m.g) derived from phytozome v7.0 (c hr-ID scaffold_3; pos 4797280 to 4797803 reverse strand)
aggtatatggtatatccattcattttgttgtttatctttgctttggtgggtgctccttttctttttgttcattcaacagaggcttcttttctctgaagcaagtttaagttcatgtactaaaaaatcacccagcaatgaaataattgttctatctagatgatgggttgatacattatctttattttcctgttggaatgtgttccatctgcccaaaaataccttccaatatttgaccaaaatatgaaataaaacatgatgtaattgtctcaagatcagcataaaacacagttaaatgatatctgaataattatgtttgttaatagttctcttagttctcagatctctggaactagtactgttgtttcacagaattttcatgaatttttttggcagggaactgaattcaaatattttggactttcatattcttattgattgctttggttttggtatatttaattaattatgtactgttgcttctgagttcaggtgattgacaaagttcaggaagaaaccaagagtcg

SEQ ID NO: 86457 - DNA, 644 bp, Citrus clementina
  Intron number 2 from transcript clementine0.9_026677m (loc us clementine0.9_026677m.g) derived from phytozome v7.0 (c hr-ID scaffold_3; pos 8350659 to 8351302 reverse strand)
tccacaagaagcactattgttgcagcaggtactttactttgcatgttcttgtcatgctgggatgaggctactcatgtcaaatgtcttttacgagtggatgccgagcttttgcttgatcataaagttgtttaactttcaaaacaaaatttgttcaatgggtgaagggagtccaaagcacttttcttttggctacatagtcataatgttgatttatttatttatttttgaattggtgtgtgtgattaaatatgcaatgggattgaacctttgactctgctaatgttactacttttatgaaacagcgatcagtattgttaaataggccataggcattctgaaattcattggttacttaaatttctcaactattagaatgaggctcaagtttagattctcttatataaataataattgattatttctgaataagaaaatggtggatgtaaaagtttgttagagatttagagtttacttgtgacaaatgttacatgcagtgaacactaatgggtggattcaatgacattggccttggtttccaaccaaaagattggatattcaaatccttgaggttgacctacttttgatattatatctgatatttttttgtaggatctgaagcattcccagttccaaacccagtgcag

SEQ ID NO: 86458 - DNA, 443 bp, Citrus clementina
  Intron number 3 from transcript clementine0.9_019032m (loc us clementine0.9_019032m.g) derived from phytozome v7.0 (c hr-ID scaffold_10; pos 34020 to 34462)
aggtcaactgtatttctttcttttggtgttcattccttctttaatttctatttttttactttttactttttatttgtgttactatgttgatttttgattttccctaagcgaagttttgattctttacttatgtttatcaatatgctctagaatttgtgtgaggttatctggtttgtgattgtgctttgtggttatgatttgtggagtttttagaataatattaatacaatttacaaaattaaactactttgatctccaagtgcaatatatatatatatatttgctgctctgctgctgccactggaatatttattgttttctcatcatgagtaggcttatcttcaccaatttttcccagactatcccttctgttgtgcatcagaagttttgactgaagcgaaagcctatataatgttttcatcttttctcttgttgatagggag

SEQ ID NO: 86459 - DNA, 535 bp, Citrus clementina; identical to SEQ ID NO: 85304
  Intron number 1 from transcript clementine0.9_006978m (loc us clementine0.9_006966m.g) derived from phytozome v7.0 (c hr-ID scaffold_7; pos 2324044 to 2324578)

SEQ ID NO: 86460 - DNA, 941 bp, Citrus clementina
  Intron number 1 from transcript clementine0.9_032613m (loc us clementine0.9_032613m.g) derived from phytozome v7.0 (c hr-ID scaffold_14; pos 367058 to 367998)
ctgtgagagcacttttaggtatggctttctttttttttccgaaaatgttatatatgtgtgtgtgtgtgtacacatagataggaggtttccaatccaggaccctaaattggagtaacaatgagggagagtggtatgtcctcccttccaccagtctttttaatttggtgataaagatataagggagaataacattttcatatctcctaagacttatttttactactcttgagtttctggtaaattttgaatatccttttaatctttttttgttaaaatagtaataaatattcaaataaaaatataagattttaacgaataaattttttttttgattttttttctttttaaaggtacaagggtggatgaagtttaaatttttttttatcccaaacctaaattcaaactcgaatgacccagttaaataaaattatttgaaaaactctctatcaaaaaccactcgatcgagcttaaggtattttcattgataaattaattatttaattaatgcctctacaaattaaagctagttaattaatttattaaaaaaatcacatttacttttgaattttgtttttttgtttgattaatcatttttaaaataaagatgaaatgagttatttaaatttatttatggaccgaaacggtaaaattaaattttaagaggcactgcaaatgcaataataggtcgggcgtcaacctcgaatgcagccttgaggaagtttggacttcggaagaagggaaaaaaaagtaataattaaaaaatgtgtcccgctgagggaccacgtcgaaaatatttagctagatctattttatgctttttcttaaagaaaatatttatgttttaattactcttaaaatagggtgaaaattatccttcaaactttgtgtcacatttaaattactgtcatgcaggcccaaaaaacgtggtggtttgtggagta

SEQ ID NO: 86461 - DNA, 718 bp, Citrus clementina
  Intron number 1 from transcript clementine0.9_026856m (loc us clementine0.9_026856m.g) derived from phytozome v7.0 (c hr-ID scaffold_3; pos 5090806 to 5091523)
ccttgcccttttcaagactcttcaggtatttttaaaaaattattattattttggttttgtcaattttgtgttagggttttgtgattaaatcttatatttttggaattcatattatgcttctttttcattcactaatttatggcaaaatttggcgagaatagttagaatctcaatgttgcagtatgtgaatgattatatgagggttctatttaaattaaattttactttagaagtgacttagagaaaccgatttcttttatgatctgaagaattgcttttgattgcccgaattggagctcttgccaagttcccgtgctcattttatggaaccagtgcttctcatataatctttgagaacaaatgatggtatgactttcatttgtgtagctgaaacgaatggtaggcttctgttgtttcgtggaattagacgtgttctgttgcttatttattaccattggagagtatgattaatcagtcagtgtacgaacttaccagaaaacatgaagccagactaataactaatcttacacgagcaactccttgtttcggatatgagttatctctattggtttgctttgtatttaggatgatagaagaacaacagctttttgtctctgatctgttaacctatgattctttttttggggggaggggtggtggaaaggttttaacctacagtgctggatgttctttatgttacaggcagctggagacagag

SEQ ID NO: 86462 - DNA, 498 bp, Citrus clementina; identical to SEQ ID NO: 80232
  Intron number 1 from transcript clementine0.9_001341m (loc us clementine0.9_001341m.g) derived from phytozome v7.0 (c hr-ID scaffold_4; pos 7399732 to 7400229)

SEQ ID NO: 86463 - DNA, 509 bp, Citrus clementina
  Intron number 1 from transcript clementine0.9_032172m (loc us clementine0.9_032172m.g) derived from phytozome v7.0 (c hr-ID scaffold_3; pos 4996526 to 4997034)
gctcaagtgcttcaggaccctctggtgccactaatagcaatggctctagctcgcaacagcagcagcctcctaagaagaaaagaaaccttcctggaactccaggcaaattcaaccactcatctatatatatatagccaatctttattaattatacatctttcattcaccgcatgctacatatagttaagttttcgtgaacaaagcaattgaagttctttgaattccgatctttttttgaaaataattgcagctgattcatcatggtgttatgagaagttcaattattgctatgcaatgagattgtgcaattattgcgtagggtactgtttgcttgattgcactttttgtatctctttttggtttcaactgttttgagctgtcatggggtcatgaatctttcttaacatggaattctactattaaatccctccctttgactaattacatgtactaatctttgctaattaactaattgatgattattcgatttatgtataatttagatccga

SEQ ID NO: 86464 - DNA, 708 bp, Citrus clementina
  Intron number 1 from transcript clementine0.9_005965m (loc us clementine0.9_005965m.g) derived from phytozome v7.0 (c hr-ID scaffold_3; pos 2101648 to 2102355)
tgttagactatttctctcactctctgcgactgcaggtattttgtttatttttcatttccatgaaagcgacgttgttcttgttgatcagctttccaagttcttgaaatgaaatttttcctcttccgtattctttttaagaaatcagctttctgtttgttgtaaatttgtaataaacagtcatttgttgtatgcaccgagtatatttattcgctgttattttattatatgatctttgctgaaagttttttacaattcgagtgtaatctccaagctctggagttcagtttgatttcgagctttcagcggccttttttttttttttttaaattttccagcaactgcgtccatttttaattgttcaaattcaattacctttcataagaataattttcgtacaaagttaaagagagttgacagagttgactatagctcaataaatactaaaacttcaaagcttcatttcctcttcgtcgtcggttttgaaaacaatcggctatgcgattgactcttggctcggtgaggctttttattttttttccccttttttcctctcaaaatttcaacctcatccatccatttatagcaaatttggcaatcaatctctttttcagcacgaggagcttatatatatgtatatatatatatatatatatttttaaaatatgtaattaatctctctgattggtattttgtttgctgcagctgaaa

SEQ ID NO: 86465 - DNA, 695 bp, Citrus clementina
  Intron number 2 from transcript clementine0.9_007558m (loc us clementine0.9_004441m.g) derived from phytozome v7.0 (c hr-ID scaffold_7; pos 1222606 to 1223300)
caggtacgctactattaagagacgggtacccatttgtatttgctgaaattctgtttggttagaaggaaaattgaatgattcagagtggctggaaattcgaggaatttacctacctaagtgagtcaaatggctggactaatatcactgtggttaattttgtatacactgtaagagaaaattgaagtgtcagttgatagtttcatctattatagaacaaatttgataagttcgatggttgaatcgtgaaaaaatcaactcttcttgagagtcttatactcttattattgatttcttttggccataagttacaaattttattcccaagtagtggaaaactcaaagagatcatcgtctccgggttcatttggcttggctacttcaagtagactggagtaagtttgggattaatacacagatgctatgagataatcattaactgtcaagtacaaatgtgccggtctgggtggtaatcactagattccaagcaaaaatgagtgcttatcaaacacttaagttgaatcacaacaatccaaaaaatacctgtaaatggattaatttatctagtgtagtatcttctattcacatttaaataacaaacataactttaatgtttcatagaattcattgtttctagtatcatgtaaactaactttatgacagtgattggtgttacagggtagtgaagagaggccagg

SEQ ID NO: 86466 - DNA, 609 bp, Citrus clementina
  Intron number 1 from transcript clementine0.9_031302m (loc us clementine0.9_031302m.g) derived from phytozome v7.0 (c hr-ID scaffold_7; pos 4261670 to 4262278 reverse strand)
atcaaaaccggcttctgtgtgagaaccctcctttctgcttcttctcttacaactgtttgttgaaaaaagaaaaaattccttttattttcagattcccctgttatttattagtgttttattcccctggttcttcaacttggttattccactaaaatggtttgcattgtccatacattggtgagttgtgtttggtttgtatgtcgcattataattagttgaattgttactagtgtattgtttatgagcttcaggtctaagtgaaagttgttgctcagtttgaatattaaaatgttaatctagttgaatttttgccgctgtacaactttgtaaaataaggatcatttaggcattgggaaatgttaagatggacacagaggaagttaaattggaactgctatttcccacaaatgcaacattgcacttgtcattggattgaaaaatggtggatgaggtatccgttggagaaatttcagctccacgaccgtggttattgtcatgaaatgcttgtcctggtcatatttttgttcctcatgttatttagatcatgtcttatttgaaggttcttatttgattttcatttgtctcattgatgctcttgttgtcctgcag

SEQ ID NO: 86467 - DNA, 1040 bp, Citrus clementina
  Intron number 1 from transcript clementine0.9_008259m (loc us clementine0.9_008259m.g) derived from phytozome v7.0 (c hr-ID scaffold_3; pos 7657537 to 7658576)
gtgacgatttggttatcgttagtcagaaggggcaggtatacttcggtttagtattatgtttatgtaaaagctttgttcttttttgttgtagaatgaagagagaagttaatgattatgatagaattttaatttagtgacatgggtattgtcttacaaatatgttatgccttgttgattttgttcttttgatgtttcttcgatgattttgtttgtcccacatgaagatcattggtttttgagtgattggaattctgaaaatggggtgtattggttgatggttatgtttagacactaaataggcttctggcttttgaaattttgtcgctaggaagtatgttatggcttgggagtttttgttgctctttgaggttttgaaggcagctgggtgattctttgctgtttctagaggttaattctattgatggggttttgtgagaatggttatcttggatatgtttatctgattgtggtcttttgtgaagtagacatgatatgaaattggagcaatgaggttaaattaaagtgaatctcatcctccttgatctgctgaccataccactttatccatatgaaaggatggtgaatctgtatatcaattgatctgctgagcgcttctagctccaatttgcaggaacttgcagattgcacattaattttatgtgggtgcatccatatgattggcttaatttcatctggttattagtggtggtgccacacgtcactggattgggttttctgctgcaagaacactctatgcatggttcagcagcatgtgctagtttggattgcaaactgaaagtgtgattgttcactcttttagttatctggatagaaagtaggcttttcgttcactcctgtaattatctggatgattgcttttttttttttttttttttataattattatttttacttttaaccacaacctccaaaaagaaaaggtagaaaaagaagtcacttatggaaaatgctatttgtattgattcttagtacattcagacactaatgttggttctttgtttattgttgttgcaggttgc

SEQ ID NO: 86468 - DNA, 477 bp, Citrus clementina
  Intron number 1 from transcript clementine0.9_004326m (loc us clementine0.9_004326m.g) derived from phytozome v7.0 (c hr-ID scaffold_7; pos 6499409 to 6499885 reverse strand)
acagcaaacccttttctgattctccttcatacaaggtaaggctctctcctttttcctcaattctttccaaagatcctgcaagtattttgccttttgtatttttttaactgtttaagatgttcactccgttttgattttggatacaactattgagcaaattttaagaaaggagcccttttcttaaggggttgccaaaagtttcatccctgcttctcaaaagtacccccatttgaatttcctttttggagcactttgagtttgtgcattctgttgttcttttctttttattgtttaatgacccttgtggtgtaaccattgatatgattaccttaaggatgattacttggttgttctggtttactagcaatgaatgatgccatctgtttagatgtgaaggaaagagttgcactatcatggattttttctttatgttgtaattcaggtagaagctttgccccaggggtccagaacattgcc

SEQ ID NO: 86469 - DNA, 344 bp, Citrus clementina; identical to SEQ ID NO: 79646
  Intron number 1 from transcript clementine0.9_013216m (loc us clementine0.9_013216m.g) derived from phytozome v7.0 (c hr-ID scaffold_31; pos 118636 to 118979)

SEQ ID NO: 86470 - DNA, 665 bp, Citrus clementina
  Intron number 2 from transcript clementine0.9_025381m (loc us clementine0.9_024860m.g) derived from phytozome v7.0 (c hr-ID scaffold_4; pos 2722076 to 2722740 reverse strand)
agagcaaaggattggtgagcttgattgaatggaatggcaaaaatgttctgttgttgtttttcagctttctacaatgttaattttcattgaagtattccttctatttgtttgttctgtttttcatttttagtcttcaggatttctgttcatgttggttagtaatcagagatcaaataatgcctgattattttatgtctttaggtactttaaacgtcattattaatagtacgtttggtgaataaagtatgtataaatggacatctgatcaaggaacttgtgaagtagctttgaagcaatcagtttcatgattatacttattactatggcttttgcttcatcattggtgattgaaactcatttcttttgctttagtctactttgaattcagttttattctttagcatgctcttagaacattaaaattttcaatttgttattagtctttaattatagaatacttaaatagaatttgctcaatctcctggggaaagctggttaaattatgtagatcttttcattccccattcaagaatttttgcattttcgctcctatggttatattacagactttgataaatattatgaggaccttaatgaaaatgtgttatatgtgcaaaaatgcaccattagtactggaagaatctgcacgtctaaaggtcttggca

SEQ ID NO: 86471 - DNA, 1053 bp, Citrus clementina
  Intron number 1 from transcript clementine0.9_015541m (loc us clementine0.9_015541m.g) derived from phytozome v7.0 (c hr-ID scaffold_4; pos 6270563 to 6271615 reverse strand)
cgtctctccagacatcaaagctggagatttcaagagtaaatctcttcacagaacactatctttactttctacttcttccattatttacttataaattccaaaatcacttctttttgaaattttgttatctgggtgttgctgattgggttcagattttttttctttttttttcagtttttttcttgttgtatcgattgttgtatgtttctttaaaactgtacatagctcgttagttgttcagattattgaaatttatacgataccgtattctatatgggctaaagatttattggtcattagcattctatgttttcggcaagaatggctgcttcaggctccgcttcaaacttagttatggtaacggaacttagggcttgtttgtgggaaaatatgaatgaaagatgagaagtttgagaggaaagggaattacgaaattgaacttttgatgttgcagcttgagatgaacatttttcctccaatcaactcttacgacactgtcacattggagattgaatggatttgacaaaaattaccttcaaccatgtttatttcattgataatggtatttttggagagagaagtttgtacatggatcattaatttgctcactgaacttacaccagatgttcacgggttagatttttgtggaaaaataaagttgcagaatgtcaatggagaaactttcttataagatatacaaaacaaaactcactttggatgctgtagtttttattttatagctggtatcatatctaatctatattttatcaatttaattattaggagacctccgattcattccataatatatcatcaagtcctttttttgtctgtttatgctctcaagtctcatctgctcccacaaaaaggtctcagactttatcttctgtggaagaagcgttcccagtcttttatgtgctctgagaattgatgcttagtcattggcttgtagtgtattttcatgttaattttctccaattcatgtcaaagtaatctgataaaaaatgattttttgtaggagaactagagagaagacacttaagttgtttccca

SEQ ID NO: 86472 - DNA, 748 bp, Citrus clementina
  Intron number 2 from transcript clementine0.9_025480m (loc us clementine0.9_024860m.g) derived from phytozome v7.0 (c hr-ID scaffold_4; pos 2721993 to 2722740 reverse strand)
agagcaaaggattggtgagcttgattgaatggaatggcaaaaatgttctgttgttgtttttcagctttctacaatgttaattttcattgaagtattccttctatttgtttgttctgtttttcatttttagtcttcaggatttctgttcatgttggttagtaatcagagatcaaataatgcctgattattttatgtctttaggtactttaaacgtcattattaatagtacgtttggtgaataaagtatgtataaatggacatctgatcaaggaacttgtgaagtagctttgaagcaatcagtttcatgattatacttattactatggcttttgcttcatcattggtgattgaaactcatttcttttgctttagtctactttgaattcagttttattctttagcatgctcttagaacattaaaattttcaatttgttattagtctttaattatagaatacttaaatagaatttgctcaatctcctggggaaagctggttaaattatgtagatcttttcattccccattcaagaatttttgcattttcgctcctatggttatattacagactttgataaatattatgaggaccttaatgaaaatgtgttatatgtgcaaaaatgcaccattagtactggaagaatctgcacgtctaaaggtcttggcagttatgttactgcaattttgcaagttgcatgtgactttcttcttcaaacttgtttgcagcaacaggcaccctagcgatagata

SEQ ID NO: 86473 - DNA, 783 bp, Citrus clementina
  Intron number 2 from transcript clementine0.9_014244m (loc us clementine0.9_014244m.g) derived from phytozome v7.0 (c hr-ID scaffold_58; pos 358368 to 359150)
aatcccgtgtaagattttcactatcttacttcatttatagtttggtttgttttcaacttctaatttgcttggattacaaaaatcttttaccatttgctggatttggcatgtattagcactttattatgtgataatatcgatagatttagagtcagttatgtagaggtaagaaatcaatgtaggtgctggattttgagatatctctgcttttgtatatgattttgatgtatttactgatgtttgcttcttctgtgatggttactggcacaaaaagactttgataacgattgtactagaagttaggatttttctaaaaaaattccctctgtcggcaatttgaattttgattctccaaatgttcattctggggtttatcttgcttctttcgctggtcagatgtatgtcttcagtcttcagaatgcctaattaaagactattggaagcttaagaatattttcaaactgctacattggtttccttaacttacctaccaaagtactagaccatttgtatgcatactgcaagcctctgatgaattgatcttctcatccttttgcctgtgatcttaatgtcttaaactcttgtcatttgaaatttcatatcctatgcttaagcgctgctcactttactttgttgcaatgtgcatttcttcgcattgcatatcagaggtttatcctcatttctaggacgattccctcaaatttgtgcctgtaagctcataattttgtttttcttgtaatttgaacagccttctgattataaggagtttgattttgaattctc

SEQ ID NO: 86474 - DNA, 671 bp, Citrus clementina
  Intron number 1 from transcript clementine0.9_020858m (loc us clementine0.9_020858m.g) derived from phytozome v7.0 (c hr-ID scaffold_14; pos 1349076 to 1349746 reverse strand)
cctctcccagcttcagctcttgtgcgtagtacgctcttaattttctctgtttctttttattttcctttttttcaattttatccctatttgctttttcttattgtgatttccagttagtttagtaattgttagcacaagtttttagaggtgatacgaatcgaatccccagtggtgattttaagagaaaacttttagctcttaatggcattaatctgttgagaaagaaagagcggacaagtcgataatataattagaaatgttctaatttagtattctggactttattaagacttttttctacttatttaatgtttttttgcttgagaacatcttggaatttcaattaattttgaacatttatacataagacacactttacatgaagcaaactgaaactaagtttaggtaatagtcgattgaacttattttaaaatcgtttaggataatacaagatgtataactggatattcaacatcaagctcacatcctgacaattaaagtacaactagatgatttttatcaatgtataaattgttacactttatatatagtccttttaaagagcagatattcaaactttatgaagtgtggactcatccttttacagcgttggctgtacaatattatagagacctttagacgaagacaaacaatgactcaccttacagtca

SEQ ID NO: 86475 - DNA, 587 bp, Citrus clementina
  Intron number 4 from transcript clementine0.9_010340m (loc us clementine0.9_010340m.g) derived from phytozome v7.0 (c hr-ID scaffold_2; pos 2932285 to 2932871 reverse strand)
gtacttcaagtttaccataattcacattggaattggtaagccgatttcttttggaacatgccttggtgtttgcatcagatgcattctgtgctatacttgattatggttcttttattggctttcaactgaggtcaagctttaaattacttgaatgatgggaggtaatgatgttcgatagacataaccgaagaaaagtatctgcctccgacttgtggcggaccatattttgattctccttgtgagaaagcatatgtttgctaattccctagaattaggagcttcaacgttatcacgttattgtgtcagagaatgcagtcctctcaagaggctttatcttataggtgtaggtgcttaatcatatctacccagcagaagaagtaatattagtatggtatctttagtatatgataaaccctttaattccttataaacttatataaactcccatgcagcatttctacacatgctacatctgtttcttttacttgtattagcatttaagcattttgggtctcctcaattacatgggttttaatattgaaaattttacagggaatattggcaacgtgccacttgttctgatagca

SEQ ID NO: 86476 - DNA, 787 bp, Citrus clementina
  Intron number 1 from transcript clementine0.9_005776m (loc us clementine0.9_005776m.g) derived from phytozome v7.0 (c hr-ID scaffold_10; pos 4381335 to 4382121 reverse strand)
tgagcagaggtcgctgcgggaggatattgagatcggtgagaacatcttcagttctcagtcatttccatttatcgtaattttaattattagttttgttatttatcttcaccaatcaatattaaaacatttaattctcgcttaatgattagttggcgcacaattttcaatcaagaaaataaaatagaaattttaaaaattttaattattctatttaatgattttagtcactcttagaaatgattaatgaaaaaactgaattcagtttagcctagttgtactattaggcaccttttgatttggtaactatttttttttcttttatttaatttctcgtgcccttgttaactgatcaattttactttcgttttcgttttctttcgttttcccagttaccaaacgcatcattagtgtttgaggcctcaaactcttccttttgttttctttatggttaccttagtttctggagttgaactctagggcttgttgcagatctcaacgttattgtttcacatgatttttccttttatgctctgtttaattgtcagccaaaaactatccgaatgaaagtacttcataaaatttgggatcttggtgctggacaatgtggaattggcatcttatagttactggaaaattcaaaccatttattagtcatcaaatcggttttgaatttgaattttggaaatctttttgttgaattttgtgataatatataagttgcaattcatctgatttgcagtgcttctgggtagatagttgatcataagggttttccaagcgttttgaa

SEQ ID NO: 86477 - DNA, 318 bp, Citrus clementina; identical to SEQ ID NO: 80615
  Intron number 3 from transcript clementine0.9_000150m (loc us clementine0.9_000150m.g) derived from phytozome v7.0 (c hr-ID scaffold_4; pos 4930240 to 4930557 reverse strand)

SEQ ID NO: 86478 - DNA, 444 bp, Citrus clementina; identical to SEQ ID NO: 83666
  Intron number 2 from transcript clementine0.9_000150m (loc us clementine0.9_000150m.g) derived from phytozome v7.0 (c hr-ID scaffold_4; pos 4931229 to 4931672 reverse strand)

SEQ ID NO: 86479 - DNA, 673 bp, Citrus clementina
  Intron number 1 from transcript clementine0.9_035855m (loc us clementine0.9_035855m.g) derived from phytozome v7.0 (c hr-ID scaffold_4; pos 2079621 to 2080293 reverse strand)
tgtcaggaattatcaacattgactaccacgggccagtaacttactcgcgcatcttcggtcgcccttcccttgattatctgcaattttatgtttagtgcaatgcttttgtagcttctattcaccatgaccccaacttatgtgcgcaggtgtttttcatcattggaattttattttccccctgtttatgcacagttcatttttttttttgagttgctatgttaataagccctattaagactccaatctagttactaatctggttcaaaatgatgaaaatttttgaatcattcaattgtgcatacatgttaattgtttgaacagatcgattatttatcgtcatcatcataaataactaacgtcatcatcattattatgatgagggagataggcatgtaaaaataatatatatagattagtatttttacattttttaaaccgatctatggcacattaagttgtatgggtgagtttgtacgtatcactattatagtatcatcattacttttacacttcaaatttacatttcgtcggataaagctacagtagagaagattgatatgagctatgagatattcgtgtttctggtattttacatgctatatttcacgggtaattagactgatagttaatttgctttctatactttcaccaatacttaagccaccgcctagca

SEQ ID NO: 86480 - DNA, 960 bp, Citrus clementina
  Intron number 1 from transcript clementine0.9_024655m (loc us clementine0.9_024643m.g) derived from phytozome v7.0 (c hr-ID scaffold_2; pos 7929748 to 7930707 reverse strand)
cgcgggggcggaagccggcggcacccgtatccagagtaattagctatactactctacttcatgatgtagatttatgggcttgcaatgctggtgtctttatgattttgagttcagccagatctagttcttctatttgcttcggttcagccaaaactgtctgaataaatggattcagctctgaacttatttattgttgagcactaaattaaaatagtccctgacaattaacataatttagtggtcaataaaaaatcagctcaatattgaattgatttgcgaaacaaatgggaaaatatatattatagaatgatagtactttaattagtttaatattttaatgttattgtaatttggataagttcaaatttaagataattcatcttaattgaatggggttaggactaggatttaataagaaataggcttattatcttggtttcatttaaaaatattttagatgattcttatttagggttcatccccatcattaatttgaagttttctgtcttttacttctatcaagttctggtgcattctcgatatatactaaaatgagttatagtattgcttctttgttgcatcaaaaatctatctttgtttgcttaattttgtgaatctaatgatcttcttaatataggattaaaaaagaaaacaaaatgtgtgaatcccatgattacccgcattaaagaaagttgattattcatacaaagattgaatattaatttgtacataccattttgttgattcttggttggaaaggattcttccaatgatgaagactttcgagaattaattctaagccgctggcttgaagatgtaagtccacgaatttaacaaaacattgaatcatctttgtgatgataaatttatcgacttgcagaaacctataaacccagatttatggtttatctagtctatttcgtgttgtattgcttaattagattgatccccgccaccgct

SEQ ID NO: 86481 - DNA, 406 bp, Citrus clementina
  Intron number 1 from transcript clementine0.9_012273m (loc us clementine0.9_012273m.g) derived from phytozome v7.0 (c hr-ID scaffold_2; pos 3642916 to 3643321 reverse strand)
gtcccattccctttttcgctgccggtatcagctcggtaataattagtaattgataaaattgattaagttctctcttgtgctttcaaaatttattcaaaaaaaaaaatggttgcttcgttcatgattatgatcttaaactgtatctgtgttctagttggtccaactgcttccataggaaagtttggattttgattacatgaggattcagcttcatataatttcttcttcagtgctgtggcacttccatttcatgtgactcaaatatttttttcactagtctgttttttcgactattattgggtacttgcttattggtttaagctttttggttggagatgtcggttgacaatctttctctcttgatttttcaggttttacacccgaagaacccttttgcaccgacctt

SEQ ID NO: 86482 - DNA, 406 bp, Citrus clementina
  Intron number 3 from transcript clementine0.9_029992m (loc us clementine0.9_029992m.g) derived from phytozome v7.0 (c hr-ID scaffold_113; pos 313668 to 314073 reverse strand)
ctgtgctgcaggttcttttccctctctcgctctccttctctctatttgagtcaaatgaagataggtgagcaaaaatgttataaatgttcctttgttgcctcataatcttaaccaatggtttccttgctgaagtagcagtattttttaatgaaatggattaagaatgaactcaattcaattctttgctttacttctatgaatagttttggacaatttttatggtgtatttggatggatcatattaagaatgttccttagtcatctcaggcaaactattacctatagtcctgtgtataggaattagaaaaagttttagatgaccttgggtttgttaattcaaagatgcattttatttttctttgtacaaatttgttttgcctctgacgttacaggtaacttggggaat

SEQ ID NO: 86483 - DNA, 896 bp, Citrus clementina
  Intron number 1 from transcript clementine0.9_019184m (loc us clementine0.9_019184m.g) derived from phytozome v7.0 (c hr-ID scaffold_3; pos 5740672 to 5741567)
ttctcgtctcctgcatttcccttcccattgaaaaggcacgtgttttatgtcatttaatttcctttctttttttcccctatcattctgcatatcttgtttaaatttgcacgtgcttgtatctggctatttcagttttttttttcttttccgaaaatgctaaagagacaaagcgctcaacaaatggttcacaaaaataacgaaaaatcggtgccatgtttacaatttaagtgaacgttccgtgcactgtaagcaatttcagggtttcggtattgttgtgatccattttttcatttcaattattacggtagagtatgaatttatacgcttagaataataccacatagcctagggtcttcagagaccgagttgtgcccaaactcccaaactgagcttagataaaaaatctgtatcgactagtgacgagacctatatccatacctaggaaggaagaaatgttgagggcatcacaccactaggctaggcctttagtggctatttaatttgaagttatattctcaaaaacatatgggactctaattttgtcccacattgctaaattatggcttaatttagcaaagccttggcatgtggccttataggcacttgggttcctcctccgcacaagccaaattttagatgagttgtatcagaagaatagacactgcttggagaaggctcttgtggaaggccttcatcaccgagaaggcactacctggtcacgtgtcgggtgcaggatccgtggagagcccaacagatgggcagccgtgcatatcctttctaagggatggctattaagtagattagtcataggttactatcacaatctccttcatctgtgatatttttattaagaaaaaaaattgtttgtttttacagatattgaaggattttttgat

SEQ ID NO: 86484 - DNA, 620 bp, Citrus clementina
  Intron number 1 from transcript clementine0.9_030568m (loc us clementine0.9_030568m.g) derived from phytozome v7.0 (c hr-ID scaffold_4; pos 2404646 to 2405265)
tcacttgtacaaatttaatcctgatacactttcaggttaaaaatacccaccaccccatttctcttttttgtttcttttgtttttttgcaattgccttgctggtatttttctttaaattaagtaatgcacttacgcatattaagttctttctttttcttgagttcatttggttattaattagagtgtaacttcttgagtttcttgaaatggtttagtttcttgagttagaagtgtttcctttgcgttcgttatacatatagtctcataatttgatttgttttcgtactttggtaatgctcttagcgcttttcttgagttcatttgtaattggagtgggcatttcttgagtttcttgaaataaaatggtctgctcttcagtttcttgagttaaaagttacttctttgcgttgttgaatgctgatttaattttctacatatggtctcgtagtttggtgcttgtatgtatccaaaacaaagactataaatatttatgttgatattattccgtattccatataatggaatcaggaagtgtagatcttttttttttttttgggtgattgatacaatgatgattctgtattaataatgcacagaaaagtataagccgtttggtgaga

SEQ ID NO: 86485 - DNA, 1016 bp, Citrus clementina
  Intron number 2 from transcript clementine0.9_012717m (loc us clementine0.9_007193m.g) derived from phytozome v7.0 (c hr-ID scaffold_24; pos 3252075 to 3253090)
gtgctcctctttctgcaagctactataatagtctggtaagccggccatctttgcttgttgtttcttaaaaatatcgctgcttctttaatgatccttttgtcaaatgtgaggaaggtaaaatgaaaatcgattagtcattgctaatgatatgtatttaattctatgtatcaaggaactttgcaggaagttttcactcaagctacttatttctaaaaatgaacctgggctgcctaggatacttatcgtgtccctcttaggaaaaaatttgtcgatacgtcaaaaatctttgaagctcaaaacttgagattcttaagctttgggctttctgaggtttatgtgctgatccgattacgcctaagtttctgagtggtaattttaattgtgcatattttttaataattttaattttgattgtgcatcaagagtggtgttagatattttggaactaaaggtttcttaaatattctagtattagagatgaaatatctgttctccatacaaagtgtaacatgggccctggtttgtcgactattcttaatatatgttggagcttctaaggaataattctatgcttcactagtattcactcgtcagaattgcttctataggcccgaggaaatttgtgccactgaacttccaagtttgtccttgtcccttggggtgatcttctgagtctctttcacactgaaatttttgtttttcaaagtggcgctgtaggtgttgtggcttttatgcatgcatttattattttataattatatttcatcatttgattttagtaatcatacttattagctgaaaattttttttattcacttttttaaggaatggagggaaaaggatgattatttttttgatgcatttattgacctgattgaatgaacttatatttttttggataagagaatgaatgaatttagatagttggatacttccaatgaattcataaaaaatggagttgtgaatcctctattaagatgcaggtttagcacttatttccaatgattgattggtag

SEQ ID NO: 86486 - DNA, 545 bp, Citrus clementina
  Intron number 1 from transcript clementine0.9_023619m (loc us clementine0.9_022242m.g) derived from phytozome v7.0 (c hr-ID scaffold_4; pos 2688268 to 2688812)
tcttcaaccaggtaagcatcagtcttatgttggcaccatttggttggtgggtcctataagcatatctcaaccaataaaagaacaagtctgaggtgattctgttctcatcacaccattatatgatcatatgatcatacagtaacatactaatacttattgtcgtgcatacacaaaatgtatttgtattagagtgatttaataataagatagtctcaagttgacacgcgggatgatctcacctaaaacttttctcaaagaaagttatcgagcggagagtagaaagggtggtgatgaaaccaaagctgtaaacactccactttccttatacaaatcctcttctctttcgagctttgatcttccctaatcccttaacaaaccatacagcacttcacaaacacctaggctaactccttttgtcctttacttgaacggtttccattgccttgagaactaaaataattaattattactcttttgctatctcggtcttaagtgtcgcctctctcttttaactatcttgtttcttgaaacagtgcccgaagaag

SEQ ID NO: 86487 - DNA, 783 bp, Citrus clementina
  Intron number 1 from transcript clementine0.9_025205m (loc us clementine0.9_025205m.g) derived from phytozome v7.0 (c hr-ID scaffold_58; pos 249991 to 250773)
gcagcgtttgggcccaaagcgctaatttccccaaggtctcgtcccttttctctgctttcatggatcgcattgttagttgcgttaatgtggcatgattgatttatcatttacgcatctgattgggaatttatttcattggttttggtgattgatgaaagcaggatcgacgatgatcgcgtccaatgtgattgcaatcctttttttttttaagatcaatttacaagtcaatttccacttggtttgattgcttggttgggatcaattgtggcttcattgtgtgaacagaaaaaaaaaaaaatttaacttatttttgttttacttacatgattctgaagatctgtatgttcgcacatttgcaaaatctgcggaatccctttcaacagttactgataaatgtaaatcatggctgtatttcagttaccatttgatgattgataataccacgaatagggcttaaatttctgtttgaattgtacttcctggaacgtggaactcaaataatatatgttgcccccgagactgtgatttgagttatatatgttttaatggtattattagttctaataatagtgctcaagtgcaacatgttgtaggctactcctttttattcgtctgtattctgtagtttatagtgtggtctgtacgaaatagaaactgcatggtggtatttgatcttctgcatacgtgctggtcttgttgtttttcggctttaaaggatttaagacattttctggttctcttgctgggtgtttccagttcaagcctgaagagattgctggtatt

SEQ ID NO: 86488 - DNA, 509 bp, Citrus clementina; identical to SEQ ID NO: 79071
  Intron number 1 from transcript clementine0.9_011472m (loc us clementine0.9_011472m.g) derived from phytozome v7.0 (c hr-ID scaffold_4; pos 6895176 to 6895684)

SEQ ID NO: 86489 - DNA, 567 bp, Citrus clementina
  Intron number 2 from transcript clementine0.9_015276m (loc us clementine0.9_015276m.g) derived from phytozome v7.0 (c hr-ID scaffold_24; pos 1016869 to 1017435)
ggaccgttaaagcgtgttggatctgtttgtcaacggtataattttgcttcaattttttagcttattatattttttttagttcattcgattgatttagtttttattattacaagctatgatctctattctgttttaatgagatgctgaaaacttttgttacaagtttgaaactgcaatagatttatagaatttctttaaatgattttttttacttattgtttgaaattgtaatcgccaatcaacatttaaaattaaatgattagctatggtcgccattttctctcattagtgtataaaagtttatagaacaacaagctatgatcgcacaattcgaatgattaattattacactaattatgtttgattgtactttattattcatttttattttttattttttttggcttactctgtgtcttgatgatgatgtattcttcttcaaagtacaaaaaggaaaaacaaagggaaaaacagcattgtttataccggcaggaaatgttgttttttcttatatttcttttattgtttgttttcaggtaatttttttgatagtgccgttggctgttg

SEQ ID NO: 86490 - DNA, 781 bp, Citrus clementina
  Intron number 1 from transcript clementine0.9_017052m (loc us clementine0.9_017052m.g) derived from phytozome v7.0 (c hr-ID scaffold_2; pos 1027961 to 1028741 reverse strand)
gaacaaaattacaagggaattagttgttaatgagggaagtgttatagatagattgattaaatctcactgtctcatttgccgagacgcctataattcttaaagaattttttttaatgtgattgccaatagcctttaaattatttgattaaacaatttgtaaatttttgttgcttaaaaaaaaaacttattaatgtgcatttcatatttccagttcatgttagctcatgtatatatagttttttttcctacacacatctcaataagtgcaaaaaaatcaaaattaaattaggtatacggtacatacaaacaatcaattctaaaaggttatatatatatatatatatatataagaaataaatgagaaaaataaatcttaaaaacggagcaaccgcgttgttaattattggaaaagtcaactagagataagaatcaataaattcttttggtggattataattaaatagaaaggacaagagaacgagagagatttaataactaacatgaagtatgaactttttaagcattgcgtaacttatacaaatagtacaaatttccataaataatgatcataaaagttggcagtcgatgcctcagtcatacatggtttcctgtcgatgtcatttggggaataaaccttacaaatatcaattaattagaagttaaattaaattaaggatcccaagaataaccaataatataatcatcaaagattcgatgacgggaaactaagcaaaagtatggtactctttgattaattgatttaatgttttacaagctccat

SEQ ID NO: 86491 - DNA, 317 bp, Citrus clementina; identical to SEQ ID NO: 80833
  Intron number 1 from transcript clementine0.9_005900m (loc us clementine0.9_005900m.g) derived from phytozome v7.0 (c hr-ID scaffold_2; pos 6552749 to 6553065)

SEQ ID NO: 86492 - DNA, 812 bp, Citrus clementina
  Intron number 1 from transcript clementine0.9_005361m (loc us clementine0.9_005361m.g) derived from phytozome v7.0 (c hr-ID scaffold_31; pos 197804 to 198615)
aaccctaaaactctcgcactttccgccgtctcacagtgagttcaacaaaacccttgaagcttttttcatttcattttgtattttgttcaaagttctttcctttttatttgctctgggtttgtttgttgtgttgggaaatgagaaagatgaggttttgggttgaaaatggataatgggtataatgatatgcatgcaagtttgatttttctgctgctttttgtttaatgttttctgtatgctgtgtggggttttgtgctctatttttcttttcagataaataatagtagtttgaatttgtgagtctaatcgtgattgttcattttgcttcaatgactttgtagaattagaggctttcgaattttgaataaagaggagtatttattttaattgaacgttggtgatgtttgctgggatttttttttttaaatttttttcccttctagttggttatttttgttgttattgtgaaaattgataccgtgtttgatcaaatgcaatatacagtttagttgtctttggtttttatattcttgagtatatgtgaaagttgttgaattaaggattgaagttattgatagtttgtgaggctaacttggtgaaaataagattgtgggtgtacaaatgcttttgtatctaaatgaagattcccttatttactttgatttcttttctgtaataccatgggtggaagagaatctcatgtttgcagatttttatattcacaatgaatcttctgctttgtgagtgggtaatcttatcagcatactttggctgagcttactttgtcaatgatggcaggtttaaacgaataa

SEQ ID NO: 86493 - DNA, 748 bp, Citrus clementina
  Intron number 3 from transcript clementine0.9_027718m (loc us clementine0.9_027718m.g) derived from phytozome v7.0 (c hr-ID scaffold_3; pos 711450 to 712197)
cagtatattttatccagccatcaaaagagaagtactttcattttttttctttttttctcctttttttcatgtttttggtcttttcattgttttagtgtcatttccttaattttcttttgggccaatttaagcttcaactaaatcaaaagtctaaaattcttttgtcacaatctttcttgtgcaaaattgctaattttcagccttgatctatggttaattgaagtgactaagaggctcaacagttttatattacatggttatttgtgaaatttggaaatgatttagtttctttaggtacgtggtgtatgtaactttgaagctgcaaactaggaatctgttgaatatattttttggaactaaagagagttcccatgtgtttgtcacatttaccaagatgatttcttttcttgtttagggcagtgttagtggaaagcttatgtcaatctcaaataaataaatatggtttatggctttaggtatcatgtacattggaataatatataaaaccaactggtgtcatgttggtagctgcttcacaaatgtcatttataatggtggaggatatattttcgtcccctgtctatacatttacagtattgtagtttttttttttcctgcaaatctcctattttactagaattcattctccgcaccatcttgccttgcaagctctgtcggatattttttccactccttagaaaacctagaaccattttaaccatatctgttgctagcatgcagtgtggta

SEQ ID NO: 86494 - DNA, 319 bp, Citrus clementina
  Intron number 3 from transcript clementine0.9_020253m (loc us clementine0.9_020253m.g) derived from phytozome v7.0 (c hr-ID scaffold_3; pos 202293 to 202611)
tacggcaatcattacagaaaaagtatcatctcaaggtgcttttttttatttttcatgttcgctgatacttcgggttcaatcattaaataagaataatttcatgtagaaactggagtcggtgcattatttgaaaatagctacgtttttctgctgtgaaattcagtattgtactttatgtctttgtactggtaaattgaagattgtcgctctaggtggggggagtaaatcaaaatttacctttatttgcctcatctatatatccatgtcttctctgttgtttgctgactcactactgcgttacttcttcgcagaacgcacc

SEQ ID NO: 86495 - DNA, 885 bp, Citrus clementina
  Intron number 1 from transcript clementine0.9_027127m (loc us clementine0.9_027127m.g) derived from phytozome v7.0 (c hr-ID scaffold_2; pos 2232047 to 2232931)
aaagcctaccaaagccgcaaagctcgccatttcaggtcagtccattcttgtcaaaaacctagcaagaaaattctgtttgttgtcatggaagcaaaattttgaattaacattaaccgagaagctaattaataagctgctgtagcgataaggactgtaagaaaaatatgcatgcaatactgacggatgtggaacatatattgtgattgtgagagtgaaatttccgttttttcaacgttcaacaacctatggttggataaacattgaccgaatagttatcattctatgttgtcataatcaggataaaaacgtgaccctatcttgagactaattgaacattgatcacgaaattaattattagggctagctagctgcttacttagagtcaccatcttcgccgtgaagtttgatcaaattaatgatctccaacttcacttcaggatttcgaatctcaattttccgttctctttcacttagaaagagctgtttggaattacgtgtgctgtctgtgtacatgtaaaaataaagtacaacaagtcttctgacaaatatacgtactctctgtttaattgattttcccaaagcagaaacccatttagcatttctctattaacatacgatatttatcaagtaaaatactcaattgggaaacaaaacaaaaaaaagcaacttcgcaccaacccaagattcttcctcctgttgctgatcgatgattacttcttgttgttttcttatttttcgagttaattttctattaagcactactttttatatcatacttctttgctttgttctaattacattcatttgaatttatcacctaagctgaagtcgcaaaagaacattgtatttttaattattattattattaactttgtttttcaggac

SEQ ID NO: 86496 - DNA, 1011 bp, Citrus clementina
  Intron number 1 from transcript clementine0.9_024075m (loc us clementine0.9_024075m.g) derived from phytozome v7.0 (c hr-ID scaffold_3; pos 7948921 to 7949931)
tgttgtctacgctgctcaatccaatttcttgaaaggttaacttcactcattttcttaactttgttttttaaataattttgtgcttttttttttgtctttttatttctttttcttgaattgggtatggataaattttggaatttaatgtaatgatagcaatttgaactgatgcatgttagtttgtcatatggttatggttctttgttagtttatgatatgtgattgcttcatacatatggtgaaaccaggaaactgaggctttgggacttctgatgaaaacttgattatttttaggaagacttaatatattgagagaatttgctgcctgtaagtagcaaacaattaagaattgaagtctttgattgtagaccataatgcaatgtgactcctctccattgatgattctaattaaagagtactttgaatcatctttttattcttcagctgcttaacctgttcggtggttaattagttgtatgaatttaagtgagactagccaagtttgtcaattttgttttcaagctgtttttgaagatatttctggataatgtggagttcgagatgatgtggacgtctctgttttgttttgtacgagtttagtgaagttcatattaagaagattaggttctccaattcatgaacttttaccagccaatattcattttttgcaacctgccaacagctcatctccttgaattgttttagggtagactgtagggcaagatctaattgtcaaattatttaaatcctcggtgatcatattctgagagtaaacttgtgctgtatttttctcgtagtcattaaatgatgagatacttttgtttcttctagaaagttgtgacctcatatttaattcctggttggtcccttttatacaagtgcacaggctctggtcctgctaatttaagtaaacaacagagtacatgtgaatttctttgctcatattctctgctaactctcattaagaattctgttaaatagctgttcaaaccgtctggaaggttgcgaagg

SEQ ID NO: 86497 - DNA, 487 bp, Citrus clementina
  Intron number 1 from transcript clementine0.9_017134m (loc us clementine0.9_017134m.g) derived from phytozome v7.0 (c hr-ID scaffold_3; pos 5172013 to 5172499)
gcttcaacttgtacgggattcttgtgaaactttgagtaagttttagttgttcttgccattttcttcagattttgttaaggactagttagatttctttccttgtatggtttatccgtttttagtttctttttttttttaatttatttttaataaggtctctcctttggaaataatttataaggtctcttaaataggcagttaatttggatatttttgaaaactgaagtttccctctttctcttattgaaatgaaaattactatattaaccccttacttgttctgtcttgcttgcccttcactgccctctaaaatgataacttggtagttttcgccaattcagatggtaatatatggtgttttttgttactcctggttttgtttccatttctagatagttttgaattattaattaggccgagtaaagaatctttgagtgtatgtttgattttgtgattgtgaagaaggtgagcggagtaaagagagaag

SEQ ID NO: 86498 - DNA, 410 bp, Citrus clementina; identical to SEQ ID NO: 83773
  Intron number 2 from transcript clementine0.9_028286m (loc us clementine0.9_028286m.g) derived from phytozome v7.0 (c hr-ID scaffold_3; pos 291387 to 291796)

SEQ ID NO: 86499 - DNA, 639 bp, Citrus clementina
  Intron number 1 from transcript clementine0.9_033790m (loc us clementine0.9_033790m.g) derived from phytozome v7.0 (c hr-ID scaffold_3; pos 6835459 to 6836097)
gtatgtataattccatcacgattgaaaagtagctgctttaattacaatcatatgattgtttcgggagataagaacttgaaaaattttaattgaagatgctgttaatgtgacaatttattagctcgagaaacgggaaaatatagcgtataggagaataatttgcaggataatacaatggcccatgatgacttttgacattttggtgctcataaccttaactcagcagacacattaattaacttttttggagaaaataaggatatatttagatggtatcattgatgatcttgatagtttggcagacaatatgatatgtttaattcaagcactagtttgacgggtgggcattgttagttctttggaacaatattgcatatgcggtatttggttttgttaaatgttaattacgagctcagcatgaatgtcttcagttgtccacaatgcttgacctagttatcgataaatcagcaggtgggaactaatgcattcgattatttatttcctgttatcacaattttttctttttttctttttttatgtttttgcatgttagtcgaatcatttgagttctttttttttattctgtaaattgcaatggctgcaggaaattcaagagaatattgttgctggtacgcacgt

SEQ ID NO: 86500 - DNA, 739 bp, Citrus clementina
  Intron number 2 from transcript clementine0.9_033790m (loc us clementine0.9_033790m.g) derived from phytozome v7.0 (c hr-ID scaffold_3; pos 6836187 to 6836925)
ggaatgtaaatacaaatcatctgatgccaaactacagtcctcctaaaccaatgggatctcaaattatttaattttttattttttatttatgtctaagtttaattgtctttcattccgatgtttttgttttatgttatcttgttgttacacgatgtgaatggcttgagaattaagataatcgaactcttaaggtgttgggaataggatccaactcgagtcgtgaggaacctgaaacatgttgaagatccattaatgtgcacagaaactattgagactcgcttctacaactgattgatgttcctgagttctgctctacttgggtgatatcttattcttcttttagtactcttggctagttagagctggagtattgttgcttgagtacagtcccaggattttttatattgaagaccaatcgaataaaatataactatagggtaaagcaaagactagtaggctataataggattgaagatattgtttcttgagaccttgtttaccttcgttatgccttcacttttaacaactttggttttctttcctttctgggtaccatttttatggtttgaatgaatctttggatagtctctataatgtttctttggtatacttcctacttgaggcatcacgccgttatttcaaagtcctttttgggcagtgatatgaaatctgattagttgttttcccatatcaatttcgaccaggttgttgcaaatttatcaaaaatatacccaaagga

SEQ ID NO: 86501 - DNA, 662 bp, Citrus clementina
  Intron number 1 from transcript clementine0.9_002966m (loc us clementine0.9_002966m.g) derived from phytozome v7.0 (c hr-ID scaffold_31; pos 1780191 to 1780852)
caacttagctgagcattacgcacattgtgctaaaggtacattttttttttctggctctttgaaaaattctttgcttcacgactctagcttttgttggggttagcttggtagttgttgaaagtttgaacttggttagctttgcttgctctttcaagtaatgcaagaaaatgcattcttttgtagtatatgtttcttgatggctttgaaagttaaagctagcacatttttactgaacttgggtaacttcccgttttgtctttaacatatactctttgtgattttttcatttttatttttatattagatctgttggtacaaatctgtggggtgtttacgttgtttggctactaaatgttatgatgtaattggaaaaattataaatcttggagtctacattacatgggttagatatgctgctcagctgagcttgattaaaaaaaaaaaaaaagaaggaatattgggttcagttgagtttaatttgtaatgatatattcatgtgtggccgtatatatttaggaagtcgaatttgacactcaaactctcattttctttcatctatatcagttttgatttgcacctaaatggcaggtatgagttgtagttaattgtagctcttgtttttcttgttctgattttgcaggttcttggtgctttctgctcaa

SEQ ID NO: 86502 - DNA, 565 bp, Citrus clementina; identical to SEQ ID NO: 81901
  Intron number 2 from transcript clementine0.9_010288m (loc us clementine0.9_010288m.g) derived from phytozome v7.0 (c hr-ID scaffold_3; pos 4869030 to 4869594 reverse strand)

SEQ ID NO: 86503 - DNA, 270 bp, Citrus clementina
  Intron number 1 from transcript clementine0.9_002810m (loc us clementine0.9_002810m.g) derived from phytozome v7.0 (c hr-ID scaffold_3; pos 7165775 to 7166044 reverse strand)
tcgagtgaaagagaagagaaactgaagaaaatgttaattgacggttctgaactgattattagctaaacttccatatcagtcaaaacattgatgttgctaggttaactcatagtttgatgaattctgtgaattttatttataggagcatttacccctgttatatttggacatgtatcatcttctatatgagcatttaggattttgttgcttcatgcttgtctgtgatctccctagtttttctcattttcttttcctatttgttttttgtag

SEQ ID NO: 86504 - DNA, 876 bp, Citrus clementina
  Intron number 1 from transcript clementine0.9_017727m (loc us clementine0.9_015129m.g) derived from phytozome v7.0 (c hr-ID scaffold_3; pos 5102218 to 5103093 reverse strand)
taaaagcatactctctgttgctgctttctcctcaggtcagatcttttctctctttacagtttccatcacttcgtgagtaacgtataattagtaatcacaagtaactagttctagtaatcgacattttaatctcaaatctttttagtttctgtgcattgatgtacgaaatatccgaaagagggaattttcatatgctaggtgaatacccctttgggaaactgataggcttatgtatctgtagcttgctatttgcttagatatgtataatggagcccaattgaactttatgtaatttgcttagatgggttgggatttcttttactctctcataagctaattaactcttagccgcttctttccttgatggttgattgttaaaactttgagactcgtgaagattacataattgtggtttattaattttagatataaaataatccttggttgagtctgcttgtaatatcattgtgttttcaaggttaaattctataagattgtgttgtaatttgtttatagcttgtgaaattgattctgacttgtgttatatctggaattaattcttgtgtctgaaggtttgtaattggacatgctttaaataatggtcttcatctctgtgtactgaatgaaactcatcattttgtctcattatgttagcgtataaaagaaaattaatcagtgtggccactgcaaatatggtatttcacatttcatttttgatggatatataaaatctgttccaaactacctgcattttttaccatttgaatttgatgtcgcacttcttttagtaagcatgatatggcttagtgtgttgtaaattatttttggagaatgatgttctctgtaagattgtctaccttgatcttagggactcaa

SEQ ID NO: 86505 - DNA, 577 bp, Citrus clementina; identical to SEQ ID NO: 79940
  Intron number 2 from transcript clementine0.9_000153m (loc us clementine0.9_000153m.g) derived from phytozome v7.0 (c hr-ID scaffold_31; pos 95364 to 95940)

SEQ ID NO: 86506 - DNA, 291 bp, Citrus clementina
  Intron number 1 from transcript clementine0.9_025632m (loc us clementine0.9_025454m.g) derived from phytozome v7.0 (c hr-ID scaffold_2; pos 7289822 to 7290112 reverse strand)
tttcctctcgcttcttcgcttcgactcttcacaaggtcttcctctcttcgaatcgatttctcttttttaatttatctttattttgctcttgtttgatttcattgaataacttgtaatctgtttgtgttatcgattagattgatattttagggtttatgtaatgattaagatagttcattgactcttcttaatttatgattttctccgcttagttttaagttctaagttctaagttttgactgctgattgtaaagcaattttagctaattttgtttgatgagttcaggagga

SEQ ID NO: 86507 - DNA, 940 bp, Citrus clementina; identical to SEQ ID NO: 85972
  Intron number 1 from transcript clementine0.9_017007m (loc us clementine0.9_014272m.g) derived from phytozome v7.0 (c hr-ID scaffold_4; pos 6386599 to 6387538 reverse strand)

SEQ ID NO: 86508 - DNA, 953 bp, Citrus clementina
  Intron number 1 from transcript clementine0.9_020500m (loc us clementine0.9_020509m.g) derived from phytozome v7.0 (c hr-ID scaffold_3; pos 1115088 to 1116040)
ttctcttcttttggaccttttgatctgtactttaggtatgtaaaatcgatttttgtttatgtttatgtttatgtgaaagcttactgcaataagctgctttttgtttgattattgagttatgggttttgatttttatttgggaatcatgattaattaatgtgattttagatattgggttttagattttgtgattttattcatttgttgatgaattattcgctcatcttgttttactccgttgggttgcttggaaatttattgtggttagcagttgaactgagggttgagataaaaaaagtcttggaaggaagattgttttttttttctttttctcttgctctctgtttgtttacggcccaccattttttttttttttcatttagtttctgagtttttcttggagaaatacagtatcataatctgccggtttagaagagattatctgacgcagaagctattctgggatgtttatgtactttgctgtagattgtctcatgcagttatagggcggctagcggttcatggtgatgattcttggatagaaatttgaagttgtaacaagatttagtgctgcaacttttggttaatcatacttcctaaagttatcttgacatgtattcttgttaatgagctgttcaaattctttttgccaattgtaattgtgtaatttttatcctctaattgaatggtctccaccttatagttttctaattcgttgagaatggacggatctttcaaatggcactttcccttggacaatggataatatgctttttatagttaagctcttgcttgacttgatttaacttctgttggttttgattgacatattttgcttctgttttatatttgtgatgtggtattttgaacattgtatgcctgatgttattttgttaatctgagttatacatgaatcataacgaaccgcaaataccttgattacaggataaaaa

SEQ ID NO: 86509 - DNA, 849 bp, Citrus clementina; identical to SEQ ID NO: 86010
  Intron number 3 from transcript clementine0.9_025978m (loc us clementine0.9_025994m.g) derived from phytozome v7.0 (c hr-ID scaffold_2; pos 448067 to 448915)

SEQ ID NO: 86510 - DNA, 688 bp, Citrus clementina
  Intron number 1 from transcript clementine0.9_029901m (loc us clementine0.9_029901m.g) derived from phytozome v7.0 (c hr-ID scaffold_2; pos 1922495 to 1923182 reverse strand)
cctttatttgtaaggttactctttcactcaatcttctttacttgggttgaacttattttgcatatgcgtttcatttaagcgtagttttcagcttcaactttaagccttgcttgcaatgcagttttatttggctttcactttacccagaaaatagaaattttgagaatcataaaacttttatggttcagtttgtttccttaaccaaatgtgacgagtttcagcagacaagctaatgcataatgacctgagaaataaaccgggtcatatcaaagctaatagataatctcaattccacaataaagatgcttattgaaccgaacaaccaaaattttattgttaccagaccttcccaaagaacggaactggaaattggcaaatgagacttcattttggtgctccccacacatacttcaacgctatattaatttgttcatttatgaagcaggcccacttccccaactttttctttccctgtcttccaataagtgaagacagaatagaggttctattattgttcttgcccattaaatatttcttattgtttccatatacatatgtatacatgatgataatgatcatgacgtgctaccattatcggtcaatgttaatttatcacatattcttccaatatgctttctttccacaatataagcatgacccgtatactatctttcaccaaatttgcagc

SEQ ID NO: 86511 - DNA, 561 bp, Citrus clementina
  Intron number 1 from transcript clementine0.9_023674m (loc us clementine0.9_023674m.g) derived from phytozome v7.0 (c hr-ID scaffold_4; pos 6030847 to 6031407 reverse strand)
tactgctatactggggtcgataattctcaaaggtgcgaactttttcacttgacgattattcgttctgtgttcgttttaacccgtttggtctcctagaaaacgcgagaaagtgattgtaaaatttatcaatttttgttttcaatatctaggtttcccctttcgtctaatccaacaaaaagagaaaggaaagaaactcatctttcagtttcttttaaatcattcctgcactgcttgaggtgaaaaagctagggtttttgtttttttcaattgcacataatcatgtttgtttatacgaagaataattacagttatttgaggaaattaaggatctgatgaagatgggtatttttgttttcatttatttttctcatttcagctaaaaagttataaattcaaatagtagactttctgcgggaagaatacgttaatttgggtttatttgattgacaatttatgattgaaggaattagtttttgtctgataaaccaataacattggttttgaaattaagttctaatacaagcagctacgtttgcaggtgattttctcctcacagtcaag

SEQ ID NO: 86512 - DNA, 866 bp, Citrus clementina
  Intron number 3 from transcript clementine0.9_007938m (loc us clementine0.9_007938m.g) derived from phytozome v7.0 (c hr-ID scaffold_7; pos 1302103 to 1302968 reverse strand)
cttgtttgaagaagaaatacctgtttagtgcattggtaaggttcaattcgactatctagtttatattatcaatatagttctaatgtttccggattttttttttccaactagtcgtgcggacatgtaattttcattatttctctcctcaatctgtctatcttgtggtatctcctattgaaacactagtaggggaaacttgaaacaacttaattggaaaacctttgcttgacaacctcaggtacatctcaatgttctggtcctttctttagcaaccattgaagcctcatcatcgactgattttcaactctgttggagactttttttttttttttggtgatgccataaaggttcacttgtcgttttggattcccaaaggttgtagtgatacttcatcagtcatcaccatatttgcatcttgctaaggtatatcatgaaatggttaaaaacactcaacagttgttttattattttgttttatgacaagttgacatcaaaacgtaaatgctacttttcctttcaagcaaaattccaaaaaaccagaagtgtttgatttcttaagttgctttttggacagtaagcaataaaatattaagaacacttaagtgagactgttgatgagcaatcaccaatcaagggatttccagaatgggaaagtttgtttctaggtgataagacaaatatgttgtttgttcagttagctgtgaacagaagagtgtgttgcttaaagcttctagagtctatgaatgattactctaacaaactggggagagaatgtgattgtcttattcttttgatatgcaagcgttgaattgtcttctggtttctaatcagcttggcgcgttcgcagttctcattcgtcaaacaaa

SEQ ID NO: 86513 - DNA, 425 bp, Citrus clementina
  Intron number 1 from transcript clementine0.9_013584m (loc us clementine0.9_013584m.g) derived from phytozome v7.0 (c hr-ID scaffold_7; pos 3440407 to 3440831)
gcctcgagcctttctccactgacgaccccgccactgtatgaaaaaaatctcttgcttttctttcttttcgatgtttgctctctcaccaccgcttttcttaaaatatgcagttaaaacgtcgccgtacttaactgttggattagcatttctgtctgaaaaactatttatttggtctccattcgctgattctttgaaatcattttttttattttgcccgctcgaacacaccatgggattgatatgaattgttatggtctctgtcgtttgatttgcgtttttctgtttctggaattatttggttcattcaatcatgagactgttacttgaggatttgaagtaattggttaatccaaatagaactctaggtttgaagaagcaataacctttaatgcaattctgcttgtttcaggttaccagctgcaagc

SEQ ID NO: 86514 - DNA, 256 bp, Citrus clementina
  Intron number 4 from transcript clementine0.9_004523m (loc us clementine0.9_004523m.g) derived from phytozome v7.0 (c hr-ID scaffold_10; pos 3168971 to 3169226)
tgtgtcacctccgtcttctcttgagcaaaatttgggtatataatgcttgatagataattattgctattgtagaaataagaagattagcatttttttttttttaagaatgattctggtgaaaaagactttgttaaaatgactatctcgggattaagaaacttttttgtggtagtttgattctggtgtccttgatattttcataatactttcttgatattaacaagttccatactaattgtagatcctgaagttgaaa

SEQ ID NO: 86515 - DNA, 792 bp, Citrus clementina
  Intron number 1 from transcript clementine0.9_005973m (loc us clementine0.9_005973m.g) derived from phytozome v7.0 (c hr-ID scaffold_2; pos 6951825 to 6952616 reverse strand)
ggcaaggtaatgactgcttctgcttcgcttgttttgcttttatatgtttcttcatttgtgtatgtaactgaatagattatagtttatagaccaatgcatgctagtagtcatattaattgacatatgatactgtaaaatctaggatacggtcagaatttaacttgttttatgcaactgttgatttgtttatatttctgcatatgagagtaacaaggacagttaagaggaatatgctttaagtgagaggcggctatagtctaaaatttgatggcagtgaagattttgtttgtttggggatttgggaaacatccatgtacgacttcatgaacttttagtgccactatgtacacttttctgatagtaatatatcctcctgttgttttcatattgaacaaattaattagggttaggcggtagtttttaatggtatcaatcattatattggtttctggataagagatgtatttaataattttgttcaactgcatcatttaagtttttaatatgagaaatagtgtaaatttcaccagcctctactaattcagttggttttgaacagtttggaacatttgaatcctttggaacagaaagcataacagcttctgctgtttttagtagttgatctcagccttattgctctaaaattatttttatgattccacttagtaaaggtttttaatgtagttagtctttattcaagttcacttaactagaaaatcatgtccctttttttcttatataatctgtttataaatcatcataatcctattaatagaatcattcttttttagt

SEQ ID NO: 86516 - DNA, 617 bp, Citrus clementina
  Intron number 2 from transcript clementine0.9_014777m (loc us clementine0.9_014777m.g) derived from phytozome v7.0 (c hr-ID scaffold_3; pos 5583028 to 5583644 reverse strand)
gacagtcacgcgtgtcaatcaactcgaggagttgggtatgtgaaggtccaattgttattttggttttgatgggcttaaatgctcgcctgcctgcttgcagattgttagttttttgtttggtttggatgttgacacaaaagatgttctgtagacatatttacaacataattaggcaatatggatgtatttgtatttgtatttccctatgcgtaatgttaatgacttagacttgatgctatgactgaattttgtgaaaggaacatataagtctggttgtatactcgttctttctatttccacctgtgaatactgatttgttgatattgcgtgatcgaattctgataaagttgttggaatagttatccaccttgaaacatttaaaacttataccctgattggcaactgggttgattgttatgttgaaaaatgagctaggggacattagtgcaaatgtctgttgaagttcatattgcaggcgtagtgcagacaacttaggttacatgtggaacatatgttggttgccgatttagtttgttgctgatggcattgttgatgctgcaatatctttcccaaagaataaggttttctcttctttcacctttcagcacacttattgg

SEQ ID NO: 86517 - DNA, 629 bp, Citrus clementina
  Intron number 1 from transcript clementine0.9_032534m (loc us clementine0.9_032534m.g) derived from phytozome v7.0 (c hr-ID scaffold_4; pos 6961807 to 6962435 reverse strand)
tttccgaactgttgcggtggacgagcagcagtgctgtaagggcattttcgtcttttcacatgacactaatgttagaatttgccatccgcaaaatctttgtataattgtgtcatctcattgcccaaatcatcgcagcgaaggaacaaaaagaaaagagaagaagaagaaaggaaaaaaaaaaagaaatcgatctgatggcagctaacaagctcgtagctctctggaaccaccccgctggtcctaaaactagtacgctctcttatttctgttcttgtttgttttcttttttgaactttttccttttgtttatagatggctgcttggtcgtatcaaataaatgaaatttgtgaaaattagttggatttaaaaaaaaaaaaattgtgttctttgatcaatcaatccgaattgagcgacggttgttgaaaattcttaaaagaattgtaaattgacatctgggtgtacgaaattgtatatgatgattagtgtttaatcctgaattagcccctattaattgatggaagtaattgataattaaggaatcgtggagtgaaattgagttgtgtgtttacttattttatttactccttaatttagtatatctcagtagagcttataattttggcagttca

SEQ ID NO: 86518 - DNA, 781 bp, Citrus clementina
  Intron number 1 from transcript clementine0.9_035720m (loc us clementine0.9_035720m.g) derived from phytozome v7.0 (c hr-ID scaffold_7; pos 6463662 to 6464442)
gagttctcaaggtatatatagatacaaaatatacatggtgtgacatccacatcactaactgagggtgcatttggttttgcttttgcttttgaagtggtggcttttcacttttgtttttaactactttgtatatagaagagatcgataattaattagtttaactgtcatattaaatgatcatatataccggtccaagtctaagcaccaaactctttaacagcttaacctcatgtgatatatattaaattacttagtcaattatattaattaattgcatcttcaggtatccaagaagtttgtctacttagctctcggagctggtgttgcatcttttttccgtaagtacattctctctctctctttgtagatagtagaaactcttaatttggtattgaagtgctgtgattattaagctgcatgtgctgtacatatatatatatatatgtcacacatgatagttatagaaataatcagctgtacgtgctgacaaagttaagttgcagccactaaattattaactccagcagcacgacaaaaagctaaaataaacagagccttaattagttctctgctcaacattatgcatgctgaaaccaaaataaatgaatgaatcattaattgcgtacttaatttgctatttggtagaggtggcttgttggatgatcacaggagagagacaggccgcaagaataagaagcttttacctggaaaccatattgagacaagacattgcattctttgacaaggaaattaataccggagaagttgttgggaggatttc

SEQ ID NO: 86519 - DNA, 588 bp, Citrus clementina
  Intron number 3 from transcript clementine0.9_007715m (loc us clementine0.9_007715m.g) derived from phytozome v7.0 (c hr-ID scaffold_4; pos 7153693 to 7154280)
caggtcaggccgctcaagtacctacaagaagagtttgctcctgcttcttactcattttgatgttatcaaaaaaaatttttctctagattagtttgtagtcatttaagtttatgttgaactttactgcattgttgcagttatataaaatttcttttgttaattgtgtcattaaactgctgatagtatgcttcttagtcatgatttctttgtaaatgggctatgcatgatatgccctatgatgacgatctatttcttcttaactttgcttcatcttgtatgatggatttacacagaaggaattctgtaacttgatttgcttttctttggaaatttgtgtgcagatgcatgatctcatgtaccaattatagatgactgtacctagatcttcccattaaacactttaatgtatgcacaatatagcggaatttgaatgggcatttttatatgtacatgagatcatgaattattgccttatatgagagcagtgcaataatactttgattagaggagttcaatctgtagatgacattatcacagaaagcttattatgtttcgatccttcaacaggtaaatcggctgatatccatt

SEQ ID NO: 86520 - DNA, 747 bp, Citrus clementina
  Intron number 1 from transcript clementine0.9_014720m (loc us clementine0.9_014720m.g) derived from phytozome v7.0 (c hr-ID scaffold_2; pos 7738572 to 7739318 reverse strand)
agtttctcgttcgattcccttcatagtactccgtaattttttctctaattttttttttttggaaagattgaatttcgttggatgaatctgtttctatttccatatctcatttgttttgtttaactctaccggcgttgcaatttgttcttgataaacattttatttttatttataacagtcggtgcagaatgctttcaaagtaatggtttttgtgagtgatgctaaagctaaaccttttgttgtggattaattaggcttaacagtgaaatagtgaaacttaaagtttgtgttgattggtttattaaggtccaattttattattattgctgatatatcacatgattaggtgaaggtgttttttttttaccttttttcccccagatccttgtattgcaaactattacgtggtgctttaagtttgtcttggaaagaacgaaaaagattgcagagtgcattgattggtttgctgaatttgaactggttaaaaatgatgcctgtgtgaaaattaaaggagactgtggtttttctatacttgtttataaggtaggtgacaaaatgatcaattagtctcataaatctccctaccatatcggggcatttatttgatgggtttgatttatgaactaactgatttgctattaacttgatttatttcacgaaaagaactaatttgagggtctcttgcttttggtataatgtttaattatggcaggtattggagaccagtgttccaatcaaggagtgaaa

SEQ ID NO: 86521 - DNA, 295 bp, Citrus clementina
  Intron number 1 from transcript clementine0.9_034426m (loc us clementine0.9_034426m.g) derived from phytozome v7.0 (c hr-ID scaffold_4; pos 6190662 to 6190956)
cacaatttgcctttcaaagacagactctcactgaggttaatttaattactccctaatctttatcaatggttagttttgcagttcacattattgttttgggtgtcaaatttgtaaccggaaacatccctaatcttattaaatgcttcccgttggtcatcaaaagagaaaataaataaacctcagacagaaactatatcttcatataaggtgtaacaaaaagttgtgaactcttcattgtaggtgatatttttaacgtaattaatttatgacttataaattttttgatgtgacagat

SEQ ID NO: 86522 - DNA, 986 bp, Citrus clementina
  Intron number 1 from transcript clementine0.9_003506m (loc us clementine0.9_003506m.g) derived from phytozome v7.0 (c hr-ID scaffold_4; pos 3084809 to 3085794)
ttcaagaatctttctggcaaaatttgatttgccaagtgagttgttaaacattacactttaccttttgcttcttctctttatttagtatttgttcattttttgatggctttaacgtgtaaattttcagtcagtctttgtttgcttttattggcttattgggcatgattctcatctgggtatctttctaaatttgctctttctgatgatcatacactttgtgaattgattctaatgaatatcaaaacattgtgaattgtgatctcgatttatggaatcacaatatttatgttactttcccaattggtgtgtgagtgatgagttagtttaagattttatgttgaatgattcatgggaacaaaatgtgaagagaattttcacgtttctgaagtacctgggggaaaacaaagaatgccttaatgttcatataaaacctgtatgttttgacaagcttttcattctgcttcgctgactttctgtcttcctttttgtttttgcatctatgagaaaattttcctttaggaaaataagcaacattgaattgaagcacatagcgatatgaattaagagtttttgtttagttacagttattattttctaggagtttacttctcataatggtttcagcttcgtttgttaaagtgcttctgcggttcatggttgttaatgttagtgcaaaggccaggatgatagatgagtttatttatttattttatttttttttgagttcatgtatgatacctttatttttatacatgatgcaggaacatctcttctagtagtttttttattttttattttattttttagagcatcacaaaatttcaaatgcaaagaccaggatagtcgatgagtttttgattcgtgatacttgttaccatagtctttgtagttgttttgtttctgtctttacaaacaattactgtgattttgtaacatatgttagaagacatttatgctaaaattatatttatacacttcggaacagt

SEQ ID NO: 86523 - DNA, 874 bp, Citrus clementina
  Intron number 1 from transcript clementine0.9_014264m (loc us clementine0.9_014264m.g) derived from phytozome v7.0 (c hr-ID scaffold_7; pos 3644671 to 3645544 reverse strand)
gtgtcctcttcaagtacggtcccaagcctgttcaggtctgtttctttatattttcttttgggatttttttaattgttactattggttcatgaattgcgttcaaaatttaactttgatgagattttaggtgaatgctgcaattgagagtgaaaattttgattcatttgtgtattctttgttttgattcatttgtagatatggacttatggctgtggcaaccttcaatgacttggattttatttttcttctgaaaaaaatcttttgatatttgaaagattaaatttggtgtttatttgttgtattttatctgtcgatattgcgattggatatgaattgttcatttgcgtcatttgcatagatgggctgatttagcaagaatttaaaatttgacattggaattcatgtatgatttgatgaagttgaggtttcagaaatcggatatcttgcttgtatgttcatatgtaataacctcctcattgtttattggatagtgagtgttggagctttggataatttgaaaactgtttttcttcagaataagagttgttcattttggttgcttgtaaggacctactcaatggcttttgaacagtataagaattagatgtagttcttgtggaccaaaactttggtctctcttttgaagggaagggttttatattctactttgttgtagttgtgtgttagcttttactccgtggcatagaaacatgtaattgggctgtgtactgtgtttttttaacttgttttcaatttatgctgtcttgtggtacattcaaatctttgcctttggatttattttttcgaatgatttttactatgctttctttgccttccaggtcgcatttaaaactggtgactatcaacaacaagt

SEQ ID NO: 86524 - DNA, 823 bp, Citrus clementina
  Intron number 2 from transcript clementine0.9_007200m (loc us clementine0.9_007200m.g) derived from phytozome v7.0 (c hr-ID scaffold_7; pos 2004835 to 2005657 reverse strand)
cttgaaaggaagtttgacagaaaagtggcaaagtatgttacgcttctttctgatgacattttgatttgaagttaaagtttgagtgcatatttcagtaatctgagaattgtgatgttactatttatggatatttttcagtctttacactgattgcatttcctacttgcatggttgacatggttagattaccaacacttacttgatttgtataatcacttgctctgggaggacaaggtagtgggagttaacatttttatggtctaggttgttttcaccctgcttatcaattcatgtagagggtaagtatgtctctaacaatcttgaaggaccatgggtgttgaatttattattgatagttatctttgaagttaattccggtatctcttactctttgcatggtggtaaaagattttgatgtaaccattttttttttcttttttttttttgagcgagcacttttaagtgactcctagttattggttttgactttggctggcaacagaagtagtttagaactaaagccatgagtgggaagatggagaaacagtatggtataacactgcaggttaactttctaaccatgaatttttctttgttttctttggtcagcttttatcagtaagtattagaactaaaacagttgtaccgattggataaggagcgagagagctttgatggtatgtttgtcatagtttagttcatattatattttaatgatgtgtgttgagtgcttccattgttttctttcataataatcatatcatggaaccttcttctttaagtaattatagggttactttcctcacagaatcaaggcttttgg

SEQ ID NO: 86525 - DNA, 875 bp, Citrus clementina
  Intron number 1 from transcript clementine0.9_032943m (loc us clementine0.9_032943m.g) derived from phytozome v7.0 (c hr-ID scaffold_14; pos 669459 to 670333)
gacgctctggaaccccaagattgcaatacctacaggtactctttcgttattttacttactcattacattttttttcctttattggatacctcgaattcatctttctttgatttttttatttttttaccttttgtgagatgggtatttaccttatttgctttccttgtctctgtttccgttatgttgtacggacccgttgaggtcaaattcccgaactctaccctactgacgaaggtaatcctgtgcataaaaattttatattccaattatattgtctcgttttaatgtcaaatatttttttttttttctcttggtgggtctattttatttatttacgtttggtatttcctgtatgatgtttttattctctagctgatgcatgctattattgatctcatgttttgtggggtcaaatcaattgaggttgtatcgaatgaaatgatcgaaatatgattgttgctattaacatgaatctagattgctaaaaaatcattattggcaattgtttgatgttaatttttctgaaagttcatcggttcagcttcagctggagatattttgagcttgatgcaagagatgtcgtattttgtggatttcttgtcttttgagtcaaactctgctttcagttattaagccttgatgagaatttgttggataactgtactccgtggatctcattgctccacttgtactgttaagcttgtgaagccatgaaattgatcacttgataatttagcattttggtttgtatatcttcgaataatttgagaagtatcaagtcgaaatacttttgctgctgtaatcattcgactgccacctaatctctccctctttacagagagaaaagagaagattgttgcaaatttggcaaactt

SEQ ID NO: 86526 - DNA, 346 bp, Citrus clementina
  Intron number 1 from transcript clementine0.9_035007m (loc us clementine0.9_035007m.g) derived from phytozome v7.0 (c hr-ID scaffold_7; pos 6103116 to 6103461)
tcatcaactattccaagcttcgcatttgggaggtacaaatatgcaaacattttttaaatgttggtttattatcaccattgttagatagttctatgacattagggcaatgatatctatacattttaaagtgcgaatttggaactagatatccattatctagctttaaatttgcgcccgttgcacgcagatgcctgcattagataaaagctcatttccaaaaaattctaagtcttcatactcatcatgattatttttgatattttcttctttaatgttacacatgcatgcatgttgataattaaaattttgactatatatttgtttctgtgtacgtagtttgtggagt

SEQ ID NO: 86527 - DNA, 506 bp, Citrus clementina
  Intron number 1 from transcript clementine0.9_023225m (loc us clementine0.9_023219m.g) derived from phytozome v7.0 (c hr-ID scaffold_3; pos 3660017 to 3660522)
aagtcgttttactctctagttggtctcgcttaatcgtacggtctctagatcctgatctctccattttcttatttgattgatatctctagtctttcttgatctctatgtctgatctggccttgttattcttcgatctgcatgttaattgcgagccgttgctcgaattggaaacatttttgtctgtgatctcctcatttctcatcttatacaactttgaattatcgaaattacgtattgatgattaagatttaggtgtgttttatgtctttattgtatgatctaacgtaattgaggtttatttcgttcttaaattatttctaaatgatatttggttattttttcaattagatctaataattgcatttttgttaaccgaatcttgtggtgttatgtagatatggttggggctttcttttgtttgttagattttaatgctattgtaatgttggagatgtgtgaacatgtcatctgatctctgcattggttggtgcttgcagttgtgaaaa

SEQ ID NO: 86528 - DNA, 507 bp, Citrus clementina
  Intron number 1 from transcript clementine0.9_016728m (loc us clementine0.9_016728m.g) derived from phytozome v7.0 (c hr-ID scaffold_2; pos 461603 to 462109)
tcgccagcagcgcttttgccgcttgctttgccgaggtttgttgtgatctcagattcttttgatgtttttgtaatatatcgcataaatgggtcaaaaatgttgtggggtaccttttatttgcttgcaaattcttttcatttgatcgaatggttatcattatattttgggctaattttggattttgatttaatttatgggtttcttgatatttgaattctgtattaacgcatcaaagataagattttgaatgtgatgaatgattttttgtagcccgaaatttttagagattaaacaagtttgacatgttgtgtaagattatatattgtatagagctgggagaagatgctatgctggttgattaactatgctatgtgtcatattccctagctaaattgtcatttcaattgtttgtattttgagcatataggctttgaagtacttatacataccaatttacttggttatgatgtagatttgtactattcctttggacactgctaaagttag

SEQ ID NO: 86529 - DNA, 830 bp, Citrus clementina
  Intron number 1 from transcript clementine0.9_034194m (loc us clementine0.9_034194m.g) derived from phytozome v7.0 (c hr-ID scaffold_2; pos 4422259 to 4423088)
tgtcaccttctctctcttctcgcctcttcgctcaggttcgcttcagttcccttttccgctgtttaattattcatcgtctcttttaatttacgatgtcgttttctgcttttgcctttttgttatttttacatgacgcttatggctttgatctattgcaagctatttgttgctgaaataatatttgttgtcgtacagtaaaaaataatttgaacatacctaattgcgttaatgaagtaaaaatatactttttctttttgaattgatgaactttatacacgtgcctattggcttgtttatgtattgtttggttggtgagaaaatgtttatagaaaaactagggtttaaagatcattgaaaataattagtcaaattttgccgcatttgttgttattgccttatctgtctgataacacacttgatgtttgatagcacctagtttatgaagctttattttgattttttttattagtaacatgccaagactaggtgttacttttgagtaattttgattctgtgttttatgctttatgttttttgatgttacgttagcatgtacaattatgttttagcagtttgtgtagtgtatattgtaaattttgctgcgaaatatgacttttattaactcatagtttcaattgggtattgtagtgaatagttgcttttaaattctctttaatgtttttgtatgtttggattttgacctcatttgattgcttgctcatgtgcatgtgggtatttggaagtgtcgttttcccttgatgtaatgttcttctagtgttatgttttaatagaatttgttttgcttccatgttcttctatgtgtatgcaga

SEQ ID NO: 86530 - DNA, 653 bp, Citrus clementina
  Intron number 4 from transcript clementine0.9_006193m (loc us clementine0.9_006193m.g) derived from phytozome v7.0 (c hr-ID scaffold_4; pos 4984569 to 4985221 reverse strand)
gaaagtctaggtaactgaatttgatcaactatctttcaatcatatatttgagtttttgttttaattcactatctaataagtcttatattatgtgcttcaactttggcatctgttgcacaatggttgaagttccaccttttggaatctggaactcattggtaggattaattttcattttttgtagttacatagattaataattattttggtatgttttatacaatggaagctaatacttctgttgatttattgaatctttccagtccccatatgttaggttataaagttgatgttcattgtcttgcacaatcttctactttatagcccctattgtgtaatatgtagctgcagaaaaagcgtatcaagcattatactgatatacagtattttaacaatggctgctttgagttatgagatttaggctccagttgggactgctgcgcagaggcagcacgcatcagtcccaaacaaggccttagtttatgatagattatagcactgttttttatgtctgagatccaggggcacaaaattttctcaaacataatcatgcttttaattgcgtattttcctctttatgatgtggcttattgatatatgattgtcattttttgacagaacttcgaaggaagatcaacaattgtcatttcgca

SEQ ID NO: 86531 - DNA, 675 bp, Citrus clementina
  Intron number 2 from transcript clementine0.9_004045m (loc us clementine0.9_004045m.g) derived from phytozome v7.0 (c hr-ID scaffold_2; pos 5195464 to 5196138 reverse strand)
atttgtctgatccatctcacagccccgtttctgaggtgagtttaattttgcatatgtttgagatttttttattttattttttggaatttgtgggggtatgcataatgaaattgaaacttttgttacatgttgattttccttctgtttcaatggcttgtgatgttgtgtttttttttttttttaattattttgcggtaggttcggtcgtgttgaaggtaagaggaacggttttatttttaaattcaggtttgttgtctgattgttgacgttgacatagaggtatttttagcgctttggcatatgatgctggagttatgtcttcgttttgctttaatttttttggatccatatatgttctaatttgtccatattctgttagtaatcaggcgataacggtgatcctttagaacttagaagagtgcaataagtgtcatttaacatgatcacataaatagaaatttgaaatcttgcttcaatttgtcttagttaaatattaaagaattgatccccattggaaatcaatcaaattgttggggataggattgccagggctggtaggtagcattcaaccagatgcagcagaatcatacttctgtttgatatgctttattgtcaattagatgttgatgcagcataacaggtcatttcattattaaatttattgatttccagagg

SEQ ID NO: 86532 - DNA, 419 bp, Citrus clementina; identical to SEQ ID NO: 82306
  Intron number 1 from transcript clementine0.9_009480m (loc us clementine0.9_009480m.g) derived from phytozome v7.0 (c hr-ID scaffold_3; pos 2284673 to 2285091)

SEQ ID NO: 86533 - DNA, 350 bp, Citrus clementina
  Intron number 1 from transcript clementine0.9_028818m (loc us clementine0.9_028818m.g) derived from phytozome v7.0 (c hr-ID scaffold_31; pos 744676 to 745025 reverse strand)
atcaaacgtttgatagtatcaaatcgacgatcgtactatgtttttttaactcaaaattaatttaaattcttagctgtccccagcacttagccagagttttcaaggaactttaattagctgacaatctgtatacgaatcatgaagtaggggtctaacaaattaatttgggttcttcgctcctcttatcttatttttttttaaaattaaactctcagcgttttttctttttctaattagataaaaaaattaatctttcctgatgtatatgtttaattatttatttttgtttttatttatttatttttttgcaagcaggaaaatatagctgccactgacacaattaaagttac

SEQ ID NO: 86534 - DNA, 274 bp, Citrus clementina
  Intron number 1 from transcript clementine0.9_034371m (loc us clementine0.9_034371m.g) derived from phytozome v7.0 (c hr-ID scaffold_3; pos 5784051 to 5784324)
gagaacaagaaaattcaaagcggtgaaggtatcttctctatcaataattatttgtttgaaaactcatcaaaatggttttcattgaattactagtgcatatatatatatatgaatatatacggtttgcttttgttttttaattagatacatagaaatttaatatagctagttttctgtgtaaatgatggcgtttttctataatctgtttaattttcatatacaagagaaatcaatatgctatgggtactactaatctaatgacacgccacagagg

SEQ ID NO: 86535 - DNA, 941 bp, Citrus clementina
  Intron number 1 from transcript clementine0.9_027446m (loc us clementine0.9_027446m.g) derived from phytozome v7.0 (c hr-ID scaffold_2; pos 5541843 to 5542783 reverse strand)
ttgaacaggtaaatttcttggtgatttatttagtctatccatgttaattgtgaataacgtcatcaaagagctcaatgccaatggattctattggcttgaactgacattttctatcgttgctttgactatggtaaatttgctctatgatatttggatttagccactatgccaggatattcttactgttataggaatttttgcaacctgaaacgttaaatttgtaacttatgtttgtaaccttggatgttgcaagttttacgtttcacattgcaaaagtcttatacttatagcgatgcccctgtataaattccaaacgcatcatagtttgcgttcttgccaatatgtgattctatttatttatggagcctattatatcctaataggaaatgttttatgggattgtcaaatgcacgtattcgctaattgttagcccctgacatttatatatgtggacttctattctttatggcaagtgtagcttggggtaattatgtgctctctgcttggtgtaaaaaatagttcatatatttagggtatttcaatcatgcaaagcttgtaattagctcatactgtcagagaagttagtgaaatatgctcgattttctatttatgattattgttttcttttccaaaaactgcagtgttatgtacccttaagtagcaaagtgttgcattttgccctgctgatatagttaaagaaaagtttcggtatgtagtttgcagctagattgttatcagtgttatgtacccttaagtaggaaagtgttgcattttgccctgctgatatagttaaagaaaagtttcggtatgtagtttgcagctagattgttatgtgcttgcactattcactttcttgggaccggatcagcgaccgatcattacgcggcatttctgttttgtgtaatgcttgtcttcttttgccataggctgagaaaatcggt

SEQ ID NO: 86536 - DNA, 991 bp, Citrus clementina
  Intron number 1 from transcript clementine0.9_005739m (loc us clementine0.9_005739m.g) derived from phytozome v7.0 (c hr-ID scaffold_24; pos 729290 to 730280 reverse strand)
agagagagcaggtaaattgctaaacattgtggttgtgcttttgaaattgagtagaaatttagccattatgaacatacatcattttattgttcttgtatttctaatgattatgatccctattgaattatgatggatatggtattgtagaataacccttttaacagattttctgtttgaacaagctaagtttttggctttgtgaaaaaacagtgaaacaaatttgatattcttgttatgtatgcttatgattgttattgtaacagccgctagtttggccttcttttaatatttttttatttttgtggattggactaaatgataacttaagtgaaatccagtggggaattgtactatgaaagtaatgggatgatttgtgatgagtattctatgctttaacttctatctctgggagtgccactggagtaaatgactttaatttctagtggtacagtcacccaacttgctttgatataactttgcttgtatatcaagaaactttttgaaactgaagttattgataaagcttataacagactagcacttccttatggtcatttttgaaaggctcaatgtctctgctgcatgcttagaatttctggccaaatatctacgtctaatattttatggtctttgctgcttgcttagaacttctggcctaacattgacatttgatattttatgggatattatgattagctaatgtaactttatttttttaggccttcaacctctgaattagaatggttgacatagctgtatgcttagctaggatcttcagaatgggtcagatgtttgatgcaatgatcttcaaatagagaaaatggatatggtttttgctatgttgtatgtgccactctacctattgaactgttatgtactgaagtgaggactttcaatgtaatgatattcatattctacacatttcctattttaacctggaagccatttgtctgcaggagatataaagaaaagaaagaagtggtggaacctg

SEQ ID NO: 86537 - DNA, 813 bp, Citrus clementina
  Intron number 2 from transcript clementine0.9_033512m (loc us clementine0.9_033512m.g) derived from phytozome v7.0 (c hr-ID scaffold_58; pos 916127 to 916939 reverse strand)
agcaatctgatttccagacaccaggtatcaataatatatttctaggacatttttttaaacatactttttgatggaaaataatggtttggtatctagactttgaattgaactccaacttttaattcatggttgcatcaattcggtgtatgttgacttggagtactgaacaggagcagcactaacagtctgttgttgcagacttgcagtctgccatagagaacttgtaatgaagatctcaattgtggttgttcacttaggtgtaaaaatgattctcaagagcttcaactgcttgagacttagaagtgatggagatcgttgttcttttgatgtccatttgactttttaggttacttcttagatttgaataaatatccatgggtcggatgagaccagtttagcaaagttatatatggtcgtttcacatctgtatggttaagttatgtttaatttcctgaaaaaatttcaaatttttcaataaggccaagttaatgctgtctttcgaagttaaaataataataattgatccttccagtggaggtgagaaagtataattataatgtttggaaggggtgggaacttagatcctaggaattttatttagtgactaagtgaaaactgggattctgcgtttgaatatgaagtctgagataaacaatggaccttgtctgtctttcttattgtggaattagatcatcaacgtagaaaagtttttatttctgtatcacccaaaaacgaaattccttgaatttcttcaccgaatataaattgtgttaatgtgaactccttttttcctttttaattgataagcttcca

SEQ ID NO: 86538 - DNA, 844 bp, Citrus clementina
  Intron number 1 from transcript clementine0.9_003542m (loc us clementine0.9_003542m.g) derived from phytozome v7.0 (c hr-ID scaffold_24; pos 3204191 to 3205034 reverse strand)
cgtcatttcagtcctcgaagcaacaaatactctctgtgagttatctttctcctatctcttcttttatgggtttgatttagatttattttaatttgtttgcatgcattgtaaatttggggtttcttccttgaaattttgggattttattattgaatttagagtttatttattctgtattagcattttcattgggattttgtaattgattttactcgtgagatcttttttcaggttaattttgtaaagttgtgtaattttgttgcatattgtagtattagtgatggaatcagggtttagtttactcgagattaatggtttaattatttcttgggtttgatgaggaatttatgtgttgaggtattcatcttctgcattgagctttgttcataatttgtcatgtacactttagtgagcttcaagtgtaaaaagattttcagaaaacttgctcttttgctggggttcctttgtaaacttattaagaagtttcttttctatagcattctggttgacagcgatgtttgtttgtcttatttaattttgatatatttatctgagaggttcaatagttctacacttctttttatgttccataagctgagataatcaagccatgatatgatgagtcatttctgaattcttctgtgggtttcttgtatctagataattgctttatgggtgaacaatcaattgttatccccgcactctatagtttgtaatgttgttccttttgggtgctgtgttgtttatgttggtttttttaatgagatttccttcaagtggctgattgcatataacaccatttgatttatcagggtagtgaaagtgagaatattagtgggggaaa

SEQ ID NO: 86539 - DNA, 672 bp, Citrus clementina
  Intron number 1 from transcript clementine0.9_019273m (loc us clementine0.9_019273m.g) derived from phytozome v7.0 (c hr-ID scaffold_24; pos 735329 to 736000 reverse strand)
ctccacccacttcctctgcttcttccactcgtcaggttcattatttttcttttaatatccaccgtccttttttaaatttaatttaattagattagatatttttcgatctatttgtgtctgattatccgatatttcggatcttgttttgttaattaacaaatataaaatttgtgaacacttgaggaaaatgttttctaaaaattaaaacagtgaaaatgtctcgaattgtaaattaaggaagaaatcgtaaacatgttagaagattgttaatgtaaactctatttttgaatttgtaaaataaaaattacaatttggtaaatagtgaatgtaggcaactaaatgataagaaatatagctgaaaaaaacaagataagagccggtattataatttattatccgtattttaatatattatatatcgtttttgttataaaattttgatgaagcgaaaatgtcaaaaaaatgtgacagagtatatcatgtactattcgggatttgtgagtctttgttatattactttgtacggactaatacacatatatgcaatgtgtggtggtctacgagcagaaatattttgaaattttattcgtatttttattgtgagaaacatatgatactagtatccatgtttgatggtagttctgcctctttatattgtttaggcttgctgtt

SEQ ID NO: 86540 - DNA, 428 bp, Citrus clementina
  Intron number 1 from transcript clementine0.9_005373m (loc us clementine0.9_005373m.g) derived from phytozome v7.0 (c hr-ID scaffold_4; pos 1322317 to 1322744)
ccatcagccagtgcgtaccaagtgagacaagaaaacaacataacgcggtttcaactttcaacgttcatgcacactcaaaacacagctgtttttctttcttagtattaatctatgcaagaatctttaaatttctatatttttttgtcatcagaaaacattaaaaaaacaatatatttagatccaacccatatgcaatgcaactgagcagctcattatcttcattgcatcaactactagttttgtttcatttttttatcatacaactcagaacccagttccgtaaatgtcataaaaaaacagttttgttttgttctgttcttcatcttttagaaaaactggaaaacggattgatcctgaagattctgtatcgttgtttatgtactgtctttacaggaatttttttttttgtcgaaatttggaaaggtggt

SEQ ID NO: 86541 - DNA, 632 bp, Citrus clementina
  Intron number 2 from transcript clementine0.9_001450m (loc us clementine0.9_001450m.g) derived from phytozome v7.0 (c hr-ID scaffold_4; pos 6023649 to 6024280)
acgtgctgggttacccaattcaccatcttcttcaggtgggttccgtcagttttcttcaaaaggactactttgtagagtggacatgagggctaaacattattttggtggaattgtggaactttatgtgcaagacatgttatgttgtttgtaccaagaatttattttcagaatgtagggtggccgtggtcttgggaacattcatatcagatcaggtcgggcctgtcactgtgatattttgaatgagtccctatctgatatgccctttttcgcggcatcaaagcttattggagatttcttcgggaatatgtttctatcggttcgtatgtctctggctttatttgttttattcccgcactgacatatttattgatgtgtgacaggtgactatgacgaatgcttctaaaatgcccatcttcattcaatttatcatatcttttccatgccaaaatttttcgttctttttttcggcagccttcattttcctttacgttaatattcttgtgcatctgtttgtttacgttaatatattttttgtttgttgataagtggctatcactggctttgaaggtatttgacatattagtatcttgtgttcaggtcaacagcagcagaatcctctgctattgcttgga

SEQ ID NO: 86542 - DNA, 446 bp, Citrus clementina
  Intron number 2 from transcript clementine0.9_031974m (loc us clementine0.9_031974m.g) derived from phytozome v7.0 (c hr-ID scaffold_10; pos 3384481 to 3384926)
ccgagactttgaaggtaaatcaattaatttttcttgtcccgctgggtgtgtttaagattatattagtttactttcaccattactagttatggcatgtttggtattgaggtgctgtaacttttaaattataactgttgtcgaatatagctattgtggaaagaagttgtaactataaaacaaaagttaattgtatgtaataaatataatttttaaataataattttgataaaattagtaaagatataataatttttttaagtgtaaaatcaaattaacttaacttctaagttacagcaactattgtttatcaaatactttaataccatagttttttaactatagttgttcaatttcaatctcaaatagagttttagttaagtaaaatattagtcaatgcggttaaaagcaatgaaagatttttcttatctctacttcgtttgtagagt

SEQ ID NO: 86543 - DNA, 729 bp, Citrus clementina
  Intron number 4 from transcript clementine0.9_007051m (loc us clementine0.9_007051m.g) derived from phytozome v7.0 (c hr-ID scaffold_7; pos 1210597 to 1211325 reverse strand)
gtcaacttttaaggggaagagttggaagaaaattggtttgtttcttttgtagaaattattctgatatttattgttaattggctgctttatttggtcaggttctattctaaatatgttaggtctcaaatttcattatttcgaacctctagaggccatgtctcaccttagaagaaattatattgaaagggataaagtataaaaagaacctttcttttggtagaacaaaaaagaaaaatcaaaatagatcgagattaagaaaaaatttcttttgggtttaacaagatagaagacaataggacctcaatcttttgatgctctttcatctctcgaaaattagagggggaacccaatgcttgtggtgcatacagatagttgattatacgaactcttcctcttaggtgtattctggagtgtggggggtagatctgtagcatcaaatttactatagttggtgatattctaaaagtgaaactgaagttggatggagattgaaactaccaaataatttaggaagactgatacagataaatagagtaatgatttgctgtttttgtttgaaatatattgatgctgtttacagtgtttaatataagttctaagtctattattttaacaaaaaaaatgagtggatgctcaatttggattttgcatcattgattaaggaaagttgtcttacattgaatacaatgtccatgcagctgagttttttcctgatagatcagaagtgca

SEQ ID NO: 86544 - DNA, 665 bp, Citrus clementina
  Intron number 2 from transcript clementine0.9_028940m (loc us clementine0.9_028940m.g) derived from phytozome v7.0 (c hr-ID scaffold_4; pos 7087214 to 7087878 reverse strand)
ggaattcttttggtactatagctgcactcatacaggtatgcctaataaacttatgttttgtttttgtttttattttttagaagagagaattatttcaagatttggctcccttgttgtggaattcttttggtactattgctgcattattacaggtatgctctttatttgttggtcttctatttttgtgtttcttccctcagccccatcatttgtcataattttatatagctcattcagcaatatactgcttacacaacgaatctctttgtctctttcattactttttccccccttactgaagcttctgcctttctgtataaaagttatggtatgctacatgtttagttagggataatttatgttgttctgatgtcgtaatttgagaaaggattaattataaagcagcaggatgaacggttatgaggaaaatggaaagtggacgattttttaatggaaagccatgcatttgcttattgtctttataatcaacttccggaaaggtcatctgttgttttttgtgctacatctgtctctgtgcaggaatgcagtaataattgagttgtaatgtagtcagttattattttctctgttcgtcatattggattcacatgttttaccaccttttatcaggagatagtatcaatataccctgttctatcaccacc

SEQ ID NO: 86545 - DNA, 776 bp, Citrus clementina
  Intron number 1 from transcript clementine0.9_028940m (loc us clementine0.9_028940m.g) derived from phytozome v7.0 (c hr-ID scaffold_4; pos 7087881 to 7088656 reverse strand)
atttaagagaaaacgctcttcttgaattatcaaaggtaaatttatcttcgcctcttattttacaaaaattaaaccctagagcctcagttttggcttttattattactttcttatttatatacattttcttggctatgaattagaagctagggttttgagatgccaatgcaattttgttataattttgattgatgatttgaacatgtaaatatggctaaggagtatatacatttggttccttttctcatgatcctaagattaagagcagtgaggattatatttggtttcaagggggtctttgtccaacattggtgttttcttggccttcttcaaatcaggatggattccctcttgatttgagctctcagaaaatacatgcatgtgattggtatgtaaaaatcgtgaacataataaaagagtagagaacgtggatagaaatgcacacatgtcaaaaccttcaaaggttagatcaagagggaattccaattctttttctgtcaaatgagtttttttaacgttgttaaccaaagtgaaattgaaacataattcatcttgttcaaattttgcttcaaagaattagatagcctgtggagacaggttttcatttatccaatgactagagttgacgtatttgaatgcatgctgccgatgctcgttctatcatgtggtttatgcagtttaagtgtttgagatttgtgtgctgtatataaactagtgtccacctttggtttcattttttagaacaaggaattatttcaagatttggctcctttcgt

SEQ ID NO: 86546 - DNA, 907 bp, Citrus clementina
  Intron number 1 from transcript clementine0.9_029592m (loc us clementine0.9_029592m.g) derived from phytozome v7.0 (c hr-ID scaffold_14; pos 4150520 to 4151426)
cgcttcctcaccaattgaaaagggtttgccttcaggtaatttctcatgtctgtcaccttctttaataaaacttggagattttttgtaaatgcatgtgcttgttctcattcgtcttttgttaatttgtgtacaaagaaaatcaatcagtggcatagaactgaatttgcttcatatttccataaaagaagtagttctatgataacataaaatataggtataaacttaactgataatcctcaatttaattgcttagaaataaattaaaggaaagagaggggggggggggggggggggggggggccaaattggaatgaaaaatttaaaaataataaaccccacatgaaaactgctgcttctataaactttgctggttggattttctttctttctagtggagagtccaaagggaaaaaaaagtttgaaggacatcacttatatttttatatattctgaaatcttatgacaagacatgacactttcctctattttcctcaaaagacaaaataattttagagttgtggctacaaattagttcaataataaaagatgaactaataaaagatttaggattcgatctctattcttgagggttagaaagaaaatgggttgcgattaagatataataatgacaattataatttaggagtttccctttctattgaagatcattgaacgaaataattttgccttttatcctttgcttgttctcttgatcttaattggccataatgtcaaattcataataatttctagccaacatatataaaatatgttaaagacattatcttttgtctattaatatttattatagttattaagtcaatttagggttctgatatcaaaacctgcccatatagcttgcattacttgaaaactcacacatgctgattatttgggtgatcaagat

SEQ ID NO: 86547 - DNA, 767 bp, Citrus clementina
  Intron number 2 from transcript clementine0.9_002969m (loc us clementine0.9_002969m.g) derived from phytozome v7.0 (c hr-ID scaffold_7; pos 3223256 to 3224022 reverse strand)
gttctttgctttgcttattggcattggtgagcttacagtagtatatacttcttctgctttcattttaatttttttttgtctttttagtttgattacaaggaatgaatttggaaatgctacggttggtgtattgttattatatcaagtgattgtattatgtgtgctaggatttatacgatgaatgaatgattcattgtgtgctgtaaggttttggactgtgcttttaaggagatattcaatgatgtcattgtgattttttatattcatttttgttttagatcaatgaaatctattgattacactgtggaagtattggaccgtagatgtaaattaacgaattaatactggaaattactttggtattgttgcattgttccattgttccgtcattttatttgttttgtatctttgctaaataattgatagtttcagctagattcaggaacaagtttgttgtggatttttatttatatctaaggtaattgtaaatgttggaaaaattagatgaaatgaaatgcaaattgccatcttttagttgtagaaaaattaccttagaagattttagagcgtattttcctggcctttacatgaattcctctaaattaactaactctgatgcatattttatgaactttcaatattagagaagctcatcccgttattctgtttctcaatgttggtttttgattttgtgcttattgttttcggtatatttcttttggttgctttcaggtactgggcttgctgctgttttcattaatatatct

SEQ ID NO: 86548 - DNA, 424 bp, Citrus clementina
  Intron number 1 from transcript clementine0.9_021311m (loc us clementine0.9_021311m.g) derived from phytozome v7.0 (c hr-ID scaffold_41; pos 576195 to 576618 reverse strand)
ggaagaagtaagcaccccttctctctttcctatttcttgtatcctcttcatggatattcaatgaacactaattgacggattccgtatgttatatgtttgttttattaatctgaaatttcttcttattaatacttttgattgattgctatagctataaaccttaaaaaatttatttgcattttttagattggtttttttgctttttcgtatttaattctgggatatcatgactagaggcaggtgttggttcttaaataaaactcatttgggtatcaatatccgtatgtcatgttattgttgcgtatcaaaacggggatttaggttgttttttgagttttatgggagattcactagtttcaatgtttaaaggggattttttgttattacaggacctgctaggtgttatcgccagataaaaaataag

SEQ ID NO: 86549 - DNA, 983 bp, Citrus clementina
  Intron number 1 from transcript clementine0.9_025683m (loc us clementine0.9_025683m.g) derived from phytozome v7.0 (c hr-ID scaffold_10; pos 3539265 to 3540247 reverse strand)
attctcacgcattagcaacaagatcaaggcagtaggtacgtacgtgctttgctttctttgcctttcctttctccctattagtattaacagtcaaatcagttattttaattctgctttaattttaaactaaaaatttgtacatcccaatctgacggtgacggtggtgacggtggtggttgtcatgtggcaaaattgacattagtggtaacactgcacaatttccgatcacatcagattttagcagcagctggaagttttagacctagtgattttcgcttaagcacagtcctctaggaaccaccacccactgatccataagattaaaatcaattccggaacaattccgtcgatcttctaattccctcacagctttttacacttcaaaattacgtgtgtgactctgtgtacgggtatatattataaccagaatccgacctcggcataagcgaagcaaaaggctcttctcgttgattgcatggcggcagacaggcgcaaaacacacgtttcttccatttcacgttaacgtatccactatgtaccaccgttgcgtttgtttgttttgtgcacttgcatgcctctttgctaccttgtagtctaacttgtttccgtttcctatgcctaatgggaccatatacatgtataaaagctttgaatcttcgagattttcgtttcaaatatcgatacaatcaatcaacacatggtctgactcgagagttgatgcagttttttggtactactacaagattaattagctgttgatcgcatagttatgcttataatattagctaccaatagggaggatgtttttgtaaccaattaatatatttgacttggaggcaaatatataagggtcctaaaatccgcattttgtcttgtgcttgtgtttgatctctatatagctagtccaaaaagctgctttgtgttctttcatttatttctctcttctctgctgccttattctagcaacaaacatatcctagatc

SEQ ID NO: 86550 - DNA, 604 bp, Citrus clementina
  Intron number 1 from transcript clementine0.9_006735m (loc us clementine0.9_006733m.g) derived from phytozome v7.0 (c hr-ID scaffold_4; pos 3984457 to 3985060)
tacctttctctttcccttcaacaattcagctccaggtaagccttctgatctcactctgatcatcagagaagtattccttatcactgacagtcatctggttgtctttgtttttctgcttttctgttgttttcgttgatgttatgataggattctggagaaatttgtgttctcttttttattagatcttttgatgataagtcaaagttgctgtttttagtttcgtttcaattcaatattaactcatgtctctcccttcagttctgtttgtatgcttgtacaagacttgtttaaattctgaactctcaagtatgtggcggttacttttttcttttcttttcggtttgttgacttttatggtttcttagtgatgattagatcttaaatgatgtggtatgagctctaaattatgggtttagagttgagggttttaatggatttgatgaaacttttatgagttatacaagtttgaattttgacttcagatggtgaattggatttgcattgtttttgtttatggataagttaacaagggtaaatgaggaaagtgagtaacattggtgattgatgggcacttgtagaatttcgtgattgaggggtggagaga

SEQ ID NO: 86551 - DNA, 516 bp, Citrus clementina
  Intron number 2 from transcript clementine0.9_032819m (loc us clementine0.9_032819m.g) derived from phytozome v7.0 (c hr-ID scaffold_3; pos 3007799 to 3008314)
cataaaatgtacgtatttctttattattattattttttttttaaatgcgtacaaaattttgttttgactatcatgatcttgatcatgttgtagttgacttcaagtgaggcatcaaatgaatactgtgttgaggcgagtggtatgcatgaagatattagtttgttgtgtgattaataaaatgccctgattcactgaattaatgattaatgcgtctaattacatgtcattaaggtagcccttgcccttgccattatcttttgaagatagaattatcatgacagtggcaacaattacgtaaactattattagaaaaataaagttcctacatttttccttgggtaattaatttgatatttacgcgactggaacatttttctttaacattgttggggcggctgatcgctattgggccgatatttttatacaattatgttttgttttatcacacttgctttttaattttaaaacgataacttctaatttgtggtgggtattgcatatgtttttggcgacagc

SEQ ID NO: 86552 - DNA, 868 bp, Citrus clementina; identical to SEQ ID NO: 86188
  Intron number 1 from transcript clementine0.9_014272m (loc us clementine0.9_014272m.g) derived from phytozome v7.0 (c hr-ID scaffold_4; pos 6386599 to 6387466 reverse strand)

SEQ ID NO: 86553 - DNA, 935 bp, Citrus clementina
  Intron number 1 from transcript clementine0.9_017663m (loc us clementine0.9_017663m.g) derived from phytozome v7.0 (c hr-ID scaffold_4; pos 2800647 to 2801581)
acgaaaatcgcgatccggctatcttttttttgcaggtaattaatgagaataatatacatatgctgattagtaaaagtttcatgataattgattgttcttatgcaacttcatcacttcttgttgcactcttattgatattctttttctttttttctttattcttgcaagagatatacactaggattttaattaattgcttcaagtttctgcgtaattaagcttaagctttttggtgatataagaaacataaagaagtggaaacttttctaaagatgataccactttcctagttttggtctctgtattggccacatctcatatccatttatggtgtggagacagtgttaggtataacaacaaatctaaagcttccaagagcaatttttggaaacaatttcatttggtttccaccttgtttcttcaatcactgagacaaaattaaatttaaccactacaacttgaaaccaactttaatttattccatgtgggttacttgtcttactcctaaacgtggcctgcattcggttccccaattagggaaccgtaaagtttttttcttgaaaaaattattacacaccatgtaaattactgcttattagtgtgattgaacttgaagaataatcaatagtcttttatgtcttctattgcattcaattttcagatcttttatatcttttattgcattcaattctcagcatatatagttgaagatacatgactcaaattgatcaattgatcaggtcttttggtcaactacaccctgtcttctctatgtgccttcattcagaataaatcttaccaaccccatttacgaaagcaaattaaaagagatcatattagttaattttcttcttttttttgagtttttgctaatatatacatatgtatgtgctgagatataatggatcaattccgtcattcattttatgtcaggc

SEQ ID NO: 86554 - DNA, 845 bp, Citrus clementina
  Intron number 1 from transcript clementine0.9_005220m (loc us clementine0.9_005220m.g) derived from phytozome v7.0 (c hr-ID scaffold_3; pos 1533475 to 1534319)
ttcttgccggaatttcggttcttttgtcggttcaggtattagcttctctacatttacatcaaaattccacttttacaattttttttttgttttcactgtattttttttcaattaatttcctttatctacattcttttcttctgtcgataaattctatgcatgctcagatttcgaattttccaatggattcgcttgctctttctgggagctgaatcttattttactttttcatgtttgttttacatatgtgcataatatggctatcagttgactgggggctctctctttcttttcagttatttctttatttaattaattgactggattaatagtttaataatattgcaactggacttcttttctttcctaatcttcatttacatgctttcggatttcaggttacctggtttggatttttctttttttcccttttaatttttactaaactgggactgacttaacgcaacgtgtgctctttttattcttttattattagctgctttggaaattccgcctggtcggtgtaggtccattactttgtttttgtaacgtgtccaatttcaatatgtagacttcttgagatgtggcaccacaactttcaataaaaaaattgctcctttacctttagggataaattaatttagaaagcataagttatctttcaattaactgaatcttgctttttgtttttaatttttttttccattatattgtttcatagtctgactcatatataaaaaggcaaattcactatgggctggcaactaaacagtttttgcaactccatttggtggtttttggttgaacatctttaagtaaattcctgatattttcaggcaaattat

SEQ ID NO: 86555 - DNA, 554 bp, Citrus clementina
  Intron number 1 from transcript clementine0.9_001034m (loc us clementine0.9_001034m.g) derived from phytozome v7.0 (c hr-ID scaffold_3; pos 5014916 to 5015469 reverse strand)
gactcactggagccaatcctctggcgcaggaggtgcgttttcgaaaattaattcaatttactttatgaagaagagaaaacattaatcctgtagttaatactcgctaactttttttttcttggtttttttttgtttgaattattgaactgatacttttgttttaggagttttagttctttgaatgcttccttattatggctcactggattcaacttatgttattaggcaaatatcatgctaatgctactgagcatagcagacactagaatttaaagaatttgcacacaatcacacaagacttcccaggggaattgacaaaacctaaaataaggccttttttttccttgggcaaagtaacctattatttgagtttaacatttaacttagtactgtatattactagttaaatcttatgcaataacactagtagggggctttcaattaatatattttactgcctttctttgaataaaaagtatttatcatgttaactaatttgtattttcttggcacatgcaggcagctggtgccctatcaataaaaattggtgagtt

SEQ ID NO: 86556 - DNA, 586 bp, Citrus clementina
  Intron number 1 from transcript clementine0.9_027018m (loc us clementine0.9_027018m.g) derived from phytozome v7.0 (c hr-ID scaffold_2; pos 426042 to 426627 reverse strand)
gaaattatcatcttctgggttaagttttgttactggtgagcatcttcctatgatcttaatcttgtcgtttgattttgttttcaagtcgtaatttcatgtcggttcaattcttattcatattgcttgtgcagcagattaaagctttacattcaagattctttagtattgcaaccacacccactgacctacttgttgattgcttgcaaattgatgcctgaatccatacgctcattatttactgttttgtgaatctttttagggtcaatttggctttaaatctcacagaccatatcagttcatggtccatttagtttgatagcctcagtaggacatatatgttgctttttgattatcttatgtttttgggaaacgagtagaatttgaaatttttttccccttttttcacaactctttgacgaacttgccatatgtaccgaattcagaagtttgttcttaatgaaacttggagttttgaaaatgttctaatgtcatgcgggcctgacctggcctgaccctcttgtgtgttggattttaagctaacgtgtctatccaaaactgagatatcagcttcttttcatgcagaaga

SEQ ID NO: 86557 - DNA, 600 bp, Citrus clementina
  Intron number 1 from transcript clementine0.9_023813m (loc us clementine0.9_023813m.g) derived from phytozome v7.0 (c hr-ID scaffold_3; pos 6183499 to 6184098)
cgatatcggcaacccaaagaaaaaacttgctcaaggttctttcttttagaatccgtctaatcattctttgagtgaactcgttagtctgtttgtacatattttatctgttcgtgcctgtagtttcatgttttgtgctttgaacctaaatatgaagttcgccttgagagctaaatttaatagcttaatagcctaatagctgcatcggtgaatgaattttgttagaacttgacaaagtgtagttgttttattcttccaattactacctaccttttattgttttatgatggcccttctagaaataagttgttggttctattgcataaaaaaagtttaatttatttagagaatcattgtgaattgaaaacacatgttgatgagtaccaaaaccctagcctttttttaacttttttgacgttggatgaagaatgtgcctggaatcggtcggtggaactgtagaaatgcgcaactgttgctatatttgcctgctaatttttacaaaacattctttttcgcaagcatttccatctttcttatgttgtatgtatttcttgctgcatgcatacagttagctctggagggaaaaagagtggtgctatcgat

SEQ ID NO: 86558 - DNA, 785 bp, Citrus clementina
  Intron number 1 from transcript clementine0.9_014051m (loc us clementine0.9_014051m.g) derived from phytozome v7.0 (c hr-ID scaffold_2; pos 6067032 to 6067816 reverse strand)
tcttgcttcaagggcaaatacgccggtaattttactgctgttttttttgaaaaaaaaaaatcaaaacgtcgtcgattcttatttagatctatcatcactcgctgtttctttagtcggatctcgtttacttcgttatgatctatgctgtttttgaccgtgctgtttgttaaatctagaacaagtggaccatttgtagcctgtttcctttaggtctaattattttttccgactcgattgttgattattttgaatttaattctagatctattaattattattttagcgtaactgtttctgctcagtgtatggtattttccacgtgtggatgcaatataatctggacggttcatactgagatctgcttttgtattcttttaattcctgcatgattgatttgatgaagttagttttaatctctgtttaggtttatttatgaaaccagttttgttccgatgcagcaagataatctttcctcagtaacttcttacctctttctttggtgcttgtatgtagatatcagtctgcgttgttgtgtgcttcgttgtgactcggatcctgagttttcttttatatgttaaaaaatgagttttagctttttagtctttaaatcgaatgatttaagtataacagaattttaagttctttagatattagtcatatcgttatgaagaatgcctaatgattttaggtggagtagcttaacattcttgagttacttatggagttacttatatgtgactttctggagttacttatgctttagattttttttcgacattctgcag

SEQ ID NO: 86559 - DNA, 650 bp, Citrus clementina
  Intron number 1 from transcript clementine0.9_005720m (loc us clementine0.9_005720m.g) derived from phytozome v7.0 (c hr-ID scaffold_3; pos 3167219 to 3167868 reverse strand)
agtagaaagggatttggtgagctccgaagttaacggtaaactgtagctagcgttttgaattttatccgtaggttgaagagtaaaaaattctattgaatttatgaattgcattattttgatactaaatttgagatttttatgtacagcattctctgtgttttggattattttgggatcattgggtggtatggttgtcaaattggggggaaatgcatatttcaatgctttactccctattttgttttaggcactgactgtctttccgctgccatatttgctgaggtggctgtttctgctctcgttttaaccgttagaaatttgcttatgcatgcgaattttttacttcaccgagatgtttgaggttatatgccttacaatcttgaaagtttgaggttgttgattacagttgttagatgatgtagtttaatttacagaaattgaaatttgagggagttgagattaaaaattcctctggtagtcatatattaggacctcaaattttagaaattgttatataattcttattgattttgatggctgaaatccgtcctcttttcagggacctttcttctggcggcaaagctttaaattcacgatttgtacatttttccacgactggattatagacttcacaatccttttccttctca

SEQ ID NO: 86560 - DNA, 597 bp, Citrus clementina
  Intron number 1 from transcript clementine0.9_014721m (loc us clementine0.9_014721m.g) derived from phytozome v7.0 (c hr-ID scaffold_7; pos 4046575 to 4047171 reverse strand)
tcaagaccgttgttgaagtcaaagccctcgaaaaggtatcattttgattcaatttctctgttttatgcttgaattttcatctgggttagccttgaattgttgttaatgaagaaattttcatttgggttgtgtggattgtgttcgtaatatgatgattttctatcaattgcttttgctgtactgtggactgctaaattgaatagttatattcgttggcattactgtacattcattgttttagagaatttaattataaaaaaaaaaagaaagaaaagaaaagagagagacagagaaatcaaatacttgaaatggatgattacgaatgcgaccactgtgttttgcttgcttggtgaatgcatgatttcagtttgtggaagtgtgaagtctgctttctgcagtagccatgttaccctaaagaagaaagcaaatgctacaatcttgtggagcagagactgacacagtcacttagcttacatgttaattcatacatagacatattcttaaaggagtccataagtgatattggaccggatttctcttttggccagttatttctatggatgttgatacctttctttcgtgtatttactgcaggca

SEQ ID NO: 86561 - DNA, 279 bp, Citrus clementina
  Intron number 2 from transcript clementine0.9_017677m (loc us clementine0.9_017677m.g) derived from phytozome v7.0 (c hr-ID scaffold_2; pos 2823809 to 2824087)
ggctttccaaaggtatgcacgctatctcttctttctaatttcgggttcaatatttttttttcctattcatagatgcttactgagcagctaatgttgttcaaaaatggaaattttagtcagttagttttattaatgttcttcaaaaatcgcaacttttgcacttttttctgaatttgggatacaatgattttgagtttggactgactgtctgtctttgtttgtttgattatattttttattccagcaagcaggaagctaaaggtttcccgattcaaggct

SEQ ID NO: 86562 - DNA, 992 bp, Citrus clementina
  Intron number 1 from transcript clementine0.9_028555m (loc us clementine0.9_028555m.g) derived from phytozome v7.0 (c hr-ID scaffold_24; pos 630099 to 631090)
cccagcgtgtgtatcaagtttggaagggacgcaatgtattgattcttaatcctgcacttttctgtttcttgtatgtgctggtttttgatactcttaatggcttcttttgcatttgggctagctcagtttatgctataagctggggggttcttgttagtttattggaaaatcatctgggtttggtttggtttgctgtttgctgctatattttatatagttactagttgttgatttgtttagttattataggaacaagtttcaacgggctctctttgatgtgcttttgatggaattcctttagttattttagaatttgtggggttttgccaacatatataatgaagttggatcatggattcatggttgctaaaatgggatttttggtctcggaattttttagtcaagtgtgagagcttaacaaatttacaacttgattacgcatgtactttgtaaaacatgttttgtgaatgttatgtgctagcttttatgttgttaatgtattaaactttattgttagttttgcaaaattattgtctaatttttgtaaattttggctcagggacacacttatatttcacggctataaataagagaatatagaaaaccaacacgaataaaagtagcatggatgtgcatttggcatccaatcatttcagtggcatttgggtgaagacaagaaaatacacttgcatatagagatgaatttgtgtatgtgtgtgtatattgtgagttctatgtatcatagagctttcagccaacattttttgtaaaatttagatttctaggctttcaattaaattatctgtgtaattttgtatgcattatgctgaagcatagaagacaatttatactgtctgttcatctgtcttatcttgttgctcatcttacatggggtttattttctccccctctattaatctgtcaatatttatctttattgctgccatcctttacttgactaaatatcttctttggcttctatgcagaaattc

SEQ ID NO: 86563 - DNA, 777 bp, Citrus clementina
  Intron number 5 from transcript clementine0.9_024528m (loc us clementine0.9_018097m.g) derived from phytozome v7.0 (c hr-ID scaffold_10; pos 1394330 to 1395106)
gacttagtttcaaaggcttgctacgagaaaatagagtgagcattggtaaatccagttgttaaaggcattcaatcaccctttttataactttctaatataagaaaaaacatatttcatgcccatttttctttgagttgataattgcatctggaacttcaaaattttatttctgttagtagtgtctggttttggtagctctccaaaggaagtaattttctgcttgcatctaggtgggtagaaggtgatgctcttgatttgcctttttctgattgcttctttgatgccattaccatgggatatggactacgaaatgtggtagataaacgtaaagctttagaggagagtttccgagttctaaaaccgggtattgtctagtctccctctgtacgtgaatttaaaaaaaaattatccaattaaaacagatgcatgatcaaaattttacattcttcattggatgttcaggctctagaatttcggtccttgatttcaataaaagcactcaaccatttactaccgcaattcaggtactcaataaaaatgaccactcaataaaaatgaccttgatgacacgtgccctttaaaatgttgattttcactctctttctgatttgagatggaaatttatggtctatcgtttacacttattattgaatgttgttattctaataatttcttttgatctttatggtggttggatatggtgctcttgtagttatatatcagatgcaaacatttcaagttatttgtttattcttttttcattttccccctcaagga

SEQ ID NO: 86564 - DNA, 960 bp, Citrus clementina
  Intron number 1 from transcript clementine0.9_000196m (loc us clementine0.9_000196m.g) derived from phytozome v7.0 (c hr-ID scaffold_3; pos 5036093 to 5037052 reverse strand)
caagcatcgaccctgatatcgctctctcttatattgtaagatatttctctttttttttattatttcagatattgtccgttgctattttgctcatgaatttttggtttagaaagtgttaattgtttttgggttgactttgttgtggtgcatattcagatccaagtctttatttcaattctttgcaattttaattttagtgactggtacaattgaatgatattgtagtgtttttgaatgtgtttaatttcctaaattaagagaacaaagtttgaggttaggaggtattgtgtttaatttcatttttgctgttgttggctatgggagtataagcattgctttcagattttagtttggtaggtaatgtgtagggtggaacattttttagtcagcagattagggaagcttgaaactgttttttaggaatgttaaattaatgcaaaattttgcatgatacgtgatagtaatgaatgatgcagttgcgcttgtaaatccaataaatgaatgatagggttgagcttgtaaagccattagtcgtggttctaggattaagcttttgtggggagtgtcttaatgactttagagttcctatccatcaattgcaaattgcgttgtgggaactgtgctgtctcatgtaattagtgcaacttgaagtttgcttattcaattttttttagtgtaataatagtaactttttgaatttaaaatcggagagttgtgagttgtgaatacttgttcccgatcatgacgctgtactgcttcatgggaacaacagtggctataattacggttttgtaacttaaatgcatctgaaagtcttatatttcgttgttctctaatttactgattttcatttttccctctactagtctaccatcactttatgtctctctaactatgttctgcacttttcgtttatcacgtataactgttaaatattcttaaagggcgagaaacttcaac

SEQ ID NO: 86565 - DNA, 355 bp, Citrus clementina
  Intron number 1 from transcript clementine0.9_006494m (loc us clementine0.9_006494m.g) derived from phytozome v7.0 (c hr-ID scaffold_2; pos 789090 to 789444)
tcgtcgagtgccgggttcgccattacaagttcaatgtaagtgcattgttcattcatttcatatacgtatacttatggatacacatataaatacattcgcatgtatatatgtatgtattattcttaattctaatgatagaaaatgtattattccatttctagtaaaataaataatcaataatagtcatgtacaagtgattgagccaatctttatggatataagtttcataatttggtctcatcaacttgacttaaaaatggaagctttgcatcatataaaagacaattcaaaatttattaattttaacagttgttattttttatttgctgtggggggattatcttcacaggtggtg

SEQ ID NO: 86566 - DNA, 389 bp, Citrus clementina; identical to SEQ ID NO: 80970
  Intron number 1 from transcript clementine0.9_022906m (loc us clementine0.9_019241m.g) derived from phytozome v7.0 (c hr-ID scaffold_4; pos 971510 to 971898)

SEQ ID NO: 86567 - DNA, 334 bp, Citrus clementina; identical to SEQ ID NO: 83123
  Intron number 1 from transcript clementine0.9_021295m (loc us clementine0.9_021295m.g) derived from phytozome v7.0 (c hr-ID scaffold_2; pos 7742659 to 7742992 reverse strand)

SEQ ID NO: 86568 - DNA, 937 bp, Citrus clementina
  Intron number 1 from transcript clementine0.9_001922m (loc us clementine0.9_001922m.g) derived from phytozome v7.0 (c hr-ID scaffold_31; pos 1607501 to 1608437 reverse strand)
cctgctggagcttgttagcgctgagcttgatcctagtaaggaatttaaattatataaatcagatcattactgttttcttttctggtaaattttgaattattttcctcttaactatcttcaaattactcttttttttaaaaaaaaaaaccttaatttatctctatttttattcaaaacataaaggaaaaataagaatggatggattaatttctttttgtcttcttaaaaaaaaagagataaattgagatttttaaaactaaagagtgtgatttgaaaatatttaattcaaaatggggtaatctaaaatcaatactatcttttattgttacacaaaaatttttcaattgttagtagtttttattgcccttaacctcttgctccaacaagtgaggacaaaccaactcaaagagaccaaaccaactattattttcataaaataaagaggaaaaagcgatcaagaacctcaggatttgtagaaatatacacatagaccactttagttttaaaaatattacagacatgttttttggtcacaatacttatttttggataattactctctttgactatggttttatttaatcttaaaataattttcaaaaaaggagtctatatgacttcttgactaagactggttcagatagaagactgacaatttcagctaaggaagagaagatcaattacgtggtgcttcatcggctagcaaatagtccacttatacatcttagtaaaccttaagttttttatgacttttcctttgaagtaaacaccgctaagaaaattcggatatcaatattttttttgttgggaaataaattttttgcatattcacttaccattttgtttgttcgttaaaataatgactgcaaatacgtattttgtccaaataaatatatattcagagacgggagcagagaagcccaccatcaaaggtttt

SEQ ID NO: 86569 - DNA, 631 bp, Citrus clementina
  Intron number 1 from transcript clementine0.9_019482m (loc us clementine0.9_019482m.g) derived from phytozome v7.0 (c hr-ID scaffold_10; pos 3345164 to 3345794)
agataggactaaatatgtaggctgtgagcacccgactctctctccttatgctcgatgcggatttcttcaaatgtgttctacccaatgcgtttgtaacaaagcttcaagtaaattttctcccgattggactggatcgaggcaattaggaatctgcgtaattaaagcatccaactttgtgataattaacattttcttttttccaaaggaaattacataagaaaatgtcaccaagggaacgaacagaaggaaccttcacgtatcatgagatggtgccctgcatttttattggaatcaaagccaggggggaacataaaagcacgttattaaattatttgatgccgaagcgcacataactaaatccatgagcggtagtgtccctacagcttcatgagaagcacgttcaggaatagccccacaaaaagaaaatgaaaaagaaaaccaatagactaacatgattaaaaaggaaaaaggcaaagcagaaacaataaccaagttcccccggaccagcacctagaaattcgtgtcctatttccaattgattcttgatttgcttttccccttcttcttctccatataattattgggatttgggtagtctcctacagaaaccatctgatcaaattctgaagac

SEQ ID NO: 86570 - DNA, 526 bp, Citrus clementina
  Intron number 2 from transcript clementine0.9_006205m (loc us clementine0.9_006205m.g) derived from phytozome v7.0 (c hr-ID scaffold_2; pos 328513 to 329038)
tccaacgagtcgccttataacatcactattcactggtaattatattgattcaattaatccttagatgacaagcgtcggcatttagctactcctctcaaaacgaaaattaaaaacaaattgcatttagctacaatgtactgctctgtttttcaaagccatatgacgactttgtcatacatgtttttattgcaaatatcccaaaaggaggatcgttgattatccttgactaattcggcacctaatatcaaaattttcttttattttttttttatttttggaatatatctctatatgtcgtcttgatacagctgcattaggccatatattgctttcaatttcaaatctttttcaaaacaatatgcaataacgcaaataacttgtgaactttttttttttaaatgactaaaagtctaattaatgcatgtgaaattagtgttaccaacatctgcataaagtatcatcactatcttcatctttgtcttcatactaattaattatatcatcaatgaaaattgtttatgtaggc

SEQ ID NO: 86571 - DNA, 636 bp, Citrus clementina
  Intron number 1 from transcript clementine0.9_006392m (loc us clementine0.9_006392m.g) derived from phytozome v7.0 (c hr-ID scaffold_4; pos 2917405 to 2918040 reverse strand)
atcacagcgtaagtgattcttgtttgcacttgctttactattttatgttttaaaatcatctctgaaggaaacattggcttagattcatctgcacagctttgactaattggagagcttttgcccaactgatgacttagcttttctcttcagaatgactgtctttgctaatgtttagatatgtcaatgagaaagatgattagtatttgaagatctgttgatttttgctgaaaatcaaattgatttgacatcttagagttcctcgctgattgatgaacgtggaaagaaaaatttctcttgcttagattttggtgcgcaaaatgtgattgattatcttgaaataatggcttttctcatttcctccttattgattatattgaaatatgaaattttacctagtaaacaattttagaagcattgtgctaagatgatggaacttgacttggattggctctgttacaacatcatcgatataattttcgtaagaatgcgattcctgacgggcaacactgactgtctttgcatcatatttttacatgtatgcatattttttcttttttaacatatgaatcttctatgcagtaactatattttattggtttctgtgcttagtaactgtttatttgacgtaagacagat

SEQ ID NO: 86572 - DNA, 802 bp, Citrus clementina
  Intron number 2 from transcript clementine0.9_034863m (loc us clementine0.9_034863m.g) derived from phytozome v7.0 (c hr-ID scaffold_4; pos 5930359 to 5931160)
aactgattattacaatatagagcttctacgaggtgatcatatatagacttctactcttgactgactgctgctgccaattcaagtatgtctaactaattttcttatactgaggttaatgatgaaattatattcaatgaaataattatttttttatttaattaattccttacatgtgtgctttaatatttatagttcttgttttacatgattaattggatgttattaaattcttttcaccaattctgttatgcattattgttcgttaagattaatatttgattaaatttatacttggatttatgaagtttatatatgattatctttgattatgtgtctttcattaaattatttacacagagtacttaagaaactttgactctttgttattcaatatgtttacatgagatgtttagatatcataatattaagcggaaaaagaacctactttaaattaattttaattgggcttaattgttatatccatgagttgacataattgatttcgagttgtcactctaaaattgaggattaattaataattagataattatagttgaatagtgatagattctgaaatcatggtaattttttgtcttattgaattctcttttgctttaattattttcttattttaattagttttatcccccttaaaaactcaatttgcaactaggttagaattaatattaattttatatttaaattaaaatttttaatttataacaatccttgtgagttcgacttcattaacactattctatttgtagattcgtgcgtttgcaagtatattaattttttttca

SEQ ID NO: 86573 - DNA, 574 bp, Citrus clementina
  Intron number 1 from transcript clementine0.9_017283m (loc us clementine0.9_017283m.g) derived from phytozome v7.0 (c hr-ID scaffold_14; pos 4083160 to 4083733)
ttttccgaacaaggaatttgtctttcgagaaaaaagtaagtaaatatttttctcattcttcttcttcttcttcttcttcgtttctcaatttattttgtgtcttgattttattcgtaatttgattgccttagaagtactttttggagaatcactttctggattcttttttaaaactgttttttttttaaaactaatgagaatatcgtttatcatgagatcatcacttaacgaggattttctctatttttttatttaagcataaaaatgaaatttaaaatttataaaaaaaaaaagttgtaagaataaaagattaatgaaaatctgatagctggattactttcaggatgatgctgttctagaatatataagaatattccgtagaaaaataatttactgtgctttttttttggtggcatctttttataatttaagaattgcatattaatactaatgaagtataagtgctgatttgttgtggtttatgtggattgtgatgtgattttgttttttggatgcttagtatttcttcaattgttaagcaggaatattttgtttgcctctgtcaacggtacga

SEQ ID NO: 86574 - DNA, 461 bp, Citrus clementina
  Intron number 1 from transcript clementine0.9_020346m (loc us clementine0.9_020288m.g) derived from phytozome v7.0 (c hr-ID scaffold_7; pos 3762135 to 3762595)
aaaacttgctgttcttcttgtctccgacgtttgtacttaacccatctcattacatctcctcattttttcctttttttacatcaaagtataatctgggttgtttctgttcgagcaatatgttgtcgtttgggttgctcttgtttgagtattttgcttgagttttgtaattgtttttatgtgggtttgctttgtggttttgaaatggttaatgggtaatcttcagttctttattttgtttttttaacctaaatttaccatctatatggttgtgttttttatttttccccttttttttctttgtttgtcttttttatgaaaattttattgataccttaagtagatgtagattgcacatcacgtgtttgatttcctattgatcatacacctatgttgttcaaccttttttctgtttactactatttttattttttttacttttcttttgcctcgtcctgcagtat

SEQ ID NO: 86575 - DNA, 618 bp, Citrus clementina
  Intron number 1 from transcript clementine0.9_016181m (loc us clementine0.9_016181m.g) derived from phytozome v7.0 (c hr-ID scaffold_10; pos 3511405 to 3512022 reverse strand)
actgaagaggtgcaattggattacaaagaatagtggtaagctccattttttatcaaccaagagttgattcgaacgcataatagttaatactacgtgcttcagatttttccatggcgattcatttttctatgtgataataatacaagagaaaagtttcttagtagctaaactttgacattgttgtagtggttaggttgtacaatctattctgtgcttgtgcatttgaaaagaaaggatttagtgaagtctacaagcgtcaaatactattagtggttaagagttcaatataagatgaattaaaatgatagaactaaatactctgtgtcatcatcgtggccattataatgggggttgttgcaactgtttgggctcctcaacgctgatataaataactcttttaaggcattcatgttccaactgtacagcatatatgtatttaagtcgtatgttttgaattcagaaatggcaactggtaatccaaagtgttgttcaacatctctacctactctacttttttcgattgctcactctttgaggacattaacatgtactcaccaagatgtatttgatccatggaaagtgtggatattaacacgaattttgatgcagatagagttt

SEQ ID NO: 86576 - DNA, 800 bp, Citrus clementina
  Intron number 1 from transcript clementine0.9_014454m (loc us clementine0.9_014454m.g) derived from phytozome v7.0 (c hr-ID scaffold_3; pos 1066541 to 1067340 reverse strand)
aacgcttcggtgtgctgctcgggcaattgaggtaattttggcgcggcccctttcatctctgttaataattcacgtcttaatttctgaagttaattaaattcgatgtgccattttttttttatttcttttgagaattttgtaaagatattcaaatttgaccggagagactgagatttgagaaacaataatactacacattttaaattttttattctaaaaaattattccaaatgatttgttgtcatatgcataaatgaagatattttataatattgccaatagctttcaaaaacaaaaacaaaaaaacgcatttatcaaaacataataaataaataaatatatatatatatatctcgaccactaaagtccagatcagctgcggacagcactacgcatgaaactaaatcaaccttagagaattgtcatcaacttcactaaccagtaaccacacagccactaaattctttgatttgattttgatacaagtacacaaaaagaaccatgcactcgaccttctcgtaaaaacaacccacccataaaataaaaatactctctctctctctctctctctctctctcaattctcattttcccgaaaatgaaaattccgagaatatttgcattcgcatagaaaatcacctcctcttaattatattttctcattgtccctgtaaatttgccatgcacaagcttttagttttttttttttttttaaaggagttgttaacgtgaccaaaccgataatctaagttgcatataatagcagtgttgatcaagctcaaagtttcattttttaaagct

SEQ ID NO: 86577 - DNA, 783 bp, Citrus clementina
  Intron number 1 from transcript clementine0.9_032688m (loc us clementine0.9_032688m.g) derived from phytozome v7.0 (c hr-ID scaffold_3; pos 7889465 to 7890247 reverse strand)
ttgcgccaaaccagaacctacagaggaaaaaccaagtaagtggtttgttaactaaatcaattacctgattcaagagttttaattgctgaatatattatatatgtgtatgttaagaattcctgtgatcattattcattaatctttagttctgtattaatgaattctctatataatggttgtttgatggtttgtatttattttgatggtaaggacacgttatcttttctcttctgttgctcatgtacgaatgggcttgctgatggttcccagttgctagataaatcgaagaaccccatgttttctcaatccacacattcttgattcttgtagtaatatacgccttcatgtatatatgggcaccaatatttgacaattaccttagtttttcaaattattcatttaaaaaatgaggcatctgacaatttgacacttttttgagaaactagtattcatcagctgacatttaatggtaaactttgtcatctgaggaaacagtatgcaaaggaaaaaagttccttcgtggttcttgacataggcaaagtgacattttgtagtcttgattttcaagacattgaataattgtccaatgcctgattatcctatttctagcaatcaccaggattcaagaaccattatttttatcagatttaacttgttcatgtatgctgatggttttcatgtttatgatgcaagcataattccctgagcattcacatagttttaatttcttggctttcatgcttgtcagtttttccagaatcgcctgtagaaaggccattgaat

SEQ ID NO: 86578 - DNA, 581 bp, Citrus clementina
  Intron number 1 from transcript clementine0.9_005382m (loc us clementine0.9_005382m.g) derived from phytozome v7.0 (c hr-ID scaffold_2; pos 4281588 to 4282168 reverse strand)
agagatttgatttttgatctgattttcaaacgagggtaaaattttttcttccttagtaaatcaaacaaatacttctctctctcatattttaaccgaaacttacgcttcttgtccgatctcgagaatagataaattagggtttcgtttgtgtctttacagatttacgcctcgtaatttttcgaatttaggattcgagcctgttgaagcacttgcatttgcgatttgtttttgtttccgctttgttaaagagttctttcgggttcgttatcgcattgtataaatgctgttgatcttaatcatgttaaatttttttatgattttgttttcttagtgtcggtgcatgcttttgttttggatttttatctacttgctttttttttttttgttaatcatattgtgcaatatttttttaatttttgttacaatttgtttatttttttaagccttgtacctttttcttattgtagtattcatttcacgattcttataccatctaattttttttttaatttgttatgttgattgtagttgcattctggttttcagggtttttgatctgatagttagatagttagaaagca

SEQ ID NO: 86579 - DNA, 623 bp, Citrus clementina
  Intron number 3 from transcript clementine0.9_024074m (loc us clementine0.9_024074m.g) derived from phytozome v7.0 (c hr-ID scaffold_4; pos 250088 to 250710 reverse strand)
ggaagacgatcaaactgcagattgtgagtcaaaatttccttttatcttgtattgagagaaattcgatttgtcttatttagtgaaggttattttcaagaaccttgtcttattttctttgtttgaagagtggtatgttgaaatgagtgtatttgtcttataaacatcatttaggtaatgtcttatgtttgattgtttttaatctgtttagtgggacactgctggacaggagcgtttcaggactataactagcagttattaccgaggagcccatggaatcatagtaaggagccttcccgttcttggtttaaatcagaaagtttgtgatttacatgtgacatcttaacagcattgtatgtgtttattaacttatttttcatctttcattaagcagtacattttccaataaatctgtatacaagatgatgtagtccaagaatgggagccataatatgatgcaaattgtctaataaattcttatgacatatgatgttgtcggaagtaaaagtcttgcaatgctgtattctcttttaagaaagaataagtggtaattttgtttttccaattttttaattgagcaactgtatgagattaattaaatgtgttgggatttcaacagattgtct

SEQ ID NO: 86580 - DNA, 857 bp, Citrus clementina; identical to SEQ ID NO: 81965
  Intron number 2 from transcript clementine0.9_011675m (loc us clementine0.9_011675m.g) derived from phytozome v7.0 (c hr-ID scaffold_3; pos 438818 to 439674)

SEQ ID NO: 86581 - DNA, 584 bp, Citrus clementina
  Intron number 3 from transcript clementine0.9_015339m (loc us clementine0.9_015339m.g) derived from phytozome v7.0 (c hr-ID scaffold_7; pos 3329296 to 3329879 reverse strand)
tcagagaaactccaacgtactaaggtagcacatcttgtttagattttggcttccttttatctgccttttcttttgtgcttgattcactagtctcaaactttcccataataatttcctagttagacatgaaatgtatctttatgctgcagaaattgttacttttgctgatgtttaaattgcaattcttcaacggatgagagaggaggattttcttgtaaatactgctgatatatgcttataaaaatgacagcctttggtgcttttttgcccaactaattaatcttattagatacttagaagtatcatcagatgctagtaaactaatttctcttttactagaacaagcaagaatgcatcaaatactttttctcaatgtctatctcttgggtgttcaggtatatgtagataaaaaactgcggatttgtttctggttttcatgactgaattttttgatatattgtttgtctctgcatgttttcttttgtgtttgtctctgcatgtacacatctagcatacatgtaatgaatagaagctttgttgtttattcaggcacttgtggagtgtgaaggggagtctgtagatct

SEQ ID NO: 86582 - DNA, 620 bp, Citrus clementina
  Intron number 1 from transcript clementine0.9_002585m (loc us clementine0.9_002585m.g) derived from phytozome v7.0 (c hr-ID scaffold_3; pos 5699158 to 5699777 reverse strand)
tgttttaccgtgaaaacaaacaatcagacaattcggtaccaatttcttcatcttcatcttagtcttatcactgcacacgtacactgcatctctcccaacattgaaaagtccgttcttttcatattcttcctcactttgaaaacacccgaaaggaaattttaatcacaagtaattgaaacgatttttttgttttttatccttttcatgttattcaaagattcgttttctgaaatttataattaattgatttttttttattttggcattcaattttgtgtttcgtgtcactgttagtatcctaggaggctttttttttttttgttttttgttttccaagtgaaacctagggtttcttccttaatttctttggtttggcgttttcttagcgactaagctgggttaaattacgtttttttttttgggtttgtttagagttgaactgcgtattgtaattgtgcttatttgttattgcattgtacccttatgattttggaacttttatacccgaatttttgtttgattttttatttaccaaatacgatttttacctaatgcgtttggttattggaattagttaattttcttgtaatttaatttctgcagatcaatagctctgtaag

SEQ ID NO: 86583 - DNA, 902 bp, Citrus clementina
  Intron number 2 from transcript clementine0.9_027200m (loc us clementine0.9_026362m.g) derived from phytozome v7.0 (c hr-ID scaffold_2; pos 5545070 to 5545971 reverse strand)
ttggggtaatatgtctgcagctttcatatttattcatttatgcacataagttacttgttttgattttccagatggaatatacaacttatgtttgcttaagatgttggtctttgcaaatctgttttctattactttaaaattgcgtacttgcttgtctatttgaatttagaatctcaaactgtcattagttattgatgtgggattacaatggactgtagattactactaacttcagctcttttttcatcaccaatttttagcattctagttaaggaactcttttgttgaagctggaaatgatattgtgtgttaaggacattgggacatgcatttcctagtgagtcgtttgtttcggagggtcttcactcttttgttcattgtcagtttatttagtaagagtgaccttacatatgcatctatttacattgcatagatttagctaaagagaatatagattcttgcccttaaattttgtactaggttcaaatgtgaccgcctttttttttttaagtgaattcttattattatctttggtttataagatgcttgttactcctgtgcgtatatctatgttgatggctattttccatttcaattgatatgtaaaatatgttggtggaaatttttcatggtaagcacaaatgattaaaatttgtcattgaggtaatcaagcctcataatgggcatgacatgagctgaatgtttagtctgttagaagttttaataatcctgtatggaaagattgagccatgtcaattgcatgtgggtgattgtccataaagatcactttgatttttttttttttaatcacctggaggttgctggattttgtgaccttaaaacagcagtttgtagtgccttcactgactcaacttttgatgttctggtactgtagaaacgat

SEQ ID NO: 86584 - DNA, 303 bp, Citrus clementina
  Intron number 4 from transcript clementine0.9_009076m (loc us clementine0.9_009076m.g) derived from phytozome v7.0 (c hr-ID scaffold_10; pos 1234910 to 1235212)
tccaaacaactagtaagtttcattattttgtggtaactttgctttggttttatagatattttaggtattcttcattgtgcccctattgagcttgcttatgatgtgcgagcacacaagcatgcagatgttgcactaatcagctcaacatttacgaagttttgccatggtcaatgttgtttgtttattgtaggtgttcagctactacagaaaaattaatttgatttctgacattcttttacattcttcattagcattttctttcagcattactaacatcttttcgggagattgcagacattggtg

SEQ ID NO: 86585 - DNA, 926 bp, Citrus clementina
  Intron number 1 from transcript clementine0.9_003106m (loc us clementine0.9_003106m.g) derived from phytozome v7.0 (c hr-ID scaffold_4; pos 3841277 to 3842202 reverse strand)
cgccgaaattcaaagcgccatctctgaaggtgaattgttctttccagttctttaacaatttttctttttgatatttttgagggggatgaagttgtaatttcagcagggggccatgttctacgtgtcttctttaaaactatgcttgtttccagatcggaggtgatggctggtcctgaaatttgggcccacaattttgttctttttattattttattaaatttattttattttgtttggtggcataaatcggatgtgaacattaaaaatatttttgacatctaaaatatatatataaacacacacaaaattttgttacaggactaaaatgatattttaattctatcatctgggaatgtgaaataatattaaaaaaattagggtatgttggcatggtttgatgattcatgctgcgatctttgtttccaatgattttaatatatgtatatttggtttatctagtaattaatattcctacatataaagacttccattaaatgtttgtgcgtcgtgatggatccaagcgttttcccgtggatctaatttctgtgtctttagtgtgtgactaacgcatcacttgagccattagattgagtgagatactacttgagaacgaggcactattgtgtctctacagtacattgaaatggacaaaactcccgatattgttattacaaatattttcaaaggttgctgagtcgcaatattacaagttacatttgacctttaattaaccccactaacagatgaacaaatttttgtaaacctaaaagatcaatgttctgattagttataaagaatgaatataacatgctgaattctctgaaatttgtttttaatttggtccggtgatggattctttctaaatttgtttgagtgtcgttgatgtgacaggggcaacctctttcctgttcactgaatatcagtat

SEQ ID NO: 86586 - DNA, 945 bp, Citrus clementina
  Intron number 3 from transcript clementine0.9_010781m (loc us clementine0.9_010781m.g) derived from phytozome v7.0 (c hr-ID scaffold_2; pos 3016213 to 3017157)
gttcagaggaagccttgagaatcacttgtttcgaagtaggcatttgtgttatttaccttcttcttttgctttgagagcttcaatttcctaatttctacaaactttttgttgcgattcttagactgggtagttaaatatagtgcccgcttcttgtatgagagctctatgtttaaaaattgtgtgccttttgcctataatccataattagagtgcaacactttgattatgccacacagctaagattgcagtctcaataaagctgaggtctaacagagtcacccattaactttagaatgctatctacttgattcacttgtaagataccaatcaagacttttgctttaaattggacatccttcaagcatcatgaaagaataatctcatcagtttaggtaatcctatgtgatgcatgtttcatagattgtaaaggttttaggctttaccatcttttgtttgagacagagactgatagataattcaagttaaaaaaaaatggcgtgtacatctaatgaaagactaacgtatcaaaaattcgcgatgaggtgttagtgtcatttgcctagactagaactttggtgacctgccatgttaaatggtttaaatgaaattatactttaatgcttcatatttgaaattggggtcattgtcatattcgtcttgtgagatatcatttcaaaatagttgcattgccctgtcatttaggtaacacatattacatggtagtgtgagagatgctataggtgatctcttatctttttttaatagtttattgagaacgtcgctgctggaaaaaaaacacagaaattaacttttttgttatgaggaacttaaaaatttctacttagttttcgaataatactttctaacttagttttcgaataatattttgtaactcaagttgatatggtctttcctggggtatttagaggcaactgtcccactatc

SEQ ID NO: 86587 - DNA, 917 bp, Citrus clementina
  Intron number 4 from transcript clementine0.9_030349m (loc us clementine0.9_030349m.g) derived from phytozome v7.0 (c hr-ID scaffold_3; pos 8152494 to 8153410)
gatcttatcaaagcactcatcgtggtactacttaatctttctatttttatttctcagaaattattcaaaggcccctgtcatctcaccaggcggcggtggaactacttgtccaagtcgaaatttaaaaaagaaagaagggatgaattgaaaatttactcattttatgtttggccgcgccgagctacgtacccttgttagaacttacagtcttctgaattttataatttatccgttgtagtatccattatgcggtttgcctcttcagttttacaaattttacactgtagtcttgataagtttattattattattattattattagtagtagtagtagtagtagttttatcatggtctcctaccaaactaaaatgctagttacacctctggtggttatttattctataactattgggtttgcttttcaaggaaaaataatattgttgtccaacttaaaattcaaataggtcaaacatagagtagtcaaaatacagagaattataagatagattttaacaaaaatagatatataatagaaacttttttgttaattttaaaaaattcaagaaataacttgttaataggctcaaatgataacgacttatataatcattctctagtgaggaaattgaggatgcacactaaaatataaaataatatatatatttcaataaattggagactgtgtcttttaatatgttagtatattaaaatttatgtttttttacttattagtgacatccttaatttgttaaaataagatgttgtgattagagaataataaataaataaataaataaatatatatatatatatatatatatatatatatatatacacccgcgcgctcaggacatatttaattttaacgtgcatgggtgtagggcatatttgttggtgccgacactagtgaagtaaa

SEQ ID NO: 86588 - DNA, 640 bp, Citrus clementina
  Intron number 2 from transcript clementine0.9_000360m (loc us clementine0.9_000360m.g) derived from phytozome v7.0 (c hr-ID scaffold_2; pos 6241844 to 6242483)
ggatatctcttggaatttcaacagacactgaaaaagtgagaccctatttcagctgattattcacttatgttatgtgcctggtgtcctttcttttgtaattttattcattttgacgtgtttgtgtgtaaatcacgtaccgatgtgcatgcatgtgcatttaagttttgaccagtaaatgctacttcgaaaaggtagtgtacattacatcattaatgtactttctttttctgttttatactttgaaaagtttataaaaggtagttttgctaccccatctccttagagctatcagattgtattgctgcacgtatcagtttaatgaaatttattctttgaagcagccccacgaatttcctatttccatccccccttacactcattctgtacttttctgttctttcagttcttacttcttttgatgttcctttacaattgtttcttgcgttcaatctttgatttttttaacccatcacattgtgttcttgtatgttatatgctttggctgtttagccgtggcaaaatggagaaagaagacctttttactatttcattgcttaagtttatttttcagaatgatgtgatgtatttatcatgataaagtttaatattctgatttattaaacaggaaaagttatccgta

SEQ ID NO: 86589 - DNA, 470 bp, Citrus clementina
  Intron number 1 from transcript clementine0.9_006663m (loc us clementine0.9_006663m.g) derived from phytozome v7.0 (c hr-ID scaffold_4; pos 3795461 to 3795930)
cagctgggacagagcctctctgctcaatctggtattgcttctttctttttcttgttttggctttttaatttctttagagtttaatcaattcttttttaagtggtctttcaaatattttgaaaatgttagttgaaaggtttttgaagcttgtttgtatttgtttgtcaactttgagatctcagtgacgcagttgttgcattttaattcaaagttttcgctctgtttttcttgtttagtgtctgcatctggttgcaaagttctaactgtgctttcattttcatctttattgttcgttgaattagtaaatatcttcatagcactgacggggatctgatgtatgcactccccaaaaaaggaaaacaaaaacgtaaaagaaatgagaatagagttgatgctgatgcatcattctatattaatacatttgatttttgctttttaattgcaggacctcaacagcaatatattgttga

SEQ ID NO: 86590 - DNA, 857 bp, Citrus clementina
  Intron number 1 from transcript clementine0.9_032342m (loc us clementine0.9_032342m.g) derived from phytozome v7.0 (c hr-ID scaffold_2; pos 5219956 to 5220812 reverse strand)
ccacaagcacagctgtgcgacgctgcagcaaccacgtaatatttgaattaattttctcgttctgctttaatttctctgcaacctactgactgccttctgcttctagtttccttcattggatgtatgtgaggaagcactttccaacctctagggattatatagccttcaaattctacatcttgtacagcttctttaaaagtgaatgagagtatgcttgatgttcttaaagtctcttgaatcacctgggaaaaaaaatgtatatttattcccatcttgactttatacttgcctttggctttttgtttgctttgcaagcggatatggtggctatttatccacttggtgtttctttctttcatattctgtctcagatgcattagaaaagaaattaggatgataaatgcaattgttaatttcaaagcaattaaaaatggagatagtagaagcaaattgcagagggctaaaaattaaataggccggaaggaagaagagagggatttaaagaatttcatatagaatttttttttatatgatatttgattaattgtcagaaaaaaaaaattgatgagaacgctgcagcaaccatatagaattttaaaatttatagttttattaaaaaattatttaaaatttggttgaagccccggcccggctcaggccaaggccagcccaggcccgttcagattggatgggctttgagagggcttggactttttgccaagcccttaaatttcctagcctattccaatggtttgggggttctgtttctgttttagggagtgtgtgtaaagtgtaatcagtaacagtattagtgcccgcgcactggttcgcaggcggaagagaaacgcagaaagaga

SEQ ID NO: 86591 - DNA, 438 bp, Citrus clementina
  Intron number 2 from transcript clementine0.9_018587m (loc us clementine0.9_018587m.g) derived from phytozome v7.0 (c hr-ID scaffold_3; pos 2853329 to 2853766)
tgcacacaagactcgtccgccaactcctcaacgttcttaattatctctcttcgcatttctatttccatttctgcttcttaatggcacttgcttatgaaatatacatccaacaatatccagcctttctatgcaaaagctaacaatccctcgaccattcaccaaaagtccaaaatcatgcgcgcattgtcaaatatttgatttttacgcctctaaaataagtttttctcttcttttcctacattattcatgagttggtctataatcaatgtttcaagcgattaaaagctcattttagtttatttttatatttatgtatatgctaattaaaaatgcaatgtggatctcaaactagtgattatggggtaaaacataatttattaatggacgaaagattaattttcaggtggaggacggtttagaccagcaccaggattggtg

SEQ ID NO: 86592 - DNA, 928 bp, Citrus clementina
  Intron number 1 from transcript clementine0.9_006880m (loc us clementine0.9_006718m.g) derived from phytozome v7.0 (c hr-ID scaffold_4; pos 6701226 to 6702153)
caactttgaaactgctttcaaggcaaagcctaaaggtatgccaaagctcaatatctcatgattccccttttacttccttcttccttttcatttttagctgactggtattaatttctgcatgtttcttctttctactctgttttttattttattttatttgaatacaacttctgcatgatcatgaagatgatgatgcgggtgtgttttgataatctgaggtggtgattttgtagctctctgttttatttgagctgaaagttactatattttgcggtgaaagcagttatttattttttagctgaaattttttttcatgaggtgattctttattcatatgcttttgatagtttcatttatctgatgatgcgttacttttatagctgtggttttcttgatgggatggatgctggttgaggatgattttgtctctcaatcacactttcatcacatggaagatttgtatctaatatcttctctttgctagtttgtgattagattttgaatccaatagccagtcttttatgataattgtagtgatatttgaaacggaattggtcatctgcaactaagagtgagtgaatttctcatctgggttagtttatccaccgtgtgatcatatgcaatcgcccggatccatcgatggtaacaccaagaaaaaattaagagaacgatttaagcctatggccgcatttcagtttatgttagtcataaccaacatgttatcaacttatcatgtggaatttcctgcatgtctgatgatgatggagtttcattactagagtaaccaagatttgtcatcctcaaaagctgtcttatctgtgcttttgagaacgattttgcttgaactttcctggtttgcattgagccacacttcatattttgttgctctatatcaaggaattagtgtttcccaatgcagttttcgcgg

SEQ ID NO: 86593 - DNA, 979 bp, Citrus clementina; identical to SEQ ID NO: 85796
  Intron number 1 from transcript clementine0.9_010839m (loc us clementine0.9_010884m.g) derived from phytozome v7.0 (c hr-ID scaffold_4; pos 6758391 to 6759369 reverse strand)

SEQ ID NO: 86594 - DNA, 1015 bp, Citrus clementina
  Intron number 3 from transcript clementine0.9_008326m (loc us clementine0.9_008326m.g) derived from phytozome v7.0 (c hr-ID scaffold_4; pos 1248105 to 1249119 reverse strand)
agaggactaagtattgtctcacttcaaaggtactaaattgagatggtaaaattaaatattgatagtcatttccttgtgcggttgtctgcatttagtttttataaacatgacttaacaaaaacatttacattacaagaaacggttaagataccgaatctacatctatgtcgaatgtgagataaagggatctatagtggcatatttacgactgtataataaattgtgaacttgttataagagttgacgtttcaatattacagcttattttcatcgcaaactgatttcctattaacaatactcatgtattggattcatgtatggttcatcgaagtcggttgagtaaaaatataaaattatgaagtacaacttgatttgatgattcaaccccataaacaactctagctaaagttcattcatttgtttgatattgtgatatgttaaagataagagatgggttactaaatgccgaaacttttgaaaccgtttttgtttccaaaatttttattcttcctcattctccattagtttgtcttgattctctcaactgttgctataaatttttttcagtttctttcttttgtcattttttggccatttctacaggcttagcattaatattatcatcgactcttcctgcttttcacttctcaatatgtccgccaaatcgcttcaatttattgtagatttatatatctacgaaagttattgtgatcatgtgatatcccagaagagagatgtaaaagaaattaaaattttaacatataaatataagaacattcatcttatgaaagtggccatgtagattcagagtcatgtgtatccagtgctctttcaatgatcttgagtgttcagaagtagaatatgaaaagcttaggttaatcttttatacagagagaaagaaaaaaggggagatcctgacttaaatcaacaacaagagatttatggtggtttctgataactgagacattcaaaaactgcagattccacttggtgtggttttggccattccaccatt

SEQ ID NO: 86595 - DNA, 1000 bp, Citrus clementina
  Intron number 1 from transcript clementine0.9_027078m (loc us clementine0.9_027078m.g) derived from phytozome v7.0 (c hr-ID scaffold_2; pos 2339989 to 2340988)
cagcggcgccgatccaccgtgttatacggcagcaggtaccacgattacttccccacgtcatcatcaatggctgctgttcgacatgatcgatagatcatcgttttaattaatcatcaacttcattttttgacgtgattgatgatcaattttcttgttttgttctctgccggtcgatgatatgctgcagtaggaattaaattcaatgccatgatgattgatttaagtttaataattccgcttattattatattatatggtttgtataataagatggatatttcaaatttgtctaggtaatttgccttcttttaaatgtaaaagtgcagttgttgcatatatattttttaattaaaggtaggatcatgcatgcacatgattcttaaccatcttgattaaattcacatactagttgatgatttggattagtatttttgtactttatttatttatttatattacactgtagtgaccttacaattaagagtcacagaaactaattaaatctacacaattaaagaatgaaactaaatctgctagtaacccagtgtaataatataattaaaatttttatcttgatccacaagtactaattggcatggctggtgtaaagaaatgaaagaagagaaagcaagaggagcggagagaaaaggaggagagaagaaagaaattaaaaaaaaaaaagaataagagataaatttcatatcaaactaaataatgaaattagaaattaggtctctttttcttcgtttcttctaaccaattattaactaaatatttagaagctgtgtaatcacttatgactagtgaagcttaagatatgacttgttgattcagcagaattagaaggcattcattaaactattgtatgttagattatatgaattcactggacgagtttctttttacttgaaagaattcttcgttattgtttaattgcatggattggattgtgataatctgttctcgaataaaagccaagaatcccgtgacttgattcaac

SEQ ID NO: 86596 - DNA, 1064 bp, Citrus clementina
  Intron number 5 from transcript clementine0.9_007085m (loc us clementine0.9_007085m.g) derived from phytozome v7.0 (c hr-ID scaffold_4; pos 4133504 to 4134567 reverse strand)
gcgatttttcacctcgtgccgttaacttggtcgtttgtttttcttcctcttgcactcgcctattgttatagtttacaaatgaactcatttttgaaagtctgcttatacttctgttactacgtcagtcaacataagtatctatggaattatagatctacattatgatatccatgtgatattggttaagtagccttagagtttgtaatggaggtgataagcagtcttgtgagttaatctctttttggtttgttataatttgtatgatgttatcttgaagagccatcgctgcttgtaattgcttattattctccaaagatattattgatgagctttcacaatgggtaacaatattagaatgctataacttcaagttgcccattatccgagtaaacaatgaagagttgactgctttaattactttctgtagttatcaatactatacataagggaagaaggaaaaataactgaaagttttgcatctacagttctgaaacgaatcaatcacccaccttagtcttttcttgattattcaaagaaatatcttttagttttcttatctaacaatcacttaggatttatgttaggatttaagaattgcctacataaataggtataatacaagcatttcatacattcaatggttgaagagaaaactaataacttgggagtgatttaatcagcgtcagagaccgttatcgatgtcaaactctatgaaattgatatgttgcatagtaatacaattctacataaatttgttggcataattttacctacgaataaactcatgattatgctaagtgaagatgaattgaagttatgtctctaatacatagtggaaataaattttgataactatccccccggtcgggggtgtttgttgtaccagatttcttttttctttctttcttggtaatgattgtgttaggtgttttatatatgacagatgtagatgtatgggtggacctgctagctaaacatttattttgaattgggtcagtggctcaaattattttatttttctaattgcagacccataaagacttcacagagactcgtgtcagcac

SEQ ID NO: 86597 - DNA, 422 bp, Citrus clementina; identical to SEQ ID NO: 81154
  Intron number 4 from transcript clementine0.9_007085m (loc us clementine0.9_007085m.g) derived from phytozome v7.0 (c hr-ID scaffold_4; pos 4134606 to 4135027 reverse strand)

SEQ ID NO: 86598 - DNA, 244 bp, Citrus clementina
  Intron number 1 from transcript clementine0.9_008149m (loc us clementine0.9_008149m.g) derived from phytozome v7.0 (c hr-ID scaffold_3; pos 3354994 to 3355237)
gctggcaacgccctctccaccctctgcaggtaccaccacaattttatttataatcaaaccacagtcttaattagctttctttgctacaagttcgttagtaatattttcagggtttcttcaagtagtccaattagcaacacgtcgcactacattcattatattatcttttctaccgattcattgatattcagttcaattttctgttaaaaaaactcacgggcaaaaataatcttgaatattgcag

SEQ ID NO: 86599 - DNA, 684 bp, Citrus clementina
  Intron number 1 from transcript clementine0.9_025019m (loc us clementine0.9_022111m.g) derived from phytozome v7.0 (c hr-ID scaffold_7; pos 5214152 to 5214835)
tctccgctagcgtcctcaagtgcggacgtggcaaggtctggcttgaccctaatgaggtcaacgaaatctccatggccaactccagtacgtcttgcttttaatttctctttgcaatttcatcattctatttatcgtttttgggtagtttatatgttctttcatagacttgattatgtgaatctaagttattgtgaaccctagatctggtagctgaaaggttttgtgagggctatattacaaattaatttatcgataatagagaaaagctattgttaccttagtggtttttttcatcaagtgtgatggcttatatgagtatttaatcttcttcttcttttttcaccttagggtttaattatgtggtgatggacttgatatatcaaagtttaggtggcagtttaattgttatacaagtttaagaaatgagcttctagtgagattttttgttattgattatttcagcgtaggatattaacttggagcatatttttggtgagcaaagcaatgattatttttggaaataacaaaagtagaaaaaaattattgtgactggcttgtgcttctgcttaattttgaagcataggatcttctcatctgtgtgtgaaagccacatcacttcaaaatctgaaataccctctttgctgttgccgagtgcagggcagaacattaggaaattggtgaagg

SEQ ID NO: 86600 - DNA, 1049 bp, Citrus clementina
  Intron number 1 from transcript clementine0.9_031656m (loc us clementine0.9_031656m.g) derived from phytozome v7.0 (c hr-ID scaffold_4; pos 4356605 to 4357653 reverse strand)
ttgcctggtgctcagagaaatcattcatactagtactttttcttttatcgatcttttagcttttgtagtctgttaggattctctaattgttgggtggtttagttttataattttttgactctgtgtaaagtagtgttacttgattttgatggtatactataggccatggcacaacaaaacttgagattcatggaagacttggtttaatctgtcatgctattcttgagattcgacaatgtaccaatgcgagtcagcattacatgatcgagtgagttaaatttctgtttcccactttgttaagtttaattccctaatttagttttggtccaaaaatttttttaaaaaaaatccaatttgtttttattaatttcaccatttaaattaattttctgtacttgtgtgttctgtccagtctttatttaatcctctgttatcattctgttttgttcaaacaatgcattgttaagtagtttttctctttgatcagtttttgcaagaaaagcatagagaatgtgaaggaatatctggttcaatattgtgaagatcgaaagcaagcagggtttatgatgttgccggacccactctcagatttctatgaagccgtttgtgtggggttggacttggatgataatctaaccacagatgattattctcagcctccaatgacaaattcaggttggtttaattcacttttcttgttatcattagttaattgatgcacgcttcagttgatttatctatgatcaattcatcagtaacttttcaatgttacttgtcattagaagtgttggattaatgatcaattttctgcaggagaaaatgaaatgcatcaaccagatatggagaatgaagcagagaggactacaaggacttctctttcggcgcaggtgatagattttctcttcagcatctaacttaacaattaatatcgaattgtatctttctgctcctttttgtcatttacattgtattatcatctttaacccagtattattttgttgtgctggggattagtgcagagggagagaacaggaaagttgacattgaga

SEQ ID NO: 86601 - DNA, 413 bp, Citrus clementina
  Intron number 1 from transcript clementine0.9_014469m (loc us clementine0.9_014469m.g) derived from phytozome v7.0 (c hr-ID scaffold_31; pos 1105378 to 1105790 reverse strand)
actgttttgttaatgtaatcaatctctactctttgatttttcttctttttcaattaatattttaaaatatgaattaaggtcctcttttaatctgagttttgcatagttttttaaaaaatcttgtgtaacatgtccattattagtaatatatgattgaaaataactacgtacacttatatccttaacttctaacagtcacaattaagctcaggaaaagcttacatcatgggggaaacctggtcttacaaacttatataagacaatttggatatatgtatgtttatccaaaaagaaaatgcacaaatattcattattttcttaatagtaagataagaagaatctacctaattattaaattaacgatacaagagcagttgatcataacaagtttttaatgttatttcagggctgtg

SEQ ID NO: 86602 - DNA, 1035 bp, Citrus clementina
  Intron number 3 from transcript clementine0.9_025864m (loc us clementine0.9_025864m.g) derived from phytozome v7.0 (c hr-ID scaffold_2; pos 2163023 to 2164057 reverse strand)
tgaccaaattaggcttcttgctcaaacaattgaaagtgagttactgtctgttagctttttattttgtttcttgcgcctgttttttatttggtagcccgaatcctgaagctcatgaagagtttgggcatctacgcttttaggttttagctggttgtgttgcgttatagtttatgattatgttttgttgttatttaaggcaagctatgtgtgagattatggagttcactgatattttgaaatttattaagttggacaattcactttccttttaaggctattcaagctcttcttaagtcaactgactagtggaaatttgaattgctacactttctttttcagtgcacgcaccctcgtataaattgtcattaccataatcttagaacccatttgatagatcagttaaaatacagataggatgactcttcttatgtagtgtttggtatgcttcgaaggaccagtaagattgaaaggatgcgattcatccatagtggactgaataagacgatcagttgagggcagttgggataaacatcatcaacaacttggtgaatgaccaaaaatgttatatatttcaatttcccacaattcttctgtgtttgctggacagtttttaacagaacctacagggaaaacctgtacattatttttcccaccattcttttgtagctcagggatttctagccaacacatttactcaggaaaatcaaattttctgaccatttgaaaactcaaaacagacaggaaacagaaatgaactgttggttgatggtgatagtgtttgtgctattctgagggcttttgtcttctttattgtattaggatctgtgatgcttctgatgggaaacttattaggttttgctagccaatgtgatatgtaattaatgtttttgagtttataggatacgatgggattttagaatatctaacatggtcaaggcagcaagtaattgcatgtggtaaactagccttgtgagtattattgttccaagagattctaatttccgttatctttttaaggtgtgcgaactgactggc

SEQ ID NO: 86603 - DNA, 721 bp, Citrus clementina
  Intron number 2 from transcript clementine0.9_020408m (loc us clementine0.9_020408m.g) derived from phytozome v7.0 (c hr-ID scaffold_4; pos 2603805 to 2604525)
ccaggtattagttattgtgatatcacgtaggttagtaccgctttttagggaaatgttattgttgcagagttgaggatgaagttctcaattctgtctgtattcatgacgaattggttactgcatccaatctcaataaagttaacgaccccaacttttcatccatttgtgttgatcgtctgagaagaaagtttgctctgtcagcagcgttacccataccattccttgttgcattatttctcaaaatagattaatcaattgctaccaattataaattcattcttactggtatcactatttgttgtttatggtttctgataaagctcaaaatttgaaagtcttagacaactttgctggaactttgtgtcaactaagatcacatggggcttgaaatgtgaagtctcgattaacttaaaaatttatctgtctgtccatgggcgaaccagaaggtaacatgtgaaggatcctgaaataggtcaaagtattgatggcttccttcagacacttgtatgtgaacaaacctcatagtcttccatatcttatcacacaaacacgaatttgatgcagatacacatccgtactaggggaaccaattagaaaacttttatatgtatacatcagttttcttggcatttagaattagttgcatatcaaatgatagttaattgtttaattgtttcctgttgtaggggctagccatttgatcagacatctccacgccaaa

SEQ ID NO: 86604 - DNA, 909 bp, Citrus clementina
  Intron number 1 from transcript clementine0.9_030531m (loc us clementine0.9_030531m.g) derived from phytozome v7.0 (c hr-ID scaffold_10; pos 5256036 to 5256944)
atccaactattgcacactggcaagcttgcaaaagggttcttcgatatctacaagctacttcacactttggaattcaggatcagtgactttaacagcattttctgatgctgattgggcagctgatccagatgatcgaaagtctactggagggtattgtgccttcttaggcaacaacattatttcctggtcttctaagaaacagacaattgtttctcattcctcagcagaatccgaatatcgggctcttgcttcagcaacctctgaaattctttggctgacttatttacttcaagagctgcatattcagcctactcacagtccagttttgtattgtgataatcagagtgctgaggcactagttagcaaccccaagtatcactctcgtacaaaacatattgagttggatcttcattttattcgagagcacattgcacagaagcaactgactatcagtcatgtttctagttcagaacaacttgcagacattctcaccaagcccctcttctttgatcagtttgcttatcttcgtaccaagcttaatgttcttccccgaacttaagcttgaggggggatgataagaatatgtgttaacagcattagtttagttaattcagttatggtgacgtggcagtccagtcagcaaagtagtcgttagtctgtttagtttgttatttagcttctctaaaaaggtgaaatacacgtgaaagtgatgagtgcgtaaaagagattccagcaagcaacatatataagctggtgatcccattttgttaataataacaagaataaattttctttctctcttgctcagattttctctgtaaacaaacattccaaatcaatatatctaattctaattttccgcaacgaaatccctcaagagattggatatctgttcaggttacgattttt

SEQ ID NO: 86605 - DNA, 525 bp, Citrus clementina
  Intron number 3 from transcript clementine0.9_028268m (loc us clementine0.9_028268m.g) derived from phytozome v7.0 (c hr-ID scaffold_85; pos 666278 to 666802)
agaagatttacggaagaggagtttctgattatctggtttgttctctttatgcttacagaatttgaattaacgctctgcatgaatttatgattcattttttttggagaaatattttatgaaattgaagcattggagtaaagcgtactagtcgtaagcttgattcactttgttttgattttattaccaagaggtgctaacagttcatgatgcataaaagagggggaaaaaaactcttcttggtagatacataaattttagtttctgaatcattttcaacgaaagaaataattttacagaggctgaagagcagcattttcatttatatgaaagttcaattgttatatcatctgtttccatatcttttgtggtaaataaagtccttgatgatggcaatagagcacagaagagttgttagtttcatatgtggagattttcatcatagtagttcattgaaagtgaaggcagctgaatacccttttttctgatgcagtctgtccctctttggtgtgattatttaaaatttgt

SEQ ID NO: 86606 - DNA, 975 bp, Citrus clementina; identical to SEQ ID NO: 86152
  Intron number 1 from transcript clementine0.9_014912m (loc us clementine0.9_014912m.g) derived from phytozome v7.0 (c hr-ID scaffold_3; pos 1371131 to 1372105 reverse strand)

SEQ ID NO: 86607 - DNA, 705 bp, Citrus clementina
  Intron number 1 from transcript clementine0.9_015637m (loc us clementine0.9_015637m.g) derived from phytozome v7.0 (c hr-ID scaffold_2; pos 4505256 to 4505960 reverse strand)
atctgcctaaagattggtcttccattgcagttcaggtaatttcctatgtttctcatgttacatattgcacttgctctgttcttatccgacttaggttttgttcaaaaatttaaagaaggaagcctaaatttgttaatggatatttttgataacgaaggttttctaaatgaaataaaaacgattgctttttgatgtattgacatagttaaaatttgtattcttgtaaagcttttgatatcaaaaagtcttagggaacacattaatataatccaaggtctacagtacttgtgcccaaacaccaaaatcagattcttcattgttcctactgtggagtgggattaaaagagtatgatgacttccggaattagatgagtttcatgcatctaaagccatgagaaatacaatattaaaatgtcatgcccacctgtattctttttgcctgttaaatgattatcatctctacaagtactattgaatcttagatcacttttccctttgaatttatgtgcttcatgattttgtcttttagtttggagaaaaaagaaataaatttaagtctcttatttctttaactaatcattttggagggttgagaattgaggtgcctgagtttttacagtaatatttcataatccacccttaaagattaatcctactttctcatatgttgttgctggactaaccttaatgataatatactggcag

SEQ ID NO: 86608 - DNA, 192 bp, Citrus clementina
  Intron number 1 from transcript clementine0.9_025966m (loc us clementine0.9_025970m.g) derived from phytozome v7.0 (c hr-ID scaffold_3; pos 2691459 to 2691650)
ctttgatattcttttgttgccctcttcaagcaaaggtataacagcagactcttgacctttttctttgtaaaggtcttccttctattccaggcaagaaaattaaagaaaactcctatctacggtttctctcttcttttgtttttgttttttgattattattattttcaataaagggaataaaaataattaaga

SEQ ID NO: 86609 - DNA, 702 bp, Citrus clementina
  Intron number 1 from transcript clementine0.9_006293m (loc us clementine0.9_006293m.g) derived from phytozome v7.0 (c hr-ID scaffold_3; pos 6662020 to 6662721)
tggccgtcgttgctctcactaccaggcgacttaaggtacgaatttgcatctccttcaactgccttcttctttgtaacatatgctaatacagcagcaatctccgactgtgtgcccgttcgcgtttttcttctttagccgatgttttggttgattggttggtgtcatatgcatgctgtaactctaagtttgcgaactggatatccttttatcttcgtatttattgaaatcattgattttttttctttttgagtttgggttagatctatagtttcataaaagagcaatagcacttgcattgattgtacaaatcatgtgatttcggcatttcgaagaactacgtgtcgcatttcagaggagtctttgattttataggtctttttcagtaggtggctttgtcatttgatatttactgtggttgcttgatcccttttgaagttattctgtatctttttattcatgtcaaattttatcagatcagctttattattcctttggttgaatttcaatattctttgtatatattctcagtgagaaatattacttggagtttttaattacagttcatgttacatttcttaaatggtaaactatggtctcagatctgtttttgccgaaatcatagatttttgaattggaaatcttggggatttgctcctttacgtacttttttattttgcagaagcagaccttatttccccaaaa

SEQ ID NO: 86610 - DNA, 723 bp, Citrus clementina
  Intron number 1 from transcript clementine0.9_009618m (loc us clementine0.9_009618m.g) derived from phytozome v7.0 (c hr-ID scaffold_24; pos 997932 to 998654 reverse strand)
taagagaactttggggaggtgccacaaagcaacaggtaaggcacctcgtttttatgcttgctgcatttgtctagcaatcaattcttgtacaaatgctcatgttgccactgctacttgtaaagtgtcaatgcaaagtttttcagatttaacttcagggcctatgtggccttttggttcaacctagggtgaaaatgaggagtacttcttaaatcagatttgaatatgataaccttcaaggctgggattggagtaactatgatttcagctatgaatgaatttgatatccacaagcttttaggcctacggtgtaaaactgatatgctacattaaaataggacaagatggagctaagcctatgagtattggtttgtataaaacctgtagtaatttccggcatagtgtttgtatatactataagctcacgccaaaatttattgaagccgggtttttttggaaccataaagcaagcattaacaaatttggccctccattgaacgaaaaccagtgaacttgccaatttcctgtcttaattaaaaaccttaactctattcctaagaaacaaattaacggctcaaggttgtcttcatattccttcttgcttttgcatctagatttctttttaagaattttgatcatgccacctgttagttataccatagttgctttcatttattttcaataaacttacaattggattgaatcttctcttttcagggaaaattg

SEQ ID NO: 86611 - DNA, 543 bp, Citrus clementina; identical to SEQ ID NO: 82280
  Intron number 1 from transcript clementine0.9_021293m (loc us clementine0.9_021293m.g) derived from phytozome v7.0 (c hr-ID scaffold_3; pos 997097 to 997639 reverse strand)

SEQ ID NO: 86612 - DNA, 1045 bp, Citrus clementina
  Intron number 1 from transcript clementine0.9_027487m (loc us clementine0.9_027487m.g) derived from phytozome v7.0 (c hr-ID scaffold_4; pos 5858609 to 5859653 reverse strand)
ttctaacatctgggcttcttctcttaattcttgtaattcattcatttctctaatctctttctcttctcttacatcttttttttctttaaattttcattttaccatatgatgtggcaaaaattaccttgtttatagatctttatcctcaatttgatgttaaattgtcacttaatttgatgtgtaactgtaaagaaatgatcaattttacaggaaaatagtaaaataaccagaaaaaccaggaaaacatattattaatgcctctttttttttaataattggatttcatatgatgggaggccaaaatgaccctgtttacaaatttttatcttcaatttgaactgttttacttcaaaactggaactattaaataagagtcggaattagtacaaaagttaaatataacagctcggtcttctttataaggtggacatcatttcaaagttacatgtatttaggggcgaagctacttttttcaagctggtggttagactaatttttttaagttaaaaaaaaaaaagaatcttgaagtaaagctattgaattaaaccataacaataagttcacattttttaggttttaaaaatattttgtgaattatgtttatttaaaaataaaaattgtcaaacttcaaaattgtgactacaatactccatgagtgccatactcaactgtgactacaatactccatgagtgccatacttcacaacttggcttttttataattagtttacttgagaccaaaaatagatttctaaaatgagatggagtggggaagaagttgggaaaaatgaccgtgagcttgaacgataaacttgtaaattaggttgtggtgttttgttaaaaataacagtggtagctagttctataaattctgcatggtaattttgtgaacaacatagaaaaaaaataaaaaactaaattattattattattattattattattattattttgttggcgtatcttgcttatttcgaagtgaacataaattgtatatttggatggactagaaattgtgattcataaattcaaggaggcacggtca

SEQ ID NO: 86613 - DNA, 550 bp, Citrus clementina
  Intron number 1 from transcript clementine0.9_033642m (loc us clementine0.9_033642m.g) derived from phytozome v7.0 (c hr-ID scaffold_7; pos 2581809 to 2582358)
gaaccttggtttgttttcttatttttttattatatctttcatggaaaagaatagtgatactcctaccaacaaagtgttggctccactggcaatagagtcatcttaagtggattgactgggtttgctccccagtttgagtcacagggaagtcgtctttgttggagaacctgtgcctcccacagttgggaccctccccagaatatctcgtggttaagacaaaaaaaaaagaatagtgatactcctctgatttgattaaatgatcacgaaaattctcctatttttttagaaatggtcaacataagtttttttttttaatattcatgtccatataaaatatagttggatcactatagtcaaagcgtatggtcatcctaaaaagtgtttctatgatcatttttgtgaaaatattaggatatatattgctatcgtttccactatatttcacacaatatatatagtgtatggagaacattaattttcattatatttctcctttttaagacatacaaaattaaaatatttatatctttcaacaggtaccacttgaaag

SEQ ID NO: 86614 - DNA, 909 bp, Citrus clementina
  Intron number 1 from transcript clementine0.9_023646m (loc us clementine0.9_023646m.g) derived from phytozome v7.0 (c hr-ID scaffold_4; pos 5496967 to 5497875 reverse strand)
cataatctgggaattctctctaaagcttgctcaaggttagaaactttgtccattgttcattatttatatttatatgttactggctcttctgtttatatatcttcgtcaactttataggcaactaattaatttgctaatgatttcaatttactatttattgagagtatgagctaactaaattcttgatcgcttagtcatgtgatcctaacatgcaacacgaaaaggttgtttatttaaacaagaagatgattctttaagttattgagtcaactttgtttgaggttcgtgtggatagatatatgaggctaaattttgattgaggttaatgtctcgataggggcttgtctgataattgcaaacctttctcagttatatggtgatcagttgtgaaataacgcttgattggttatgtatattgagtaacggaatttcaactatttcgcatacaagttgaattatattcatagcactatgaaaacttagtttatttttatgctcaaccttagcatactcaaactgcttgtgcgttagatggtaatgaatcaacccttcttggcattgccgtgtttctgacttccgaagcatgtctgctggagactgcagtctctaagatatgcaatcgtgagctgataaatcagtggaaaaagcgcctttttatagcaattagatttagtccccaccaagtgcccgtgatttcgagtggcgggcctattaggtcttgttttgcttgccatgcgtcttgttcaggcttcacttcctagcatgctaacaggggatgatgaaaattgaggaatatgatgaagtcctgtgtgcccataacaacacatagctgaattagttccccatttgtagtgattatggatagttcatatctttgtgacatttgtatactttattgcaggacgccat

SEQ ID NO: 86615 - DNA, 1002 bp, Citrus clementina
  Intron number 1 from transcript clementine0.9_012385m (loc us clementine0.9_012385m.g) derived from phytozome v7.0 (c hr-ID scaffold_3; pos 3491254 to 3492255 reverse strand)
tcttagatctgcgccgaaacacttgccagccacaggtgtttttttttttcttttttttccccggttcggttagaataatttttctccgtccctttcacgttttatttctgtttcattttgctcattaataagcgtcttgagttcctgatttttgagttcaatgctttccagatctgaactctatctaatagttgtttaacttcctactcacattcatgaattaaggatctgagattttgaagtttaattgaaattccgtgaacttgagtttaacttgttgtttttactagatttacggacgtaacacactgggaagttgtagatctgatgcaatggaacgttttgattaatggatctggtgcttgtcgttattttgagcatgtgatttgtaaaatgcttaattactggatgcttatgtcattttcattgcatcgactgctggacctcttcgcgtaattgaagtctagcaggtgctcgaacgtgttaaagagagtttgtgggatcttaaatgaactaggtggaggaggagttatataccgtacacttttctaatttttcttgtttgagtagtttaactttttaataccagtagaattttcttcctcatcatctagaaagtgattgatgataagaggctattgcggttgacattgttttaaataaaaatcaatctgttccttgattccttcttctttgcaactttatgtcattgagtgcttaaggaatctggtgtgagtgcgttattcctttaattatatatttgcccttgaaagtaaatgacagtgcttgttagtcggtttgctttgtttgtaaaatattccatgtttgaggaatttcatccaatcttgactatacttctttctattctttattctgtattctaagatatcaagacctatcatctaccgcaccaatgatgttcttttcacttggaacctgttattaattatacgatgtgttctgatatgctttttttttattattattctgtagcttgataag

SEQ ID NO: 86616 - DNA, 689 bp, Citrus clementina
  Intron number 1 from transcript clementine0.9_008253m (loc us clementine0.9_008253m.g) derived from phytozome v7.0 (c hr-ID scaffold_7; pos 6378695 to 6379383 reverse strand)
tgctgaaggagttgactcaatccaaatcgaatcaggtttgtgttctatttccagtttgttgcagttgtttttgggatttatcggggtcccttaacactgaaagttttgatctttatttgctgtttgtttgattatgtcaaaatgatatgtgaattgtatgtgtgtgtcggctgtgctggtattgaaaaatgcaacgtgcttttcccttttaattatgatttttttttatcatttttttaaaagtttggtagtcggtggagttgattaatggagaattatgagcttctttagcatcttcctctttggattttgagaagttaaatgtggttctaattttgcttttcttatttttctagttctctgttttctctctccatacttgttttgcccccccccccccccctttttttctgtctgcttatgttgattcctttaggatataaatcaaatagtatgcgatgttatccaactttggatgtgggttttgtgtgaaacttgttgatgaagggcatccatattttgtttagaattcaggtttgtgttattgtctgttaaaaggaacctttgaaagagcatttaagcttaatcccaaacccaagtgttgaacccaccaaaatacttgtggttcataccatgtttgccgcttacatttcatttttgatatcgcaggtgtattggcatatatagaa

SEQ ID NO: 86617 - DNA, 782 bp, Citrus clementina
  Intron number 2 from transcript clementine0.9_023508m (loc us clementine0.9_023508m.g) derived from phytozome v7.0 (c hr-ID scaffold_14; pos 1517905 to 1518686 reverse strand)
caggaagtcttgtccattaaaaacacgtaagttcttttatctcggtattgccatcggattttcatttgtgttagtagcagttgttttcatgtcttggcagctttggtttatgttctcttttagcttcttcttggtgattatttgacccttttctctttaccgtggcatgatttctttatcaaccttttttcttgtttcccatatgtttggtgtttattcaggcgattcaaaattccagactcttattggaatatcagttgttgacctgatatctgccatactgtggattgtcgagactagctgagactagctgtgaattttaggcaaatattaaatatactacaaagaagtatcatttttctgcaagtacatgcttgttgtaaagtgctttatggcttggcagggatgagtttaaatgggtgttaatattttttgtgcgttatttcactcaaaagcaaaggcttttgagggatagaagaaatgattttcttttactagtttggggtgtcccttcgccagtgctattatggatccgctgcttgtcctagaatgcttttctccttttgctgactatctgtcttttcttgtttgttgtcttattctagatatggttttaaagatcgtctatagtttagtgatctgagacctaaaccaaatttgctttagaacgacaaacctaagaattgttttaggtctcagcatgtgaaattatgctctcacgtcctaactttttaagtggtgttgcagggaaattgcaaaacatctttctctaccacctgtta

SEQ ID NO: 86618 - DNA, 468 bp, Citrus clementina
  Intron number 1 from transcript clementine0.9_013749m (loc us clementine0.9_013749m.g) derived from phytozome v7.0 (c hr-ID scaffold_2; pos 9234205 to 9234672)
cccaaaattcaacctaccaggtatatgatgtatataagtttaatatttactagttttccaaatttctgttcatattaaattgcatcaattcgatgatttgagaaggaaaaaaaaattaaagtttcttgatttttctctttttttttttttttgatgatatgctttgtttttggattagaatttaaagaattaatgaggctgattcgtgattattggatgttttggagatcattaaacatctatgcagttgaaatttgatgacagccgacagaaattatgaaatttaattcgtgtaaaatgctccaatatgcctcaaaaacttgtcgattgtgtcaatatttattcttcgaactcgttgacaatctattattaagttattatatgcatacaagaaatcttttgcaactgatacaactatttaaggtgactgcagagaggagttgtggacgctgcaaaggaattaatcag

SEQ ID NO: 86619 - DNA, 878 bp, Citrus clementina
  Intron number 3 from transcript clementine0.9_005133m (loc us clementine0.9_005133m.g) derived from phytozome v7.0 (c hr-ID scaffold_10; pos 2228462 to 2229339)
tggacatgtgagcagttctgataattgttcttatgcattttgtttgcttggttgtttgtttaacttgataaatggatgcttcaggggttgaattaggtgatgttaggtagacaagattgtggccttttaagatttagggtataatctagtcataagttgataagtagaatgattctggaatcatttatttgtcatttttttctccatgggtaaattattgttatttttgttgttctgatcttttaattactattttaacaatcataatagttggtaattggtcagctccttcttgtctggtaacttcatttggaaggaacttggagtaaaagtttgtcagtgaaagaattctgtcctctttatagtaaaagtttgatgtcataacaaagctccaatttttctattgttgagctgtacattgttaattttcagatttgaggcagaataactcttagtttattaattccttttagatgtgaatgaataattatgaacctgttgtgtaggattttgaatgatgaagatgaacacatagcagaagatatttatttgtcatttttttctccatgggaaaattattgttacttttgttatcctgatcttttaattactattttaacaatcataatagttggtaattgtagtcagctccttcttgtctggtaactgcatttggatagaacttggagtaaaagtttgtcagtggaagaattctatcctctttatggtaaaagtttgatgtcataacagagctccaatttttctattgttgagctatattttgttaatttgcagattcgaggtagaataactctcggttattaattccttatgatgtgaatgaataattaagaacctggtgtgtaggattttgaata

SEQ ID NO: 86620 - DNA, 598 bp, Citrus clementina
  Intron number 1 from transcript clementine0.9_004603m (loc us clementine0.9_004603m.g) derived from phytozome v7.0 (c hr-ID scaffold_287; pos 6843 to 7440)
aaccccaccaacactgtttttggtatgttccttaactcccgttgaacctgataccactgattctgtttgcgattagttctttgatcattctttttcaaactgatctatttggcgggggagaaaatagaattcaaccgaaaattcatgagaaaagaataatgtagataaaataggagaaaataaaaagaaagttactccgcagtctattgagtttgtattcaattttatgtgtattttatatccatgcacttaaggtatcattgtttctgttttagttctttaaccgttcttgttgaaactgctttctttagccggcgagaaaataatgtgaggttctaggagttatactctgttctactaaaaggagaattttggggggaaaaaatctgtgaactctgaattgcatcccgattttatttatttatttatttttggttttcaaatatgcataatttacttgatttaatggttcttaattgattctgtttacgacatgtgatgaacatagcagagcattcttagtttgtgacgctgaaagaaagttagtggttttagaattgtatgctgactcgtgttttgtttgtatggtgatatgcag

SEQ ID NO: 86621 - DNA, 640 bp, Citrus clementina
  Intron number 3 from transcript clementine0.9_027971m (loc us clementine0.9_027971m.g) derived from phytozome v7.0 (c hr-ID scaffold_10; pos 3126303 to 3126942)
tctctgttgcactattttctggtggtttggtaaaagtacgctcctaactgttgttttcttcataatttatatggttatccgaatttttcctaatgattttaccccttagatacccaaattgtgaagaaacaatgatttatttagttggcctgtcaattattttctttattaaaggaatttgttgagatgcttagcgattgcacagagaaataatatttttgtaactggttgatagattacaagcgcaatccatatttttgactttgatttgaccaatatataacttctgaccttcctcttatccttctagaaccttcatcctgatccaaatgaaaccattaatggtttggtctatgctaatctttgtcttattttcctcatcttgtttttcttatactaagtttgatgaaatattatggaggactgtttctattgttctcaacatcaacccagtttgtctttcttcatctcttaaaataatattctatcatttgatattaatgacttatcactgttacagtactatctttacatctgaaagattcaatttgtttacttatcctcttgctataatttttttgtttttccttttgttatgataatagccaaagctggttgcagtgtcaaataaaatagcttt

SEQ ID NO: 86622 - DNA, 931 bp, Citrus clementina; identical to SEQ ID NO: 80576
  Intron number 1 from transcript clementine0.9_035952m (loc us clementine0.9_035952m.g) derived from phytozome v7.0 (c hr-ID scaffold_14; pos 298562 to 299492 reverse strand)

SEQ ID NO: 86623 - DNA, 363 bp, Citrus clementina
  Intron number 1 from transcript clementine0.9_030165m (loc us clementine0.9_030165m.g) derived from phytozome v7.0 (c hr-ID scaffold_3; pos 7495759 to 7496121 reverse strand)
agaaagctcttcagtggggcattttctttgagaatgtcagtatcttctctctcttcactttatatatttttgacttttgttcttgattttttcgcttgcactcgtttcttattcttgcatgcctataatttcttattcacgtcacaatttctgtcttggatcatcagtccatgagtcttagattatttagatgccttaaacttgtttgtcataatgtgcttagattgttaattcttctgattttaagttttactacaatggatttgcattaattatttcattatttcttcggttatcattattgatttcttcgagtgatgatgtttaggtggttagtcacttgtgcagttccgaggtttatct

SEQ ID NO: 86624 - DNA, 185 bp, Citrus clementina
  Intron number 1 from transcript clementine0.9_013103m (loc us clementine0.9_013103m.g) derived from phytozome v7.0 (c hr-ID scaffold_3; pos 8536028 to 8536212)
gaacttgatcgctgagaatcttgaaggaagatcaggtaatatatttaaaatccaaacaaaataagaagaaaataccgtttcttctttttttttttcaagggaaaaaaatgacttttcttaggggtattttgactgttgttgactttgtttaattatttgtttccagggaagagttgcagattgag

SEQ ID NO: 86625 - DNA, 373 bp, Citrus clementina; identical to SEQ ID NO: 82519
  Intron number 1 from transcript clementine0.9_011728m (loc us clementine0.9_011728m.g) derived from phytozome v7.0 (c hr-ID scaffold_3; pos 5421264 to 5421636 reverse strand)

SEQ ID NO: 86626 - DNA, 738 bp, Citrus clementina
  Intron number 1 from transcript clementine0.9_034405m (loc us clementine0.9_034405m.g) derived from phytozome v7.0 (c hr-ID scaffold_4; pos 6957785 to 6958522 reverse strand)
agtttcattctcttgtttttgaatctcccaataaggtaataaaagaaagtttcacttttcactcgtaattttgaattagggttttgccagggtttaaggctttttttctaaatttgactatttttcattcaatttgtgtgtgtgtgtgtgttttttttttttggttaattgaatacgagttcccatgtgctttccgtttatgttattaaagttggggacttttatcaagtttctctattttagagattagactagtgtttctgataaatcacagaattgcctgaattctatagtttttgggattaattggtctatctgtgtatgaatgagaaggtgcttcgggattgataagcgttgatttttattatgtatgtaatcagggttttactcggtaggataactgtttttcttttacaatttattgggattgatatgaatcagctggatttattttctctcttacatttgattccctctcccccccccccccccccccccgggaaagcctcctgctgttaagcgtcttaagtatgaatatgagaacttacaaaaactgaatatgagcagactttttttttttccatgcatttgaatattatccatacttgaatgcttctttgatgttttcttttcttcctttgtatggcatatcttcaagtttgacatgcaaaagcttgagttatatgattgttttctgtgtcagttgacacaggtgtctctgtttcatcaaacgacact

SEQ ID NO: 86627 - DNA, 380 bp, Citrus clementina
  Intron number 2 from transcript clementine0.9_001849m (loc us clementine0.9_001849m.g) derived from phytozome v7.0 (c hr-ID scaffold_4; pos 5097577 to 5097956)
agcttcgacgcccgtcttcagattttctttgacatgtgcgtacgcttctggcttcttctctttttgtttggttatcgtcggttaacagatcaacggtgatggaagtcgttcagttgatcacgtgatttctgccaatcttgatcggctagaatcatctgcttccggtgatacggttaataacacccgattttaaccgagttttatcgcgggaactggagccgttacctgctgcgggacaaatttgatttcgttgccccagttcgacttatttattatttgtcttctgtttttttttacatttagcattttatttgcccattttaaattcagtttaaaaattaatactttttctgttctgtgccttttcagggccgatagca

SEQ ID NO: 86628 - DNA, 1015 bp, Citrus clementina
  Intron number 1 from transcript clementine0.9_016681m (loc us clementine0.9_016681m.g) derived from phytozome v7.0 (c hr-ID scaffold_2; pos 7782331 to 7783345)
tgtgaaaggtaaattaagaaaaaaaaaatatttgacttgtgggttttaaaagctcgtaataaaatgtgcaaaattttcgttgacggtttactataatgaagagttgtgtcgttgatttgattctctctttagttctcgttgattttgttcaaaagaaaagagtccccttcatcgtggccaaatgccaccatcatcagttgttaccggttattggtaaaagatatttcaccaccttttttttttttttgattaatctaatccttcatacaattgaatcacgagctctctttaagtttaacacatgattctatcctccaaaaacgcattctattttgattactatttgtcttgtacatttttaggtgtaaacaagatcttcttatactaatagcataacttgtttaattattttgtaaaatacacgacgcaatgtagacagttcatagaaagtggcacgtgcgataacgtgtaataataaattaagaatgatttattgaagatacataattgtttagttaattatggtacttgagatacaagatttgttactcaagtttgcacacttctccttgatttgttactcataaacacagtcatcaatcatataatttgaaaaaagaaaagaaaagaaaagaaaaaagaaaaagaaatcaattatgtaccaacaactagcacaagttgagacagaaacagacagccatgactcatgagccaagaatttgatgtccgcacacacaacagcatcatctccttccgttgatcgatttaagtcacgtgattaaaatcccctcacccactttaataatttcatcttacagaacgttcaaggaaaccaagctccaataatagtaataataataaattaaaaaatccacgaaccgctaatataataaaatatttctaaaattccaacatttttcaaattcatgcatcttgccactatataaggttcaccctccatcaaaatccgaaagttgcaggttgcagttgcacactcacaattcacaaagaaagt

SEQ ID NO: 86629 - DNA, 562 bp, Citrus clementina; identical to SEQ ID NO: 82517
  Intron number 2 from transcript clementine0.9_034269m (loc us clementine0.9_034269m.g) derived from phytozome v7.0 (c hr-ID scaffold_3; pos 2292658 to 2293219 reverse strand)

SEQ ID NO: 86630 - DNA, 686 bp, Citrus clementina; identical to SEQ ID NO: 81968
  Intron number 1 from transcript clementine0.9_032863m (loc us clementine0.9_032863m.g) derived from phytozome v7.0 (c hr-ID scaffold_105; pos 66398 to 67083)

SEQ ID NO: 86631 - DNA, 659 bp, Citrus clementina
  Intron number 2 from transcript clementine0.9_015707m (loc us clementine0.9_015707m.g) derived from phytozome v7.0 (c hr-ID scaffold_7; pos 5572164 to 5572822 reverse strand)
gccgcggtgccttgcccctctactggtgtgtatatcattctccatctccataaagttaaataaccttaattatctgagtttctctagcaaaatataaattattggtcggtgagccggtggatatttagataagaaagtagatataattaaatattaataatacaatttcatccaatcaagagaaaatcctaaatgaatctccataaaattaatctattattttacaaacttgtaatattaatcacctgataattaatgattttagcaataacaaataaattatatgtgttgattagttcaactagtaaaactttttgaaatcacgaggaactattcttgtttcaaacttcaaaccccggcccgctctcaggaatgttaaaattgaaaacgagatatttttactatatttatgcttattatgagcttcaatattcctttcttcaaagcaatttcacaggtgacttgttattcaagaagaaattgtataactacgttaaacctaccaacttaagtggtacggtaggtgctgtgtaaaatcaatctttgcttggaagtaaagtaaatctttagacaaagaaccctaatccctcttgacaactatcaccttcaaaatttttaaggatatttgtattttcttctatgacacaggaactacaact

SEQ ID NO: 86632 - DNA, 736 bp, Citrus clementina; identical to SEQ ID NO: 80233
  Intron number 1 from transcript clementine0.9_025836m (loc us clementine0.9_025433m.g) derived from phytozome v7.0 (c hr-ID scaffold_31; pos 194014 to 194749)

SEQ ID NO: 86633 - DNA, 852 bp, Citrus clementina
  Intron number 3 from transcript clementine0.9_019159m (loc us clementine0.9_019159m.g) derived from phytozome v7.0 (c hr-ID scaffold_10; pos 4767406 to 4768257 reverse strand)
ctgtacaggtacggttgaaactctctgcttggtggcttcatgatataatgtctattcttgttaatgttaaaattgttttgagtgaagtttgctaaaagtggctcataaattggtgtgtctgattaatttgtttgactttaaaacaaatttttgggtttatatataatagcttttcagcaaatgttaaagcttggagtttaacttcagaataaagtgaatgttgatgttataccacattctcttgctttattgtatgattagtgaaatcgttgattgttattatcaatgaaatttgaagttttaattattgaaaagaagaggaagaatttagttcagagttcaatactgtttttgaatccattcacgttaggacttaggaatgaaaggggcttggtttacatttatgcattatataattaaaaacagaaaagccttatatctaagatttggcttattttccaaattttgggtttggtcttctatggtccaatagtgtcatatttaggatcagttgaaacccacccaattttttgatcaagaagccaaagagcttctctatgccattttatagtactttacaatattgaccttggttgatgcatgttactggttttccatattgtagatagagcttcagaagtaaacaaacctttatggaatgggaaattcttacaggcaacaacagttaacctagtcggtgtcttggagtgctttatcctttgtatgtttctagagttcttaaggatgaacttgtttacatttcaccctgtttaaataattttaatgtccatttgaagtggtaacactaatgtgaaatctttggttttaacctgccactgcaggtctggaacc

SEQ ID NO: 86634 - DNA, 759 bp, Citrus clementina
  Intron number 1 from transcript clementine0.9_020790m (loc us clementine0.9_020790m.g) derived from phytozome v7.0 (c hr-ID scaffold_10; pos 4444359 to 4445117 reverse strand)
gagtacgtcaccaaggttctcacatttctttcttcttcttcttttctattttcttcttttaatttaaaatcataacaattataagaaataagtattgatcagggagtccgttactccttgattataatttagccacatgataatatatgagcttcaaatgatttattgagaaacgcaaaagcctcactgctttggctaaatagcctcaatatcccttggttgaatcataaagaattttttgtattttcattgtttctcttttcaattttctggttcttcttatttaatggcgttttggctttatgtccgtactgtatgattttttaatcttctggaccatttacttaatggtatctagtgtttaaaattttcaattcattctgttttgttcggtagtataagcccaatttttgaagccatctgcagaagggtttatgtttacattagagccttcggtaactgcagcttttcttttggcctctataccccctaggtcaatcatttatttgcagatcgtatgtgatactttatttatatgtgaatttattgctatttgcccccttatattcatattaagtaccattggcatgtcactcatatcaaactgaagtttccttttgagattagtacattcacgaatgatctatatatttgttggagggagctctgttctgtaatttcttgtaagcttaatgtaacactattttctaattctatgatacattcaggtacaaaatcttgtggaagcatcaaaggcat

SEQ ID NO: 86635 - DNA, 1035 bp, Citrus clementina
  Intron number 2 from transcript clementine0.9_033611m (loc us clementine0.9_033611m.g) derived from phytozome v7.0 (c hr-ID scaffold_4; pos 4868975 to 4870009)
caatttttaaaatacttgtcatcaatcagttctgtgtgaactcagctggtgtctacaggatctaagctgcagaggatatggtgatggagaaaaagatgagtaacagattagaaaaatgttgcaggatgttgagaagtgaactgcaaatctatatttgtagttgaatatgacatatcagtcttgagtttcaggactagatgatatgtcggttatgtgacacaagtgagccgtatgacaagcctggtggatcagccaaatgaataagttaagcacgtgatattgcacatgctttacttattctaaacgactgaagaaggctgcgttttgagtgaagattctacacgtgtattgaagctagtttgaacggctgttaatgctgttaagataagtggtaaatttctgggtttgttacaaacaaacccaggcctggtgagctggtttctgggggttgtttctagagcaattcaggcgtgtatataagttgtcttcatttcattgttgtattgctgaagtgtgtgatagttttctcagacatcttgtatcttgtaaacactgaatcagtaaaggctctttctctctttcacagtggatgtaggtcacttggtggctgaaccacttaaccctttttgtgttggtgtgtgattgtttctctgtttttttttttggatatctgttgattttgataagtggttccacctagcattggttgatcataattagttctttgattaaggctaagtcaagtggatcttgggggattaagattgattatttgttggtcttggtccaacaaattagtttcagagcagacactactttatttaaacttgatagtggcaaaagatggctccggaaactttacaacaatttctgaagcattggcagccgtacctcaaaaaatatgaaggacggtatgattaattatgatattcaattgagcttctaacaatgtcatacaattcattttcgtaatggttcgtccattttgaatgcgctgtaggtttgtcatctttgttgccacaggaatttacgaag

SEQ ID NO: 86636 - DNA, 790 bp, Citrus clementina
  Intron number 1 from transcript clementine0.9_032745m (loc us clementine0.9_032745m.g) derived from phytozome v7.0 (c hr-ID scaffold_7; pos 2810677 to 2811466 reverse strand)
agcaaggttagagatccagcatccacgaacaagagagagatgagatcgagcgctggcaagagtggattagtagtttctttgaggtgtcggttgaggcacctgcgagtccaggaggcggcagccatgagagcagcgagcaaggtttgagatccaacatccaagaacaagagagaaatgtgatcaaatttaatgagagatgagagataaggttgaatttgatggtgccaaagattgtttgttgcttttaatgatgatcgatgatgaattgacaatgatttaaattgatgttgaggatgatattgattgttattattgttgatgatgaattgacgatgggtggatgatgatgaattgaattgatgttgaggaagaggaaaataaaggtggcggctggggtggggatttagggtttcttttcgtttctttcttttttttttcttttggcttttatatttatatttaataataaaaattaattaattaataaattattaatactgtagtgcgggttcaggttcggttgaacacgcaaccggacccgcatgtatccgggtttgaaaaaatgctacccggatctgtttttttatgcacctggggcgggtttaacccggaccggatcgtccaggtttatccgggtccgcgccgggtctgaaaaaattttccatccctagagaagaccattcctgagttaggaggaactcaaatcccaactccttttgaggttccgatctctacccaatggctctatgtataaggaattttcggctcttagacaaaacgaatccgtgag

SEQ ID NO: 86637 - DNA, 489 bp, Citrus clementina
  Intron number 2 from transcript clementine0.9_014010m (loc us clementine0.9_013980m.g) derived from phytozome v7.0 (c hr-ID scaffold_24; pos 2777053 to 2777541 reverse strand)
acatagcaaacagacgagaaggaaaaggtgctgcaagtatatgatggggtgtccaagatattgacgctttgttacttcgtgatgttttagtgacttaaatttgttaaattatatgggagaaaaaaaaaattttatgccattcttggatttcttgtcttttgctttttgacgttagcggctaactggttctaatcatgagcatggaatcccataattttatagcccgttatatcagtgaccttctgtcagagcctttttcttgtttcacctttgaagtggagagtgctgtttaattgaagtcttccattagctgtttaatgtttcttattttagttataattggagactgctgttcaatttgaaccttgtaggttcccattacctcttgtggtattttcattccaccgttttatctttatgtttatgcctatattttgttacatatgccaaaagcttatttgacctgatcctgttattagtttgaagagc

SEQ ID NO: 86638 - DNA, 768 bp, Citrus clementina; identical to SEQ ID NO: 80654
  Intron number 3 from transcript clementine0.9_026309m (loc us clementine0.9_026309m.g) derived from phytozome v7.0 (c hr-ID scaffold_4; pos 4202605 to 4203372)

SEQ ID NO: 86639 - DNA, 470 bp, Citrus clementina
  Intron number 2 from transcript clementine0.9_020135m (loc us clementine0.9_020132m.g) derived from phytozome v7.0 (c hr-ID scaffold_7; pos 5924775 to 5925244)
attggatctgggattttcctgccttcatttctaaggtaatttcacttttttattttcttattttgtggttttcaattttactccttcaaatttttatatgtatttttgtgttctttgctttctttcaaggttactttagattcttgcttattttgtttttcgaagcctggcagctggatttgtgcttttgataaattttcaaacaacattgtattttgtaacgtctagtcctttacgctttctttttcatttttgaagttggcgtctgatgactgtcatcttttgctatagatggtaatggtattgtgttaaagaagcaattttgttacgtgggtttgtataaagcttgatcgttcctgttgagtgggttagtgaagatattggagtttatgccgtttccatttatgtttttgaattgtgactgtgattctgaattttttttttattattattccgtgttggatcggcag

SEQ ID NO: 86640 - DNA, 582 bp, Citrus clementina
  Intron number 1 from transcript clementine0.9_016429m (loc us clementine0.9_016429m.g) derived from phytozome v7.0 (c hr-ID scaffold_2; pos 5171061 to 5171642 reverse strand)
gctagctcaggggttctttctgcaatcaccagaaggtaagtcacaacaaaccaaatcaggtttttgctttcatcttcagtgtttttttttttttttaatttttatcaactgatccaacagctactcatctcatgcttatgacacttatttagtactaattcagaaaacatacacaaatgatttattcatcaccaatatctttctattcaaagcgagtactcgagctatctgcactctttttctatcctaagtttacagtaacaatttttgtgtatacttcactttaaaacattaatgttacaggattgtacataattaatggcttagattttcagatctactggtttgactcgaaattacagagaaaggctcttttccagtcaatttgaaaatagacagaaatatctttcaagatttcaaaattgttatggttttttctccctcatatttcagattcaattacatccctttactattaaaaagattctcctactttcaacgcctttttttcctcctagaattgattcgcttttttttttttttttagtgataattcattggattggaatctacctgcacaaa

SEQ ID NO: 86641 - DNA, 268 bp, Citrus clementina; identical to SEQ ID NO: 83460
  Intron number 2 from transcript clementine0.9_028706m (loc us clementine0.9_028706m.g) derived from phytozome v7.0 (c hr-ID scaffold_10; pos 3341708 to 3341975 reverse strand)

SEQ ID NO: 86642 - DNA, 999 bp, Citrus clementina
  Intron number 1 from transcript clementine0.9_002308m (loc us clementine0.9_002308m.g) derived from phytozome v7.0 (c hr-ID scaffold_2; pos 1629654 to 1630652 reverse strand)
cgccgggcttcccaggcttcatacgttgcctgaaggtatggatttgacgaacttctcgccggagtgattacctcggcttaattgatagtgattattgcatgactgtttgagcttatagtgttatgtctcggtgaaatgtggttagagtaaagggatagtgtccgttatgtagtgttttacatgtgtgattgctgattgtattaatgaaaataatgtatttttatgcatttttatactctagctctgcaatttttatttattggcttgagactcatgtggacttatgagtttgagaacggatggttaaagttctagatgatcatctaactgaaaggcaaatgacttctgcatttgcaattttgtcctgtttagaatttttgttcttccagaaaaagaaaatggaggtataaatggaaagtgggaagacattatgacctggaagtgaaaagagtggggaatttaaattgaactgagtgtaaacaggaggaaaaaataagaaattttaaagtttaaagagaggggaaccataaggcggcgtattattgtttatcagtatttcaagttataatcagttagtttcctttagaatttgtttccaaatgatccgaagtaaaggtattgatttccatcaataaattggaaagatttcttttcttttcttttctttttcttcttttatggtcttgcaccattcgtaatcctcttaattagcttaatgtttgtcaacacatttacttggattacattgtctgctgcttaaacatatctctgctgactgaaacatgctgcttgttgctcataaccaactagaaggtttttatccccccaccaacaacaaccaaaaaaagggggaaaaaaaaagccaacgagaaggcaagaagggaactgattccactcttataacgaaagtgactctaaaatgtccagttgtgcctgcccttttctgtgttctttttgtttaaacacatcattgttttgtttcagggaaatctgctgggc

SEQ ID NO: 86643 - DNA, 579 bp, Citrus clementina; identical to SEQ ID NO: 85415
  Intron number 1 from transcript clementine0.9_017220m (loc us clementine0.9_012008m.g) derived from phytozome v7.0 (c hr-ID scaffold_3; pos 2050600 to 2051178)

SEQ ID NO: 86644 - DNA, 1001 bp, Citrus clementina
  Intron number 1 from transcript clementine0.9_023625m (loc us clementine0.9_023625m.g) derived from phytozome v7.0 (c hr-ID scaffold_10; pos 3237664 to 3238664 reverse strand)
caagggtggcgagcaaggctgggccgctcagcccagtatgtttcccttgctttctttttcttttcttctttttcaattttcttccgttttttagatttggttttgttactaaattttgattttgacccgctgtattgttggggcttagggtttaggtttggctttgttagaagtaaatattagtttgacttctctataatttttcttcataggcagtgataattgattgttaacccttgaaatgaaattatgaaaaatgaatattttttggtctgaagatagatctctcatcagattgagttttggagctcagttaccttgattgctaaaattatcactgattcccttcattgctgtttgtgtctatgattttatttattgtaggacttgaatatgtttcaaccacttgtcttgtagaggcggaaagaacttggaagagtctcttagctattccattttaatttgttctctcctagacaagtctatataaaatcttttacgatggtgtttttgaataatattctgggaagcagcactgttaattgctgattttcaatttaattgtcgttgtacatttaagattttcaatttcttttctgtaccttcctttctcttgtctaggtttagggtttctaagaagcataaagacattttctatttcttgtcatttttcagtggtaggtataggttgatttcttcgaaggttgaggacagaatattcaatgcttgtgtatttagctttgtgtgtgtattagatctcatagtcactgtgatatcagtgaaaaataaaatttgtggttaattccatgagaacatatttgttttcttcaggttacttatatcaaacacaaactttgttgatatcttataaagtacaggagatctaggactttccggcgctaaatgctagtgttgtatgtatcaggtgttaaatgatcaggcagatcagtatttttctgatgagactcaattctgtttttctcattttccagtttgggcgg

SEQ ID NO: 86645 - DNA, 932 bp, Citrus clementina; identical to SEQ ID NO: 77850
  Intron number 1 from transcript clementine0.9_005473m (loc us clementine0.9_005473m.g) derived from phytozome v7.0 (c hr-ID scaffold_3; pos 6539716 to 6540647)

SEQ ID NO: 86646 - DNA, 354 bp, Citrus clementina
  Intron number 3 from transcript clementine0.9_015998m (loc us clementine0.9_015998m.g) derived from phytozome v7.0 (c hr-ID scaffold_2; pos 4771858 to 4772211 reverse strand)
gtcgggcttggagttccggtgttgatcgaatcattgtaagtttctttgcaatgcccttttgaatttttcttcatgttgagtatataaatccataattcgtttcttcagtgagaaagaacattgtatacgtggttaaatgtgaaattagtagttaggattgttctttttgtactgttaagtcttaaatttcattttgttctgatgataaatggaggatataataattgcaaataaatgggaaattagatatttttgttaatccttgtagaaagtggttattttgattacaagtaagtttggataaggtttctggtcacaggtgactggtgggtcgcttgaggaatcgaaggaagc

SEQ ID NO: 86647 - DNA, 317 bp, Citrus clementina
  Intron number 1 from transcript clementine0.9_021060m (loc us clementine0.9_021060m.g) derived from phytozome v7.0 (c hr-ID scaffold_41; pos 1513237 to 1513553)
cctacagctgtccgtctagcggtcgcttaacgccggtagttagtttttcttcctttttatttgctttaattttttattcgatttatgaagttttttctgtaattgaatctgatggttttgtgttgattaaaggttatgtgacttttttattgcgcaatttcaatttttggagatgatgttgtccgcaaaaagtatttagctgtttgcatttctttttttgaattagttaataatagctgaattgaaaaatgttgatggatatatttttttttttttttgcaggactactttaccattttctttttggttaggaagaa

SEQ ID NO: 86648 - DNA, 647 bp, Citrus clementina
  Intron number 2 from transcript clementine0.9_021060m (loc us clementine0.9_021060m.g) derived from phytozome v7.0 (c hr-ID scaffold_41; pos 1513569 to 1514215)
gaggactggggtaatttttcttgctttggatttttattcctttcgctattgatgtcttggctgagacagcggtaacgagtattctaattttaaaaacaatatgtattgttcttaaatttatgtattgctatgataattggtagaagacactggaaaagttttaattagttagcaggcaaagtcgtaattgtaacaagggtgttatttttatcgatggtttcttgaagattacataaacaatctgatgtaggaatttattcatcttattttacttatttgaaatacattattggtatcacacaggttattaggcttcaatttttaggtaatacatctcaatatactgtctctgttcatttggcaatgcatctttctgcctttcatgtgaacccttgaacatatcttgctttcgatatgtatattggtcagcaactgcactttgacccttcagtaaaatttgcttcatattttttttttttggggcatgcagttacattggtggagcatgcattgaactgatattttctagaactttattttgggaaaaattggatgccatcccattttctgcttttgaactgcaatgcatccaccctgtattcttaaatttgacttaattcttaatatgcatttgtgcatttcagagg

SEQ ID NO: 86649 - DNA, 680 bp, Citrus clementina
  Intron number 1 from transcript clementine0.9_005760m (loc us clementine0.9_005760m.g) derived from phytozome v7.0 (c hr-ID scaffold_7; pos 3924537 to 3925216)
gaacaacttgtcaacttcataattcggccacccaggtaaacaaatcttcaatcttttcattttctttttcattttttcattttatttataatattacatgggttgattttctttctccaagttttgtgtgtctggttgatgaggacgaggaaataaattcggacttggtgcttttagaggaaaagatttgagatatattttagttttcttgcatcaatttttggttgctgttaaatttttgtggatgttgaattaggttgaattagcctgtttgttggatgtgttcaaaagtatagatcttttcgagttaatttgacggttacttgagagtaattctatactgttgaaattatttctttatggtatttgtttttagtgctaatcttgtcaaaaatgaacttttgttattgacttcaattggaatttggattgggtgacgtgtgaggctttgggatcgtttttcttgttttagttatctgtggacttggttttcatataattaatttaatgtgataacgaaagttaagaaatcaggattttggatctctgaatctagtaggtcctgaataatttattgtcttgtattttttcagtttgacaacagaaactgtgcttgagtcaaatgaaaagatcataagtctatatattttcgtgatgcagagctgaatacagtccagaac

SEQ ID NO: 86650 - DNA, 804 bp, Citrus clementina; identical to SEQ ID NO: 81910
  Intron number 1 from transcript clementine0.9_020267m (loc us clementine0.9_020267m.g) derived from phytozome v7.0 (c hr-ID scaffold_3; pos 566156 to 566959 reverse strand)

SEQ ID NO: 86651 - DNA, 784 bp, Citrus clementina
  Intron number 1 from transcript clementine0.9_000419m (loc us clementine0.9_000421m.g) derived from phytozome v7.0 (c hr-ID scaffold_4; pos 6845860 to 6846643)
tcacctgtcaggtaacaatctgtaattattttctttaaaaatttccttttaatggtttcttgctgtttttgtggtttttgcggtttttgcgttgtgatggaatccttaatttgttgtttggtcagtcagaaaatcaatgaaaagggaagaaaataagattgaataatttcttcaggtctcttcttgttagccaactgacacgtcagtctcacttaaaaacagcataaaaaaatagagagagatgttgttcttctattgctgagaaagtgaataaggtcaataatttttttctttttgaaagaatagtaaacccaaatcatcgaacactataaggagaaacccaaatttctgcattggtggtttctgattttgctaagcaggtaattgtgtaattatcttttttatttttgatgatttcatttaattgtttgattttattgtgtaattatgccattttcttacttcttccggtttttcgtttgtgaatctgtacttggttactgagaacatgaatgaaaagattgaagaaattaaaaagaaaagtgggaaaatgatgccttttttttgctattttaaattttcaggttttctatttgtcaatcaaatggtgtgtttagtgttaaccaaactttgaaggtttttttaatattgatatacttttttttcttatttattattattgtatttaattatttgctgcctttactgtagagtcttatcattgttcttattttttgttgtgaatttgttgttttaggtgtgaataagaagtaaggggtttatt

SEQ ID NO: 86652 - DNA, 691 bp, Citrus clementina
  Intron number 1 from transcript clementine0.9_025135m (loc us clementine0.9_025135m.g) derived from phytozome v7.0 (c hr-ID scaffold_4; pos 2836695 to 2837385)
tgcttcgctcctcttcctcttctcactcttagcaggtacatatacattaatcttatttaagataaagttgttgttcgttcaccaggaaaaaatctcatttgacacacacttaatttattttaattagcaaagatttgtttctctaaaaaacaaacaatttgcatatctattatctgcattaattacttattgtagagatttgaactttttgagtaacgatggacatctcaaattttttttatcttaaatctgatcccaaatgatgtatcgttaattgagtggttggtaattctttataagattgattgaattaattgtattatctcactaactaattaatgaatgccacattatttgggataaaaaaatttgagatgtataacactacttttcttcaaaaatattgaaatgttaggtataagacaacaattacatgattatgacatattaacctcataaatgccggtacccaattcgtcactctatataaacatcgactcattacaccatatcgaactcatcaccaacacgaattaattaattagccaaatcaatttcttatcacaatgaagaaagtctccacagcttccaatgcttcccttctcctccatacatattttttaatcttatttatttatattttgttcgttgagctagtaaaatctcatacacattatttttagcagtaacc

SEQ ID NO: 86653 - DNA, 443 bp, Citrus clementina
  Intron number 3 from transcript clementine0.9_035048m (loc us clementine0.9_035048m.g) derived from phytozome v7.0 (c hr-ID scaffold_2; pos 3885895 to 3886337)
aaaggttataatcatttatgagcttaatttattcatacttatataataaatagaaagtgatatcagttaacgagtctatctcttccacagacgtgtggtagagccatgaaattttcagaaaaccttttttaaaattcaattaaaatttttatttgtcctcaataaaaattgtgatttatttccatcggttttgaataatatatataaacaaataagctcaaatttatattttcattgtcaaaatctctttaaagaatttgttaaatttaaaattatgtaaacatacttgagagaaaaatctaattttttacagtaaattaaatttgttcctactgatcttgaaatctggcaacgccataatatatatatttttaaaatattgtacgtaattatttagatatataagtggcatcacatatatagtttaatttgaaattgcagat

SEQ ID NO: 86654 - DNA, 927 bp, Citrus clementina
  Intron number 1 from transcript clementine0.9_008480m (loc us clementine0.9_008480m.g) derived from phytozome v7.0 (c hr-ID scaffold_3; pos 8570577 to 8571503 reverse strand)
gtgccaagattccggtgcctgacactcgtattccggtatgttattattattatgtgttcatttgtatgtttatgtttatgtttatgtaattgtcagattctttacatgaaagttgattgctaatgatgaatctttgtatgagttgtgtgttggttttgagcttttttacttgatgtttttggataagatgctttgatgaatcagtggaatcaatatagctgaattgggtgcctgaaaaaaacattttcatagcttctgtgtgatgtgttaaggttgtttctgggctgcaactgtatcttgtctgatttaggcgcttgttatttgattttcagtttgctctttgtttttattttttgtgatttgagacccaacaggatcatgtaaatcttgtcctgcgattggcagcacgaatttcaattagattaatagctgcatttgtggctttctactgaatctgaaatcggctgttccttgcttcattttccttttagaaaaaatattttatctgagaattaggatggtgctcctggattgaaaattgacggttgtaattgaattagtcaagcaatttgatgccttttcacaataaatttgaggaagaaagcagaaccataattagataaattgatccaatatttgttcattaatcatagatttgcaagtacacaatgatattcttattcattaaccacaagcttccagagggagttctgttatgagtgacaagcgaatgccctattgatcaaaggtcatgagctctgtaatgagtgtgctttctttagttgatcaggaaccttgcctgccacagtagaaactccttcactttcttttttcctctgaaacaagaaaataacctttaaatattctctaaacagtttgctttaattttcaggacgtttgcaaacaaataacaaaagaagaagctga

SEQ ID NO: 86655 - DNA, 697 bp, Citrus clementina
  Intron number 3 from transcript clementine0.9_025618m (loc us clementine0.9_025618m.g) derived from phytozome v7.0 (c hr-ID scaffold_105; pos 251843 to 252539)
cctcagctgctgatattgaactgcaggatttacaggtatgattgtgaacataagtgtaaatatcaagcagcacttggtgaattcatgtaagaaacttatcatctctatgagctcttataaatttaaagttgtgttagagtattttatggcatggcaattatgcttgattctagggattccatgatattggagatgaaatatgctgatcattgattaattttagccatttacttgatgatctttagcacttatatgtaatcaaggcattccttttatgcatgggcttatcaccaactacatataaaagccttcttctgtatttcttttatatattgaaatgcaacttcgtgtcagttgtctctctttcccctttttttcttttttagtttgctttcgttgtcttattaagtctacaagctgcatgagatggtaagcttttgaatattatggaagaaggaagtataaaaattgtgggattgcagtaacttgaatgcattgcgtaagtcaataattcagttgttaaaggtctctaaaagattgattttgtaatttgtattttcagtgctggagtgcctctgttagatttagaaatcctttctgtaattaatgattgttttagtagtactatgtctagatcagagcaaatatcaaatatttgattgtttgtatttttaggaccataatccaaatactgttt

SEQ ID NO: 86656 - DNA, 557 bp, Citrus clementina
  Intron number 1 from transcript clementine0.9_000986m (loc us clementine0.9_000986m.g) derived from phytozome v7.0 (c hr-ID scaffold_7; pos 4792939 to 4793495 reverse strand)
cagtcctcttcgtatagagtacgtagaaatatacattcattttcagctgtattttgcactaattctcgctctctctctccttttcgtaattttgttttgaaatacatttcttttggttattaagaaatttcttgtggaaatgaaggaacctgaaagcttgcttatgattcctttatttcctttttcttgcagttcctcgctaacgaaacagagctttagctcttatttttattttataattagtctcattgaagcttgtgccaatagatattttattaagcttagtgtttgaattttgatgctaatgctagtttttgagctttgaaattgaaatacttgattaggttggttatggtgcattaactgcttgctaaaatgtcttagaagagcgagaagctcagccacatgtttggttatgtatccagaaatgcaattttactgtgataaaatgtacaatatttgcattaacaaatgctggtggagtttaaattggtgctgattaattatgttgttaatttacaggttttatcacgaagaacttgctcatcatttaggaa

SEQ ID NO: 86657 - DNA, 429 bp, Citrus clementina
  Intron number 1 from transcript clementine0.9_028575m (loc us clementine0.9_028575m.g) derived from phytozome v7.0 (c hr-ID scaffold_24; pos 2277987 to 2278415)
gaggttttgttcattacttcctttcaccttcttattaattttgtttttattgtatgacgatttgtggtagattcatctctatggattcaagattttctcgtaatctgagttctcttgaatttgtaaaaatcttacttaaatatttgcatggggtatgctctgggaggattatttaaatgatggtgcgtggttcagatttgttttatttaactttctttgtaaattagttgccacgatgtaggagatggattattgagtcaattagggttgtttcagttttcctttttttttttttgtgttttcttctttatctgacctcatcatttctaaaactctgataaaaattgagaatttaaaaagaaaaaaactttttaatttaataaccaccgatcacaactttaaatgttgcactacaggacgcgtcgaaga

SEQ ID NO: 86658 - DNA, 514 bp, Citrus clementina
  Intron number 1 from transcript clementine0.9_016249m (loc us clementine0.9_016249m.g) derived from phytozome v7.0 (c hr-ID scaffold_10; pos 5458410 to 5458923 reverse strand)
atcattcgaactgtcctcaccctcgggtgcaacaggtactgaatttgtttaatttgctttctctgcgtatcttgttactttcattacatgctcaagctacatggttgcttggataacacacgtattacttgattggatgatcgagtttagaaagtccttggctaccaaagacaattattttgtaaataagcgctccttttgcttcattcttgaagggatttccatgagtaaatggtagactgcttttagccactataagagaaaatgcagataatgatgctaatccatacaagtcaacacatgacacatgaagaaaaatacaaagtagtatttaggatcaactttgaagttatgtgagaacagaaccggcatgtgtttacattgtcaactgttgtggtgcattatcactgttaaaagattatggtttctttctggtccttttgaatcaaacatagttataagttcacgttttgttgaaggtgtggtgagccagccgctcagagtgtgttttccg

SEQ ID NO: 86659 - DNA, 299 bp, Citrus clementina
  Intron number 1 from transcript clementine0.9_004854m (loc us clementine0.9_004854m.g) derived from phytozome v7.0 (c hr-ID scaffold_3; pos 3467689 to 3467987 reverse strand)
cagtactggcattgctctcaatcacgtccctgctggtatatcatttttcaccctttttatgtgttgagaatttatttatttattcttttatgaatatgacttcgatgatgaatcttcactttgacggtagaatttcataccaaaaaagatcggttttatttgttgattgattgatccctgatatttgattttgttttagaattaatcgattcaaagttttgtttttttgaattttttagtttgtgttgtatggtgttaacttacgtgttaaagaacggaaaaaaatataggtgttaaag

SEQ ID NO: 86660 - DNA, 909 bp, Citrus clementina
  Intron number 1 from transcript clementine0.9_010738m (loc us clementine0.9_010738m.g) derived from phytozome v7.0 (c hr-ID scaffold_4; pos 6979972 to 6980880 reverse strand)
gaacaactcaatgtacgtatttataaattataattcacctatgtttctttgtaatcgtttttccttttctttttctttttagggtttaaaatttagttttggttcgattatcttgagagaattagagaatgatcgttggtttagaattataattttactctacaaatagtttcataatttggtcaactcagttcttctcttcaagtgtctatggaaacaacagaggattttttaagaagccaggggaataacagaggaagctaaattagatttttttttttttttgggtggcgtggggtggggggaatgtgtatagaagaagatcctaatattcctaagttatgtcaataatcgagttggcgtttgactttgatcagctgtaaagaaagccgtttatgaaagaaaataaaactttcgttcgcagagtctcctaattctggctacatataagagatagtagtaataatcaataataaatgaatagctacactgtacgaacggttgtgtagctgaatcacctgcccaaaattgtacttacaagatctcgtagaactgtccagaattagtatgattaacttagctgatagcattttaggaattcttagctttgagttagacttgaaggatgtaaattgagaaataaaggactagaacaaagtaaagtatagattcttgttgctgatgaattgtttaatgtgttgctgtcaagctggcaatgatatgcacttttaggttaatgggtactttactcaatataaattggaaaagtataagatctatttttgcatttttattttttttggctgaacaagttttttatgaatgtaattgttaatgtgacttctttttttttttttttttgtaatttatgtagagatcattgaagatcctcagtatttttgtcctccc

SEQ ID NO: 86661 - DNA, 888 bp, Citrus clementina
  Intron number 3 from transcript clementine0.9_000583m (loc us clementine0.9_000583m.g) derived from phytozome v7.0 (c hr-ID scaffold_10; pos 2415928 to 2416815)
aatatttagagctcctggggcaaaagcacagtcaggtattatcttttattggtataatcgaattagctggttcctatttgtaaatataagtcacttattacttcaaaatattagttgtttttcgtcacttggtgaacttaaatgccatcatgctaaaagcgggaatgatttatggaacaaaaatgaaatctctaagggaggcagcttggttgcttcctttgtttcataaactaaagtcatgctgttgtctgatttgagctaaaacaaattgaaatgtgaccggatggatcgtgttgttggatttgacattatttaattttccttagcaaggttgccttgtaactcctgagaaatcagactcccatttctgttgccttagttctgctcttattgtttttttttttgggcctaggtatgcaagcccctcctcaatgattgttttagggcttagtgacattgtaaaggactgattctactcgagaacagaacccattaacctatgagaaggtggagaggcaggtttgtttaggtcttgggtgccatttgattagcttcaggattttttttttggtgggggcattcttatctatgctatatgtgctatactccaacttccgttgtggtctgcttacttggattcctttgtcagttctctttttagtttttttttgccacgtggctgtccttaaaatggaattcaacttggtctttttgtgtaatctcccatttagttgttttttaaaatttatgggattgccttcttactatttgtaaacatgcctgtaaaaattattcttttattatgaaagtacaaactttggtgctttttattgatcaaacataattgtaacagggttaggtgttcgtgctgttgaaaaagggggagtt

SEQ ID NO: 86662 - DNA, 905 bp, Citrus clementina
  Intron number 1 from transcript clementine0.9_029315m (loc us clementine0.9_029315m.g) derived from phytozome v7.0 (c hr-ID scaffold_2; pos 8425376 to 8426280 reverse strand)
tcccaaacggaaggtttacataatcgtcagtttaggtatgcctaacgtttttacactaaaatagatcctaattatttggcaacttagcttctgctaaataaacaagttttactgcttgcttggggctctattggggattatatatatatatatatatattccggaagtagtggcatggctctttttataaaacaagagagaatggcttgtctagagtttgctactgcgttttaattatcaggatatgttcaaaaattaatattaagagaactatgcgacaggtagacgtcagatattgatatctatgtataaaatttcatttacctaattagtttaataatctggtaaaatttcctttcatgttgatcgtggagtttttggttagagaaagtttctcaatttcgtattttcatggaaaacttacttttaactcttattatttccgaatgcatgactccaaagcaattaatagaagaaattcaataacatgaaaagaaaattgtcaaacattataaaggattaatcttccaaattttacgtgcacataatgttcttgattcttgccatatgtgaatgacacaatggtcttgattcttgctatatgtacaataatgatcttaaatcttatgatctatgcatcacataatggttttgactcctgccatttgtatatatcatgatgctcttgatattaacaaatgttaatagcattatatacttgccatatgtgtgtctcataataatattgattcctattatatgtgcacgtcaaaattgcatattcttctgattcttgaaaaaaaagaaaattcaaattgaatgttgaaggtattggctcgggtcttttgggttcttttctatttgctggagtctggtggctgcgtatctgggtaaagaaaagagag

SEQ ID NO: 86663 - DNA, 404 bp, Citrus clementina
  Intron number 1 from transcript clementine0.9_005873m (loc us clementine0.9_005873m.g) derived from phytozome v7.0 (c hr-ID scaffold_24; pos 3107074 to 3107477)
aatttgcacccggatcattcggcactgttgcaagggcaagctttctgtatcctcaacttatccggagatttgcaaaggatatgttttcatttgttaagaatcaactattcaaagagataatcaaactcccataagatgaagctctttcaaaatataatatattgatatgcatgtcataaaattttgcctttttttttttttgtttccttcatcatttatttctttattcggacagggtttgaagcaacactaatattttgcactaagcattatgcatgtactagttccatgcattcaaattacgtaacagtaatcccccgtgtgcttttcaacacatacagtgttaacattttcttcaaataatttcaggaaagaaacaagcggaaacctctccctccaggccc

SEQ ID NO: 86664 - DNA, 639 bp, Citrus clementina
  Intron number 1 from transcript clementine0.9_033251m (loc us clementine0.9_033251m.g) derived from phytozome v7.0 (c hr-ID scaffold_135; pos 76841 to 77479)
gggtcttcctcgtgagctttgattttcattatattgccattttcggttagtaattggtcatcacagttatgaaattgtttgattttctttgccatatagcctattgtttgaatttggagaagatgttatattgttaattttggttaagtggtgtgtcttcactgatttgggaagtgttgttgggacgttatgtgggcaagcatatagtgcaagcaaatatgaaatgctagggatatataattaaaggaagactagaactgagaggttgtgttagtttgtttcttttgtgtgtgttaatttgtttattcaccttctgcaatcaatctctatgcatttaaagttagttttttttttttttttttggtgtgtatgttagttagtttgtttgctttagggtcctttctcagaaaagcagcaaagtaaaggaggaatggagctgagagggctttatatatatatccacatccatccattattgtttcttttctgatcttagttacacaaggttctgtaatttgcttttcttataggatgattatctatggttagcgaaagactgtatattttgtaatattacattctacactgcatgaacaattaattatttgttctcttgtagaaaaaaatccaactgggaca

SEQ ID NO: 86665 - DNA, 919 bp, Citrus clementina
  Intron number 2 from transcript clementine0.9_033251m (loc us clementine0.9_033251m.g) derived from phytozome v7.0 (c hr-ID scaffold_135; pos 77540 to 78458)
ctcaggttcaggaagtaagtttgggtttatgtcttatttaatttaatgttttaatgacaatgatcttcatgcttgtaagaataatatgactacccttattggcttgctatcaggggtggagctagcataaggctagagggtaccatggcccctgtagaattttgaaaaattttagggtttctaaagaaaatgtgaaaaattagtgtaaaatatctatatcggccccgtagaattagaattttacatatgtaataacgtaaaaattacaattttaaatttggcccctgtagaattttttccctagctccgcccctgcttgctatcaatataaatattgtttgattgattataagcctttttttttaccgaaattggttaggagcttgcttagtttttttgtcaacacatttctatatgttttcaccatgtgcattttagcctaggcagggcattttagaatttgtctatagctctagtagttttgaaacaagtaataatacaatagagttgtttctgatagttatcatcattttttcaccttgtagattcatacatatagcaaagaattatatttgttcctcaatccatcttcagactcccatgcttgtggatactctcatttatacatctacctaaatactcacacaaacccacagataattttgcttgtgtcattaccttttcagatggggacatgcacaaaaatatttttgtactttgtgtttatctattgaatacaagtaaatagatgttttcagtctattttagttattactttatctctttttgccagcaaaacttgttgacataattgctctttgttgtgcttttaaagttgatattttgtcaattttttggtaatcatttttcgcaaaccatgttttaaatataagtgacaggtccatactaaactgaggaa

SEQ ID NO: 86666 - DNA, 714 bp, Citrus clementina
  Intron number 2 from transcript clementine0.9_002090m (loc us clementine0.9_002090m.g) derived from phytozome v7.0 (c hr-ID scaffold_3; pos 6940990 to 6941703)
gaaaggtacgtactagattactggactcatacgataatggaaaaattgagtcatgatttcatttggtcattggaagtagaaatgtaacagcatagtagaattaggatgctcaagatgtagaaatgtctagcattggtgcagacatgtcgcataatatgaagcagctacaggttatagatgttttttgtaatttctattttggttgtgttacacattggtatggtttatgtacattacagataaaccatgatgtatgttgatattgattgactattggaaatggcaatttttgttttagatgtgttatcgtttgcttgggatgcactgtttagagactgaaccattggagcaatcaaaattctcctgtctttattgattcctgctttaactttctaaaaagtatttcaaatgttcttttcctgtgtatcatattgaggaaaagttatacacagaggcatgcagcagtgttactatttagatctcagggttctgaatattagttgttgaccgagtgaaaaagttgtcagtgtgatataaaatatttttggggaaattgttttctgttatgttcatattctggttaaggttcacatttgtgtgtattttagtctgcctttcactttgcacatattaatgtctttttttttttttggttgttgttgttcatacatgcttacagaagagactaatctcaattatttacaccattcgggg

SEQ ID NO: 86667 - DNA, 603 bp, Citrus clementina
  Intron number 2 from transcript clementine0.9_006216m (loc us clementine0.9_006216m.g) derived from phytozome v7.0 (c hr-ID scaffold_2; pos 4792239 to 4792841 reverse strand)
tttacgagtctgatattcggcatccaaatttagaggtattattgtgactacttggttaatgcttcatttgtcagcttagaagatgtaaacgaaattccttacttgttagagataattttaacaatatacttgagttgtagacaaggagctgtggatataattaggagataggtaatgcaggaagaagggaataattaagatatactttagcaacattatactgaataacctatttatacatagtttgcccattgtagtttctcgacactccatctgctccgcaatgatattttgattttgtatgaaataaacaactactggagaaaactggtcatttaagtttatcctttagcatgtttgaattcatcaagtttttggtgtatataattgttgtgcttcttgcttcccactttttcatttctactcactcggtgatttaaaagccacaacacctgaaaagtatatctttagtttgatatggatgttgaatattgtgcgcatggaaattaaatttaacccctgtctcgttagagtttttgatttgataacatgtttctttggtaagtaggtagcaaaggagcagctgaagcaggttattacaag

SEQ ID NO: 86668 - DNA, 449 bp, Citrus clementina
  Intron number 2 from transcript clementine0.9_029198m (loc us clementine0.9_029198m.g) derived from phytozome v7.0 (c hr-ID scaffold_58; pos 1354384 to 1354832 reverse strand)
gttaccatcctagcatcacggtatatttataattcattttgtttctattttgagccacagtttcttttcatcaataacattgatgggtcattttgtatatatttttttacctgatttttctttcaccactttggtgtttatttttcttgcgtaattaatgatgatgtactaagtattttgttaaggaaatagtattgccttgatataagcagttttttttttttttttgaatttgaagtgaaatctatatagacgttgaagaatcttttgaatcgatcatttctaattctgtgcaagtttttgcttatttattggtcctaaccctagctggattaacaaatgaatttgttgcaagatttttgcttctttttggttaattaattacggattatgctaatgatcttgaatggttcctaaattaatttttcaaaatttaattccttatacag

SEQ ID NO: 86669 - DNA, 768 bp, Citrus clementina
  Intron number 1 from transcript clementine0.9_005458m (loc us clementine0.9_005453m.g) derived from phytozome v7.0 (c hr-ID scaffold_4; pos 6140756 to 6141523)
aaggctcaaagttttgatctttaaagacaattaaggtacacttcttttttgggttcttttctcttggcttttaacttgtcttctaatttgcttggtggtattttgcttccttgccattctactttgttttttagcatctgggtatttgtgggctttcttttttatgccaagaggtggggtttcactttgagatctataatgaatcttctttagcttgttcttatctcttgctctttggcctgtatttttaagctctaaaggaatagcatttgtatggtattgatccttttcgttttacttttgtattttaaggttttaaaagattggaatttgatctacgtagctatgattctcttgctttcagtatatgattgtaaatttcttgcagggtattattattattattattatcgggaagatatcatttgatctatgttgcatgcagctataaacctttctttaagctcttttggatggttttatgaagtggtatttatattttatcctcgaattgttattagagtgactatttggccttactagatttgaggtttcagtacttatgttggcttgcaatatacaatttttatttttttgtgtcatgtggtagtttaattatattttgtcttgtaagggatgatgtatttatcttgttttgtgtttttcaattggacatgctatttgtttgatatcttgtaagtttaaaaaatttaactgcctagtgattgattttgcttttggtcaattgtagaaaccattgtactgtgg

SEQ ID NO: 86670 - DNA, 796 bp, Citrus clementina
  Intron number 1 from transcript clementine0.9_025900m (loc us clementine0.9_025900m.g) derived from phytozome v7.0 (c hr-ID scaffold_2; pos 2034117 to 2034912 reverse strand)
gagctgttgctcagattatcggaagacctgaacacgtacgttaatcttctcttttcttttctccactctttctggtttttttttttttaagtttttatattaatttccatgtataaacttagttttggaagcttaatttcttgatcaagtcctatagaccttttctagatttgaagaccgatttattgcttctgttttttttttcttttttatgtcctcttaaaatcaaaataagtattgtatcatccatcatgggaagatatgaaggaaatatatgggaatttgtattattttttcttatataagagcatcattgatttatgcaaaaagattactaatatgcactttttattattattattattattattcttcatggcaaatgcatagtagttttggaattatcagattatctatttactactagacagcaaagacatctggttgttttttctttttataattttggtttactttttgaaattgacattagatagttactttaaataatattaaacgcccttcaacttgcccctaaaacgttgtcgcattcggtgcatttcaaaaaatcagaatctattaaatatatttgtcaaaatcattcgtaccaaaaacgtgacccgaacatgtggccatacgtttgtgattcttatctgcaacaaacatcaggctagctttattccaattcgaacacaaagacatatgtgtttattatattttggcccccatcaaccgtacagatttcgacatttacccccccataatgaatttccctttgaattctatgcagttagtg

SEQ ID NO: 86671 - DNA, 378 bp, Citrus clementina
  Intron number 2 from transcript clementine0.9_003181m (loc us clementine0.9_003181m.g) derived from phytozome v7.0 (c hr-ID scaffold_7; pos 5473585 to 5473962 reverse strand)
cagtctttttcctggtcattgaaggtaatgagcttattggttctaaaggaaccgtattaatattgtcacttgttatgcttcaattgcttgcattcttgataggtctgagaaacaccattttgatggtaccaatgccctactttgcattttacatgaatgaagataaaatcctgagaaggagattatgcgtttttctgtttagaatttgtagtcttcctgcttttccttttcactggtgataaaaacttttgtgctgattgacctcattgcattatcttagccaactaagattttggttttttgtatcttttattgccaactttttaaatttatatttcttatattttaatgttatgcagacgttgttgggctttgtga

SEQ ID NO: 86672 - DNA, 429 bp, Citrus clementina
  Intron number 4 from transcript clementine0.9_002878m (loc us clementine0.9_002878m.g) derived from phytozome v7.0 (c hr-ID scaffold_2; pos 7574114 to 7574542)
ctctgtctggctgcagctgcagctattataaagtggtatcagatctttatttttacatatttgtgaaaaaaaaaagagtatgtttttgttccaaatccataactccctctggaaggcgcaaaactgttaatgttcatcttaaagcataataccctaatgtccaaatctgcacattcgaactcttctccatgtgcaatgtgaacatgtgattttgcagtgtgtgatgtaatgcacacatggaaaaatttggtttacatccaaggaagacctcaagtaatgtcgttgctttgaattatcttgtaatattgcagttttagcagctgtcttgtacaaatcttgttctgtagacctctttcacctttctgcttttgaaaagtttcaatttcttttacaggatagaagcagagaaaggggtcattgtcacaaacc

SEQ ID NO: 86673 - DNA, 610 bp, Citrus clementina
  Intron number 1 from transcript clementine0.9_032859m (loc us clementine0.9_032859m.g) derived from phytozome v7.0 (c hr-ID scaffold_2; pos 3533052 to 3533661)
tcaaatcactcgccggcgccggcgccaccgccgatgtaagcatacggtgatgaaacaaaaacaaacgttatgcctttaatcgtgcatttccaaataaacacatattttaagtaattccgaaatttaccacgatctcccatgaatccgaacttgcagcttgttatggagcttcaacaaagttgctgctacttttgtctagcttccgaattcctttctcttgcctcagttcaaggatcggcttgcttcaaacttcactgtacacacacacggaagacaaacgggagagagagagatgcactgcactcatgccacagatttcttgaacagttaacttccaatgggctgaagttacttaaatacagtggttgagcgcagggacccctcatgtgttagtacaaaattgcccatcccattatgggcgaaaataacacaattaaggatatacttgtccataatatactactgtacagggtatgtcaaaattgctccataatatttgacaatagtcacgtattaattcggtaaaatatagaaaacaattagaatgatttatgtcagtccacataatgtgagaaataaatctaacatacggttcattggtgtcccgaag

SEQ ID NO: 86674 - DNA, 657 bp, Citrus clementina
  Intron number 1 from transcript clementine0.9_002646m (loc us clementine0.9_002656m.g) derived from phytozome v7.0 (c hr-ID scaffold_4; pos 5027093 to 5027749)
tcttcttttcgtctagttttgaattcttcttcgaggtcgaggatcgtgttcaatgctctagtctatcctgttgaattacttgttcatattttacgctgattttatttgaccacctctagaaactcagccttaaaaaaagctcctcagattcactgtttcctttgctagaattttctcccatgcttttgttggtggactactaaaaagaaaaaggataaagaaaaaagaaaagctttgatccaaaatttatccctggtagccacacaaagtggtagttcaattattatgcctacgctttaaagattttggtaatattttgtttggcactataccggccaaccagcacataagtgaatattcttaacaaattaagacgcaatgttaatttttaagacggtaatataagttgaacaatatggactctttgcgtaattaatattttaagacttggttgttgaaacttgaaactggaggtgggggtaggtttagaaatttttcgtcttctagatttttttatttgactattcggattatccataatccatttcttctctatataatgaaggttggttttggatagacagctatatctttacgttatttacgtttgcttggttccttgtgttgcagttgaagtttttgtttgtctgagaatca

SEQ ID NO: 86675 - DNA, 922 bp, Citrus clementina
  Intron number 1 from transcript clementine0.9_011450m (loc us clementine0.9_011450m.g) derived from phytozome v7.0 (c hr-ID scaffold_10; pos 1692451 to 1693372 reverse strand)
tgtcacacttgttgcacggttttttcgttttgcaggtatttacatgttcactctctttttatttttctgctttttaagtaattctacaactaaaaatcagttcaaaagctggtagctttattgatcggcatcgctcgtatgctgctaaagtttctttttttttttcttaattggtttttttttttccggttcttatgttaactgtgttttttttggggcgaaaaaaatatattattattctcttttaaaaaaaaaaaatcttcagaagtaacttaatacttaggtttatgtttgtggtcgtgtaattctttgtgtctttgaatgtaagcaaaggtcagttgtttgtctaatctgggtatttgggcttttgttgatttaaataaaagttttgatttttagtgaaaaatgggaacatggtaagttgagggtttgaacgggatttttggtatgattgtttattcaatcaaatggaacattttttatgattcgatgaatttagtttcttgtagaggattatgtgtcggaagcacatgcttgcttggttcatttcgtgttttcaggaatagctgcaaatttattgatttcgtttcaaaatctttgttcttgcatgtgtgtatatatttgacaatggggatgtgagattgtgattatgccacagagttaatacattaccgcataggattaccttgtgaagacattgaaaagggggaagttctcgatttctttcttttatcatcttagattgtggctagtagagtagtaacattgttttgtcaatagtgagcaccattttccggtttcatgttgttgcaatagatgtttctctggatttgtgagttaatgtttcttaatagacctcttttcttgtaacaatgtattgaatacagcaggtcctgttttgcttccacaaggatctgtgtct

SEQ ID NO: 86676 - DNA, 824 bp, Citrus clementina
  Intron number 1 from transcript clementine0.9_031177m (loc us clementine0.9_031177m.g) derived from phytozome v7.0 (c hr-ID scaffold_85; pos 325385 to 326208)
acaaaaagtcccgatcctcttcttcttcttctaaggttctttccacctttttttgtttgaattcacaatcttctcttgtttgatggcaaagttggtcctttttagtttttttttttggtttttaatgaattgaatttagcgtatcatagactctcctttaaagggtttgtgtgatgtagttcaataagttttggatgctccgaagtagttaattttagttatacgtagtgtttgtttaggtcatatgggtgtcttaatttttaatttttcttatatatcaacagtcttcagttgttggctgctcttgatgactgttttagtttatttaatatattcttattgaatgatcataataatatgtgatgcaaaattgtttatcaggtggtttacaattgtaagcaaatatatagaagctgaaactgatcattatacttttagtgattgctgatgcctgtagaggtcgatttctgacccagaaagtgccttacacgatcatatcagccttgttagtgggaacacaaaatgagtaagagtaagtatgtgttcttgaggagccaaaaatagggtgttattttctgcttctcttaatcaagttctgtagcaatagaaaatggggattacaatgcttggtttaaaggcctttttttaattttgtggcaaattaatgtatgttccagagtaggagcagtgtttgatccataaatttttttctttatatttgtaaatacttttatctctctcctttttttttttttttccctggcctctaactggcttttctgccaataggattcagagccaacacctccaagaattacatctaa

SEQ ID NO: 86677 - DNA, 607 bp, Citrus clementina
  Intron number 1 from transcript clementine0.9_026410m (loc us clementine0.9_026410m.g) derived from phytozome v7.0 (c hr-ID scaffold_14; pos 885245 to 885851)
agctctgcgcatacgagctctctgtctctcttactgtaagctttcttcttctgtttgttctttgcatattttctatttgcattttagggttttaattttattcagcttatacttgattttcatcagtaatttcacgacattattatgtacaaatttagttattttgcattctgattgctggtggtaaatgggtttttaggctttgttctattctattaatctttcgagatttacgcttctagggttttatgttgttggttttcttggtcttattttatttaattttttaaaatctaaataacaatgttattgagttatgattaatattcttctctttttggcctctctgtaacgtgattggtgcttgctttgaccaaatagtcatggtgggtcattttctttttgttaaggatgccagataactttgttaaattgaccatatttctattccattctatcttgcatagccgctaaagatgctatacgttgagtatttattatctatactgttgtcaatatcatatatctaatttgtgtttttgctctctcatgaaatcaaacttgctttgcagaatttttgtttgctaccagtctcgtgaaggatttt

SEQ ID NO: 86678 - DNA, 430 bp, Citrus clementina
  Intron number 1 from transcript clementine0.9_017506m (loc us clementine0.9_017469m.g) derived from phytozome v7.0 (c hr-ID scaffold_19; pos 966094 to 966523)
tcttctcacacttgcggcttcactccgactttctggtaagctctcttttcttcctcttgttatggtccttttgatttccgacctttcataaactaggatcggctccaatgcgactgatatttgtgtcctcttgttagtttttatgttaatttttgctatgaccgagggctgaggcttacgttacgttactgaattatgctggagacttttatttgatacgtttctattctatcggatcaagaagtttgggttactgctatctcaagtctacacatccgtaattgtgtcatgaaatgaatgcttgtgtgttgctgtatacatttctaaagagaatagtacgattattttattattagactaatgatttgtatttgtcttattattcatatttacattgctgtgaatggaaacagagtgattccatatcaac

SEQ ID NO: 86679 - DNA, 781 bp, Citrus clementina
  Intron number 4 from transcript clementine0.9_018382m (loc us clementine0.9_012832m.g) derived from phytozome v7.0 (c hr-ID scaffold_19; pos 3537330 to 3538110)
gaaccttccagctctctggttattgaagattctgtgtaagtgagtctttaagtcctaagatcagatttctttgtttattcaagcattgggcctctgtctaatgctcttcaaagaatgaaatttaaccttttgattgttcactagcctggcatgcttaatttttatttgcttaagagacaggaaaataccatttctacctgttacgtcgatataaatataagatggctcttgggaatctacagccaaacaactgtgaaatgctgctttcttatattctgttgacatacctactgttgcttgaaaagttgtggattcttactaacacggctataggaacacataggttatatttttaaagttgcaaaatcacaatacaggtgattggcagctacagtttggaatttttatttgctcttctcttgaaagacaaggactcttatgttaggttgcatttataagttagaagatagcacggagaaatgattactgtctgaaaccataatcaattcagcctcaactttccatgacatctgtgaagctttctttttcctgttttcatatataccattaaatttctatgttactttttgctgtgattgattgacagataatgttttgtaaactccatacaatttataccagtcatttgttgctttctcaaaataaataaatatgataaaaaatgcagcaaaatctttttctctggttaagacccacccacacatagacagaattcagttattgatattgcataggctttggccttctcaggataggtgta

SEQ ID NO: 86680 - DNA, 807 bp, Citrus clementina
  Intron number 3 from transcript clementine0.9_009096m (loc us clementine0.9_009096m.g) derived from phytozome v7.0 (c hr-ID scaffold_22; pos 2428324 to 2429130)
cgtagtatccccgggtctgtcaattcagagttcaggtaccaattaattgttgccttataaaagacaatttatgggcttagttgtaagagtagtcaaactgacgaagtgaggaaattaatcttgaaagatgaggagttaaactttaaagctttatcatttatgattttctttgtagttgatgacattaaaattgtaattctctattattatgagtttccttccaaaaaaaaaaaaaatcattattgtttgtgcttgatcgacttgggttttaatttttcacgctttctttatttgtcgcctcttggtcttaatcaacttatattaatcgggctagagaaagcagcaaatttggtcggtaaagaagaaagagagaaaagatagacttgtcctgaatgtaatgtgaagcaacagtcctgaaatggattgcggagtcaatgagctcgaagatcgataaaatttagagacttgagagaaagggcgccattattaattgcttctgtctttttattttttatatttttttttttgggtgatagaattgcttctgcttttactactcatgagctttccagttcaacttgttattcattgcttttatcaatggctttgaaaagttcataaaaaatatgagcccttttctactgtttttcctttttgatcattattttagtaacactagttttcatcatttcataccttttttttttccttcccttttcaatactggttttcttgtagtttctaatctttgttttggtgaatatgcttacagaagtgcctgctgataatccattgatccattccccg

SEQ ID NO: 86681 - DNA, 451 bp, Citrus clementina
  Intron number 3 from transcript clementine0.9_015237m (loc us clementine0.9_004978m.g) derived from phytozome v7.0 (c hr-ID scaffold_32; pos 1611530 to 1611980 reverse strand)
ggtgtggctgagcagcgaagatactggagcatacggtaatctaaagcttttcttctggagatgtcttgtttctacagtattcctgtaactgtttgaaatattttcagcaccccctccccccccaaaaaaaagaagtttttgtaatgtacatatgttgtgttacaaggaatctgtgttcaacttttcccctcttctaacatgtaaactaatcaactttgatgttttgtgaactagtcaccgtaagcactaatatttgaagataaagtcaccctagttttatttggtcaaaaggatttcagcccttgatcaacaaggttattatataactggttaatgattcattgttcttgtcggagaaaattgggatgcttttacttgagttattgaaaatatttaactgtccagaaattttgtaggtcgtgacattggggttaaccttccaattttgtta

SEQ ID NO: 86682 - DNA, 716 bp, Citrus clementina
  Intron number 1 from transcript clementine0.9_002819m (loc us clementine0.9_002824m.g) derived from phytozome v7.0 (c hr-ID scaffold_6; pos 1034386 to 1035101 reverse strand)
gcaatcccgaagggcatcgccttttgctggtaggttcgatgcttgcatttattactcggctttgtattcttatttactttttgactgcgtttcttgtttgcgttagttgtcgttttgcgaaacgacatgctgaaattgacaccacgtacgagtgaaatgcaatgaaacgaaacgaagcgcatatgctttgttttgtagtgttatgggagaaaaaagaaaaaatgacgtgatgccgagcatttttcatgcctggatcttgtctcgttccgctgaattttcgctttctgtggaccgtggttttgactttgttgtgaatttgtagtgtaacttgtttatgctgttttttgctctgctttagttcatcccgagtttcaggtttgttttgtttggctttgattcgttgatagtttcgcttgtacgatttgtactttaattatcttaaattatgatcagatcaagaattctttaagtttcagtttttgatattcaactgctaatacttctgttgatcatgtttggaaattggatctgaaacgttgtcgttttactttcctcctagcacgtagcatctgtaagttgtgatactttgtaggctaatcttcgtttgattccgacgtagaatgtacgcacaatgcatctggtgtcctctgtgtgctcatcaagtctgatatcttgttgcagattatacagggtttgttgtttaattgaagaatcgg

SEQ ID NO: 86683 - DNA, 722 bp, Citrus clementina
  Intron number 2 from transcript clementine0.9_011221m (loc us clementine0.9_010579m.g) derived from phytozome v7.0 (c hr-ID scaffold_76; pos 1197959 to 1198680)
gattattgtgctttgcactggtaaattttggctttttgctttaaagggctgttttcttttttcctttttttccccggtttatcttgcaaatttatcaagttttaatgatttttttggtcaaacaggggatcggtgatttttattttctgcattacatgtttcttggagtgtagtgcttttggcattattattgtggttggtttagaggttgtgagtgaattgggctcattgaaggagattaattgagtaataaagcgaattaaaacgatttccttcgagtttgagttcgcatttctacctcaatttgatagtttctacccattaggttcttataaaacttaacggaggtagttggtattactcctctgggtttggcataacaaaagctaagcagaaaggtggtggttcctagtcaccgtgatgacaattttttagcttgctaagttaattgagtgattgttgtgtacactgcataaagtgttggaaacaagttctgttgttgatttaatgtagtgtctctttttgtttatggttgttacttcatcattgcaagagctcaatgccctgttgcagcacttggttggtttgctgcatcacttgtttgagtagctgttaaacttttcttacattgtgcgattaatcttgtatatagtatcccttatggccttcttctattcaatttttcagcgctgccgatatcatcactcttcccgttcctgtac

SEQ ID NO: 86684 - DNA, 1011 bp, Citrus clementina; identical to SEQ ID NO: 82149
  Intron number 2 from transcript clementine0.9_023443m (loc us clementine0.9_022109m.g) derived from phytozome v7.0 (c hr-ID scaffold_76; pos 1066493 to 1067503)

SEQ ID NO: 86685 - DNA, 751 bp, Citrus clementina
  Intron number 2 from transcript clementine0.9_016743m (loc us clementine0.9_007371m.g) derived from phytozome v7.0 (c hr-ID scaffold_34; pos 1037482 to 1038232)
gtactgctttgagagatatttgattgcttgcttaggtattacaggacgtactcgatcttgcttgctttctctcatgttcggttggtagaaaaatgtttactatcatagttattagacaactagctgaaacatgcgtaaatacactatacgtgttttcatagtacaaggcattgtttaataatatgaataaagcattattgtttggtaaggcattgtttagtaatatgaatagaagccatattttgtgaagaatatcaataccatgatatgcacgacttaaatgtccatgttacaatgctctgttattacttaaaagaaatgatttaaaataataatgtgcagataaacatcaaagttcgttgataaactaaaacagagaggctatcctgatgtatgttacttcatctcttcaatggcaacatgactcagtttatatttcatgtatgatgcacatgtcacccatgcattatgtgcccattttcatatgcacagaagacattttaaagattatgcctttgtgctttggaaataattttgtcagaggttacttgcattatttccccgcttccattttgttattcttcttaaaataggcatctcttagctaatatcttatttttctatttcctaaaatcaaatgtgatagtcatttgaatattgataaaagtttaatttgaatattgataaaagttttctttctgacctgacaataatgctgtgtacaggtggagaggaaagaacaattgaattc

SEQ ID NO: 86686 - DNA, 377 bp, Citrus clementina
  Intron number 1 from transcript clementine0.9_002332m (loc us clementine0.9_002332m.g) derived from phytozome v7.0 (c hr-ID scaffold_9; pos 429786 to 430162)
gcacaccgatctccgtcaccgtctcaaccgtccgggtaactctatcttctcccataacctcaaataatagccaaataatttttttttcttcaaagaaaaacatccttaatcaagttgaatgctagggcagctctaaatctagttgaatttattttttcaaataattatagataagggaatatcatgctcaatgaagtacattttagtattaatcagtgtttattagttaaattttttgattttgatatcagccatgtcgttctgatgttaatgtgtatatgtaatatgtcgttttggttttggttgtgtctgcatgcgctaattggacccgttgatttacagaaaaggagaagtttcggatttgaaatcacagctcc

SEQ ID NO: 86687 - DNA, 1020 bp, Citrus clementina
  Intron number 2 from transcript clementine0.9_001404m (loc us clementine0.9_001404m.g) derived from phytozome v7.0 (c hr-ID scaffold_9; pos 3596859 to 3597878 reverse strand)
gcttctcaataagctcattaagtttcttcaacaaggtttgtaccatttattgagtacttggctttaatttttttaactgttgtaatgaatttttcataatttgggttgagcttttactctgttgcttattgtttaacatgtttctgaggtaaactgcatggctgctaaaatatcttcaattgttttcttaaccatgtttgcttgcagttttgtttttgcaaattcaacatctgtatgatgcatagttttagcaggatcaagtcatgctttctatagctagatcagttttcattctttcttgagattgtttccaaggacagagctagcattagacaagttggggcagctgccctcttgattaaaaggtccttaaattgcatccattaattaagcccctgcccccgtgaacttaattaaaatgccccaatgagttgaagaatttaagatcctgccccactgaacttaattgaaatgccccataagttgaagttttgatcccttatattgaattcattgttaagttgccccatataaactaaattcctggctccatccctgattgtttctctactgtagtaaatatggccacactctgctgctcagagatgttggcttctgggtttctgactttggggttctcatatgtgatataatatcagctttgtaactacctcctaggttgtaaagaatttaatgatttattatatacttcaattagttcctctaatatttttctttaaataggagtaattgtgtttagtttatagttttttgaatccccaaagattttggttggtaactgtgtcggtctgtcagatagttggttggaattttctcactgcatgttttttttttttttcctctctcttgtaatagaacattcaacatatacctgaatgcctggcctgttattatagtattatgctcagttgtttacttactaataagttttaactggagataagtttctactgaccaaggttgatttcctttttcttctgtcaggttctgggcatttgg

SEQ ID NO: 86688 - DNA, 124 bp, Citrus clementina
  Intron number 1 from transcript clementine0.9_007737m (loc us clementine0.9_007737m.g) derived from phytozome v7.0 (c hr-ID scaffold_6; pos 4176827 to 4176950 reverse strand)
aggttccttttgtgttttcttttttattatttttggtaatgggtgtttttttattttgtcttcttgtgtttattttgattaatttttgtgggttgtgatcagattgtggcattgttacttgaaa

SEQ ID NO: 86689 - DNA, 628 bp, Citrus clementina
  Intron number 1 from transcript clementine0.9_005048m (loc us clementine0.9_001746m.g) derived from phytozome v7.0 (c hr-ID scaffold_26; pos 3291118 to 3291745 reverse strand)
cttctctttcctgtgagcctttaggctttttaattgtaagtattacttttaacaagagatttctttttttgggcactgttttttttttttttattaagaatatgggtggttgtgctcctggtagtctttcctttggttcctttacattggcctgctttcctgttgagctttgaggtgagtttttcttcctcgtgacccccggagatcagctgaattttcactcgttatttggttgcttttgggtggtattgcttgcttgttttattacacttctttagaaagacaatattttctttttctttttttccttccctccatcagccttttgcttttggcttctcactattattaagcttttgcatgttggatcacttaattgctatttttcgtatgtttggaacttccaattgttatttctctttcaaggtggaaacctgttcagaaattgattttcttattacttttttcatcaccccgtgttttttcagctactcgaggttgtccttgccttggtcaaggaagattctccttcgcagttcgttcctgcagattttcttaattcatttcaaaatttgttgtctgtcttattttggatgttaggtggtcggattcatcatttagcatcacc

SEQ ID NO: 86690 - DNA, 535 bp, Citrus clementina
  Intron number 4 from transcript clementine0.9_017332m (loc us clementine0.9_017065m.g) derived from phytozome v7.0 (c hr-ID scaffold_80; pos 910052 to 910586 reverse strand)
atcctcgtctgataaaagtgagtttgagatatatagttacatttcataaattgaggtttatattttgctctttagattcctgtatgcaatgtggttagagactagctagtattttcttaccttgggaaattactttctccaaaggcattttaattggtcatagtgttgatgatctgtcatagcgcttcaaatttaaattcatactttgaggttcaaaattagtcaggaattcaccccactaaaatgcgcatgtttatttttttggtttaatgattcctttttggcttgtcaagcagagatgcattgctgtaggattgcatgtttggtgatcctcatataatcttttgatccatttgcaattattgtttgattactgcagttagtttacctgattgagtacctggctcaaaatgatgaaacttttttttttctttttatagcaatcaagatggagagaatgatactacttacagtcatattgcttgtttcttgtcttgcagacattcctttatcaaattctacgtggcattgccta

SEQ ID NO: 86691 - DNA, 658 bp, Citrus clementina
  Intron number 1 from transcript clementine0.9_019304m (loc us clementine0.9_019304m.g) derived from phytozome v7.0 (c hr-ID scaffold_80; pos 598363 to 599020)
aacagctcagctcgcactcttctactcgtgagcaggttttgctcttttcctttctgattaaattttttatttttttattcttaaagtttgtgtttttagtgcattgttaaattttgtggttcttttatctggagatgttgagttttggtcactggtattgtgtaccagttcaaagctggcattttgttttttaaaatatagatatgttatttcacgtctgttcttcattctggttttgattcttgcttagaaatgtgttttggtgtaatattttattataataatggagctgtatggtcaagattttgagcttggtgctgatcttggtttctctttagttcaatgtaaacctagatgtcttaatattgaacaatgtaataatgtattcagattggattgataacattcgagttgtgtcagataagggttaaggcatttatagtccattgtatgatgaagaaataaaattaaaaaatgattctgacattgcattatctgatgattacttgttcttacatatgcctcaatgtatggatgagatttggtcttgataaaagagtaatggctaataggtagatattttccaattttagctgattgttggtactgattcttgtatacagacccaattgagagaggtgacattgcaggaagagaa

SEQ ID NO: 86692 - DNA, 475 bp, Citrus clementina; identical to SEQ ID NO: 79057
  Intron number 1 from transcript clementine0.9_026119m (loc us clementine0.9_026119m.g) derived from phytozome v7.0 (c hr-ID scaffold_9; pos 2387528 to 2388002 reverse strand)

SEQ ID NO: 86693 - DNA, 521 bp, Citrus clementina
  Intron number 1 from transcript clementine0.9_000787m (loc us clementine0.9_000792m.g) derived from phytozome v7.0 (c hr-ID scaffold_34; pos 1639710 to 1640230)
acgaattcttaaagcgacgcagagttagatttcaggcactttctccagtttcattttccttttttttaattttaattttattgcaataatttttcctctattttgttcttttgatcttgaaagttaatttgatgctacgcatttttttagtattattattattttttaaatatgtgtgaagttgctgctgttatttgttgaagattcttctattgtttataagtatcagctgaaataaacataaagctaaggttttggtgattttgaagcgaaaagaagaagaaggggaagaaaaaaaaagaagaaagttgtttgctgatatagtgatatatgctttttttttttttaattcatgtgaatgatcttttaccttaagtaagttttatataccttttgttatcaatttcatcaagtcttgagattattttatttacatagataaatctgattatcagtagtactaaattatttattatatttttcatttctttttttgcagaatagttttgagtacgaaaatt

SEQ ID NO: 86694 - DNA, 930 bp, Citrus clementina
  Intron number 2 from transcript clementine0.9_000787m (loc us clementine0.9_000792m.g) derived from phytozome v7.0 (c hr-ID scaffold_34; pos 1640587 to 1641516)
ctgagcaacgcaaggtttgattctttttcctctctcaatgattctgtcttgtttggattttgttttgatgaaagttcaaaaagtaagagatgtaattttgctgctatctgttaatttgtgggaagaattgcctgcaaaatagaaatgtgtatgggagagtgttaaatttaatactttgttctattagctctttgtgtattaaattttggaacagatgcctttgtatgtatggttgctgtcatattggaaaccagtaatcaaaatgtgacgtttctatttgaacagaagcgtagtttccttattccacgttgtcggctctttgaattttcacaattatgtgattattattggcgatttcacacagatttaatctgtagttatctatgtgaggttcagctgcaagagcgtccatctgagttcaagttgttatggccattcattctatctcttaagtatagagtaaccttctgtgtgatgtttgttggttttgttacctaacactgttcttgttctagtagtgggatatgttctataaaataccttataccgactaaacttgccataaatttgtttaacctactaaaagtatgtcaactgagttattaaccttcttttatttaggcttggccttactattttgagagattaagcatgccagtaatatatttaccattaatcaggctttcaaatgctccaacctggtgctaaaatagttctgtaggggaaaaataggtggtttagtggattttatacttccttttgaaataacttatgagttggtgtgtgcagtttcctgttggcaggcttttttttttcattttgttgactaaactgtctttctagttccaaatttctacaattattaattgcatgttttctcttggcccctctatagattcaaactacggcctacgtggagtactttggcca

SEQ ID NO: 86695 - DNA, 558 bp, Citrus clementina; identical to SEQ ID NO: 83152
  Intron number 1 from transcript clementine0.9_012841m (loc us clementine0.9_012841m.g) derived from phytozome v7.0 (c hr-ID scaffold_26; pos 2687751 to 2688308 reverse strand)

SEQ ID NO: 86696 - DNA, 970 bp, Citrus clementina
  Intron number 1 from transcript clementine0.9_020044m (loc us clementine0.9_020044m.g) derived from phytozome v7.0 (c hr-ID scaffold_34; pos 5457 to 6426)
caccagcagccaagaaggtaacatttctttttttctttttttggggggggggggtgaaatctatcaattgttgggttggcttcttacgtttttgctaatatttagtggttaattaaatgggaattattatttgaataatgacaaaagaatggtcaaagatgagctcgccggctgttgctcagtcaagcagcagtgctatttagagatcaagaatcttttttcagttttctgttcctttgcataactgatgagcatatttcagaatttaattatttttagttaatgaaaaaataaagactgaggaatcaggccgatggtgaatatttgcagataatttcgtaaactcttcataacaccagaaattttgtcctagttttggtagttgagatttggtctctttgttgcatcataactctctgttttcaacttaaaaattcataaatttcaaccgaagttggtgagggagcggcattaattattactcactacatcatctagattttccataggctttctgccaaaaagaagaaaaaataataataacaagagtaataatggtctttttttttttaaaaaaaaaaaaagaataatggtctttttgaaaattcatgtaataggtattatttcttgctaatcatatttctaattttataattaataataaacacagcatgagtgtttacgtgtttgtccttgtcattcatgtcaacacacgcatagaagatagaagatagaagatgtcttctctttttttctctctctctctctctctctctctctctctctctctctctctctctttcttgaacagtaagcactaatcaaaatccatatcattattattaaaatttcgacagttgctttcttattttgtgccttttttttctttacttttcgctggaatcagccataattcacactccaatattatttagcttttgcagactctttcatctcaataaagtttgaa

SEQ ID NO: 86697 - DNA, 826 bp, Citrus clementina
  Intron number 1 from transcript clementine0.9_016868m (loc us clementine0.9_016868m.g) derived from phytozome v7.0 (c hr-ID scaffold_17; pos 616286 to 617111)
aatcggccattgacaatttcaacaataaccgcagggtagtacactcttactgatcatgttcatttttattttcacgacattgttcttgtcaaaagctttgtcctttttgtttgtttttgtctagttcttttattatttgatgatgggttttgcttaatttttgtttatgttctctggattgtgtgatttttttttttgggtcttttggggaaaaatggggtttcggggtgtctaggatacttcatttctctgttggtttgtgatcaacatgagaatccatgcgttattttattttatttttcttgtgccattgttgatttagacttcattgaatttttttttttaagttttgacttttattatgccattaattatgtacccttcattgatgaatttttgggttcaattgtcttaagagtttgattaatatggtttgactcatgtatataaagtttattttggagttaagttggagttcttgggattttctttaataatttgtacctgtggctatggcggttcatctgttagctgatcttgggtttgctcatggagtttgtcagtgttttgtctttgggttaattgatatatatttaatcttccttgctttacacatttgtaatcattgtggagtctttgtattagtcaaatttattggctgatattttaattttgtgtcggttgaatcggcagttcattgatattcaagtgtcatttccgctcttttatctatttgttttctacttaactatggttgttgaaattttgaatttttatatttctctttttagagaagaaacaattttaaccaggggaggaagaggtt

SEQ ID NO: 86698 - DNA, 788 bp, Citrus clementina
  Intron number 1 from transcript clementine0.9_029968m (loc us clementine0.9_029968m.g) derived from phytozome v7.0 (c hr-ID scaffold_66; pos 1028481 to 1029268 reverse strand)
ccaacggatctgtttcgcgctctacttgtggtagagtttgtcactcctctttcatttacttttaatgttctaattaatttttttcaaattcaatttactcatttataaactgcaaatctattgtttactagccgtttatttattattttaaaaacaaatttattgattttatgaaatgtggtgtactctgatcttgaagttcttgttatgttaattttatgttttgagttccattaacattaattacattgatgatatactaattcagtgttgtttaggataaaagcatattgtgaaaatttaatttagagccacattaatgtgattagcaatccatctagtacctttataaaggcaagctggttgagttctttattaatactgtactagtgataggcaaatgttttattaatatgtttgtttctttttattgtttcctctttcctcttgtatgggttggatggcggggtccatgttagagtgttaactactttgttttttttaaatcttccaattggaaagttttgtgaacaaaatatgagaggctttcttaagtatgaatttcccagttgcctgatttatttgctcgggatgtaattgcttgcttattcttgtgaccgcatttgtttctcattgttgtggtggtcttagttttgcatgatggaatagattgaagcagtttatgccttttctttggcttaagatatattcttctttaaaataatttggttgtagtaacacatcttaaaatatacttttgttacagtttgagtcaagttcaactggaa

SEQ ID NO: 86699 - DNA, 482 bp, Citrus clementina
  Intron number 1 from transcript clementine0.9_001095m (loc us clementine0.9_001095m.g) derived from phytozome v7.0 (c hr-ID scaffold_19; pos 3346962 to 3347443)
gccaagcgtggatacaagctgcgtatcctgtccctcatttttgttagctttaaatttttttaatgccgagcttgaatttgttgtttcattcagttattttgctgagctttgtgtgatgatttagtgttgaatttttggtctatctatttacatatgtatatatatttgttgactacaacttgaatttagtgatggtgtgaggaacaagatattcaattccagctgcagttttttttttcttccctgtttgaattgtttggaagctgagaaaatggaggaatagttgaatgaagttaaaagtttcagtctttgtgatacttgtcttgtttgagttttcagatgatgcgaaattaagcttaagcttaccttagaagaaaacttggaaatcttaagtccaatatgttgaaattaaataatgttatagaaaatgtgaattttcttgactgaaatcaatgtagaggaatttgtggcgcactcagcaa

SEQ ID NO: 86700 - DNA, 417 bp, Citrus clementina
  Intron number 2 from transcript clementine0.9_001095m (loc us clementine0.9_001095m.g) derived from phytozome v7.0 (c hr-ID scaffold_19; pos 3347519 to 3347935)
atctttgggccattggaaagcccactgccttagttagtttcttttcttcttattaaccactttgcttgtattttaattattgccagtttctgttatttagcatttgaattctgctttagatgtacaatgtgttgtcagtttttctttttaaaattatctaatggagagatggcgatttgctttccttttatttatttattaccattagtaaatcaatgcagtttctggaggaaattttgaactcaatagtttccttttaattttacttacattttcaagcattatgctgttttacatatttgcataattttccgcaacccgccattgtggtgatgttgctgtatgagaaaaattaagtgtgtccactggtgttaatatgcagagcctgtgtggtctttcaagtccagttgattcagt

SEQ ID NO: 86701 - DNA, 705 bp, Citrus clementina
  Intron number 4 from transcript clementine0.9_033693m (loc us clementine0.9_033693m.g) derived from phytozome v7.0 (c hr-ID scaffold_6; pos 2470838 to 2471542 reverse strand)
gctggataggcaaaattcaaaattttgccttaacggtaacataaatccggcttaccgaattccataaatggcaaaccggatacacccagaatgtgagtaagctagtttttcagctcaaactataagaactcaaatccaactcattttgaagccctcccaacaagcaaaaacaaaaagcacacgtgatatcttgagccttcaaacttgcgaaatacaaatattgaatcatttcttattcttcatttttgaatatctactcattgagtgagtttcattgtaaccttcatttattcatctcaattgtaagagtttgagtgtgtgagacacgtgagtgaagagattaggagataatctctttgttgtaaaggtttattgacacctcgaagtcaattgtaatcgttgaagccttggaaagacttggatagtgaaatcttcaagcttggatcgcttggaggcgtggacgtaggcggcgattgccgaaccatgtaaatattcgtgtgtttgtttctcttctcccttactctttaatttttgtgcttttcttgaacttattgctttcaatttttattaagacattagattgcttgttatgtgaatttgctaggataatttttaaatttccaattcaccccccctcttgggttgcacacttatatttcaatatgtgcagaacataaccatcctgcagcaaaacatcttgagggg

SEQ ID NO: 86702 - DNA, 675 bp, Citrus clementina
  Intron number 3 from transcript clementine0.9_015171m (loc us clementine0.9_007223m.g) derived from phytozome v7.0 (c hr-ID scaffold_80; pos 351648 to 352322 reverse strand)
gttgcttattcactctcgctctcagtcataagcaggtgatttctttattgtgcaacttctttcaattatatctttttaaatttatctttccaaaccatgtaagtcaaaccctggactgtttatttgattccattaagaggttttattatctgtctataatctgagtaaataactgattcatgtgatcaactaaatcaaaggtgcggggatctctagagatgtaatattttatcatatcatagactcatggatgaaatcttgtgacttttgagcatattggacagatttctgcttgggctaatttatttcaagataagacagatggtgctagcatgttttcggtaattttgattgtagagctattattgaacatttctaatttcttggctgtatacttgcattaaaggaattttaactggagttgggatgggttatgggcttgttgagttggattgttgagaaagaccaagcacgttgctagttatttacataatacatatatatcagctggcgatctctgattatatttcatttctctagctaattgattttaatgagtcattttatttattttttcagaataattctcaaaattgaaaatttttcttttctttttgtttttcaatttttttttttttaattttgatcattataattgtaaatgttgtggtacag

SEQ ID NO: 86703 - DNA, 375 bp, Citrus clementina
  Intron number 1 from transcript clementine0.9_015171m (loc us clementine0.9_007223m.g) derived from phytozome v7.0 (c hr-ID scaffold_80; pos 353249 to 353623 reverse strand)
cataagcattagaaagcggaacaaatcatactctggtatgttgatactttactttgaaagctttgatcttcttctattttgtttggttcccgagaaaatagaaaaacaaatattcttgaactcaaaatctttaatttccttttctcactcattttttgcagtaaccaaacctgtgatccgtgctttgcttgtgccattatccgttaattgatcgttaaagcacgttaacttactcaaatttttgatttttcagttttagcaatataaaaaccgaaaactttaaagtttaaaattgaatatcatattatttggtttctgttgcattaaagattgatcattgagtttgacctgtaattattctttttttcatttagg

SEQ ID NO: 86704 - DNA, 895 bp, Citrus clementina; identical to SEQ ID NO: 78494
  Intron number 1 from transcript clementine0.9_016212m (loc us clementine0.9_016201m.g) derived from phytozome v7.0 (c hr-ID scaffold_50; pos 278577 to 279471 reverse strand)

SEQ ID NO: 86705 - DNA, 433 bp, Citrus clementina
  Intron number 2 from transcript clementine0.9_017864m (loc us clementine0.9_016056m.g) derived from phytozome v7.0 (c hr-ID scaffold_110; pos 407577 to 408009)
gccgcgacgccgtttttgatcttatagctcttcccgtatgtattgcagctcaccttagctcatgccaatttatgtgatgtttgtataattatagatgattatttccgatactgaatgttaagctaaataattcgttgttaagtcatcttcatttaattttcgactgaaaatgaaaaaatagtaattttgagcaaagaaaaatgtagaaaatgtttattttgttttatttttaatttttaatctttttgagatttccttattgtggctgttatcattcattatatggtcatagttaaatatttcaagttgttgtagtcagtgaaattcttttcgatatttattctggcatgtatatttttcctttcaatttcttttgttgctgattctttgattgattatgttatatccttttttgtttcctttgtagggtggc

SEQ ID NO: 86706 - DNA, 764 bp, Citrus clementina
  Intron number 1 from transcript clementine0.9_011169m (loc us clementine0.9_009143m.g) derived from phytozome v7.0 (c hr-ID scaffold_22; pos 3646075 to 3646838 reverse strand)
gataaacagtctaaattagccgataaggtttgcattctctctctttcttatatatatatatattagtattttggtttaaaattttaaagcgtggaaaattttgagaattaaattaaagcattgaaacctcataattgtaaatttttaaaaaaactttccgctctttaaaatcttgaattgaaaatttctaatatgtatatatatatatattatgtgcgacgccttaccctttttttttaacgagctattagactatgtactacaatagagttaacttttaatatttcataaaatattaaactatttgatttaccggagtgtttatatgaaaaaaataaaaataagagcgaccgcatgaaaagactgtcatatataaatagtaagttgttattaaagggagtgttttacttcaaatgaatgctgtatataatctttaggttaaaccgcacctcaagtttgttctttgtttactttttcgcaaaaaccacttttgcttatgtcagccaaacactagaaggcagacaaaagagataactttttgctgtttcagagcatttcagttaaataaaaaacactggcaaatgctctattagtacagtgttattaatggacatgtttatagtatctttcttgtttcttttcctatatgtattaggttctcaattatgaattttacttctgttgactgttgtctgtactatggtccggtttaaatttaattttaaatatttacatttttcagctaccgccaatatcaattggta

SEQ ID NO: 86707 - DNA, 897 bp, Citrus clementina
  Intron number 4 from transcript clementine0.9_014875m (loc us clementine0.9_013737m.g) derived from phytozome v7.0 (c hr-ID scaffold_6; pos 5373938 to 5374834)
ggaactggtaaactattgctttctttctattccttgcctccttttttttctctgcactagattgtatttgtctaggtgtttttttttttggtgcataaacggcattgttgtatttattatagttcatttgtccagtatttatagttctgaatgctgaacaggataaatcttacgggaatttaaggctattatgttaaggtagaagttagtttttaaagggaaccctaaggattaccagcacagcaccatgctgcaaaatatgctcatttaatatagttaaaaggtgtaattttcctttagggaagagaagttttatatcacattcaaactcattaaatatatgttaatgttgacaactattacatcaaactgttaaaatttttagacataaagttatatgggtccaaaggtagggcagacaagtgagtactcattactgttgctaaaatgcttgcaatggaggtgtcaaggtgtttaccaggctggaaagcaagctctgtggagacactaattagatgcttttgtaggaagtgtgttctggaatattaatggataattttactgtcattcaatagaattacctaacactctcacacttcatgggcattttcagactgatgcaacaagcattggtgcataatatgtctgaatttgtaaagaattgctctagcatgatgtatttaatagtctagtggttagatcctcaggttcaatgattgatgacactcaccaacattttcattgggattggttgtattttttatttgttgcatttgggagtgttctgaaaagaagaattcttttctgttgggttttgttgtggttgcctttggagttattgaacctatttttgtgtttgcaggtgcagctttgaaaaaaagggagaacgagaaaggc

SEQ ID NO: 86708 - DNA, 838 bp, Citrus clementina
  Intron number 1 from transcript clementine0.9_005040m (loc us clementine0.9_005040m.g) derived from phytozome v7.0 (c hr-ID scaffold_34; pos 1300943 to 1301780)
agtgttaaaggtccattgtgggaagagatttccaggtgagattaattaattatcaattgaattgattgttgatgataagtataattaattcaattgaattttgagcacttaggtcgagatctatgagctgaattttcttgaaaagtgtttccttttttcttcttttgatatatttttgagcttccttttcacagtttatgcttattcagacagtcacattgatagtaaattaattttcggttatttcattttattttattttaccttcttgtttcatttttattaaatatatagatatataaaataaaataaaaattgaatgcttattttaagagaattatgcaggatcaaaagaaaagaatcagagtcagaatttagatttttagacacttgtgatatttgttttgtttcgcttctgccggcactggccttttccaacatatttcatagggagtagtaataatctgaaattgtgtttatatgtattatatatataacggcaggttttgtatgtactagttattttcaatatccaggttaacttcagaagaattgtaaaactttctttttatcttatgtctacaaatttaccactactgcaaatttaaaccttgttcctaattcaatgaataatcagtctgaattaatgcatgcttatgttcattttatgtgtcaaatgctcttaattccaatgtattttgattcattgctgaatctgatagaatgggatagtaacagaaatggagtttgatcaatctagttttaaattgaacgttttactgttctgttgcatatattatcagaaagcttggggagcttggttatcatcgaagtgcca

SEQ ID NO: 86709 - DNA, 529 bp, Citrus clementina
  Intron number 1 from transcript clementine0.9_024141m (loc us clementine0.9_024141m.g) derived from phytozome v7.0 (c hr-ID scaffold_6; pos 3971378 to 3971906 reverse strand)
gcttgattccgagttgcaggtaacatgcttgaatctttgttaatctaactacttattgatatgacttatttttgttttatccactttttgtgttcttattctgagcaacatagaattagatatttcatttgacttgcttaaaaaaaaaaattggcaatttgcccttgttgttaggaaattgtggaactatttttctacttttaaatgggtgggtgtttcttagaccatttagatgagctttgaggccgaaaatgtgtagtagtttcatgtaatatttttgcacaagcttgggaatgtggagtcataggcttgcacaaaatctgctaaatggaagatcccaagtcgctgcatctgcttttgtgtctctttagtaccattttatgaattttttagactaataatatgtgtaattaaccagaagaagtgtgtcattttgacaggtaagtaataaatttcctagtgtatgattaaccctttgccctttttatgtttcaattgtccaggacggtcaatttgatctgcggttttt

SEQ ID NO: 86710 - DNA, 603 bp, Citrus clementina
  Intron number 2 from transcript clementine0.9_001336m (loc us clementine0.9_001336m.g) derived from phytozome v7.0 (c hr-ID scaffold_6; pos 276712 to 277314 reverse strand)
ccctgttggtctcgagggccttgcccattttctcggtatgtttaatgtatcttgtggcaaatttgaattcttgatttggggaattttagtcttgtatgaatgtaaaagttacttcaaaaaaaaatggggatgggtttgtgtgagatgactctaaacgtgttttcggatgatcacagattaaaatacaatgtgttgctcatattgaaattagagtagacagattaaaacagaattagaagtttcacttgtactttctttttggttcaagtatttcttcattgtatgtttaggcttgttaatttcctgttaaagttatagcattgtttcgttctcggttctttcatctcttcctactttgcctactttcttttccctttttactcttactattgtcattgatatatttttttttttttgaattctgttgtgtggcaatttattggatgattcttctactctcctattctacattattatcacttttagctgtacttagatatttatatggctgcaggggacaatttctgtggcctgtttaatgagttcgagtattcataacttgctttagttactgttttcctgtttctttaatgtgcagagcat

SEQ ID NO: 86711 - DNA, 978 bp, Citrus clementina
  Intron number 1 from transcript clementine0.9_022573m (loc us clementine0.9_022573m.g) derived from phytozome v7.0 (c hr-ID scaffold_32; pos 1707810 to 1708787 reverse strand)
ctttttctcgccaaagaaattcttcactcccgcaggttagcttcccctcattccatacggataatttccatttctctttccgtgataacaaagcaactactttagtttttgttgttcgattctttcacttccaggctgatagtaatagataatgttaatgtagatatttacgttgcccttcgaatcatttctactattaaggcgtgtaaccctagtgacaagataagtttcagctaccattcatttgtggtgtatgacaaggaaataaaagattggcctcaaacaacgtacggactaatattttttcattgttcttggtggtcgtacttgtttcgtaaaatgtgcataattgaatgcaatatgaactccgttggatagtaccgaccagaaacagtacgcgctcttttttggagcttagaactccttgtaggaccaatacacttccgcatgaagtacaagctacttagctgaaaatgaatcatatgaactagttagtagccccggtaaagatgtagttttgcttttgataagcctcttgctctgagctagaatttatgaaacgatagtaaataaaattctttggattagttttttaagtctacttcaacttctgaacttgtgtctgaacctgctagtatataaaattggagcaacttggatcttagaaattatgttccccgtcacatatatataaggtatttgccagagtcaaaagctctccatatttaattatctcatttataactcatcctaacttgcaaaaagtgtgttgtaatcaaactttttaagaattgttctaaagctgacaaggaggtcgttggaaaacacacttactgaaggttgaaattggatctcatgatcttttgatatagaggctagaaagtagagattaataactctttatgaaacaatattgctgaaatttaaaacaatgtcatcttcttaagttatttgattgtgtttcctgcttcaaggtat

SEQ ID NO: 86712 - DNA, 810 bp, Citrus clementina
  Intron number 1 from transcript clementine0.9_008464m (loc us clementine0.9_008464m.g) derived from phytozome v7.0 (c hr-ID scaffold_6; pos 6443522 to 6444331 reverse strand)
accctgatatccctcctgtgttttctagaactaaggtacgtggatttctgcaatgcacaatattatgatttaagccatttcagcatattatagtgatctttgttgactggcaatgtgattcaaatgagcctgttgactttgttaacttgagcaagctagaaattttgcttaggtgaatagaatgtaatgtggaggtattaaaaaaaataattccagcagatggcaacttgtttttttctgcataagctccttgaattttagcatctttatatttggattctgcttggtctagtagctagtcttgataagccattgcaatcttattcgtcctgaattttggtgttcacttggttactgccatttttatgaaaataactttttgcatcaaaattgatttgtcttgctcaaaattgctggaagaaactttgattgtagttgttatgtaatctcatcattctggtggttgtatgacctgcaatcactaagagagtctggaagggtttacagaaatttaggaaatggagttaacaagtacagtagtagttctatttataatgcattaggtttttacggtttgagctttagtctaaatgtcgaggaataatgcatcaaaacctttactctcctactctcattttgcattgaagaagtatcttaggatttttacctatttgtttatcctttgattactgcttggcctttgtttggtatgttcacttggaatagagcatcgcatgtttctaagggaattattcttcagactcctgaattctttttttctctttttttgtctttagtttttagttttgg

SEQ ID NO: 86713 - DNA, 954 bp, Citrus clementina
  Intron number 1 from transcript clementine0.9_005411m (loc us clementine0.9_005411m.g) derived from phytozome v7.0 (c hr-ID scaffold_26; pos 624275 to 625228)
aaaacggcttatcggattccgaattcggcaagccggttaggcaaaattgccttaacggtaacataaatccggcttaccggattccataaacggcaaaccggatatgcctggaatgtgagtaacggctagttttcaagctcaaactataagaactcaaatccaactcattttgaagctctccaacaagcaaaaataaaaagcacacgagatatcttgagccttcaaacttgcaaactacatacattgaatcattcattgttcttcatctttgaatatttactcattgagtgagtttcattgtaactttcatttcttcatttcatttgtaagagtttgagtgtgtgagacacttgagtgaagagattgtgagataatctctttgttgtaaaggtttattgacacctcgaagtcaattataattagttaaagtctcggaaaggcttggatagtgaaatcctcaagcttggattgcttggaggcgtggacgtaggtggaaattaccgaactacgtaaaaattcgtgtgtttgtttctcttctcccctactctttaattattgtacctttattaaacttattactttcaatttttattaagacattatattgcatgttgtgtggatttactaggttaatttttaaatttttaattcaccccctcttgagttgcactcttatatttcataattgggatatgtttataattgaagtaaaacgaagtgaacttgacgtagtaatttttttttctcattttaagttataaaaatgcagtattttaattattttagagagccctcccattctccagccccatttgagtactagaaacttttttatgcgttgcaggcgccttcttcttaaatcttaatcttataaattgaacctggagagtagtttaattgtttcacaatttgtacccagaaagaagaaatcatcaaaagccttctccaattgta

SEQ ID NO: 86714 - DNA, 316 bp, Citrus clementina
  Intron number 3 from transcript clementine0.9_011029m (loc us clementine0.9_007456m.g) derived from phytozome v7.0 (c hr-ID scaffold_17; pos 1250566 to 1250881)
gaggtatattcacatttctcttcactggaaacattcatatatacatgtcatataggattatttatgattaggctttgattaactttgcgggagttattttctttcgcgcaaaatattagaagtagacctagctgattcggctcagatatcttgattgtgctaatcatagagttattctaagaggctccagcagatttctgattggtaaaaagagggcaaaaaaaaattaagggtttgattagtttgtttagttcttgtcttttcagttgtttcattgcttatatataggtttttacctacaaagagaaataggaga

SEQ ID NO: 86715 - DNA, 583 bp, Citrus clementina
  Intron number 3 from transcript clementine0.9_016975m (loc us clementine0.9_013348m.g) derived from phytozome v7.0 (c hr-ID scaffold_6; pos 3934807 to 3935389)
gttctctggctaatcaggttgattgaaaatttacatttttagctaaggtctagaggactatgagatgagaaatatggtagactgactttaacacagtttatgcccttataaatttcagtaatgatatacttactatggtaagtataccatcactacagaacaaaaaaatttgattacaagataaaagaaaattccattgtaagacaattttttttttttttttgctttctcttacagattttgtactaataattatacaaacattattattctataaatttcactgtttgagattttttattgtcttagattattactacaatacgatctatgcccttgtgaattctgttgcataaatagtggtgtcactttacctgttcttctaaaaacatactggttactgtcaattgtgtagttcccatttgatcttctgttccctcttgtcatatattttttatctggaaatgattgttgattccttttatttgaaatgaaattgactgctatcaaaattgatcggctgcttgacataatgactaagatgcatctcttgtgtataataggtggtgcatcctgcagacct

SEQ ID NO: 86716 - DNA, 659 bp, Citrus clementina
  Intron number 1 from transcript clementine0.9_012167m (loc us clementine0.9_011808m.g) derived from phytozome v7.0 (c hr-ID scaffold_19; pos 973458 to 974116 reverse strand)
ctctggctttcacaaggatttgaatcttcttcctagtgagttaatttataatttatgccctccttttgtggtgaattatgagttttattatgttgcatgccatttaattttcccaattaaggatcattagcctaaataaatggttctttcatttgtgctgtgtagggatgaaaatgaataaacattcatgaccagttagttggcaatattgatgtattttagggttcttaacttgtagctctaggaaaccaaatttacttcatgttgaatattttgataatgtttaaacgctaattttgtgagtatcagaatgtgaattgttgtaaagatgattttatctaatgcaatatccaaaagctcctacaggctacagttccttatcaaagatttcactcatggttgttatgtgtcatacatttaaatctttttggggatgagccattttcttgaagttcacatatgtcattgatctacttcgtttttgatgaactgtaattttatggacttcacatattggagatgaatatgatgctggatactaaaggcaaatcatgactctttcgggccactgcttctttccatcttccctttctctcctccttttatggcacattttcttagctctagtatatggacaaattgcagaacccttgtctata

SEQ ID NO: 86717 - DNA, 474 bp, Citrus clementina
  Intron number 2 from transcript clementine0.9_003156m (loc us clementine0.9_002137m.g) derived from phytozome v7.0 (c hr-ID scaffold_32; pos 708626 to 709099)
ttgaagtaaagagaagaagagacaagaaaaaagaggtataatttcggaaatgtcttcgtttcattttgggaaataactttaggtcctgtttctttgcattgagagagatgttaaagtaggcattcattctttctcctggaaagctagacctacctgtgaaaatggttatgtgctgtgtggatttctagggaaatgtggacttgattttacatgtttttttattgttcaaccacctttctgtctctgctcactcatatacatacatacatacatatacatatacatatacatatacatatacatatacatacatacatacatgttaaactctgaggttaatttgttgcatgttcttgttcttttagattattttgatggatgctgtctatctctgcatattcccctcaaatttgcttttgttttggctctcttataaattctctaatatttttttgaaaatgtatgcatcagaat

SEQ ID NO: 86718 - DNA, 668 bp, Citrus clementina
  Intron number 4 from transcript clementine0.9_016695m (loc us clementine0.9_011609m.g) derived from phytozome v7.0 (c hr-ID scaffold_19; pos 2639397 to 2640064)
tggtgagctgggctgtgggccttcccaagcgagctgtaagtggacctatttcagcccactaatttgtgctaattgatcactagtatttcattgagaccgatttctttgattttggtatagactttccatttaccacttgccatattcacagtgtttgacgttgcatgaactgctgctggttcgattcatatgaatgaattttaaatatttgcttagccacgtggtgcttgtgtatttcttcttccattaccaaggtcactgaaaatgattttgatttgggagttttattgattacatatcacattcatgactaaaaaaattaataaaaatgtacatatttaaacatgtcttgatcacacattacagtagctgtccatcagcccatgtgtagcatggtttctggaagcttaagaggaatttagatacttttgaatgccaagcttggaaaacaattgcaggtagaaactgattaatcatgtcagacgtatgtttgatttataagactgatattattattatgttgagtcataaattaataatctttattgcagtgttgagttatcaattgtttcaatgtgattttctcccagacatgtgtactcataatatcacgtaactgtattttttgtgtagcctattgattcaaaattcctgaagctgttaatccc

SEQ ID NO: 86719 - DNA, 836 bp, Citrus clementina
  Intron number 2 from transcript clementine0.9_005600m (loc us clementine0.9_005112m.g) derived from phytozome v7.0 (c hr-ID scaffold_125; pos 261834 to 262669 reverse strand)
tcacctttactgtccataaggtaactattactaacaagattccctataatatgacaaatagacattcaaagatccttcctctttgggtacacagctaatcataactatctagatatattacataaatgaaaaaagaaaatgctaacgtaaagctactttgcctcctcggcatatttagtcttgctcatgttacaacgctgcagagcatacagcttagattaatgtgaatcttggtgcaccacatgcatattacagtttgatataaacgattttcagcaggcgattagtttcctttgtttgcagattacatagcaagcttgatctatatacttgtatggttttctaaaactaaagacaacaaaataatactgtagggcacatgattacacagaaattaatgggagactccttttccttttctttcctcttggaaaagactcagactgcactttccaacactgttgagcgctagcaccatctactgaatactattgtcatcatcttcataaaagcaaagactaatagccattaattaaggcaaagataacactaacacctaaaaaaagctcaatacatttctggaagccttacctacttaaaaaataaaaaatgaaagcataataatgacttaaaaggtcaatgaatttgagatttacctataataaacaaattgtcgtaaaatacactgctttgaatttctatacgaggatgtgcacctttaaaaaaatttagacgatggaaatgatatagtttatgggtgaagcagtacagattaggaggaatatattcatctgacagctcatgctcatctaatgttcctgaaacagtatcccttg

SEQ ID NO: 86720 - DNA, 1003 bp, Citrus clementina
  Intron number 3 from transcript clementine0.9_016343m (loc us clementine0.9_016343m.g) derived from phytozome v7.0 (c hr-ID scaffold_22; pos 3239043 to 3240045)
gttggattatctgaacgcccaccttggttttgtaggtatgtacatttttatcgtgcttactttccatgtcttttccatttttataaataaggaatcaataggaaggctggttgtgactgatgatgataatgttaaggaccgtagtaattgcattgagctttgcaatctatttatgttgatgcacagcgaagtcgttcagtatacaagcctctcttttgtcaaaggctgaatgtttttctttagttctgatttaataattgactatcattttcagattatgtaattaacttaacctgctgcccaaaacttttagaagtttttccactctttttttattcctttttgggttcagtatattttcatttctactttatgttatgaggtaggacaaagcttttttggtgagaccattttcctgatttgttgaaagaaaatgatattaggaaggaacattgaaggatgcttcttcaatttccaaagggaatggaagaataaaacctattgaaatataattttatgtcttttttactttagaaattacagatgcaaattaatatatactactttaactttcaaagatatggtgatcagactaataataaaagtctctttgtggatactggattgtagaaagtaacacccatctcctttctttttggaattctattaactaggttggaagtatgtgtacttttgtatctccttttgctgtgccctatttgctttacagatattacttggaaaataaaatggtagacaactaagttgttgctaggttgaatttgatccatttcttctcaaatttcggtattattcatagaacactaacacttaagagagttctttgatttcattaaatttgtgagattgttcatgcatagaacttagcttgcacttactatttgcaagtacttctaatcttatgattgggttcttgaatattactctgtatatatctgtttctgcagtctctgcaacactaaggcaaccagtaggcaaaccc

SEQ ID NO: 86721 - DNA, 570 bp, Citrus clementina
  Intron number 3 from transcript clementine0.9_012739m (loc us clementine0.9_010460m.g) derived from phytozome v7.0 (c hr-ID scaffold_54; pos 34450 to 35019)
attgctaatcatttacttttcaaagtaaggaaatcctgttaatcaaatttttatcacaagtaaaccgtgattaacttctgtaacttgctttatttttgatagactctggtcaccattatgttttggttgatgttagaatttgtgtttttaacttcctctagaatggtgcggataaggtagtgggtcctcaacaataaataacagtgaactgtcattcgtatgattccattcatagactgtatacacagtcagctgtgccttataatcctgaaagaaaagctgtttggtagatttcatcataaagtcctatgtgaataattcaaatcaagattaattgccctgttggccatacattgtaattattgccattctttttctcctcgtcaaataaaattattcatttcctatgggaaccagattgttgaacttgaactaaaaattattggtgtatttatattgggataatatatttgcttcagtgatgtaaatgaccttgtaatagcaatagaatttctaacttgtctttttcttccagctcgcagctggggaggttttagggccagatcaacc

SEQ ID NO: 86722 - DNA, 629 bp, Citrus clementina
  Intron number 5 from transcript clementine0.9_016563m (loc us clementine0.9_016565m.g) derived from phytozome v7.0 (c hr-ID scaffold_2; pos 3191063 to 3191691 reverse strand)
aagaaaaaagacattcaggtgtgtaaccttttatccttcgagaattcatttttggaagtttcatttgcctgaatgtgagggtcaccttggtaaactgatttaacacgctgtttctagtagtaagtttttactgttctgatgaatgcttagatggggttgcaactctgaaattgttcggtctattacatggtatagaatgtgatcgcatacttgtaggatgtccttgctattgcggacagcttgttcactgttttagaatctttgtcattattaatgcaaacatttccattttgagggaaaactgaaaagctggtaattttagtaggcaacatagttgctcttgtaaatctgttatctgatgtcacctcttcacacttattgggcttcttcaattactactatggctcaagtggtgttaaacttttcttgctaatcaatatcttatgataaagatgaattagtaaattgattttactggcatcggcatcaaatttttaattttgtttgatgtatatattaaactttattgtgcattttcttttctcttctccccctcatttctgaattccattactttgcctttgtttctcctagggttcatttgtacctgttgtcttggttgagaacag

SEQ ID NO: 86723 - DNA, 386 bp, Citrus clementina
  Intron number 1 from transcript clementine0.9_006512m (loc us clementine0.9_006512m.g) derived from phytozome v7.0 (c hr-ID scaffold_32; pos 2372002 to 2372387)
atattttctcttctaatttaagtgcagagtgtctggtaatctttttttttttttttttccattctgtctcgcaatatttattttctctgatcatttgtttcttaattttagcaacaaattagggtttagtgcttaatgactagtatctagaggctaagcagaagaaaaaaattgctattataagacagaacagtccttgtagactttcactacattgttcatccactaactttggaagttcagatgaaagattttcttagctttaaacagaagttttttataacttaaatcaaattttgatgaaatgctgatgggttgtgtggttggatgttgacccagttgaaatctatatgtaacagaaattaccactacaattcgtgagacat

SEQ ID NO: 86724 - DNA, 442 bp, Citrus clementina
  Intron number 2 from transcript clementine0.9_006512m (loc us clementine0.9_006512m.g) derived from phytozome v7.0 (c hr-ID scaffold_32; pos 2372825 to 2373266)
gccttctcaaccgaaaacttgcaacataaagccaggtaacaaatccaaccttgcgttgattttgaagacaatctgtttcttggttgaacaatttcctagatattgagcatttctgttgctttttacccttttctgagtcctccggtcgtttgaagaaactggaaatagaattatagaaattggactcatggactgtgctcgtttctgcataatattctagtatataagcacgtccacaatgaagtactaattgtaatccaaattttcttcttgtaaacaggagtttttaacatcaatatctttattaatcaaaatttcagaattgtgagagatttcttgtttttaccgtcttgaatagattttcttttactgttagaaagtgacagcaaataagatgaattgtatttacatgataaaagttgtctttcattgttctcagaag

SEQ ID NO: 86725 - DNA, 849 bp, Citrus clementina
  Intron number 1 from transcript clementine0.9_017444m (loc us clementine0.9_012157m.g) derived from phytozome v7.0 (c hr-ID scaffold_26; pos 1065213 to 1066061)
aactgaattcgccgttgcctgattcatcaacaaaggtcaattcagcttctatatttggtttaccatttctagctgtacttgattgattgattgctaattgaattgtttgaagctcgtggtttgcattgttgatgagtaaatgcatagaattttcgtgtttctgctcgttctttactaatatttttggaatttgagtttagttgatgattttggatagcgaatatttaaacgaattaaattgaagtttagacaaacctgaataatcacttaggctccgtttggttgctggaaaattgaagcttcagccgtgaagtgaaagttgatggtgtttggtaaataataattttgacaaagtagtaaaagtaatctagctttttcgtcggacagccagttgcaagtgtttacctaacactttaagctacagctgctagacagtaaatcggagcagagccttattaacattagctttgattaagctgcaattgaatgtttagttgctgagataatgtacgaccacgttcttaggctaattcgattagctttgatggatggaattttttgatgaggaaagtttcaagtttagcttcaagttattaaatctgaataatttgagttgctgatttgaaaattggaatgttgacgtaaggcattgtgatgggaaaaagcacgtgtacatgaagattttgatcagaacttattcgattcggctactcagaattgttatgagctttaagtacataaatatattcagatatgatttcatttatatgctttaatagaatgatcatgtggtagattttggacttgacactagattgtttattcttatagaaatcggtgctagcaagt

SEQ ID NO: 86726 - DNA, 484 bp, Citrus clementina
  Intron number 1 from transcript clementine0.9_003160m (loc us clementine0.9_003160m.g) derived from phytozome v7.0 (c hr-ID scaffold_22; pos 1414762 to 1415245)
aaggttgttaaattgtcactttgctacaattgcttcacatttttcagttcttttaattttttctctttaatttgctttatttcacgaagaacctgattcgctgaacacgaggaacgaattacttttctcttttctttccttccttttatttttttatttttttcaatttttttttcttctatgaagctttttgtctcatctctctctctctctcgctaatttttctgagcagctagaactaaaactactcaaaacacacacacacacacacacagaaagcagcggagaaatatctggcaactaaaattgattttctctctctttagaaatctcaaacgccacttttgtttttcctttcactttctctcctctaaagtttgagaaaaaaaaaaacaaaccgaagctctttgaatctcatttttcttatattttaatgcgttttgattggattatagatcgaattggagggcgtgagggagagcag

SEQ ID NO: 86727 - DNA, 602 bp, Citrus clementina
  Intron number 4 from transcript clementine0.9_003160m (loc us clementine0.9_003160m.g) derived from phytozome v7.0 (c hr-ID scaffold_22; pos 1415867 to 1416468)
tgatcattcctccattccgcgtaagctacgttcaggtatgttgtttgtgaatcaagaatgataaatttttcattttatatctcaaattattttttttttaaatacagtttttttttttttttaatttcctactttttctgttagttgtggggctaatagttaaagtgttaccggtttaaatatcatgttctatttagtgggtcttccgggaagtttccttttttcggttttgcttagtgatttggattttggattacgacttaagcaaaatgaagccttttttgcttttcttttctttcccccctttttttcccgtgtacgcagaattttgtttgtttttattttttaattatacttaatacactggtgttgctactttgatggtgcattgattcttttgaaataataatattgtatttgagatttttgcctcctgttgttctgaagctactttttgaagggaaatacttttaactttctatggaaaacaaaaaatgttagtttatttgaagggaaagaaaaagaatattttgaagtattaataatgtatgagaaatttggatttaactcttacagcggtgaagaagcgaaatcccgaatct

SEQ ID NO: 86728 - DNA, 435 bp, Citrus clementina
  Intron number 1 from transcript clementine0.9_000390m (loc us clementine0.9_000390m.g) derived from phytozome v7.0 (c hr-ID scaffold_9; pos 2767776 to 2768210 reverse strand)
cgaagcgtaatgaatcgtttcatttttattttttttttgtttattgatagtgcgttgagcttttgaaaaacgagaagctgaatttgtgttttcgacattaagaatttgactttttttttcttttttgtttttcaatttacacttataaaatcttataacttatttcaacgaacactgtttttaaactacttattttccattttaataaataaaatagttgtggaatcaaagtacttttttttttttttggcaagtcgaatgcatgttaatttttatttttagttgtgcaccagcttcacttcctcgatgagttacatttggaaatttttagctctaaataatcgaattgagactttgtttggtcgatgagaactgactgaagaagaaagaatatttacagagttgatttggagcttccaaagattgaggttcgat

SEQ ID NO: 86729 - DNA, 864 bp, Citrus clementina
  Intron number 1 from transcript clementine0.9_027365m (loc us clementine0.9_027365m.g) derived from phytozome v7.0 (c hr-ID scaffold_30; pos 127042 to 127905 reverse strand)
aaacagaaaggattgcgtataccaaatttaaggtaagtgtaattttaatatgagatttgtgatgtgaatcatttgttgttcataatatggttggtgggaagctagatctcatacggataatggcaaaattgggctgcacaaattttttaaaataaatttatggatattttctcaacaatgtaataatgtaaaggatttttttgtcataatattcatcttagtaattccatgtattaaaatgatattcgaatccgtaacaattagttccagttagcttgggtgttattaagttttacaatgaacatttttaaaattaggaacaggaaaatgatacatgcttacccttcgttctagatctcctttgtttatttttttccccaatttttttgtttgttttgtgctggactaggaatgtaaactttatgttgctgtgaactttagtttcattataataaataaatgtatcactgaatttcataaattaagttggtgggaagtaataagcataaatcgtgtgagattgatggcggtgttgaagaggttggtgacgatcaaaatattgaaagaagaagaaaaaggcaatgccataatgggttcataagatatttgtaagcttagttcattaaaaattatagagatgtataattttgcagtcatatgatgatattgcagcagtgaagccgtgcatgaggttaaggcaagcgatggaatgacttgcattacagaagaggtatgtaaagttgcactataaagataaaataaatttgtattttcaattagtggagatgtagttagtttatttgccatgattgtgtactagatggaaattggatccacgtttaaggatttaccaccagagagaaa

SEQ ID NO: 86730 - DNA, 751 bp, Citrus clementina
  Intron number 2 from transcript clementine0.9_001009m (loc us clementine0.9_001009m.g) derived from phytozome v7.0 (c hr-ID scaffold_22; pos 2643449 to 2644199)
atttcgtcaaattttggaggaagggtctagtcctggtatgtctttctcttcgataaatgatgcaagtcggtgtgtggaaacaaatacgcggtgaatgggattttgccgtctggtttattgtgctagatattagaattttgttttgattttggaatataaatttatactattagaagatgagattttacccaaaaaaaagttcatttatagaagagaacatttttttttttataagaatttttcacaatacgagagccgccactgctttgaattgaaaaaggccgtatatagggaagtgatactctgggctcttataaaaaagaatgagttctttcaattgactattcatcaattgtattttcacgtaaacagggacaaaagagctctatgaaaaaatggttccatttgatgttatctacgggtaaggggaattataatataggtattggttaagtaaatcaatggagagccttgttcctattaaaaatcccagtgcaagctaggaacttattagaaatgctaaggataaaaacattcataattcaactgatagtgactgctaaatttacaacaaactagttggtttcaaggacattcataatttcatctcagatgacactttttttggtcaaggatagtaatatggatgattattccatccattttgatatagaaaatcaaattttagaactagataatgctcattctttattctgttgtgataatgccttacgctttcttgtagagattg

SEQ ID NO: 86731 - DNA, 946 bp, Citrus clementina
  Intron number 1 from transcript clementine0.9_015083m (loc us clementine0.9_015083m.g) derived from phytozome v7.0 (c hr-ID scaffold_9; pos 2370510 to 2371455 reverse strand)
ggcaatcaggtatattatgttgcttagatcattatattttgctacactgactatggtttctttgtgcaagtttaggattttcttttaatttgtactttttattggagattggcttattatgggattacttgaagacttttcctcttacattgacaataggtattatattgaatgcagaagtgactaaagaattgttatagagtgggaaaaagtgaccctctcttagtgtgatttgaggaaccttaatttcctttggaattggatgccttaatttgtaggtgcgcccaccttatttccactttgcatgattgtggaatcagttcttctgtgtagatctttctcttagcacaatttgtatgttgattttattattccctaggagtagaataatcttcaggaagttagaacttttgaatgcttccccaaaattctataatttctttcattagagagaaatggtattgggccaacaataattatgaagttcatgccagaacgagcttattgaaaactggattccataataaattgttaacggatgatttatgagttgtgttactatgataattaagttgttttacattatttgcttgtgcaaagaaagcttagccatctctacatatataaaaacagtaaataaagaaataaaaattgaatgaaagcaatagtaaagcttttgagacatgtttccactggattttttttctttaacatattaatattttgatgtaagttccaacaaaagctgtatattgggaattgtattgtggttgagagagtgtgtctgaattgtattgtgtatttcttgcttggatgacattgttacatataaacaattttgttgcaatgttgactgaacttgtgtctttgctatttattgttactgatcttggccttttttctgtaatcagaattacaggtaattggtggacgaactgaaggggaa

SEQ ID NO: 86732 - DNA, 435 bp, Citrus clementina
  Intron number 1 from transcript clementine0.9_013594m (loc us clementine0.9_013594m.g) derived from phytozome v7.0 (c hr-ID scaffold_34; pos 1753216 to 1753650)
cgttcctgacaactcagtttttctcttcctcttaggtgagatctttattctttctcattaattatttagattctttcttttatattttctagatcctttcaattctctgagcctatatctcaactgggttctttttatttttcgctcatcttcttggatgttgcttcttcatagacacacacacacacacacaaacagagtttgatatgattcttttttttttttttttttgtaaattttcattttgcttcttgattcttgaccacttgttcagaagaaattttgctttgtgtgttgcctgaatctttcactttaattttagcacgattgagattcaatcttgaaaattcatcatgtccttgattttatgttcttactttatttacctttattatttcaggtgaagttttcaatttttgttgcaatcaccacttt

SEQ ID NO: 86733 - DNA, 507 bp, Citrus clementina
  Intron number 2 from transcript clementine0.9_013594m (loc us clementine0.9_013594m.g) derived from phytozome v7.0 (c hr-ID scaffold_34; pos 1754017 to 1754523)
ccagggtatgaatatattgacatttcctttaaatttagattgattggttaaagatagtgataaagagtgaggcctgagaaatcttgatttatgaaacagagttcgttccaattcttctgcttactgtttttattgatctgtcgtctgagcttgaagcttcagtaatctctgcatattattcggaaaagttgtttaacttctctgttaaactcaatatgtatcctggtgaaatataattgcataaactacagatcctgccatcctaattctcattctccgtcagaaatagtaaaaggaagaaaaaaaaatgcatcagtttcgcctgaatatttgattcgagttgcatgactttacagtcgagtttggtctgcattatttgaatttgacaagacttagtgctctttccctacacatatataccttgctttaccgacagtacttataaacattttccattttgttgaatttccagacactgtcggctgctgacatccgtgaccccaaaat

SEQ ID NO: 86734 - DNA, 443 bp, Citrus clementina
  Intron number 3 from transcript clementine0.9_007266m (loc us clementine0.9_006126m.g) derived from phytozome v7.0 (c hr-ID scaffold_2; pos 8988793 to 8989235 reverse strand)
tccatctactgtccattacaattattactacccaggtaagatattgaaactattctttgcctgtagatcttggtctaaattagcagtctcaaagttagttgaactcagcagatgcaattgttcaaattaattaatgcatctttaatattgatcagaatgtgtactgttgatatggttaagctttctgggaaaagcctttcacatttatatcatgaaagaaaaactggaaaatgaatttttgaaccatgtggaagttgattggatggtaactttaggttcatttactcttattttgaatgctagtgttaaaactcaaagtttgcatctttagtttgtgagttctagtaccgtgcaaaattctacagaatttctgttcctatttgggtattattgccttaatagttgaattttgattatttatgattgcccttttgcaggatcta

SEQ ID NO: 86735 - DNA, 812 bp, Citrus clementina
  Intron number 1 from transcript clementine0.9_007266m (loc us clementine0.9_006126m.g) derived from phytozome v7.0 (c hr-ID scaffold_2; pos 8990433 to 8991244 reverse strand)
gttccaagcggtcccgatctgttaatttatttccggtttgtaactttttctttgttgtaataattttttgttcttcgttttagttcgtaagtcaaagaaaagtcaaactcgctttctgaagtaaccatcttctgactttcaatttctccatatatttttaatttcttgttgtagatataaatttgaagtgaaaaaaaaaagaagctttatttttgctggatattatttgtgtactttttttgaatttttttattttcaataaaaaaatctgatttttttttttaaattgagtttcaattctgtcagaaatttgaaaacttttagttaaatactctcaaaggaggtattttttatgaacatggaggtcaatttccagctgtattattaaatatttttatcctttttgtatttttaaaatatattgagcaactaaacgcagctttctcttaaaattaaaaaatcaaaacttttgtatttgtctgtcggtgtattcaaaatattcgattttgctttaacaaaaatctgaattttttattttattttttaatttcttgagaatgttgtagagataattaatattaatatttcaaaaatcattgtgagaaataaaatctggtatctttttttttaaatattgaatcgaatccttttctggcagacacacgtttggcgcgtgttatattgcgctgtgtgtgttttatgttgccgcattttatttagttattttcttttgtgaaccttaagagctaagcattttttccttttttgtttatataggataggagtgtaagtaggtgcttaaagttcaagat

SEQ ID NO: 86736 - DNA, 417 bp, Citrus clementina
  Intron number 1 from transcript clementine0.9_020851m (loc us clementine0.9_020727m.g) derived from phytozome v7.0 (c hr-ID scaffold_6; pos 3257670 to 3258086 reverse strand)
ccggagtctcccggcactctctatataacttctaagtactctctctttcactcttcttgcgaattattattatttttttgatagaaaaaaaaataaagattctctagttcactatttaatattcagaaggtaccattttgccatgttgtgctgaggttttatttaaaaaaggaaaatagagtttgcaatttattgtctgttcggtaaagttttacgaagttgtttcgttgaatgaaaaccagaaattagtttttttaatctttttaaattatatttttaatattttaaattgtgtgtgtctgatagcttgactaaatgattttgcgttttaattctccaaatgctgtttttgaaattgtataataatagacagaactgtggtgattggcttttgcaggcaggttgtgtggttgagtg

SEQ ID NO: 86737 - DNA, 971 bp, Citrus clementina
  Intron number 1 from transcript clementine0.9_005306m (loc us clementine0.9_005305m.g) derived from phytozome v7.0 (c hr-ID scaffold_19; pos 205367 to 206337)
gcaaagcactgaagttttttgatacttgagatcaggtttttttttttttttttttggagtctgttgtgttttgcttgatgggtttttgttcttatgttttagcttttgtatctgggtatgcacttaggtgttgttttggatctgtgttggctccaaacaaaaaagatgtgatttttgtgatcaagatctgatttttatgttagcttgagccttgatgatcatgcttgtattatcgattgtgatgatatttcattatctgattgagatcagctagctgaggtttgtcttttaactgcattatttagctggatgacttaacttaattagctgattttgtagcttttttttttggtgatcctatccttgaatcaattttgttgttacttctgtatctcttcttcttcttcttcttcttattattattattattattttatatgtatgatgttcttttgaggactgattgcgctattgaggaggatgttgtgatcttttttttaatctaatctgcccccgcaccccccctttttttctttatcagtattatttgtctgaaaaggtctgctcattctgtgcttgaatcttcttattgcattggggtaaattaattgtatttagttattgggtgttaataagttctcctgtttggttatcaaagtttgcatcttgggatccttttattgaaaaagatgtctctaagtttagcggcaaatgcgtgtccatacttagctatgagctgatttttatgccacctgttgaatattttcgattttctttcttaattcaggtttcaaatatgcatggagaaacctctctctctctctctctctctctttttcttctgggcattttagaaagatatattgtcgtatccgagtgcagcatgttgtcttaccctagtttgatgtctctaataaacttggttgctgtgtgcagatttgggagagaatttgctaggcttttgattgctg

SEQ ID NO: 86738 - DNA, 1017 bp, Citrus clementina
  Intron number 1 from transcript clementine0.9_023254m (loc us clementine0.9_023254m.g) derived from phytozome v7.0 (c hr-ID scaffold_2; pos 3132563 to 3133579 reverse strand)
ctgcctttgctgggtatttgattattccttttttttttaaatcagaagatgaaaattttgtaaatttgcggagtaggtcaaatcaattagctcatttcattttattttattttttgttgtatatatatatggctgtttagattatttattggcttctgcaatcctatgatttgattgttctggaggattttacacagagagaaattcagttgaaagaaattgaattggatctggtagtgatttgcaatttcttgtataggaacaaccacctttaattgaatgatatgcagatccggtagattttgtagtatttggaagaatgttgaaaatattacagtgacaagaagcttgaggttaatgaaatcttattgacggcgtttagagcttataatgctaggatctgtccatggcagtttattcaatgtgctggttgctttgtgttggaaaaatcagttttgttttgcatttttatcaccgaaaattttataggaaggaaggtgctacatgtgtgagtggagtcatgaaacaatcaatcatctgttgctgttttgcccagtggctttgagtttgtgctctatttcatatgtttattagagttggttggatcattcttgggagcaatttggctggttgtgatgtttggaagtatcttaggaaaggtcatccctttcttttatttggaagttgtggcttgtcaagaaattgcagaccatttgatatcatgaagctatatattaatttaacaatttggacgttggtttgatattttgtttcagatgcctttttggtgttgttaaatctgatacttaaattaattcttttctcctttcttatttgcttacaatgcttgaatagttcagaatgtttactagatcttcccttattctgtactaacacatagggtttataagaacttttcttggttggggaaaaaaagaaaggaaaaatttacgtatgtatttgtttatttatttattattttgttctttgcttctttgcagtgctttattgggtgga

SEQ ID NO: 86739 - DNA, 591 bp, Citrus clementina; identical to SEQ ID NO: 77908
  Intron number 2 from transcript clementine0.9_021860m (loc us clementine0.9_011711m.g) derived from phytozome v7.0 (c hr-ID scaffold_22; pos 1710551 to 1711141)

SEQ ID NO: 86740 - DNA, 212 bp, Citrus clementina
  Intron number 1 from transcript clementine0.9_019554m (loc us clementine0.9_012856m.g) derived from phytozome v7.0 (c hr-ID scaffold_9; pos 2265955 to 2266166)
acccctcgcgtcatgtctgttccatctctacgctccgttttttgcttcaaactgaaactatttgatcttacttttattttttttcttaaaattactttcagctgagctagagtttaatgcaactttcttttttcatttatacattcttttcttgttgtgatttaaaattcctggcagtgccttgtgcaaggatctgttcaagcagtggtcaa

SEQ ID NO: 86741 - DNA, 620 bp, Citrus clementina
  Intron number 2 from transcript clementine0.9_019849m (loc us clementine0.9_019803m.g) derived from phytozome v7.0 (c hr-ID scaffold_22; pos 2464810 to 2465429)
ggcaggcctcggtatctatcactctggtgtggaaggtgagctctaactcatttggcacatgcatttgtgtttcttaaattttgtactgggattaccgtatgcctcactgtagttattgactttctaaattatgaataatttgatgcttaaaaatataatttactgtctgctaaattcttgctggcaatctcaaattgaatttcgttaatgatgttatattatatgaagtgtcgatacgcatttaacagtgcaagccaagtgctgtttttgaaagagtaaggaagagataaatttcttttctcttcttcgtaggattaatagtgcataagcaaatggaaggcgaaaaccgaagcttcatatatgaggcttaaattatggcagtgccaattacaactgtaaatttataatcaaacctgcttttaaagatacagatcattgtcctcatgatgtgggagagggaatataggtctattgtgaacagctagtaaactgatcagttagttatacagtaaacaacagttgaaacttttacatgttacgtctatttctcttcatattacgctctagtttcaagtgaagtttcagattttctgatctgctgcacctgctctgtgcagtcc

SEQ ID NO: 86742 - DNA, 693 bp, Citrus clementina
  Intron number 4 from transcript clementine0.9_015469m (loc us clementine0.9_015469m.g) derived from phytozome v7.0 (c hr-ID scaffold_80; pos 832339 to 833031 reverse strand)
tacgagtttgtgcttggaaaaagctttatattcaggtatcttttaagtcctctcttctggtaatatgtctccttgcctatttatgttcggatgattagggaaaaacctttttttgtttctgtttttcacacattgtacgtattttcattggaactgcaaaaatgttgaattcttgtactatgtcctgtttgtgataaattttccaactacatcttaattatcagctttctatatgaaattttcaagcaaagacgtgtatgatagtggtgtttcaatatgagggcatgccattgtgttcttattggcaaaaagataaaaagggaaaaagtgatttatggacatgtaattagaccatttgtttctaagaagtagaaaggagggtgctgacaatgttattgttgttgcatcaaaccagtctaattgtgggtcaagtcttattttggacaaggcattaatgagaatattgtttaattgggattgaaatgttaattgaaattgcatatgaaattaagcatttttggagttcaaacttttaatttaatctcaaaagagactcaaggcaagtttatattttttgaaattcctttttgatgcttgaagcattgttaaagctggtgtagacggtagtcttttaagttaatgtttcttcattttacagcgcgataaggaagacttggccaaactagttagaag

SEQ ID NO: 86743 - DNA, 736 bp, Citrus clementina
  Intron number 1 from transcript clementine0.9_009151m (loc us clementine0.9_009166m.g) derived from phytozome v7.0 (c hr-ID scaffold_6; pos 788331 to 789066)
ccctcgccgccttcgctgccattcgatcaatctaggtaatttttttctttttttctgcagcattttaacacatactgtcgatataattgttttgttgcagtgtgtaaattcgccatgttgcattttaacagaggcgaaaatttgattccaataaaatttgtttcatttgtttgatggactattgactaataaaattgaatttatgatgagttgcttatacttttaaactttagcactctaaattctttatccgtaaaaatttttggaatgctctctattctctctttgtaatttgtgaggttgatggtgatgggagaatacgatgaaatcaaagaaatccgttattgggaagttgaattaaaaattttcaggaatttatgttttcgagaatctgtttgtttgtgttgaaatgttttgttgttaagtagtgggtttcttgcgtttgccttttttctttttcatttttaaatttaaatgcttctttgctgatattctacttcatgagttggctatgaagaaaatatctcatgtttcgatttttttttcccatttcagctttgattttaatatgagaaaatgtgaatattgctctaattatagtttaatgattttatattgtttacttatgtattttggtggactgttaatattagactaacaatcatgtgcaaaagaaaagactttaatttgctgtcattttttcatcttttcagagttgaagggtgaaatcaacatt

SEQ ID NO: 86744 - DNA, 380 bp, Citrus clementina
  Intron number 3 from transcript clementine0.9_009151m (loc us clementine0.9_009166m.g) derived from phytozome v7.0 (c hr-ID scaffold_6; pos 789534 to 789913)
cttcacgcctttcacattggttggccttgtttaaggtttttttttatcttcattatatgcgctcttctttttcttagaaagttagattctgttgcttaagtgaaggtattgaaagtttggattctgtaatgtcattaaatggaataaaaataaaaacaaaattggattaggatcattgaataaactgaaaaagttgataactttgtctcgaatatgtttgtcctgtttctagcaaagcaaaggctgatattagcgatttctttgcttttactcatttctttgagaacaatgttgattatgagaactttatttaattttctactggaatttaattctttttgccagctttgacattgtgcgtgataccttgggtttagtac

SEQ ID NO: 86745 - DNA, 885 bp, Citrus clementina
  Intron number 1 from transcript clementine0.9_035667m (loc us clementine0.9_035667m.g) derived from phytozome v7.0 (c hr-ID scaffold_30; pos 2576123 to 2577007)
ctctccgttcattacttcccgttgcagatcaaacggttagtatttagttgaatatatttatctaattccacaaaaggcactaattaaccgataacttataaaaatgtaaaaaaaaaaaattaacgcgttaatatcaaacatataattcgttcaaaaataataatgcgtcaaaattaattgaagagtcagatcaagaaaatcttctagcttttaatccttcatgaagtatatggaacaattgaaattaacaactttcttattcttcttcaccattcaagtagaattcgaaaagagagagaaactggtgactttgattttaattattaatgttttgtactctagtttgatttttacaattactacagtagcgaaccctaaattattttaataactaaaataaacatttaacattgttaagtaggtgtagatctagatccaagcttatattgagacctaaatctgcctaatttcttttaatttaagcacaaaccattccagcaaaaccacccttagctaactagtggttaacataaattccctcgctccactcctgaggtttatggttcgagtcatctcgtatgaattcatatttatactgcatcatctaagtgtcgactaattaataggtttcgatgacgtttaatttcaaatatcattatattgtaatgatagtaaagagatcacctctcaaacccatccattaagatcgatccatgtctgaggtcttgcaggtctgtggtggaccaaccccgttgtcatttttaaccatgtccaatacaaccatcaaaactttaattttattaaatactttatttcagaacgtaattatggtgttttatgattgtttcagaagaagttaagcattccagccacagtttcacgtgt

SEQ ID NO: 86746 - DNA, 641 bp, Citrus clementina
  Intron number 1 from transcript clementine0.9_004566m (loc us clementine0.9_004566m.g) derived from phytozome v7.0 (c hr-ID scaffold_32; pos 1816283 to 1816923)
gttacgttaactacgccaaccctgcaggtaatatagattttttcttttggacagatttttatttgatattgtttctactgaatggagttggctgcttgagttgattattattattagtattttaatcctttagtcgctagtagccagtttctaacaattgtaacatttcttggtaattccattttgtgaaacccaataaaatatattgtgcgtttctgttttaggacaataatcatgtggtatgatgtctgaaaatttgcgtagttactttgttgccaagggattcaatgatatcttgtcaggtttagtttgaatacacttattcgctcttcttttgcttgtttctatgttggttggatgatggtacctatgtgggattggttgcacacattatgtataactgaagcgaaattgatctcttgaataaaatattagcatctcctatgctgggagatataattttctcttccggacttttttgttgttgttgttggatatgtaatgaagttaattaattttacattgtattttgtgcccgaagagaaatgctatttgtatatttgaataggagaaagatattttctttctttttgccattttgtaacttatgtttatgttgtcttcagcggcaagggcactgg

SEQ ID NO: 86747 - DNA, 624 bp, Citrus clementina
  Intron number 3 from transcript clementine0.9_012426m (loc us clementine0.9_012426m.g) derived from phytozome v7.0 (c hr-ID scaffold_80; pos 1088122 to 1088745 reverse strand)
attcacatcaaggagaaaaagagtttcaaacagaggtaagggctcattaagaacatattatggatcatggcagcctctttattttgtacagacattttgagggtttagcaactggccttattgtgtttgtattttcaagagttatacagtttctttgatgagaaatttttttttttcaaatctatgatttttcaccagcccattgcctgagagaaccaggaatcacaaattattgatttgcagatagaatgttttattcttatgccccaagaacagttgaatttatttagttggtgaagaatattttgaatttattctgttaggaattgttttaaggataatccctgttagttttcatttaggagaaaatggataaagcaacaaatctctagacattgcctgaccaacaattttgtgttcctatttctcttacattattacatactgttcattttattatggagaagttccaattgtcgcgagttatatccattttttcttcaggtttctaaattagtttcaagattcttctgtatttatgcttgaaccacccgctggtcttccattatattgcttggtgtttttgcaggtaagtctgctgggacgattgcatcataggaatct

SEQ ID NO: 86748 - DNA, 493 bp, Citrus clementina; identical to SEQ ID NO: 81350
  Intron number 1 from transcript clementine0.9_012426m (loc us clementine0.9_012426m.g) derived from phytozome v7.0 (c hr-ID scaffold_80; pos 1089528 to 1090020 reverse strand)

SEQ ID NO: 86749 - DNA, 618 bp, Citrus clementina
  Intron number 1 from transcript clementine0.9_017100m (loc us clementine0.9_017097m.g) derived from phytozome v7.0 (c hr-ID scaffold_9; pos 1983052 to 1983669)
aactctgctcgtcgccagcgtgggtaaaatcgagggtttgttcttctccgtgatttaattttcttacggcaacaattttgcagtgtccgattcggaactcatttaatttacaagcaaacgatttctcttatttatttctggtttcttttttcttatgttatggctgctgagattattgatagattttttttttccaatgattttagaaggaaatatgaatctcgtgctttgtcgtcgatagggaacttaatcagttgctgtgtttacttgcggcgtatcattttagttttatgttttagtaattgaattcagtgtttcttgggacggtcttttaattattcattgcatttataaatgtttgaaattacttatcatgtttggttttggaatccatctgtgaattttccggtttggttgtctgttttatggtaatgtatactggggatgtttgttagaaaaatactttacttagaaagcattttgaacttctatttaggtactttgattcttccatatatttgcccttgtttgctgatttaaaccttgttttctttgaatcttatttttattttgaatctttcaggtggaggcagatatttgcaattgcgagtctaacac

SEQ ID NO: 86750 - DNA, 961 bp, Citrus clementina
  Intron number 1 from transcript clementine0.9_004892m (loc us clementine0.9_004892m.g) derived from phytozome v7.0 (c hr-ID scaffold_19; pos 4063915 to 4064875 reverse strand)
cacgtccaaccctccacctgcagccggccctaacggtgagttcattgacttgaggttcgcacaacgcatactgttgagctttctataacttagtaaagatttctcgtaattatgaggaagaaagtctagaatatataaaaaaaatttaaatttaaatacacatatcatatatacattagttgattgtattacctctaatgtattataggatttttgaattgacgccaattaattaagacttgtaaaagtgttcttgttttcattatagagttcagatttttcagttataaatccacttaaggcgactgtggaagcagttggaacggaaactttacatggtagaacatgattcaacttccaatgtagtaaattttattcttttgatttagtttttatgtcatacaaaatccctctttctgaaatcctcgtggcaacatatattttattgtaaccttttgtatttttacttttaaaaccgaacggcatatatttacaacttgtaatcttataaatgtgtgacacctattaataaattttctagtgagataagttgttcattgacttcattattatgtgattaaaggttatttaattaaacattcacagtttgttgtgtcatcctcataaatttcacgaccattaattaggttgaagttctaacatttttaatgtcgtcatgaaaaattcttaattattttagcctggattccaccaagtggaaggaacgcaaacagaaaatggattgaaattggcggttcagtatcagggtcaattttaatagtcatgctgttcgtttcttttctttggcgtacgaggcaaagaaataaaaaagaacaaggtacataacggttttattatcggtgatggtacgaaagcgacaatactcttgttctgctctttgtaaagtaaattcattgtgcttgcagaggagagagcaattagtcgagaggctcaattactt

SEQ ID NO: 86751 - DNA, 725 bp, Citrus clementina
  Intron number 1 from transcript clementine0.9_001375m (loc us clementine0.9_001375m.g) derived from phytozome v7.0 (c hr-ID scaffold_26; pos 3383341 to 3384065 reverse strand)
cataatcccttcatactgcccaagagaaacacaaggtcggtgagctgatggtcctctgccaacgagtaccaatggattgatctcatttttacacctgaactttaacagtgagaacttggttccttccccaactttttgttttctttgacccttgtcttcccttgtatcattttttcaaaagcaaagcactttcttggaaattttgcccattgtatgtataaagaaaattaattgcagaataaagtcgactcaatttttaagtggagttgaattaatggacttacctctaggactaggattgtattacactttatttattttttaatcgttccattttataatacagtatttaaggtgaattctagttctataatgaattgcaaatttggcattatttttctttttatttgtgtgtgtaattcatggtatgaacaaattctatttaaattactatctgaatgagaaagctcagtttttcaggttagaaacataccttggtcagctggattttcaagtttctttactcttgtttttcagttgatttataaaagaaagcctaacatttttatgaacagaacagaatttttacctcattctttcagcaagaactggttttagctttgaactttctttcgcttgtcaaaatgcagtgagtgtatttgcaccatgtttcgtgactgggattaaaatttaaacatgcaggattttgagaagatagttcaaat

SEQ ID NO: 86752 - DNA, 396 bp, Citrus clementina
  Intron number 1 from transcript clementine0.9_008985m (loc us clementine0.9_004766m.g) derived from phytozome v7.0 (c hr-ID scaffold_26; pos 2741465 to 2741860 reverse strand)
agatcctctcttttctgaccagtttccatcttcttgtaagttgtttgtttatgccgtttcagctgttggttatcaaagttttatctttttttcttgcttaatttgattgtgggtttttttttttttcttctaatgaataaagcatgtgtgagaaaaccccagaggttcatatgaatgttggtgaaaatttgtggggggcagaatgaaagaaaatcaaagctaaagagtctcaaattatttgcatgttatatttgttttggaatgaaattaattcaagagaagttatgtgggttctggtttctttttagttgatttcgtttatgaagtggaattgatctttgttggtggatttacgttgaaggatattgcactgtcgacggaaattatcaagccttt

SEQ ID NO: 86753 - DNA, 450 bp, Citrus clementina; identical to SEQ ID NO: 82265
  Intron number 3 from transcript clementine0.9_023104m (loc us clementine0.9_019380m.g) derived from phytozome v7.0 (c hr-ID scaffold_32; pos 168180 to 168629)

SEQ ID NO: 86754 - DNA, 405 bp, Citrus clementina
  Intron number 4 from transcript clementine0.9_023104m (loc us clementine0.9_019380m.g) derived from phytozome v7.0 (c hr-ID scaffold_32; pos 168620 to 169024)
aaactacatctggagaaaatcttttcctggatagggtataatcttctcacttatggttattaatatctttctgttgtctgcttaattgatttcttctctctgtagtcagtaaaattatttcgtcatcattaaaagggggaaaagaacaactgtcaatgatatgatttatctattttctttaagtgaaatgaaattcgcagatcgccttggaaacttgttttttagatttggtgaattgggactgaatgttactctttagctctgatgattaggtaatttcaaactaattcatttctcactgaacgcttgtgattctgctttcgcaatgaggtttaaaatactctgttttccatcattttgatctgtgtgtttattaaatggctttgcaggtatttgatctttttg

SEQ ID NO: 86755 - DNA, 689 bp, Citrus clementina
  Intron number 2 from transcript clementine0.9_000053m (loc us clementine0.9_000053m.g) derived from phytozome v7.0 (c hr-ID scaffold_6; pos 5913086 to 5913774 reverse strand)
ttctcgttgctcttccacacgatttctttaaggaggtaatttgatttttaaaatttttttttgtgtttttgcttttttttctttttaattttatatataatttcatgtaaccataaaataaaataggaattttgttcaatttattttattctattttgttatttgatattttttcagggagaaaaaattaattcttttgaattgtttatatgaaataagcacttattttattttattttgagtgtggtgtgtttttaaataatgcctcttctacaaaattcaatttaggattttgaatgttgagtttaattgatgtgggttaaattttatggtatgttactagcatagatttgttagtcgttcaactgtttcactactattcagtgtgtggtagtttgtttgagggtttttaaatcttgataatgattattgttgaatttatattattttattttattttattttattttgagtgtggtgtgtttttaaataacgcctcttctacaaaattcaattttggattttgaatgttgagtttaattgatgtgggttaaattttatggtatgttactagcatagatttgttagtcattcaactgtttcactactattcagtgtgtggtagtttgtttcagggtttttaaatcttgataatgattattgttgaattgccaatcaggctgccaaga

SEQ ID NO: 86756 - DNA, 663 bp, Citrus clementina
  Intron number 2 from transcript clementine0.9_023132m (loc us clementine0.9_023132m.g) derived from phytozome v7.0 (c hr-ID scaffold_55; pos 1325333 to 1325995 reverse strand)
gaagcaaagtgctggagaattgcgtcttcatagaggttccgtcatacagcctccatctgccagattgtagattggttttcgcttcattaacacctttaattcatcttttttttttttaatattactacctctcacatcaattccagacaaactctgccttgcaatgatgggcagaaaaaatttggttattttcatttattatgtatggtttatatgggtacctcgcatatatacatggaagaaaaacgaaaatgttttgagtttcttcacatgcttcctcacatccaagtaatttattcagaaaataatagaaatactttaattctgctggctgctctatgaacggtgataaactattattcttagtcattgttgtttctcattaatatagtttgtcatgtgtctcatgacctatttttagccgttgtttgaaaatggtctgtactctgtatagttttcttccaattcttgaaaccttattaccttggacatatacaacttggcagcgttcctgcttattaacttaatttcatctgttcatatgaaatttactctggattaaatttgattcctccagtaaagtaacacttgagttgcagttcaatttttcatttttctcatcttgcagacatcagtgaactgaacctacccaaaacttgcagc

SEQ ID NO: 86757 - DNA, 774 bp, Citrus clementina
  Intron number 2 from transcript clementine0.9_035263m (loc us clementine0.9_035263m.g) derived from phytozome v7.0 (c hr-ID scaffold_106; pos 716934 to 717707 reverse strand)
cttggtacaaggagaaggtttatcctgttaacaaggtgatgctgatgctgatgctgatgtgtgatcaataataatatttgattttatttgattgatcatttaagtaatttgatagatcaacaatatgtgcattcttttggttaacatggagcttagaatctgctgggaagattttgaatagtattagaaagtttctgaataataattaggaatttttctaatcaaggtgttgatagaccaattcagatatagaaaaggaagagattagttgtgtttggtattgaggtagggcggctatggattaaaaggtacagagttaaagtgttttgtaaaattataatatttctactatttttgtcaaaatcttaatttaaaattcatatttattacgcatttttaatttttattttatagttacagttttttttttttttttgggtacgtgtggcagctgtagctaaaaaaaccacagcacctcaataccaaatagcctaattatgtgactctgtgtccttatgccccatctttgaaattgaaatgcttgtaatctgtgcggaggagttcctgaataaaattggaatggtgtctttgtgctttgtgtgcctagtaaaatcttaacatattctgatttgagcaagttgcttgcttgcaagaaaacacaacgaaagagttaaactgattgttacactttcgtgcaagattagagatcattgctggagttatgaagtatatttacctattagagttctttacaggttccagcactggagcaca

SEQ ID NO: 86758 - DNA, 697 bp, Citrus clementina
  Intron number 2 from transcript clementine0.9_023737m (loc us clementine0.9_020960m.g) derived from phytozome v7.0 (c hr-ID scaffold_9; pos 3215651 to 3216347)
taattcaaccgacgccacggatctctttcgctccggtaccgttcctctccctcctcctcattttcctttcattttttattttaatttattatgcttcaattatgatatgaataatcaatcgatcgatcggtcaaatctcgttcctttttttttttcctgattttatctaattaatgtttgttttattttagttgccaaacagtcgaagatgtatgagctaccgtgcgaaaccgattaaggatatatgatgattttattttgaattatttttagctcttatcataaaattctctaagcaaaacagcttaattgaaattctggcttgtggaagattagatgctttccttttctaattagccgtgtgttaagtatttacttgagtaataaatactacatgtatgtaatctatctggaggaactcattcatttaaactgacgtggtatgatatgaataaatgatgggaattaaattttctgttctcatttaattgcttagtttttttttttaactataccaaatttccaatcatatgatgccatgtcagtttagcatatacttcggaattgtattgattgcttgtatgtgtaatatttattatttgttttatttagtaaggttttgtagaatttctgccaaatggttacatttctgttgaatttcgttgcttcagcctcaagtaaagcatcttcgaaagag

SEQ ID NO: 86759 - DNA, 716 bp, Citrus clementina
  Intron number 3 from transcript clementine0.9_023737m (loc us clementine0.9_020960m.g) derived from phytozome v7.0 (c hr-ID scaffold_9; pos 3216402 to 3217117)
attgagtaagcttgctttatttagtaaaattcagtttgtgaatccggtacttgatttataagtttttacaattctattattattgtagatttaatataaattgcgtgatcggagttgactgaatgtaagatgttatttgatcatgaattgcactattttggcttaagtgattttaaggttgaaaatgggaccagctgaaaggggcttgtttttccatagcttttgtctgtttaaaaactatggaatttttgtattggtttctttcctcagctttggtttctgtccgtaggtatgcattctagcttcagaaaaaagtttgtgttttgaattgtaagcaatcaactgagatgaatttaagctatcttcatggaaagatggataaagtctgtccctttgaagtttggagaaaatatggggtgtttgcagccgtgatggatctataggaatggttactttaaaaaaaaataaaaataaaaataaaggaagagtaccactgttttactgtaacttagacatgtctaactgatgcatttgttattacgtttcagtcactgaagcagaatacgtattaaagtcacggtgatttgtgtgattcaaagtgtgccaaattttctttctttgaagtaaattaaggaaggatttttatgtaatttctgatattataatatattatttgaacagcccagaaggaattgaaagtctgtgttcagatatcg

SEQ ID NO: 86760 - DNA, 565 bp, Citrus clementina
  Intron number 1 from transcript clementine0.9_023210m (loc us clementine0.9_021039m.g) derived from phytozome v7.0 (c hr-ID scaffold_19; pos 1679372 to 1679936)
atctacaccttctcctccgttgaagagttctggaggtaaaattttatttttatttttttcttgtgcgatttgttaggtttttgagataatttaggaaagactaaaagttctctctgttttctgatgtcaatgaatgttctctgtttagattatgtgaaagtatgatggaaattgaagaaaaattctggttcttttccctaaagaatcgatctttgcgagatgtcgtcataattttagcctttttattttttggatttaattttctctttggtccgtccttactgcttgaaggattgatctttgagtggcaccattaatagcacaattgaactttcgagaaagattcattggtaaattttacatgcttttggtaaatttaaagattcattgtttatcatgaaatttctaatgtgttcacttttctttgctttattgttttgaatggcttgttgttagttgtctttcttgttttgtttgtttatcctgtaaatggttcttaaaagttttcattcaagtttttctgcattcagcctttacaacaatatacatcatccgagcaagttgg

SEQ ID NO: 86761 - DNA, 787 bp, Citrus clementina
  Intron number 2 from transcript clementine0.9_023210m (loc us clementine0.9_021039m.g) derived from phytozome v7.0 (c hr-ID scaffold_19; pos 1680033 to 1680819)
ctaaaggaaaatctgacacttcttggctgtatacggtatgtcttgactcaatgggtgggtttgtttgtgtatgttggtttatcagcctaatattaaataccaagtatgggtttaaatttgtatacgtacttggtagttgctggcaatgattggagaacagtttgatcatggagatgaaatctgtggagcagttgtaaatgttagagctaggcaggaaaagatatctctgtggaccaagaatgcttcaaatgaagctgctcaggtaacttattaatcaaacacctacagtttcccatagtaatgcggaaaattatgctagaaagttaacgactttgtatgggggtagaattttagatgaagatgttagatgttttgcatgcaatttatcccatactctgcactctaatccgtccttgcacctgcctccgtactccatattaacagtacttattataatgtccgcttaaataagttaaacagcatctatgttgattaattatcctttacttgacagagagaacaagttcagttttctttcctattctaatttgatgacatgtatgtaaaattcaatagtaatttgtcatggcctgttttttttttttttttttcaactctttccttgtcttgtgttgtaacatatcagtggtagatgattcatgtctttactacatgatcaggtccttgaaactgcttgggcatttcaatctatccctttttaatttgtacctgttactttgattctgactgtataatcttcacaataacattaaatatcttgttgcag

SEQ ID NO: 86762 - DNA, 849 bp, Citrus clementina
  Intron number 2 from transcript clementine0.9_004481m (loc us clementine0.9_004481m.g) derived from phytozome v7.0 (c hr-ID scaffold_9; pos 2292887 to 2293735 reverse strand)
aggagctctctgtcattatagaccttatcaacactgtaagctactcaattgttgcttcggattgttgattgataattgggtgcattgtgaattactatctgagtaccgttgcaactgtcttgcttctgtttagtagacattcccttttatttggtaactactttctagaaaccactaaacaacctatacctggcagccagtggtttcaattgatattagctgtggatcaaaagccttagctcctcaatcgcaatataccctcttcctctttagcgaattttatggtttctttttaaaacgttactgtattgctgaaagtgtgggttggtttggtgtgtttggattttagatcagattgtgaatgagacagtgaaagtgaaagtgcttggtttctgtgaaatgagctaaatatagccaagttaaacttcgtttatggattttactgcccggtagtaactaaaacagtgagaatttttcttgatcgagtctgatataactatttgctccatattttcttcttgtgcattgggatggggttgggggaggagggctagtcaaaagatcttaactcttaaggctcaaaattgagatatcagttctctgtcttgtagttatatccaaatgtataattgaaaatggacggaaattttttatccatcaaaccttgcaagtcaataatttagaattttttttctaatttcctttgctctaggtttggcttttacttgttgtaaccgattcagatcattgtttcaagtactcattgggaagtggaaagtgccatttaaaagataaacagtgaatgttaacatcagaaatcaatttgatgtgcataggtggaagctaacg

SEQ ID NO: 86763 - DNA, 956 bp, Citrus clementina
  Intron number 1 from transcript clementine0.9_019800m (loc us clementine0.9_019800m.g) derived from phytozome v7.0 (c hr-ID scaffold_6; pos 3869810 to 3870765)
gggtttctcgcctcaaagacacagatctcttcactgtaagattccgattccatttttcaaattctacgtgctgcggtgaatcctctgttgaaaagtttaatttctgaggcaaatgtccatttgggttcgcgttattctgtagcagggatagttttcttagaatcttgttaatgaattttcattttgtaccagtgacgttactctttgattaagaaatctagtctttgtatggtgagttcttaactttgctgtatgtgtaggcgtaagaatgtggggaggtcaaaattttatattattcgtcacttagtaattaagatgtaatatgaaatgaggcctgtaattttgtaatccatagagttagctttgagctggagctcaagcttcaatataatttggagcttggtcctttttgcttcattttgcggacgagtggggtggacatgcatgctctggtcctttgcgataggatattgattgacctggaaaaataacagagggatttcagttgcaatatggagatggttggtggtgaggaaagaaagggtagaaaatcagttaatgaattgtgaacacataggtgatcaatcagggatgagatagggaattcggtcgagtttactaacaagaagcagggaacgtgtggagaaaacaaattatatggagattgagatagcggaaagaatttttagtatggatttcaagcattaattcggaggatcaaagttaaaaatggtccttggagaagtgaacggcaaggaaattgacttgttgaatggtgaatgatgtggaatctgctctttagattaagatctttatgtaggcacaaaaggttttcctggatatatggctaatttatattacattgagaatgtcttcttttgaattttcctgttctcatagttctttgtttatgttattaaggtgcaaaatttctttacatctgctgaatcaaaggg

SEQ ID NO: 86764 - DNA, 738 bp, Citrus clementina
  Intron number 2 from transcript clementine0.9_014732m (loc us clementine0.9_014732m.g) derived from phytozome v7.0 (c hr-ID scaffold_73; pos 543267 to 544004 reverse strand)
ttcctggttagtttattttattcatcgtctgctttgtggtgtttagctgaagcactttctcatgtcatgaaagtaattgcagtgcctcttcttttttttttttaaaggagattggtgctttcttaagaagtatttatggaatcgaaatttcttttaggccccatctgctattgtgattttgtggattaatgtgaatcaaaagctatagggattaaataaaacttgatagtgtttggtaaatattacttacaaaagtttatattttttacaaaaataataagggtaatataggatcttctttggacaaatgtcgagtaaaatcaccttaacttgcagatgacaaaccacattagtaagtgtttgccaaatattttgcagctggagcttgtagacgtcaactccaagcagagcctattgtactttttcttttggggggcccgggggaggggggaggggggagggaaaaaaatcaaattgcacttgatattcattcttatttgatacagtttccctgaactagagatgagtgcctttgggatataggaagcatttttaggttgataagtagttttgacaaagcactgtataaattggtagactatgttttatctactttgttacccttgtcactagtggatctatggatataaactatggtttttgatctttctactcgcattatgcttgacctctttacatttgttgattgcaggtcctgaagttgagcgactggcggct

SEQ ID NO: 86765 - DNA, 851 bp, Citrus clementina
  Intron number 2 from transcript clementine0.9_019981m (loc us clementine0.9_016517m.g) derived from phytozome v7.0 (c hr-ID scaffold_19; pos 3378137 to 3378987)
aagaggaagtgaatcctttctccgtaagttccttcttttcaagttcggttgctgattttgtgtggtttattgacattctgaaagtctagggatttattttagttgattgatgaagttagtgaaagtaatttggtttgatttaattcgctagatccgctctgtttttgtggctttgtgtgcaaaagtcaactctatactgaatgtgaaactgatgcttttacattctagttttgagcttctttagttttgttccttgattatggttgttaaggttttaaattttcagctggatctgttaatttctttgtacttaagtttctccactttgattttaatatgtttttgagggatcttttcttttccctagttatgaataggtgcctctcaatttcattgttagttcttgatggttttgttgtttaattactggtgcacttttatattacggccggaatttttttttggtcttttggtttatcttgtttattgtttttgagctctttctttctaaccttgaccttatcatcacgatatatggacactgcattactagtggtgtaccttagttaacaattgcgagtacattgcttgacatggaccaaattacattatcaggttcacttgcaacttaaacaaaatgagagttcatgtgatgatgtttttgacttttcgaatagtaatgttgtaaagttagatgcttgactatattgattttttttttcaattttatattttggttcttagtgttcaatagtgcttaatacaatctgacaaataactgattaaatgttctttgatttcatgtttcactaacaggacccagctgttagggggaaaagctcgggccaatc

SEQ ID NO: 86766 - DNA, 641 bp, Citrus clementina
  Intron number 1 from transcript clementine0.9_016706m (loc us clementine0.9_013273m.g) derived from phytozome v7.0 (c hr-ID scaffold_6; pos 5046559 to 5047199)
tctaaagcctattggcgtaaagcgtgggtgacttatatttcgtttctttgtaatttgtaatgcagtagatatataatttagcgaaaagcatgtctagaactgttcaatttttgtttaaaagatgcattttttttaatataagttaatccaaattatattcagttatgtttaggtgtagcaattgactgatattatagcactatctgcgagaaactgagaaattttgaattactttggtaacgtgaggacatcattccatgaatagccagccaatattatgggcataagttgattgcctatcttcgaatgtgacaagttaaatttcaggatcacataagatatgttgttgggggggggggggggggttatctaggaaatgaatatttttgatgggctaagtgtagatgttttggtttttgtgaaacaccttaatctacatctaccttaaccaaattcattgtttaatggtataattttgtttgttctgtatgttttcaaatgcccctgttgcttatttattgatgtgcgtggacttgagtatgttatgcttgttatgtaatttcttacagaggaatcttgtcgattgaatttccttcgcccattgatttttctctgctgtttctatttacagcaccgcttgc

SEQ ID NO: 86767 - DNA, 1043 bp, Citrus clementina
  Intron number 3 from transcript clementine0.9_019218m (loc us clementine0.9_019206m.g) derived from phytozome v7.0 (c hr-ID scaffold_19; pos 2231374 to 2232416 reverse strand)
aaagcctatcaggtttgtgatggtctttgataatgcttttgattttgatttacattctctctttgattgatgagcttaagttttcaagcttgatcaaccaaaattacatttaaggtcggaagaattgattctggagtttatattggtttttgttttggcttgtgaaaggaaatatcatattaatttaaaactcctacctttttcctatgcttgaatgctgagaaagtaaaggttatatcatcgtagaaacagaaaatgacatttttcacaatactcatgttggcacataatagtttgtttggtttcaaacttaatttggattttgagtttacttaatgctatgattcctcatcataaagcaccagaatttcatgacctgtaccttgagcattttattatatattctagctttcaatttcagtatatgatgtttgtcttaataatttaataagatagacagtgtgtgaatcataaattgatttctgatccttcaaagatatcttcatggacatataggcatgatgtgccccatagctgctactggattatgtttgcttttaagacagagcatacccgtgtaagttttgacctcattgttcgggattgaacctgtgatccctttatgcatggtttgtgatccgtgttcttcagttgtgtgtatgtgctgaaaactgtcatgtttcttcatcttcttgatcttcttgatcttcaatttcttgatacaattaatcattccttattctttgggttcttatcatttaattataagcttactggatggttgtgaagccgagagtgttcagagatagtttaatactctgaagtgccatgatagcacaaccagtcttaattatatgccagcatgactgggagtttcatcactggttttcaggacatatagctcaattctcccactaaacttgtggttgttttggtcaagttgtcatttgcttgtccaataatggttttttgtcaattctgctcacctatagtactatttgtttgcaggcagcttctactaccgcagaagctgaattgtctcc

SEQ ID NO: 86768 - DNA, 467 bp, Citrus clementina; identical to SEQ ID NO: 78032
  Intron number 2 from transcript clementine0.9_000619m (loc us clementine0.9_000620m.g) derived from phytozome v7.0 (c hr-ID scaffold_22; pos 107171 to 107637 reverse strand)

SEQ ID NO: 86769 - DNA, 723 bp, Citrus clementina
  Intron number 1 from transcript clementine0.9_020840m (loc us clementine0.9_020840m.g) derived from phytozome v7.0 (c hr-ID scaffold_129; pos 509288 to 510010 reverse strand)
actcctcctcctgtaagttccaaacttcacttcacttcgcttttgtttcattactgtaattttaaactgttttgttaatactatgtttatgattcacatgtttatcaaacagtatagcttctgtgtattctagttctaggttaataaaaagcacaacacacatatacaataaatatccttagttttgtggccgtgtgtttaactagtaaaacctcttggggtggcggctctagggctgacaaagggaaaagggttgtgacacttcgtggtttagcgaaatagtcatggagactgcttgtttttagaaatgatcgcatagactcctttttggacaattatgctcagatgaatcactataatcaaagggcgttattatcctaaaaggtgtctgtctaactgtttctaagaataagattgtctctactatcatttcaccaaaccgtggggcgcttgtgctttccccttgaaggtagaaaataaagaatgcccaagtctggtgatggaagagaaagtatagcaattgattttctatgtctgattaattaaattgggtatatggactgtaacataaaatttgtagcaagttaattgcaatgttattataattttgatcctggtgcgattgcttcttccttgtggcagtgagtaatctagttttaaaaattttatggtgttctgtgcattgcagaaagtgagccctccttcatcttttactatagtcaa

SEQ ID NO: 86770 - DNA, 539 bp, Citrus clementina
  Intron number 2 from transcript clementine0.9_015081m (loc us clementine0.9_014474m.g) derived from phytozome v7.0 (c hr-ID scaffold_32; pos 338373 to 338911)
gaggtaatgaccactcactgagtcattgtataaactaatcaattgaccaagcaatttatcttgagacttgaaatttctcagctgatttttagcaatgtcgtgtataaaaactatcattagggtaatttcatcttttcaaagtcaactaattgttaacaaaaaatttaactaacggtgaaaggatatttacaaataaattaattttcgctatttacttgcaactgcctcaaacgtcaggatatgttttttaaaattacccatctcggaaatcgggtcagcgttgtcgccgctcgttttccagagtctcccgagttcttcactttcctcaaaatgccctttcagaaccctaaaaaagccgaaaaagttcaaaaagtaaaaagttatgagacaattttttaaaaaaatctgaaaaaagaagaaaaattagaactttctgtcaatggcatcatttttaggcacggtgaggccaagcccatcctcagtgtcctgttttgctccttgcagacgccaaatatcggtttacacctctcaaatttcac

SEQ ID NO: 86771 - DNA, 910 bp, Citrus clementina
  Intron number 3 from transcript clementine0.9_018820m (loc us clementine0.9_018820m.g) derived from phytozome v7.0 (c hr-ID scaffold_26; pos 605992 to 606901)
acgactggaagctggtaattttgattactttctcattcgctgtttgtataccgacataatgtatattttattgtttatagtatctttgcgtttgagatgctgtggcttataattatacagtccacgatgactgtgaaatggaatcactacgaattgagtataatactttggcagaatggttggtaaatgtcaattgccaaataaaaggcagtgttttcacaattaagcagaaacacaacagttgcaaacacacccttggtgtagttcgtagatgagattttgtgattacgatatcaactttcattttgtgtttgctggagattttactttggagtaccgataaattatacagagagaataatggatgtactgctttttgatattatttgaatgtatattgctttattcttaaatgcaaatgtgtattttaacagaggaaaaggatgataatgtttgtttcttaccatctccttaagatcttcacttttgagcaaaacaatgaacacctgcttttttacaattttatattatctacttgggacctttaaaccctcggtctttggttagatgttaaatcaagtggttgaagacatgccattttcttgtaaggtagaatccttttgtgacaattttttttatttgttaatggaatccaaaaattaactaaatactactgctaatccacctctatgttttggttgatatgatgtatctgtggtttcctaaataacgtaggtgattgtagtagttaactcattgattccagttaattttctctgtaggttggtgttgtttcagattatgttttggttgatatgatgtatctgtggtttcctaaataatgttgattgtagtagttaactcattgattccagttaattttcactgtaggttggtgttgtttcagatt

SEQ ID NO: 86772 - DNA, 686 bp, Citrus clementina
  Intron number 1 from transcript clementine0.9_009855m (loc us clementine0.9_009855m.g) derived from phytozome v7.0 (c hr-ID scaffold_19; pos 1090969 to 1091654)
gacagccccagcagtttctggcaaaccgtgtgtgtgtgaggatttttccagatctgcgagcagtgtgtgtgtttttgttttgtttgtgggtttgttttgttcgtctgttttgttcgtgtgtggtaagtgtgtgtgcgtgtgttctgttcgtgtgtgtgaagtgtccgtgggtttttggtcatttcatttgttattaatttacaattatgatattaatcttttaataatttaacataacgttttctgttagtagattggagtctgagtgtcttttttaaaacaataagaaattttatgtcccttatctaaaggttaggggtctctatgtcctttttcctaaaaaatatgtaacttttagttgtgatttcaccaaaaatagggagctaggtgatattattccattccgccctgaaacttggttagagtttagaccccacgtatttcttaagctcattcatggcttctgtagtacagcactccattactctctcaattaatcgtgtcgttttacttttctttcttccttctctttcattcccacccattctctgaattccaagacagaaactactaaaaattctttaactgttggtcacgccttttgttatatatcctcctttttcatctttacttctaacttttttttttttcatttttttgagttgaaagaaggaaattttggagga

SEQ ID NO: 86773 - DNA, 782 bp, Citrus clementina
  Intron number 1 from transcript clementine0.9_023845m (loc us clementine0.9_023845m.g) derived from phytozome v7.0 (c hr-ID scaffold_32; pos 63102 to 63883 reverse strand)
tccctcttttcgttggatccaaggttgcacttcaggtataatagatatatttctttcggatgttatttttacgagttttgtgtacacacttcagatctggtgtctattatcatagaaactcgttgttgaaatgcacttcagatctgggcagtaccactgctagtcaattcaaattccattcacgtaatacttaatctttcttaaatgctactacgaaaaactaagccccgagaacaaaaactattagttgtagcaatctatacctaatcatgtttgtgcgcggcgtgcacatcagccactgtttgattgatttagatgcattaatagttctctaatgactggtttatggaaacacaattggcagcagcagcaatagctgatgctttaaaacaagtaattgagatcttctaggagcattattattagagcattgaattgtcatcgacaagaattccattcttaaagaaattgacacattcatgcatatcacacaagcaagcattttccgaccatattggttggtacaaattaacccaggtcttgggagtcaattatgcatccttcaattcaaatgtgaaattgagctagctaatttgtcaacaatttaggctgcaattaaggtaccaatttcaagtatctaatagcaattcctgcctatgcttttggttctgtttattgttgatggctgcttgtgtcttattaatgtatgtgcaatccttcttagtcataacatattttgttgtttgcttatgatatgattcaattttatgtacaatagtgta

SEQ ID NO: 86774 - DNA, 809 bp, Citrus clementina
  Intron number 1 from transcript clementine0.9_016599m (loc us clementine0.9_012420m.g) derived from phytozome v7.0 (c hr-ID scaffold_19; pos 1104656 to 1105464)
catttctgcttcttttgttgcttaaggaagccaaggttcgttctttttctctctttgcatccgtattacggtattttaatttttatttatttatttttatatcaggatcagcttttgttcttcttcgacttgttcattgcgtgatgtgtattagcatctgggtttaaactcgctttgtagttttagttttggtttcattgttatctgccttttgggtatgtaaatgcttgtgttctgttctccatcgactggaattttattagcgtgtatctgcaatttgcgtacgggttaattatgacgcatctttgagctccagaatatagtttcaagctaatattaaaagtctagttttgttggttttatcttaaaaaccgttggttttagtaaagtcataatcatgtttcctctgtttaattgctatggtggatacttaatgtaatctgttaggcgtgcctcacatccctttgggatcaaatgcatgtgaagttatacttttcattttgtttaatgtttagtcatttgattcaagaatcttatgttcgaactatatacataaaaatgctacgggagattagtgttagcccggtatactttggtggttctttaattctcccaacatgagatcaattgttacaattaactatttgggtaattcattcaaattgtttagcgagagcattatgacttatatatcggagatcaccaatgttatggagtatgaggctcttgcaaaggagaaattgccgaagatggtttatgactactatgcatcaggtgctgaggaccagtggactcttcaggaaaaccgc

SEQ ID NO: 86775 - DNA, 842 bp, Citrus clementina
  Intron number 3 from transcript clementine0.9_034051m (loc us clementine0.9_034051m.g) derived from phytozome v7.0 (c hr-ID scaffold_6; pos 5726521 to 5727362)
tgcatatcgtaatagtctccgtgattcctgtcatatgtacatcacaaagtggttttgattgtgaaaaagatagatcttcatacgattcatgtcaaggataatgatttcaatgtcatttttccctttactaggattaaagttgtatttagacatataaccctaaatgttttgcatggatattaggggtggcaattttcgttagtgagtagtgttaaatttcagctataggaattcgatactttattaatcttgtcaataatttcaaacaccaactccacctgtctattaataattatgtcacatgcttaatatgctttgaaagtatatttttaaatttgacttgtttacaagtttttaatatatttgtttaattaagatatttatagtactgcctctcaaattcaaatcaattctagtcttaatataactagataattttgaaatatatacaaatagaaagtagttcaattgtatccaaaatctagtcgtacaaccattattaatcaaatagttaattatgtcataattaaataggctcacgtgacaggaacttaaaacctgaagaagtgaacagaacacaaaatatttgtgttccttttcaccaacgcgaacaaactattattttcatgccattggaatcagtttcgcaggtcatttcaaaatttgtcaccccagctataccatcgttttgcacaaaaataaataatcaattttgttcatattcaatatccttcaaaatatttatttccattattccataccaactaataggacaaaccgtccaggttttggtgatttttttggtgatttttggaataagaggcccaggattttcaacggca

SEQ ID NO: 86776 - DNA, 790 bp, Citrus clementina
  Intron number 1 from transcript clementine0.9_006963m (loc us clementine0.9_006963m.g) derived from phytozome v7.0 (c hr-ID scaffold_9; pos 2808261 to 2809050 reverse strand)
tagtcttatccttcacagttttgaagaaagaacaggtttttactctcttatttaatctttagttttggttcaccgcaaaaagttacaatttttttttatatttacatgtagaattctgtgacatgtaccatagtatatgcatatgagtggcataggctgttttgttgaagcgtgtgttgatgatatttaagatcttggttgtgtccatttgtctcaagttctgtaatttgggttagatccttcgtaaatatactatcttggtctcattactctcccagatccatgatttgagttcaccaattctttgtatgatggcaaaatttagcgtttgattttaatgtgtttagatcattgttgataccaagcttctggttccttttccagattatgatcgtagtagctgaattccttcgtatttttgttgatctggattttcttttttagctatatgcaattgcttttaactgtttctacttttgggttcagtgtatctggctggaaagctatttcaagtaaagtaatgtggtaatgctgataatcatagatggggttgcttattcttgtggttgttagatttccactgcagctaaatatataagcggtctctcaaacttacttttgacacaaataaggccaataaattgcatatatacagtttcttaacattgaactgagtctggttttaggtctttattctttttattggtattaggtttctctatgtcttccccttgccacactcaattttctgacttttacttgagtttataaaccatgtagtcgattcaca

SEQ ID NO: 86777 - DNA, 942 bp, Citrus clementina
  Intron number 3 from transcript clementine0.9_014702m (loc us clementine0.9_014702m.g) derived from phytozome v7.0 (c hr-ID scaffold_6; pos 2578799 to 2579740)
accagaagttgaaagaaaggtttggatgagcatgattttcaagtctttgtggcatcaaagtttgtatgtgcttagtgttgacatggtgtgaaattagtaaaaagataacaaaatttcagtaaaaatatatatactttttaaaatttttagaattgtggtaggtttgctctatttaacctcaatatcttggaaatatatcaatgaggattgagtcaaaagtaattgatggcatggtatgtccttggtgcttagtttctttcattgatgcttcttgaagatttcgactgaaatttagtgactgagcataggctttgtattttcattttttttttttgagatggccttcgccccacctccacccccttcccccggagaactacatataagaattttcttctgtactgaggagtccaataaaaattaatgtgaataggattaaatccatcgttcaggaaacatatgctgggtttattatcctatcttgatttgactactcagtactcagctgattcctgagtggatcagttcatgcaacctttttatgaaatgaaacaatgcggtgaaatggaaaaagaaaagatcaaatctgtttggatacgctttctctgcttatattgtggctactggtgaaactggcatctccttttgtcgctgtatgtgagtgaaattttaactttttgagaatgattatagattgtcatgcacttaaattcttgctgattttatattgaaatgacaaggtgggaaaagttcttttaagtttattcttcatttaggaaatgttagaaatttgcattgccttctgtttctaacgtttttactgtatctatctgcgcgagtgttgatctgtttgtcttaggtgcatgataaatcacttggattgtataccagttaaaatgtgttattatgtttgtgactgtagttttgagaagtccccgcgac

SEQ ID NO: 86778 - DNA, 1050 bp, Citrus clementina
  Intron number 1 from transcript clementine0.9_024179m (loc us clementine0.9_024179m.g) derived from phytozome v7.0 (c hr-ID scaffold_19; pos 3825449 to 3826498)
gcgactcgacttctcctttcgagtttcagacgattgtgtgctctgttttcagaactgtcttcatcaatttttgtctggaagagaagatagtacattgtgtattaaaccattggatattcgaaaattacattgagtctcgactaatctagattcgagtcaagtaagaccattagggcggcaaaactctcctaacaaatatttaacattactgcattcttaagtctcaaatccaggaccttagttaagatagaacgactccttgtatattggtagatagtacacttatttgaatcaagttatgtgaatactgaatagaatgacaattcatgcggtcaaagataagtccaaactgacacgtttgttcgggtactgaataactattgagattcgtataatataatctcgatattagacatagaagattgacgcaagtaccagaattatttaacttgtgacatgggaaaaaaaaacaagaaaacaaaccaacaaaaccactgatgtacagttcaacaattgctctatcataagatagaagtagtgttggttcttggaaattatctttaatttgtggtcataaaagccaagttaatagagtcacgtcaaattgcttcctgtcactcctttaatccttctagcatgtttcctggatcttgactggctgcatccaatttgtttccaaagtcttcacattcgtggcaggcagtaaaccaaaaacatagatttttaggtactagacatttcctttgcttcaggtcgagggcacatttctatcactgtcaagaaattatgacaagcaaagaacaatatgtgaattggagctcaaaatccgtgcatatgagaatcattcaacgtggattctgtcaggattcaatctgccggttgaattttttttcttttttcgtttgtggaaatcacatgagcaagagtaaatcacatgttttggtgtggaaagaaattctgacgccatggacgttcatgaaataaatggaaagcgtgagtccttttcatgttttacttatttcgttgttaacaggtgaagtactcttggat

SEQ ID NO: 86779 - DNA, 573 bp, Citrus clementina
  Intron number 1 from transcript clementine0.9_005481m (loc us clementine0.9_005481m.g) derived from phytozome v7.0 (c hr-ID scaffold_34; pos 726790 to 727362)
tgtgtttggcgttttgcatagagtgactcaccccagtgagtgtttttttatggattgctttgccccgtgtatgcaaactgtttatgtttgtaacggttgtgtgcttatccgggcctttatgattcaatatctttactgactactgggttttttttattaaagatagatttttcaattatcttcttttgttgagatttatcacattattcctttgatgtgtgcctagcgattggatctgttctgttatgtagttgctgatatacatttttatgcaattgaatgttgtatactggcaagcatttattggtcatggtgctgggatcaaaatatctagagcagaatgctactgttgattaccaaattgaatggatatctgtgtgtatatattgatatttattcatgcatgacattaagcagaaaataaacaaacataagataaaatcagaaaatcaattaaaattctgtggagctatggctaagatgtctatagaatggtagaacaagctaagtattttcttatttattaattattgtgttgttttggattggtgtagtgggttaccaagcaaaagc

SEQ ID NO: 86780 - DNA, 712 bp, Citrus clementina
  Intron number 2 from transcript clementine0.9_005481m (loc us clementine0.9_005481m.g) derived from phytozome v7.0 (c hr-ID scaffold_34; pos 727473 to 728184)
aaggggtacaacattaactactaaacagcatcgtatagtattcaatgggatgccgatttaagaggacataccacacattttccactgctagaaaaaatattactaaaaattaatggacaattacacccaaaaactctcaggttgggaacacactaatttctgtcaggataataccaagaaaacatcgaaatatgacatatcatcatcagtgatgcatcaaatttattagcgatatgttgcactagcatcatgaccatttacttaccttcttcgaaatgtactaatctattaagtcacaggggtactgaaggggttctatactataaaggggccgccattttcaggaaatataggggaaaatatttcttgcttcttgtctgcttctccaacaacactgtatgtttccataacagcgtttgatggcctaataaatgatctgctaaaaatgcaaagatcagaaacatataatacaactcaagattaaacaacataaaacaaaattattcctttcctgctctatgatttcagcaaatattcaccatgatgcaatgagattttcatgtaagtaatcacatgcaactttgttatttgactgaattcatactagggaaacagagagtttttatctcttaccactagcaattttgctcgtaattctaattgacttttatgtttaggtcagcctcgaagtcaaggttactgctggaactcc

SEQ ID NO: 86781 - DNA, 931 bp, Citrus clementina
  Intron number 1 from transcript clementine0.9_016490m (loc us clementine0.9_016468m.g) derived from phytozome v7.0 (c hr-ID scaffold_55; pos 821188 to 822118)
attgattcttgaagatatctttttgtggtaagtttttttttttgaattaatcagaaaaattcattcttgcatacacgtatacataattacgtatttagtacagaaaatgatggaggagtaagtgcttggcatggaatatgacatcttgatttgtcatctaatgccggctgttggtgtttgtggagattattatttaaacctctcatattgatttttaactctgccatagtcatattcagaaataagcagattcattttgtagactttttgcttatttctgcattgttactggtatgcttctgaataaattgaattagttatctcacatatttatcaaactgtttcgctgttgatctttttatttttggttttaattgatttttcgaatgggtatgtaaagttgtagtttgggtagtgaccatttgttcagctttggcagtattcatgtgttacttgtttttattttattttttcttttgtgggcttgaacagttggatttttggaattttctatagttcttggccatcttcttatcccccctttatcgtttgtctcttcccttttttaggttacgtaatcactgcttgtttcttatttcaattgcaatcggattcattatttcctctatagttcctattcttctgctcgagactttttggtcttcatcttcttttctttattcactctcgctggggatttatttggcctgaattttatttctattgtttctatttttaatatctattccgctcttcacatcagtagactatctggattgcatcactttcaatagaaattgacacaccagttctcttacgtgttgatcaattggacttccccggtctttttttttttttggttttcaaatgttcaaatcatattgtatgaattggcatgaactcactttgttaacacggctgcagggtcttt

SEQ ID NO: 86782 - DNA, 996 bp, Citrus clementina
  Intron number 2 from transcript clementine0.9_016490m (loc us clementine0.9_016468m.g) derived from phytozome v7.0 (c hr-ID scaffold_55; pos 822870 to 823865)
cccaaaaagatactccttctgagctgcctttgcaggtacttgttagtttatcttgaaatttaatggaaactcttttatgcatagatgtctgacttctctctgttcaaacattagtttcacccttgcttaatcgcactgatgtttgttatatcccaaactctttcctggcttgtgacacttttagcaagtatgagattttcaaccagctaaactaatcttgtcacgggttccataaagaaagttggttcagtcacatgtttttagaccatgaaataatgcaagactgccttctagttttctttgacaatgtttgagtgacttcttattttagtacgtactgatgatcaattgtgtgaactttatgcacagctgtttacttatgtggtagataagtatctactcattaaatgagttggaaaacacacaaatacttccttgagtttaatcttttttcaagggttgtagagctttcttttggattggatatattctgctctaatgtgttatctaatttcttatgggtgccttctaagacctcatgattgtatgctgctagagaattctagattcatatatcaaacacatgaccgacttgcatcgttgtagcaagtttctgtatgtatgtggaggatccaattgatcctcttctcttcttttttaaacttgctatcttgttgaacccatcctcttactgttcatgaactgaattgccgcaatgtatatttctattcatacgtgtaaattttaactttggagaattgtcgactttccaaatcatgcatgtaatttagactttattctggtgttcttaatactttatgtttggtatatcttatagaactgccaatggtcaagaatctgttttactttccagttgagtaatctgtttgtgttgatactcaatttgcattcttgttttgctccaatagttctgcttttcatatttttcacaactttgcaggtattagatttttcagatcacaaaccggaaagtga

SEQ ID NO: 86783 - DNA, 789 bp, Citrus clementina; identical to SEQ ID NO: 83538
  Intron number 1 from transcript clementine0.9_027661m (loc us clementine0.9_027661m.g) derived from phytozome v7.0 (c hr-ID scaffold_6; pos 5116908 to 5117696 reverse strand)

SEQ ID NO: 86784 - DNA, 901 bp, Citrus clementina
  Intron number 5 from transcript clementine0.9_010998m (loc us clementine0.9_011006m.g) derived from phytozome v7.0 (c hr-ID scaffold_34; pos 1342013 to 1342913)
tcaagatcaagcagcacttacattgggaaactgaggtaggattccttctctttgtggctccctggccctttgctttgccagtcagctccttagtccttaactgtatctgtcgcaaattaagagtagagctgaggaaatgaaaatttgtgatgaattctatttagttgagtacaattgaaatttttctgtagcgtttgtgctgtcctctaacaaagtgcatggacaatggaaagagaaaaaaatcttgaaatttaaccctaaagacatttgaggtttctagacgtgttcttgatgaatcttccatgacctagcatgttaagcaattttcagtttgttggtttcccaaatttatgttggatgaagggatcttaaaggcaagtgtgaggggtcatcatttagtgcagtttgttaaaaaaaaaaacttcttggttgctaattttcatttacttaatgttcttatatagtatattaaaatagaataattttgcttggatgtaatacttgtaattgttgatgttatttgtattccacattgcatggtttggattttgactgaggaatttgagaaattagatcgttcttgcaaggccactttctagagctctttaaatatagaagtttatcagcacaataacacttccactccccgcccaaactacaaatctcaagccacagaaaagaaacttatatgcctttggatttggtggttgtgggtttagcaacatatagagaatgcacaaatagaaatttattgtttgcaattcattttcccttcttatcagatggacacagatatggttcttggattttaagatcactgtatatttttactataaacccttatgatgtaaatactttctttgattcaggtcaaattttctaggcacaaaattcataattt

SEQ ID NO: 86785 - DNA, 456 bp, Citrus clementina
  Intron number 1 from transcript clementine0.9_034700m (loc us clementine0.9_034700m.g) derived from phytozome v7.0 (c hr-ID scaffold_46; pos 490873 to 491328 reverse strand)
tctgaaactgttacagtcaaaagtttggttaccttgtgagttatttttctatttagtttctctgtatctacttgcactatacttcctgtgacgttcattttgtatccaaaaagggaaaatcagttatgtatgaatattcatgtagccaccaagaattagtataaaaagaaatttttaaacataaaacaaaaaaaatttacgaagtaatatcataaatttgtcggccttctgtcaaaaaagggtaatagataaatataaaggtaacataaaatatcacactctgaaattttaattctcttgtgggtaccttaatttctaattatcaaacactttactattcttttagacagcaagatcaaatggagcctttatgtatagttagttttcttgtcctatattttgcaaacacatgcgttcttaggtggttcatcccggtgaatattttagtctcactaa

SEQ ID NO: 86786 - DNA, 639 bp, Citrus clementina; identical to SEQ ID NO: 81119
  Intron number 3 from transcript clementine0.9_014354m (loc us clementine0.9_014354m.g) derived from phytozome v7.0 (c hr-ID scaffold_6; pos 5612801 to 5613439)

SEQ ID NO: 86787 - DNA, 591 bp, Citrus clementina
  Intron number 4 from transcript clementine0.9_009187m (loc us clementine0.9_005446m.g) derived from phytozome v7.0 (c hr-ID scaffold_19; pos 751400 to 751990 reverse strand)
tgaggtaacatatcccttgctttccttcctttacttggttctttaattagcacttcattgtttgcaattttcttccttctggctaatttttttattgaaattggagtggctgcatctaatttctggatcaacacataagtaggtttcttacattaatcatttcagctttataatttgcttcatttcctcttaaccttaagcccttccttacttcaaatgattaacatttttctgagacttggtttgtggtgatctgctttttttgggctggtattaagggcatcctgtagaagtggcatctttaatcattaatgtgtggacatttcagttgtccctttgttgtgagctttctattgtaatttcactttaattagtcttgtgccctaaataaactgattttatttcaggcaacacatttgtatctgcattttaaatcacatttagcaactttgaattttttagtggcattttggatgcctagctgatttcaaattctaagtatttgttctagatggaaagtaaggaagtaacaatattaaatttcataatttcatagccaattcagcgatatctatcaggaggagcatttta

SEQ ID NO: 86788 - DNA, 332 bp, Citrus clementina
  Intron number 4 from transcript clementine0.9_022337m (loc us clementine0.9_018992m.g) derived from phytozome v7.0 (c hr-ID scaffold_19; pos 2819943 to 2820274 reverse strand)
gggcaggttatttgacatcatacaatttaatgtttttgtttgttctctggataattttggaatgaaacttagttttgcctttgatttacttttactctgttcttagaactacaaaatcaactgaataaagagatatgttcagtatatttatcaggctatattctgtcaagataggaaagagttgaacacatcatatgatgtcttgttttttgttttggttttcattttcttttctcccttctgagtaactgcttcctttgttctttaatgtggtaattttctgttttacatatctaatgcctaatttctgtctattgcaggcctgaacagag

SEQ ID NO: 86789 - DNA, 583 bp, Citrus clementina
  Intron number 1 from transcript clementine0.9_022266m (loc us clementine0.9_016395m.g) derived from phytozome v7.0 (c hr-ID scaffold_19; pos 210272 to 210854 reverse strand)
tgtcttcccacaagtcaaattcgttccttctccacgtaagctaattactccttaaacctgacctctccaactccctccccagaaaatctctctgtctttctcttctttcgtcttaattttctaattattttccttattattattattattattttgctaggacttactagctagatattacctgcaaattaaagagttattggttggttggtcggtcaaaaatggcgctttgactgacaatcttgcagcgcccgtgatttcactctggtcgataaaacaaacaacaaagtcaagccttaattgatgatcatttttttcctttgatgcatatgtagtacgttttcacataaaacttgcatgactcgtggaagttattgtcttgtttgcctggagaaagcaccggtgctttcgagtctttaattggtagcaagtacatatgtctgtgtatgtcgacgtgtactagtgtggttaagcccatttgatttgataaattgatattatgagactgagcccctcctattttgtgtgggtgataatgctgtatgcagttggcaagttaccaaggaatcaagtgaatccagag

SEQ ID NO: 86790 - DNA, 234 bp, Citrus clementina; identical to SEQ ID NO: 82731
  Intron number 1 from transcript clementine0.9_028500m (loc us clementine0.9_028500m.g) derived from phytozome v7.0 (c hr-ID scaffold_32; pos 1076413 to 1076646)

SEQ ID NO: 86791 - DNA, 1024 bp, Citrus clementina
  Intron number 1 from transcript clementine0.9_003750m (loc us clementine0.9_003750m.g) derived from phytozome v7.0 (c hr-ID scaffold_6; pos 564961 to 565984)
tgaccactctcaagtacgttaggcactggaattgttattgtggtggtggtggtgattccatttttgatttggcaaaaggatttacgagatacacattttgtgttctattatggttatggagtagttgtgttagcagccatcaacatccagaaatatcagtttttagaagatgaagattaagagtctaatcagttgggagattgaaccagtaagcaaatggctctactgcggcttgtggcgccattgaaaccaaacaaatggaatatatatatatatatatatatataggcctatacggtataaggtttattatacaattcaattatttgcctttgtttgatctaaattggacacatcatacatatcaccttttggaaaaacaaaaatcttggaaaatttgaaagaataagaataactgtaaggtgaaatatcaaacggaatatctttacttattactattttaaatttttttcaaaaaattattgagatttatgttaaactttttacattattgtgctgatttgaacttcgtatttatctttctataatattatgattcctatcgtgacaagagattataaaagaataaatacaactcaaattgatatttttaagtaggtgttattcttaataaacatgattttttttttagggtacaaaatctattaattttgaatcatataagctagaagagcgggatttatatattttgtcatgaaatttagttagtatttaatttatcttaccaaggaagctgtcagctcagctgtgcacttacttcacgtaattgacaagatccgatgcatactcttctccccgccaatttacttcaaccaccatttaaatctcaacaaactctcccgccattgaaaaaaaaggtacccattaacacattctcaccaaatcccaaatcccaagtcgcctatttatgttccatttcaagcgtttcatgttctgagcggacacttctcttcaatgactggcctcagcttgtcaaaatctcaattgggtcaggagatttaaa

SEQ ID NO: 86792 - DNA, 651 bp, Citrus clementina
  Intron number 1 from transcript clementine0.9_000765m (loc us clementine0.9_000765m.g) derived from phytozome v7.0 (c hr-ID scaffold_6; pos 6412073 to 6412723)
cttgagttcttcattcgataccatttgcctaaaaggtatatgttttgaacagctgagctttatttttttattttattttattttatgagactgtattctgatatccgtgttcgtcaaatcagttttgaatttattagtttaataactatcgctattttatttttatttttattttttctgagattcttggttagccgggtttgttactgttactgatcttattggtgtgttatgcaatttgaatctaagacattgatagatgggagaaataaaatgaagggacatttttagatagtttctgaagatagaacattgtagttcaagactcaagagaagggataagtgtttttggtacctttgaggttgtgtgaagtcaaaaagtggtaagcttatatgatcaaactagtagattattccttcattaatgccttagcagaagaaaaatattaaggtgttaactggatttggggcatatttttttacaaatttctttaggtcgataccgaaataactggtttttatttgtatttttcaaagctgaaaggaagtattatattatggggttgtattaatattgttactcactttatctttctgaactttggattgtatgcagtataatttcgtttgatttgttggagctttgacaaa

SEQ ID NO: 86793 - DNA, 423 bp, Citrus clementina
  Intron number 2 from transcript clementine0.9_014080m (loc us clementine0.9_014082m.g) derived from phytozome v7.0 (c hr-ID scaffold_6; pos 4615546 to 4615968 reverse strand)
gcagtagtcaaacctgaggtatgttgtgtaattgtttcatgaatatctttggtctctttcttcgattatgttctttttaattagttagtagaaacaatggataccagattattctttggaaatgtagcaaggagcaatggcttttttatggtgtagtaagtatatgtttaggtattttgttgttaatctaggtttttacttcaataaccaattttgcggattcattatagttttgtcctatgttaaatgctttgatcactggatagagcctagaaactgaacttctagtgtttgagagttggaatgtgcaatacaatgatctagctatgatcatctacttatttatttgtttatttattttgcctttagcggcctgtcagtcttgattcttacttggtgttgattttggtttgatgagtccag

SEQ ID NO: 86794 - DNA, 1056 bp, Citrus clementina
  Intron number 1 from transcript clementine0.9_014080m (loc us clementine0.9_014082m.g) derived from phytozome v7.0 (c hr-ID scaffold_6; pos 4616196 to 4617251 reverse strand)
aaaaaaattgtcttcgtttaagcttcggcggtaaggtaatcaaaattctgtaattctcttatgaccaaaaatatgttatttttattatggattatgaacttaattaatgaaaatgttaaatgtatttttttatcaaaatgatgtttggcttgttagttagcttagttcaactatataggaaaggaaattgcaaaattgtaaacttcttttatttttttagcatctatttgattacttgttcttaaaatttatctgcatcccagcttaattttattttttaacgaacttgatactatagtatagcattagcttattgctgcaccggaataatctataataacttaatgatgttatcaaattggaaaacaaatttctcttgatatagctgaatgaattttggcttgcattttatgggttttgaaaatggtagactgtcattgtttcattctagcgatgtctaaagtggaatttttggccgggaaaagagtggaatttatgctacggagaatgattcatggagaattttttggatacgaagtggcatatgatagtctcatttgaactctgcagcaacaagcactattttgaatggtatttgaaaaaaattgaagtctcaaaataagtctttggaagtttttctgacaggacaagcatcgagagcccctcctcttgtccaatttctctttgtttcttcggaaggtttggtcgcacctttaatgggaaaacggtttggatttcacatattaatgaaacaggggcccacaaaaatatagctcctaaaaagcaacattaattcttctattaagttttcgtgtatatatgttcattatcggtagaactcggatcattcctagatgctttctgtggagtagatgtcttggctttgtacaaataactcctgcatgctataataccaaattttcatttttagtctaaatagaatttggttttagttaaaacactagcattttcttttgaaatgtaatttcaattgtaacatttcatgttgtactgtttatagagtgacaactgaaaagactgaggaagttttcctga

SEQ ID NO: 86795 - DNA, 889 bp, Citrus clementina
  Intron number 1 from transcript clementine0.9_022614m (loc us clementine0.9_022616m.g) derived from phytozome v7.0 (c hr-ID scaffold_55; pos 290029 to 290917)
tccttttacgtgaacatcgaaagactcgtttcaaggtcagttcctttactcttctttcatcaatctttcctcatttaatttgatatctatttttttaatcttcaattatttatttgtttttattaattaatgcgccctgaatctgggatttgtgatttgctgtctgggtttgtttcgtttagatctgtggttgaagttccctttttatcttcgaagtaaattagctgtcaaagaaagaatcaaaagaaaaaccctcgcttctgtttggtgggcgagaaagcttgggaaaatgaaaagatagaatcttgcatctttcttttaggtgggttttcgtttttttttgtttgtttgttttgttttgggtatttctttggatctttggttgatggaaatatatagaggaatacggctaatgaattgcattttaagtaagtctttgtaatttttcccctttttttccccactttgttaaatttaagaggtttttgttttcatgggctttttattatgattattatttatgggtttctttaagtaattaggtatttggtgtatttacttgtgagatttgggcaggtgttcatgagtgttaatatgtgattctatcataaatccgtatctggatctctgatttgaagcttgcattgaatgaataaccatgccggcaattagcgttagtagtgcagaggtgttcatcattaatgcttaaattgggattagacttgaatctattgtagtcactagggttgtcattgaagtttttaagaagcactgctattcattcagttacatttatgcatctgttatatctggtgatctctatgaatacgaatatgtaattagattggactgtgctatatatttgcaggacttttcatacttcgattga

SEQ ID NO: 86796 - DNA, 229 bp, Citrus clementina
  Intron number 1 from transcript clementine0.9_021989m (loc us clementine0.9_021989m.g) derived from phytozome v7.0 (c hr-ID scaffold_22; pos 484458 to 484686)
ctctattagattctttatcttcgacccttagccaggtaaaataatagaaataaacatgccgttttaattcacaagactgaaactttactatatagatcgaatctcttactagttttttcttatatgggtttttaatgtgatattttgattttttaaaacatgttaaaagtttgaagaaattggtaagaaaattgctttcaggggtggctggaattggcaagcgccaggc

SEQ ID NO: 86797 - DNA, 949 bp, Citrus clementina
  Intron number 1 from transcript clementine0.9_023295m (loc us clementine0.9_023085m.g) derived from phytozome v7.0 (c hr-ID scaffold_34; pos 1857500 to 1858448 reverse strand)
aggtattgttttaagtttattcttcggtttcgtattgaaatctgtttggtttctgagaaaatgaagggaaaaaaaaaagatagtatttttcgatcgaactccgctgtagcagttttttctttttttcttccaatttgttttaatgcttctgtttggttgagtaaaggaaaagtttggaatttcggatcttttttttttcccttgttttgtttctcagggcgttagtttgatttgtggattctaggacttgttgtttgataattttaaatgatggcatctttctgttttgctttaataggcttatattgtaattttttgtaattttaagttgtgtttagctacattagctttgggcatttatatcaatggttagttcatttgatgctgtatgaatgaatggtttgcttactttgatcagtccctggtgctttggtatttgatatcttgcatcacatcaaatgaagtatttttgtttcctaagtagagtagtatcaatattctggttgattgttcaaatttcaagtatgattgtagaattttctgtgccttgggttggagtgtgacaattttcgagagcaaacctggggcatggggatttagatgaatttccaatgcagtatatttcatggatttgaagttcttttctatggcatagtaaaatcggtttctgcgttgatgcatgaattttgacatttattaaggaaatttcaaatacctttgtagtacatgctttttgtttctgctgtatctaacgttattggccatatgaaaactgaaaactatgttggcagacttagctcatttggtcaaattataactgaaccagtgctacactgctctgtaggtttagggagaatattgctaagtcttgtccgatccatcattgttcctttttagtctctaattttccttttgaatattcaactttcagccggcatcctactgtgaa

SEQ ID NO: 86798 - DNA, 495 bp, Citrus clementina
  Intron number 1 from transcript clementine0.9_001414m (loc us clementine0.9_001414m.g) derived from phytozome v7.0 (c hr-ID scaffold_9; pos 836404 to 836898)
tgcggcgagctctcttgaggatatctgctgcccaggtcagcttaatttatatttttaattttctttgatctgcttccatttttattttgtcggtttttttttttttgcctcgtagctctggtcgttttgctatgaacagagataaaattgagattattgattcgttattttttaaaactttgcagcttttgatctgatcaaaatggatcttgattttgttgaaatgcataattactaaaatttattcgtttgttttaaattaggggcttagttagctgattccttatttgtatataatgcttgtcaaaatgtgactttgtttgcttttggcttgtcttcacttgttcttaattatacaactcaaactaccatataaatttaagctggaattcatagccattcaaggattgattattttggcatattaaaaaattggcttcctttgatgtgttggttacaggttggaaggaaaattgagtcaacagtgcttcccct

SEQ ID NO: 86799 - DNA, 634 bp, Citrus clementina
  Intron number 1 from transcript clementine0.9_001649m (loc us clementine0.9_000544m.g) derived from phytozome v7.0 (c hr-ID scaffold_6; pos 4532719 to 4533352 reverse strand)
gccgcggcgtcgttattgcgattttcggtattgaaatttattttatcttactctgttccgttcaattgaaatcagttgcctactcactgtttagtagaaaaataaacgaaagtaaaaaaataaaaatagaaatgctaagtaaagttttggtagtgaaatcgattactatttgtctgtttgctggaaaagagaagaaaaataaacgaaagtaaaatgatgttgttgatttcccgtgccgctgcaatccagcagttgttgtgacttgctgtccgtccaacaattcagttgactcctctcatgcttaagtttattttgaaactttaagataagttggtagtttcaataaatgaatttgacatattattgcagagctagttatagactttgttggggtgttgatatcaattgcttgttttctctttgatagaaaaagaaagaaatttgtcttgtcataggtttttggagttgaaatcaaatacttattagtagacctctggtggcgatttttgtaattgaagtcaaatactcctctgcaaggcagaaaagaatagaaaaattatatctaatctaatgtgatttcatggtatttgtgttttcagattctggtgtggaccccgctgctgctggtttgcag

SEQ ID NO: 86800 - DNA, 539 bp, Citrus clementina
  Intron number 2 from transcript clementine0.9_021355m (loc us clementine0.9_021355m.g) derived from phytozome v7.0 (c hr-ID scaffold_34; pos 434486 to 435024)
aggtatggtgtttgttttgttttgtctgaactgaaatgatgtatctgaagtagttacatgcacggtccaatgatcaaatgatagggttctgtttcctaaaaacgtgtaaagagacatgaaactgttgattctatgaacagatctataaatgggatgtgttgtggcttcatatatatttctctttattctcttttttgtgcatattttattgaaaaagaaacataaaaccataagagatgtaacatctatgaacagatctggtaataccatgtgttctcttccttccttttccttgctaaaatataacgataattattatagggaatttaaaccctccaaaggcattcgtaatatataggtcaactctagagtattcttttcattagagcacagtataaccagcagattttacatgtttatgaaaacagatctgtcaacaaactgctcctttttttttttcatttttgtctcatgaagtaataactaatatgcattatatatctactatactttattgcaaatcacacagaacctctaca

SEQ ID NO: 86801 - DNA, 659 bp, Citrus clementina
  Intron number 1 from transcript clementine0.9_026192m (loc us clementine0.9_026192m.g) derived from phytozome v7.0 (c hr-ID scaffold_46; pos 1585634 to 1586292 reverse strand)
gagctctctcgtcgtcgccgcagccggccatcgtactgtttcgtttcctaccgcttctctcactttatttattgcttagttgtgattggaaattttcgattcgtgcgtcgatatcgttggggaatttggggaaaatttcggttcttgttattcaaaaaattatggtgctgttattagtttaggtcacaactctcaatcaaaatggattaattgaattcatatattgccttggaagcatgttcgtgatatctgaaagtttgtgctttttccgttttctctgatgaattaaatttttgttattttggcatgatctttttatctgaaagtgaaatatgaaactcgtaatctttgaagaatgattgtttgttaattaggtttccctcatgcttgatttctcttttataactaaactaagcagcatatatgtagtattttcagcaagactgggcatatgctgagttcttgatgtggcgtggaatggatgtgcaatttaaggcagatttacttgatgggttttgaatgttggtggattttttgttgtaactgctcttgttcatgattgtttgtcggtttttgtctctactcatataatgtctgtgttagtttttgtgatttgaggtgaatgattctaacaagtagtgtgtgtgtattgcaggtga

SEQ ID NO: 86802 - DNA, 737 bp, Citrus clementina
  Intron number 1 from transcript clementine0.9_006736m (loc us clementine0.9_006739m.g) derived from phytozome v7.0 (c hr-ID scaffold_32; pos 551547 to 552283)
ttagcaacactcaaaagtctctgcagtttcaactggtaagtgttctgaaatttattttgttaactttttatttatttgtttcattgtctgcttcttcttcttcttctttctttttggccgggggggggggggggattaaagatcagatttttaggatactgagatggtaaaaattgaatcttttgatctgtgtggacaattattcttgttgttgattatctggggtttggttttttatcggtagaaagagtaaaaaggtgaaaaggactcgtctttcaagaaaggctcatctgagttgccgtagatccaggaaaactcgagtttaacatgtgagaaaaaaataaataaataaaggttcaactttttagggtttttcttgtgattatatgtaggtgtggttttactttttcctaggttcttctcattgcttcttttgctttcccttgttgtgttttttaatctaaaagaggcttgattttgatggtgtatttaagggttgttaatcgcgataacatttgggtagtcttggtttattctttctaggaaagtttggaagaatttgattagtgaagtcttagttggctttatctttggaaactcaaggctggtagtgaattagatctttagatgaattagatccattttctgacaccagatctgatgaagctttgcatcttgttcatgttaacttattccatctttaatttgatcttggtagtgtaatttttggttagtgt

SEQ ID NO: 86803 - DNA, 590 bp, Citrus clementina
  Intron number 2 from transcript clementine0.9_006736m (loc us clementine0.9_006739m.g) derived from phytozome v7.0 (c hr-ID scaffold_32; pos 553297 to 553886)
gaggttctcaggtataactgtcctcctagatgtttccttcacttgtttggtctttcttttcttttcttttccctttttttttaagtttaaatttcctctcctgatttaaatgttcttttgcttgtgtaatagacctcttcgagaacatttgactaaactaattgatttttttctgttttcttattattgatgatgatgatgcttcaattatgattgaatgaatccaatgggcatgttcaaatttttttttttaatcttttttttaaatcatcacattgatgtggtggaccattgagcatgcttgaccaggattttttaacatggcaaagtagtttctaaatttatgtttaaactccttatctatttgaagaactctgagtggtgtgtatgcgcttctgttttacaatttatttttatgttccaaatgatcaaataatcaaatttcttaaccatacatatacacaatacattctggttctcttattttagatattctttgtgttggatgggtccaaaatttttactgctaccataatttggagaggtctcatgcaggctgctaactattgtcgtgagagaatccatttggc

SEQ ID NO: 86804 - DNA, 607 bp, Citrus clementina
  Intron number 2 from transcript clementine0.9_026032m (loc us clementine0.9_026031m.g) derived from phytozome v7.0 (c hr-ID scaffold_54; pos 292767 to 293373)
cagacacttctgtgtttgttaatcgtaagtcgctcttgatattatttactgttaattcaatccaacatcttttcctgaggcaatattgagagttctcaagatttccaaatataacaactgaaagtctcagtttagccactctttccatttattgtcatttacttactggtgtttgtagctcccttgaatatagacataattgtattgaaagggtccaaaatgttgtaggtgttaactgcagccttgcagaatgtaacccaaacataaccaactgaattactttagctccattatcagaaactatcatcatgaaaattgcagtttcaagatgtctatctactaagaaatttatgtgtgcagacctatatttgttttataattatttctgaaaagttcaatgataagtaaacattctgagctcagtgggttttggcaaaaagcaaatcaagatgcaatatcgagttgaatgattgtatcatatatatttttctgccttgttttgtaaccattttgaaagtacattttttggtttgtgatcttcctttgtacttattttacgatctcaattattttctttgaatgtcttgtgtagctgaacttgcttggc

SEQ ID NO: 86805 - DNA, 944 bp, Citrus clementina
  Intron number 1 from transcript clementine0.9_021966m (loc us clementine0.9_018660m.g) derived from phytozome v7.0 (c hr-ID scaffold_34; pos 675713 to 676656)
gtagtagagcttcttacggtacttttgtctccgaggtatgtcctttacataatggcattgtcatttagttgagatctaaattcgtatggttgattgttttatgcctaaatgttgctttagatacttgcattttgatattactgagcaattcttggcttggaccaatcaaagctattgaaattggtttagatggtgaatttgtggacctagttggtacaatgttcttatttttcaatagaaccgaattaaagattgttggtggcataacaaaattacagtgtcatgcttaatgcaatagttgatgtaatgggtgtattttaagacatgctaagactgtgttgtagactggcggcatgcaagtttgggaaagattgggttgcttatatgtctctcagtaattgcaaagcggcttctgtctctggggcacctgtgtcttttagagatgcctttgattttctatttgccctcaactggaatgcgaagatttagttcaaatgttaaaagtacattttttttaccatttgattactgaaaatttgtctcactggggaacagatttgatgaataatgaaatttgtcttttgagtccaacgaaacgcaagactaccaattttcatcttttcttccccgctttcctctggcaactaatagacgaaatattgcttaggccatatgctcattttataaagttccttgatacaaatgcacggatatatgctgtttttgcttaactctgaaaagtttagttacatgaaaagaacaaactgttcaatagttctgttagaaattatccatgacagcttatctcaaagcagttgtaatgtcacgttgtttcatttaattgtcaatgattatcaatgttcacttactgtcaaataggatgccatgttaatctgttctaattgctaggctgtaaggcttttgggacctccagcaagttttga

SEQ ID NO: 86806 - DNA, 809 bp, Citrus clementina
  Intron number 2 from transcript clementine0.9_010002m (loc us clementine0.9_010002m.g) derived from phytozome v7.0 (c hr-ID scaffold_137; pos 179592 to 180400 reverse strand)
tgtttttgttcccggtaattttcacatcacatcccctggtttcactcatagtatgacttgtaactatcgtaatgacccctgaatctcatatacaatatgtaatgtgaactgattttgccgtaatataaaacctggagattggctttaaaatggttcttttagtactctgctttacttttctaggatataagcgaattagatcatgttattgatcatttgtatatgacaggttgaattcgaccattgagaaaatagtttatttcgacttctgcacttttttgccatttgatagcaatctatagggcaaaaaaggccagtgaaataaagagtgttttcaacaagtgccgcacaaaatgagcatggatttgatactcaagtgtgttgtaaagttccctttgtaagcattttcataaaatagaaacccactcattcaaatgcaaagcctatcatttctcaaatgatcttcattttctctacccttttttttttttaacttctgcctcacatacatctggttttgttctgtttcatatttaggtgtttgtttttaatttaataggcatcattttgcttcaaccaaaattcacttttgaatttttcttaagatgcattaaatacattattcagctatgggattctgaatttcaggatctattatcacatcctaactttgttttatattgtatcctaaagtgttgttacaaattgttgtgatgtttgctctgattactactttagcaagagattgatttgagttttaatttatttttgcagcaataccacccgtcaagaatcctcacacttgtcta

SEQ ID NO: 86807 - DNA, 575 bp, Citrus clementina
  Intron number 2 from transcript clementine0.9_034403m (loc us clementine0.9_034403m.g) derived from phytozome v7.0 (c hr-ID scaffold_54; pos 720501 to 721075 reverse strand)
ataattggatttgtgttaattggaggagaaggtaagcgaagaaagaaataggggttttattaaaactgatttttatgaacataaaaaatgattgcaagtgtctaattgaatataaattgaggtcagctgtcatggcatacaagacaatccctggaacaagacgagcacagaagacagttcattggctgttgcatttgatagctcttttggctggagttatagggatttatgcagttttcaagtttcatcacgaatcaggactcccaaatatgtttactttacattcttggctcggcatgattaccatctgcctatatggtttacaggtaattcagtttgtgaacattatcaagtgctgacatccgcacattttgtaaaacagagttttaaaagtacagttactttaccaccaccgttaagtaactagcttcaaaatctgcattctaaaatgtgcggactcctagctaggatcgcaaatgaagaactgacagagcctttgtttgattaaaatttaattcgattcaattgtgcagtggctgcttgcgttcttctcatatgtgttcccaggtgcggaa

SEQ ID NO: 86808 - DNA, 792 bp, Citrus clementina
  Intron number 2 from transcript clementine0.9_035570m (loc us clementine0.9_035570m.g) derived from phytozome v7.0 (c hr-ID scaffold_42; pos 1384622 to 1385413)
gccaaatcaaacctgttcgattgctcggtctcaaggttttttttctttcttttttttcggattatggtattttgtcattgttaaatttatgaataaattccgctctgcatgactgcttctggcagagctgtagttgtatagcttttaagccaatgcggttttgtctaatggtcttttgaggaaaaaaaaaaaaaatacaccacgatagccaacagactctttctgttattgtgccttgagcaaataaaacataagtttgttttttgtcttctaaattttcactatatttgatattcatttgtttatatgacttgtataataagagtactgacttgcatgcacatccaacgctttcaaatgcaatgctttcatagccttgagtttagaacagaacatactgacattgtgaggacactgccttaatctattttaacaaagttagaaaaagggaaacttcgttgtacagcctttcattttttctatgtggaatttgtttgtgggttattatggttattctaaaacatctatgtaaacttttaggaagctgtagctgcttctgatggtcttatgttcattaggagaacatacattgagttctttgatagtgtgatgtatttaaaaccgttatttatggtctaatattgcatcataaacttagcaaaaaattatcactcactcggagtttccttttgcattttgtatctgttgtagtatagttatcttgcttattaagtatttcctgttttgcatgttataggtttggccaattgaggtggacctgaaattcttaga

SEQ ID NO: 86809 - DNA, 522 bp, Citrus clementina; identical to SEQ ID NO: 81111
  Intron number 1 from transcript clementine0.9_025675m (loc us clementine0.9_025675m.g) derived from phytozome v7.0 (c hr-ID scaffold_9; pos 1458978 to 1459499)

SEQ ID NO: 86810 - DNA, 626 bp, Citrus clementina
  Intron number 2 from transcript clementine0.9_025675m (loc us clementine0.9_025675m.g) derived from phytozome v7.0 (c hr-ID scaffold_9; pos 1459510 to 1460135)
ctaagtgtcctgtcactggaaaaaggatccaaggagtatgatttcatatttttcatatttgtctaagttgctgatgttttgtgagactacactctacaacttttcatatcacattgatgattaagtctctaaggattctagttttaaatgtggtctttcttgtattgtccatactgttgattgctggtaaaaataaaacactgttccagttcagcatttttttttgttatacttgaatgtgcaaatgggaagccttattttggttgaataatttatggtgatgctctcttgtttgttcaagtatcatatttccggaatggcatccagtactggtacggcgagtctgacgtatttttgctgttttacaaatgaattttattttatgcacctttgattctatgatggtttaacttctgttgttatacttcttcttgagattgattgtggagctcgatcatgtgtttaattaagactttagattgtgtgggactcaagctgtgagtctagtgcttcaggaattgatagttgactatgtaacttgaaccatatccatgggcattcattctttgtaaatgttggatgtaactgcagattcctcacttgagacctgctgagtacaagaggtc

SEQ ID NO: 86811 - DNA, 641 bp, Citrus clementina
  Intron number 2 from transcript clementine0.9_000825m (loc us clementine0.9_000825m.g) derived from phytozome v7.0 (c hr-ID scaffold_34; pos 190636 to 191276 reverse strand)
gttttggttagtattgtcagttactttttaattaatcattaattgtacctagtttaattattttttgttggtgactacagcaaatgattatgtgtcaccttttagtttcataaaaaaataaatgtaatgtacctaatcagttttaattatatgattgagttttgtgtaatggaaatggaatattatagttaatgtattttattattattattagttataatattagaaaatgttagtgtgaggccgtgagccaactgcttttctttttgtgaaattttctgattcttggtcttgaagttttattgaatataatctttgagtactggcttgtttagttgtgaagcattcatgtggcatttgaattctgaagtagttccggtactatataagcataggctggtttttggatacacaagtctttttgaccatttgatgtgttggaagatatgataaatcttggaaaataagctttgcaaaatttagtaaatgaattaccttttacttctttcgtttcttgaaagatcttatgtttactgtatctcatggtgctcatagaaatttcttttttcccctactttttggttgttctttgtgtatgtggtgcagataaggtgtttggtccggcaacaacaacacgccat

SEQ ID NO: 86812 - DNA, 542 bp, Citrus clementina
  Intron number 3 from transcript clementine0.9_017298m (loc us clementine0.9_017298m.g) derived from phytozome v7.0 (c hr-ID scaffold_19; pos 2330483 to 2331024 reverse strand)
tacctgttgctggtatgcttaattgtgtcttaatattacaggtcgtttgattgttcatttgtctgcctgcctgccattttagttgacagaaaatttttaaaatagggaagacatttggtgttcaggagaattgtttttgatgtgattcatgaaaccatgcgcaaaacctgcagaatagatgctattctccatttgctgttttcataaatttaagaaaaccagttaccttgtcttcctgctttgtgatggtacagtcaattgatttaatctgttttaaacatcatatggaatgctgactccagcttttgttttggatgccaattcctattgatctgccggtatcgatgccacagtcactttcatactttaaggtcatcaggcaatggtgcttccctagtgctttactttatcttaactgatgataaacaaatgaagtccctagatttagactaacatgcttttatttcttggggattgtcaataatccttgatctgagttctgatttgatattttgccctgtctctacttgctgtagaggtta

SEQ ID NO: 86813 - DNA, 821 bp, Citrus clementina
  Intron number 3 from transcript clementine0.9_029566m (loc us clementine0.9_029566m.g) derived from phytozome v7.0 (c hr-ID scaffold_2; pos 1550340 to 1551160 reverse strand)
ggaacttcaccagaagaaaggagagagaattctgagtgctaataataaaggggatcataacgcgaaagcctataaagtgaagaaaggcgagatcgtgaaagctgttgttgatgcttaaatctgctcgccttttgaccgaccagattctttcaccaacgtttgtgttatcaactgttgctcgaaccactggggttggaatcgccctcctttctcttactagacctgcgttcaccaaaaacggatcagagacgccagtggttttgccggcgtaaaccctccgatgcctaagttagcacaaggtgtttacaggaaaacaatgcaatttggattcaagaattgtttctaatctattcgaagtttttttttaaagaaaaatgtttgattgcaatttggcagcgttttccctctcttaatttttctctcccttcttcatcgatttctcctccttttatagccgctgtcccacgtttccatttaccttcatccccccttttgcgggtagtggcagcctctcatgggactttaactgcttcattgtgggcaaacatgggatctcgcgtctcctgcaatggttctgggaaaagcgcaactactgtgattctgtggaatcgtgttcccgctttttgggggattggtatcggctcagtatatcactctggtcggtatattaccctggtcggtacccgtctctggttggttcatgtttatccccgtgtcctgctcgtactatttggctgaggtgatccatgccggggcggaattaatagcatggccgaccttgtgcttttatttacttaacagctgtggttgtgtgtaccgcc

SEQ ID NO: 86814 - DNA, 442 bp, Citrus clementina
  Intron number 2 from transcript clementine0.9_017894m (loc us clementine0.9_017894m.g) derived from phytozome v7.0 (c hr-ID scaffold_22; pos 1474607 to 1475048)
aacgtggcttttcttgtcgtaggtgaccctttcgggtaatctgaattttcctttattattattatcattatcattgtcatcatcattaattcattattattatttgtctaaattggctttttaatcatgtttttgtgctttgttaattgtttatcacttgtcatggagtagtcagtagaagtttccattttgtgaagaataatttgtaaatgggacataacaaaagcttcaaaccaaattgtggaactgaaatagaagtgtaatagatcatggtggtacataatgcttttttgaattattcaaatctgtctgatggatgttttatttgagttttgtagtttctttgttgttgcctttactggcgttgctttattcttgtaaagattacgatttggtttgtgatgcagagctacaacacataccgatctggttgttcgagcta

SEQ ID NO: 86815 - DNA, 1041 bp, Citrus clementina
  Intron number 2 from transcript clementine0.9_020274m (loc us clementine0.9_017122m.g) derived from phytozome v7.0 (c hr-ID scaffold_9; pos 1284281 to 1285321 reverse strand)
agaagcaaaatatcggcgaatttgagatattggaggtataaaaaacaagcatatcgattttcatctcgtcgatttaactcgggaccggttctctttcatttcagttttgaatcggtttccacttgcttcttattacgaagcttatacttaagttcgactccgattctcgttttttcagctgtttggctctggcgagaattcatcattagcgtctacaagaaatttcagttccatgaaaatcttgacttgttattgatgaaatattttttcgttttgatttttgttcttttgaccatctctcagtctcgtcttattcgagctttaaaatttttgtcagtctcgtcttattttgagttttagctgtggctgcttctcagatttttctcaaattacctacgtttggttactgagaaagaaagcagagagaaaaataacatctcagaacttctttccattctcgaattgatctctagaaccaacgaattggttctgattgttgcaattcacgatccttctttattttctttttcgaacattttctcggcagccgagcaaaagcatggagcttgagaaattttttctccgttttctatgcgtattcttcgtcagatcctctggagtgagtacgtctgtgatctatttttgaattaaaattctcattttcactgctgatgactattacagcatcactcggtagagaattctgcattttttcattttgaaaaatccttggctgtcggatcttcctcttccagtcttcggtcttcctcagtattcaatatttttgttgcattttaatatatgtgattcttatggtaagcctacttttcttctcaaaatttgggaaaattcttagccgttactctaaaattttaattttaatcattcgttttaaatggcgtggaagttgccggaaagccgaagccgtatccaaattgttcattttgtttttcttttttagtataattctgcaagttaaccgtaatttaggatgagtaattgtaattaacttatctgaatgggacaggtttgcgaaaggag

SEQ ID NO: 86816 - DNA, 267 bp, Citrus clementina
  Intron number 1 from transcript clementine0.9_020274m (loc us clementine0.9_017122m.g) derived from phytozome v7.0 (c hr-ID scaffold_9; pos 1285430 to 1285696 reverse strand)
tctgaatccgatagagagatagaggagatttagaggtgtgtattaccaacacacttttgtttttcattattaagaagatcaatttaaaaaaattggccggtataattgttgtttggttcatgctttagtttacagacaaattcaaaatgacaaaagacgacatggttcagttggcttagtgttaattccgtataattcatcctctgatataatcattttatttgttttgcagatacatttcttaagagaatagagaaatttctgtaa

SEQ ID NO: 86817 - DNA, 225 bp, Citrus clementina; identical to SEQ ID NO: 82988
  Intron number 1 from transcript clementine0.9_013518m (loc us clementine0.9_013518m.g) derived from phytozome v7.0 (c hr-ID scaffold_26; pos 3262675 to 3262899)

SEQ ID NO: 86818 - DNA, 499 bp, Citrus clementina
  Intron number 1 from transcript clementine0.9_024816m (loc us clementine0.9_024816m.g) derived from phytozome v7.0 (c hr-ID scaffold_55; pos 1235994 to 1236492 reverse strand)
cagaatttgcttcggcctcagtctcagcttccaaggtagtagttcttcttgtttcactaaaataatggacataaatttttagttttaaggtttattatcctattcaattttcgagttttcttttcgatagtttcttttagtttagggttttaaattctcgtgtgctgcaattgttagctctttgcaatcaaaacacataaaccaattattggcagttttaatcgtaaatgaagtgtttagactcaaaatttgacaatttaggttacgcagggaattgaattaaattaaatatatatatatatatattattttgtttgttgcgggataatttcttgatttccaaaactatttgttagaatgagatttgttagatcaaatttaggactgtacggacatttttatttgatattgcattatgtagttctcgtatactctcaattcttgaattattaagctgaaagttcattattgtggttacctgcagttcaagtgggcggtg

SEQ ID NO: 86819 - DNA, 989 bp, Citrus clementina
  Intron number 5 from transcript clementine0.9_014066m (loc us clementine0.9_013906m.g) derived from phytozome v7.0 (c hr-ID scaffold_59; pos 159970 to 160958 reverse strand)
ctgtaaagtggagctttattaattcattgaaagaggttagctcgtggtagctgcttctctaatttgatagaacttggtatattgtattgcattcggtatcttgtataactttaacatggaacttgtaaattttatgattaattttattactaatgttattcgaagatcaaccacttgattgctaaccctctcatagtttacgaaagaaaagaaaaaaggtggaaataaaaggcatctttctacgctacacacacatatatgcacaaaatatgtagcaaaagcctttcatgttacttgtttcttccattaaatgaattaacattgttagagtgaccactaaacttggttgttttgtgctaacatgatcattcaaaaattatgcaagagcatagactatttatgcattggcttagaatcaccagttgggatttttgttagctcggccattatggcctgttcaagtacgatgccttatgcctacccatttaagccaatatgtagaattatgatattgctaaaagtttacactgtggatatcaactggtttcatccactagtataaagcgacaatattagaaagaggcaggtggttatttagtttcctttttattgtgacctagtgaattaatatcttttatttgaagattacaatctttatgttttgatgttacttggagacatataaaatgaccgaagcgatgctcttattcctttctttgatctttctctctctttctcttacttaatgaagcaggaaaaggtttaaatacaatgtcagtatgatttcctgtgttcataggatttatgctgaaatatagagaatgggacaaaatgaaatcaaaatctttgttctaatttttttctggcttttttctttatttaagttcatattcatttatttatttccatttgaagtacatgatgtaagcgttgatccagttatgtcattaatatttttcaattatgcctacaggcagcatatataatta

SEQ ID NO: 86820 - DNA, 984 bp, Citrus clementina
  Intron number 2 from transcript clementine0.9_021876m (loc us clementine0.9_021876m.g) derived from phytozome v7.0 (c hr-ID scaffold_172; pos 30433 to 31416)
caaacaaggtgtgacactcgaaactttttgaaaaggtaatgtttctctcccaatttaatacctgattttctgctaattgtgaatcaattgtttcattcgagatatttacccgaaatctgttttctgcatgtgggttatgtcagtgcttgaggcttcatacattgctttgctaagccttacctgataactcaggatgtggcaaggctatttgtttacaatattttggttcaatttcataggagcagtatggatttcaaaattcctatggggagacggccccatcccattcgcacctattattatatctctgaaaatcagttgggttgagattgggatttttcgctccaggctcggggatgacaatcttgaccccttgtcatccctataattagagatggtagaattccctgtgggaggggggaaaaaataggtagcaaggggatctagtaacattttacacatgatggctggtagctatcctttttgtgtaagtcagttatgtcgtttttacacgtagaagttgattgtttaactacagagtgaacagccgaattaccaatatgcaataattgatgcatgagatcatcttgtttagtctgtgatttctttcagaagtgttgaagatataacaaaacaaagcacgcagtggacttctttagttgttctgagtattttacagacacagtaggctgattaatattcctggcacaccattccttaggagttttgcttaacaaataagcaatacttgctgtggattgtgcatttatgtgatgacagtactattgtacctttattatttgaattcttgggtgctttgtcggttgataacttgacctatgctctgaagcttatatttcaaacatgctgtgtcattttgaactagaacatgattaaaatccatatgcctgttacacagcaattattagttagccttttcacattgcaggaagaatcataaatattgtccgcctatttttgtag

SEQ ID NO: 86821 - DNA, 857 bp, Citrus clementina
  Intron number 1 from transcript clementine0.9_001380m (loc us clementine0.9_001371m.g) derived from phytozome v7.0 (c hr-ID scaffold_73; pos 1193671 to 1194527 reverse strand)
agggacgccttcttctgctggaagcgccggcattcgtatgctcttcttgatcattttatattttttccggttgcttgttggattatttaagttcctttgcctaggtctttcttggggaggtttgttgttgcttgaaattatgatctaatgcgaggttgagtgacttcaagttttggaatgcaagtaatttgtgacggaatttggatattttctgaaagtttctgctcttgctggtgcctttgttgtctaagttacaaattgtgagaaaactagataaatttaaatgcatatatttcattgagtgagaattcctaatttttactgaaaccagtgcattaaaatgtcagtgtttgagaaccatggtcgtcagtcgcaagttttttaattttttgggaaattgtaatttcattgatgcccataaaattaaagttatattttgattggttgttgttttttgtttatccttgaactgtaatttttgttcctttttgggcatgggatagtgcgattggcattaaaataagggagcttggttgacttttgtgcagcttcataggcatgtttggttgtgatattattttcggtgtgttaaactaagctgtgtagtcatgtagaaattttgttcttcatgtggaacaatgatttatttatttttttcattttccaattaattgtttctttgtgtgataaatggcatgagaggaataatagttttgttgattattgctgcttttctgtctttcattgttttcttgaatggaggatttgttgtgtttctgagtgttagtatttcatgctttaagctctcatgacgattttgtttacttgaataacagggctagcaggtgccactgctg

SEQ ID NO: 86822 - DNA, 613 bp, Citrus clementina
  Intron number 1 from transcript clementine0.9_008661m (loc us clementine0.9_008666m.g) derived from phytozome v7.0 (c hr-ID scaffold_26; pos 2618833 to 2619445 reverse strand)
ctctctctctctcactcacagagatcacaagaaaggtacgcctctttttagatccaatccccataattcttattcatttacttcgatttaattttatctaatttagtttaattgcactcagtataatccagatttaagttcattagatcctgtgatttttttttcctcttcatctttttaatttaaattcttaccactaatgattcgggattttgtcttgtttatgcattaaattcaggaaatagaagggtttttaaagtttgaatttgtatcatattcttttttgttagttacaggttggattccagaatgttagcttaatttagttagtcgctttcaatatgattcaattattgctttagaagagggagtttatttgctttttgagtttctgaattgttgggtcaattgtgtagttttcagattaatctagtttgtggtgctgatcaagcaactttttgatgctgttttttaatctggagtcctagttatcatttttttcacgaattgctttgctgttttatttatgaatgttgcttttgtttgacacctttgatgactttgttgtttttccttcccctttttcagaccaaaaaaagaaaaaaaattgaaa

SEQ ID NO: 86823 - DNA, 903 bp, Citrus clementina
  Intron number 2 from transcript clementine0.9_021905m (loc us clementine0.9_021905m.g) derived from phytozome v7.0 (c hr-ID scaffold_137; pos 205525 to 206427 reverse strand)
cgaccttctttgccccacctgggtgagttatgatttatggttcatgacaattatcaaagcttatacctcttagctgattttgatcattgctcaaaaagctacactgtaacattaactgaattacaagtggtatggtgaatatgtttcttagtttcctttttatttcaaatatttttgtgtaagtaggaaactaacccaagatttctatgaacttggagaaaatgtattcccaatttttcttggaaactatgtttaagctttaactggcagggacaatgtaaagcatcccccccccccccccttcaatttttttgtgggcaaataacacaattcaattttatcaatattggcttggaaagaatttttatttttatttttattttgtgtgtgtgtgtgtgtgtgtctgttggggggaccggctggattatatatttttcttactgcctccaattgttttggaaagttttctattatattaagaagaagactagattactttgatcttggtccttggagctcataaaattcatctattttaaaagagatgacacaatgattttcttagtaaaatttggtgaagtatcttatttatgtgtagaattggtttagatacaacaggggggagatgaaacagattgaatattagaatatactctttgattgccttaataatttagactcaattttggtttatcttgtcactggtttcttgtattcttctatagttggcaatgatcccaagccttggatgtttattaggcttcaaatagtttgccatcatttatcgatcattaatatgctgcttttcttgctgtggaaaagttctgttttattgatttaacccactcctgttaaaatatgataacagtttaggaagtgctggtggtggtactactgccaagg

SEQ ID NO: 86824 - DNA, 691 bp, Citrus clementina; identical to SEQ ID NO: 78917
  Intron number 1 from transcript clementine0.9_001884m (loc us clementine0.9_001884m.g) derived from phytozome v7.0 (c hr-ID scaffold_26; pos 2599944 to 2600634 reverse strand)

SEQ ID NO: 86825 - DNA, 528 bp, Citrus clementina
  Intron number 2 from transcript clementine0.9_020970m (loc us clementine0.9_020970m.g) derived from phytozome v7.0 (c hr-ID scaffold_19; pos 1480700 to 1481227)
aggctcgtgtgttcgaggattcattgctgcacaaagtaggttgcttgatttgactgtttctaaattttgtttatttatttattgattttcttcttgtacctgttatttgttcactgttttcaggttcttccaagtatttctaatcattgtagttgaattcactgttaaatttggtcttgattaaatacatgtagcaacttactctttgaggatcgagagatttgttgttagtctagccgaagtagttgatctctcaagatggattttttttgcaaaatgcaaactatttagagatgatttatttgtagaattttgcctaacgtttactgttaaatgttggaatgacaaagaaacttgtttacagatttttttcatatgtgttgcattactttactttcctcctgatataattattcatttaatcttaatggtttctccaattttttttttcaactcacttttcttgaaggttactcactaaattggttgttactgcagaaagtgatcaaggggtcctccgctcagttc

SEQ ID NO: 86826 - DNA, 570 bp, Citrus clementina
  Intron number 1 from transcript clementine0.9_001684m (loc us clementine0.9_001684m.g) derived from phytozome v7.0 (c hr-ID scaffold_34; pos 877649 to 878218 reverse strand)
atatattttactgttactgttcggtttcaactccggtgagtctttctctttcaaagactttagctttgaccctttctttttgtgtgtgtgtaatacccattagctttttcacttatttgggagtttggatcgttgatttatccccttcagggatcgatcgaggctgttcagttgttgttttgagcttcttttagctttttggttgatgggttgagcaggaattgggtttttgtttgttgaagttttgatttttgttttttgggcttttggtgtcttgttttggggttattgaggttggaatttgagcttatagtgggaacaagaagtcctttttgtaggttttgcttaattttgattgcacttttctgggattttgtgatttggttttctttttaacgtttgattgaagatgatttgtggttggtagtttagggttttggttgatagtgtggtcattttgagttagaagctatgctttgtactgaaagttgaattgctgttaattgttcgtttgcttggaatgtttcttgttacagcggatctaagaattattctattgtgcagagattc

SEQ ID NO: 86827 - DNA, 928 bp, Citrus clementina; identical to SEQ ID NO: 77939
  Intron number 2 from transcript clementine0.9_012651m (loc us clementine0.9_007282m.g) derived from phytozome v7.0 (c hr-ID scaffold_9; pos 3014840 to 3015767 reverse strand)

SEQ ID NO: 86828 - DNA, 501 bp, Citrus clementina
  Intron number 1 from transcript clementine0.9_017889m (loc us clementine0.9_017889m.g) derived from phytozome v7.0 (c hr-ID scaffold_147; pos 153780 to 154280 reverse strand)
caaccccatccgtgtcaagtacacttggtatgagtccttaaacttctctacaatttaaatatttaaattttgagtttctcttgttgcaaattgctcttggcgattttgctagtgagtagaccatctgtattggttcaattttgtacaacaaagcaaaaagttgtcgatgattttaatgtcccatgttacatcagagtttgctgtggtgtgtgaatagtacttgataccgttatttgaaaatgatgatacataatgaattgtttcctactatgatttcaaaggaggcttccagaaaatgccggcactaaaagtagtggtgtaatttttcttccattccacagctactgagaatggggacctaagaaagtctatgtttgagtacagatcataattaacaagtccctactagctattgaatatcttacttttctgtgtcactttgaatcacatgatttctgtgaagcaggtagtagctttaagggtgctttgttgccgaggagc

SEQ ID NO: 86829 - DNA, 470 bp, Citrus clementina
  Intron number 1 from transcript clementine0.9_024580m (loc us clementine0.9_024580m.g) derived from phytozome v7.0 (c hr-ID scaffold_19; pos 1288122 to 1288591)
gccttctcaatccatctcgtgttttcgcaggcgtaaatacatatctcaatccaatttattcattttttttttgtcaaatcgcaaaatttacgcttgatctgtatattagtttctcttttggtatacgactttagaaaatttaattccttttcttttattgtgtcttagtataatgtaattgattgtttcaaatgtatatttatggcagactttccttttgtcaatgtctttttatgagatgatttgattgtatgctaatggagacacaatcttctcttactactagaggagcctgtattataagtgtttaatggaaaacatttttgcaaatggcgtttagaaaatttgtttctggttatgtgtaatgtaaatgctaaactaaatattccaggggctttaacatgtttggtgttcacaatgtttctgattctttagtcgaggagaaagaatagggagcctaaggaagagaa

SEQ ID NO: 86830 - DNA, 442 bp, Citrus clementina
  Intron number 2 from transcript clementine0.9_025277m (loc us clementine0.9_025310m.g) derived from phytozome v7.0 (c hr-ID scaffold_19; pos 2753721 to 2754162)
actggtaagtacgtgcgtgtgtcctcactcactcactcgctcgctcgctcgctcttcacttgcatagatgctgcatgcatgttctaacttattattctttctttagacttttatcagttgaacgcaaaggcaacttgtactatatctatatatgtttaatcatgttcggttgctgataaatatatatatattttttaatttgttctctgtttctctcccttttttttttttaataactgaattagttccccgatcggaaaaaaaaccgcagcttattatattcatgtgtgcgtgtgtgtgtgtgtgtgtgtgtgtgttttaaaaagaaaaatgatgaaaccaaatcaatggagcaacaactcaaacatctctgtttttgttttgtcgttcttactggcttctctcagcaaccaaataaaggctaagaggaaggaggaaaacg

SEQ ID NO: 86831 - DNA, 626 bp, Citrus clementina
  Intron number 1 from transcript clementine0.9_005272m (loc us clementine0.9_005178m.g) derived from phytozome v7.0 (c hr-ID scaffold_80; pos 454066 to 454691)
tcaccaggtttgtttgtttcttcttcataattgagattgagttagtttgttttaagtgctgttcgttggtggggaaatgtgggaaaatgaaagtatagcatttctgagctctgtttcctgttccgtttgattgatgagaaagcatggctccaacaaagtggatattttagtggtagtcctctttttctttctttttccaatgcttcaagtaattaccgacttttcaatctctttttctgtttggttagtgagaaagcgtgggaaaatgaaagaaagtgatagataaaaatccattaataaatgggctcattaataaagttagtttgttatgtttggagagtaattgtgatgggctcgagcaatttttggctttttgccatatggctatggttttacttaattgcttttctttttttcttgtgaattattgttattataattatttttttctatatatgttggttgttatgaatctttggattaaatatttaaggaagatccatggtaattgtttaggaaagaattgaagtggaatgctgaatgttgttttaccagtattttcttttgattgatttttggtggtattcattgtgtctaatttaatgttgaagtgccggcaaaaaaca

SEQ ID NO: 86832 - DNA, 885 bp, Citrus clementina
  Intron number 2 from transcript clementine0.9_005083m (loc us clementine0.9_005060m.g) derived from phytozome v7.0 (c hr-ID scaffold_55; pos 67869 to 68753)
tcgggtcctctcgatcgcttcgctaggccttgtgagtatcatctcctcactccccgtcgcttctatttctgtaaaaattttcttttatttaatttgatttatttttttctttttgcgttgttagggttttactgtgcactcttcctttgtttgataattttaattaattatttctttttgtggctttagtgagaagaactaacttgattgaatcaagacagtaggatgagcttaagatgacatgaatgaaatatttcatttctgttttgtttagttttagttggttcttgagagattatgaggctaaacttaaataaataaatatcaattttttttggcaaaataatttgtcatgtgttcacgtatgtaggagttagatttgaaattattctgatctgctgtgaacttgtgccctgggattgatagaaacttggttaatatttcaaatcttgtttatattttgaagttttatttcagtgattagcttcttctttttttttttggggggggggggggggtggtggatgagacagtgattagctttctacccaaaacaaaatttaatttaagcgacaaatagaatgatgaaagatttcattggtgtttttattgattttttttccctttagaaaggttacacaatacatgtacatttagtgtctggaattttgggtttcttttctgttgttcatggattagtttgtattccatgctgcagaaaatttttatccataataatgggttggcagtcggcacttaaatcttgtggataagtcaattatatttctttctttgccttcacaaatgtggaattacacctgtttctggttgcaaatatattgattgttgactgtgccgcaggttttgagggattctcaggaagtg

SEQ ID NO: 86833 - DNA, 990 bp, Citrus clementina
  Intron number 1 from transcript clementine0.9_017966m (loc us clementine0.9_017966m.g) derived from phytozome v7.0 (c hr-ID scaffold_80; pos 1093427 to 1094416)
gtgggtttgtggactctttcaaagcttctttgtgatggttcaaggtactcaaatgtggtttttaagacattgcaggttttttctttaaacatttttctcgttttgcttaagttctggtggcagagtggtgatctgcgggaaagctgctgctgatgttatttgctactgcaatggtggctttgaatgttaattttgggcttagcaaatttcagattattgtgctaaactgaaaataatgtggcagaactgtaatactactatttggaacattcttatcatagaccttaagtagttgggttcagatattgttgagttggcgttgatacaagggtttatttagttgattaggaatgtactttgacttgcctaacaaatcggatagagcaaagatattgttataaattaacttttatctacttgcaattaattgtatgttgtttgtatgtttctccgaaatattctttagttaatgcattttagaagtggctgcaatggattgaaaatcttctgttttgtatatgaattctgatgtgttatgtcaaccgttgattaatttcaaaagtacggcattatcatagatctcagcttttagtctcgaaccattaatttagtttgggatagcggccccgtggagatgaagcatttttctttctattgaggcaagcagatgctgagattttaagttaaataaaaatcaaaataagtgtttttaatgtcttaggtggagtgaggtgaggttttttgtttgatcactagatggttttcttaatgaagcctagctttcaattatgacagcttattattctttttgtagtataatcaattcccccgtcattcttgtttctgttctgcattctgatagctattggtggaactagggactgcaaaaccatcaataaggcagtggcagttgtttttgtattagcacattttcatttttttctttcatttgaaggaaggagcgcgctacaagattggtaatattctcat

SEQ ID NO: 86834 - DNA, 524 bp, Citrus clementina; identical to SEQ ID NO: 80933
  Intron number 2 from transcript clementine0.9_007590m (loc us clementine0.9_007590m.g) derived from phytozome v7.0 (c hr-ID scaffold_55; pos 1485983 to 1486506)

SEQ ID NO: 86835 - DNA, 630 bp, Citrus clementina
  Intron number 1 from transcript clementine0.9_011808m (loc us clementine0.9_011808m.g) derived from phytozome v7.0 (c hr-ID scaffold_19; pos 973487 to 974116 reverse strand)
ctctggctttcacaaggatttgaatcttcttcctagtgagttaatttataatttatgccctccttttgtggtgaattatgagttttattatgttgcatgccatttaattttcccaattaaggatcattagcctaaataaatggttctttcatttgtgctgtgtagggatgaaaatgaataaacattcatgaccagttagttggcaatattgatgtattttagggttcttaacttgtagctctaggaaaccaaatttacttcatgttgaatattttgataatgtttaaacgctaattttgtgagtatcagaatgtgaattgttgtaaagatgattttatctaatgcaatatccaaaagctcctacaggctacagttccttatcaaagatttcactcatggttgttatgtgtcatacatttaaatctttttggggatgagccattttcttgaagttcacatatgtcattgatctacttcgtttttgatgaactgtaattttatggacttcacatattggagatgaatatgatgctggatactaaaggcaaatcatgactctttcgggccactgcttctttccatcttccctttctctcctccttttatggcacattttcttagctctagtat

SEQ ID NO: 86836 - DNA, 243 bp, Citrus clementina
  Intron number 3 from transcript clementine0.9_013882m (loc us clementine0.9_008821m.g) derived from phytozome v7.0 (c hr-ID scaffold_26; pos 3092356 to 3092598 reverse strand)
aatccagtgtccaagacttcatcatttgtatagaggtatgccttccatcatcttcaaacattttttgatgtttctcaagtctttcaagatttcatgtcacctgcttccacattcatagttattctctaacgtcatatttttctgtagtctttaaaacattgtttctcctgccaaggtttatgaatgttataaatctcattaaaatattgaagttaaacaagcacttgtattcatccagcacag

SEQ ID NO: 86837 - DNA, 527 bp, Citrus clementina
  Intron number 1 from transcript clementine0.9_019444m (loc us clementine0.9_014919m.g) derived from phytozome v7.0 (c hr-ID scaffold_34; pos 1264414 to 1264940)
tcggctgcaagttcgtttgttctgctgttaacaaggtcgcttcgttttttaattccctcgtcttgtttggtctagtgatttagttcgttgtctctgaaattcgtattttcggaaattcgggagaaactctgttttgtggatcaaagagagaggaaaatagatggcgtaattcttaatgttgttgaaagttatattggaattgtctttttagttgaaggttattttaggaaataatgtgctataattcgaatgaaatcactagcaatgtgaaagccagagttaaaatattagctgcaagtgaaaaatagatattttatctaacattttaactgttgtacgcttggagttacgtggaagcagaaatgcttcaaagaacaaatcttgaaaacaaagagtagaggtttcttggtctctgtctttgaattgctgtaatcatgtggaccgtatacataaaaagaagtcttctttgacccctgtttttactttttgcaggcgggtcttgccaagctaattggacttgctggaga

SEQ ID NO: 86838 - DNA, 689 bp, Citrus clementina
  Intron number 2 from transcript clementine0.9_003162m (loc us clementine0.9_003159m.g) derived from phytozome v7.0 (c hr-ID scaffold_32; pos 149157 to 149845)
tacgctgcttgtggttgtcccttcgcatagttccggtacctacttttcttgccttctgatttttatgttactttttttctgaatgttctagtgaagaacagttaatgtttattttactgcttttggttttgacattgataatgctttttgttaccaccattttccgtttgacctgatttcaaaacatttgagcaatattcccaaaaaaacactgggcttcttctaatgtcgaagattggtagaactttctctctaatcctcctcctggtcaattctattacagttgcattgctgaaaactggaacctttcatttattgatgagcaatttctgctctatggtttactctttggatagttgggtctgagctgtttgggatatttcacacagtaagcatacaaattgtagatctacccaaagctgaactgttgtactcaagggagggaaactttgctgcttattaaccatctactgtatcttctttctggctcagagaacctttcattggatgtcatttaatacatatttgctaaatagtcaagtgtggttaaggtttctttgataccttctttaaaatgcatggttttattttttggtttatccctgatttggttaatgtgttactaaaaattgtttgtttactgcaattctttaggtagaagattttgggttttccccagatttgcaggt

SEQ ID NO: 86839 - DNA, 299 bp, Citrus clementina
  Intron number 2 from transcript clementine0.9_025879m (loc us clementine0.9_025870m.g) derived from phytozome v7.0 (c hr-ID scaffold_19; pos 588180 to 588478)
caattgattaaggtccgttccttttctgccctaaatttagattggtttcaaatttggattacttttttgaacaaattcagaattaaattaatattcttgagatgcttgatgtcagttttttcaaatagtagacattgaattttgcttcaaaactggagaaattttcatgttttccgtaaaatttaatgaataagaaatatgaagattgtagggttatgtttggcttgtggaaattgaattttcaactaagaatttgagtttctggtgttttctttaggatatccaagtgacattgcggg

SEQ ID NO: 86840 - DNA, 708 bp, Citrus clementina
  Intron number 1 from transcript clementine0.9_010578m (loc us clementine0.9_010578m.g) derived from phytozome v7.0 (c hr-ID scaffold_116; pos 573820 to 574527)
agctcggccacggcgggtttggtcccgtttacagggtacgcttataccgcaatttcttctttaaaaaaaaattaattttattaactttttggttagtttaatgttaaattaatgattataattatgttatttatttactcatttatttatgatttcttatataatataattatgttatttatttacttatttatttatgatttcttatatatattatattttaatgacagtttgataaaaatctaaaactatgtaagacaaataagattgtgttaaagcccaaattacagtaattaagcaaatccaacaggcttgtagtgtttgaatattatacaaatttctttgccttttaggccctgtttggtattgcggttggacaactgtggttttatgctagattattaaagtgtttggtaaacattacaccagcaattgtagatttaaaatgtttggtaaacgttactccagcaattatagattggtatgttaatttgatctcacacttgtttggttaaaaactgatgtttctaatatttttatcaaaattattatttaaaagttatatttactatataccatcaatttttattttataattgcagtttcttttttttccacaatctcaataccaaactgagattagtttgttaaattagtaaaaactagtaatctaatttatttatttatttatttttgttacaggggttg

SEQ ID NO: 86841 - DNA, 933 bp, Citrus clementina
  Intron number 2 from transcript clementine0.9_020095m (loc us clementine0.9_018094m.g) derived from phytozome v7.0 (c hr-ID scaffold_54; pos 267771 to 268703 reverse strand)
cgtttgatcgttttggaaaaataatcgagtgccaggtaccactttatcgttgttcatagtttttatttatttatttatttattttttacttatgcgccctttttttccccgctgtattattgtgctctgtttggattttgagaaactcgagcgggaacggagtatttttttttttttttggagaaagcggaatgtaaatgaatgacttgttctctttttactcacgtactaagctctcatgtttaacgaactaaaccctcatggctaacgtactaagctctcatggctaacgtactaagctctcatgtttcacgtactaagctctcatgtttgaacaataaaattaatataaatcagcaacttaaatagcctctaaggttttaagttttataagagtgttagagtccttttgagaatcacaacttgttcttaatgcattagatttacaacgtgatgtcattgaatcttagttttgatttttatcatttggcttggacctcaaatagtttggtattgacatctagttgagtttgagtattaacatcactgaaaattatgttgcttcgtcggtgtcttcttttctttcaggtcacgtgttgatcgatcaaacaattctacggtggtcttttttattgtcatctttacatgtttctggcagcttgcctgcacgcatgaaaaagtacaaaagaatttgagaaaatgtttcattatttatttgaaaattgaagcatagttgatttcaaattaatttataatctatgttgaggtaaaggtcccacagcttgtaattcatgataagcaacgtttgtacaggctatgtattttgatcgcatttgttatcattctcaattcttcatcttcactatattaattattctgcttattttgttgttttgcctggaatgctcgatatgatcttttgacatgctgtag

SEQ ID NO: 86842 - DNA, 972 bp, Citrus clementina
  Intron number 2 from transcript clementine0.9_012598m (loc us clementine0.9_004786m.g) derived from phytozome v7.0 (c hr-ID scaffold_130; pos 322350 to 323321)
tttttcaggctccgagaaggcgcaatcgaaaacaggtgacttatttacttacttttatttatttatttatttttgttaacaaaatttgaaatttctatttttctctctattgatgttgttgttaacgtcaagcatttacttcggcgatcatgttgaatttaatttttttttgttgggtttcttgttgggcacttgaagttgaacaatgttagtttttttttttttttgtttctttttggtccaatcttgtaggattgtcaggggcactatgtttactgtttatagtgctatgtgttttgagacgattctgatgacaccaaataagtgtaaattttacggtagtgatttaggaagagcaaataaagtaaatgttatttgggtttgcttgggattgaggtcttgttaatccaagaatttgcatactatagaatcattacctgtcaagtatgagtgggtgggtagatgttaagtagaagtgatggtctaccaaataatttaggtggtttgctttcttagtgaaggagaagcctaacaattaaaaatataccagctatcggtttgcacttgatataaggggaaatgtcataaaaatgaataaaacaaaaattaatcaaaaagaaattgttctctttgagcatagcaccgtccatctgagaatgtacaatttctttgttttaatgagaaaaactagatttgttctgtggtttaacctgggccttcaaaaggccttttcattacagttgaaaatgagtgtggttctggctgacattgctcaaggatagctgcccaactttaacatttactgaaaaatttgcaggacagaaattagggattttgctctatcttcctttcccagaccctgtataatgtgtttaacccactgcaagtttgttagttgttcccttgttttgtaatgtgattatgtcaattttatagaatccattctcctgtaggtaattgatcttgagaaag

SEQ ID NO: 86843 - DNA, 473 bp, Citrus clementina
  Intron number 1 from transcript clementine0.9_000077m (loc us clementine0.9_000077m.g) derived from phytozome v7.0 (c hr-ID scaffold_55; pos 1242356 to 1242828)
tctgcttttctgaaggtaccaatgtcaatagataaatttcatattataaaatgtttgatttattgttaatagaattagataattcttgttgcatttaatcaatttaatacttggataagtagagaaatagtagtgcgttgtgcgggaataccttattgaagaaaacattagtttgggttaaattccgtgtgacaatgtttgcttgattgttatatgtaaatatatgtagatagttcttagtgcatattaacttttgaacttttttaagagaaggggaagcaagagaaactgtatgggaaaagcgaaagcatatactgtatttgaaaattaaaaaaaaaataaaataaaagtttgttattggttattgagtaggagaagtttttattttgatttcataaaagaaaaaaatttagcaaggttaattggttatatatgcagataaggaagcgggattggactgaacaggggcctct

SEQ ID NO: 86844 - DNA, 1038 bp, Citrus clementina
  Intron number 1 from transcript clementine0.9_011368m (loc us clementine0.9_011368m.g) derived from phytozome v7.0 (c hr-ID scaffold_22; pos 1138978 to 1140015 reverse strand)
ttcatcgcagccaaaactcgtacagccgcaatccggtacttgtaatttgcttcttcttctttttcttaatttatttatttttctattaagtaattcgtttactttgatcatgttcagttgtgctggtgcttttaatctttgtacgcatatgagtgaaatacagtcagtgtcctgtatactggaggaatatcctcttggctaaactatgaaatagggtttctttaactggaattcccttaatcttgtttataattgcaatgggcttcattacaaactggttaaagggttcgctcggatcgaggtgatgtgatttcttatcctcaactgctgtggaattgagtcgctagctgtcagtgtgactgaatgggttctttggtaaatattagctccccaagtaactcgcactttagcacttatacttccagagttaagtagaaatgcagcagttccaaatgtacatataacgttcgcccggggggggggggggaggagttggtgtgtggggaagaaccaaagaacatccttgctgggtgtgtaaaaggatctaaagtgaattttggttttcttttcattatccaattggatctagcactggcagttccttttccgttcccagtagtgtttgtagagaaaacatttgtttcaatgtcagtgaagttggacattttaagctttctacttattttatttacatgaattgagtttcttagctcatgtttctacaacactaatcttaccgattctaaaaggaaagaaaaatctaatatgatttctccatcttagggtgtgtgataatgatttttctttacgtgggagagtgctagcagtctgagtcaagtgcactcactagttggtcacatcaagaatttatttgagatacaatctctttcttgaaaagtgacttcaccaatttatggtcttcaacttttgggatttccaaattttctttgaagtgtaaatgctcctgtatttagctacaagttcttctggacattattttcagattgaaattttgaagcgattgcaacgagaatcatt

SEQ ID NO: 86845 - DNA, 400 bp, Citrus clementina; identical to SEQ ID NO: 82961
  Intron number 3 from transcript clementine0.9_010815m (loc us clementine0.9_010815m.g) derived from phytozome v7.0 (c hr-ID scaffold_22; pos 640706 to 641105)

SEQ ID NO: 86846 - DNA, 728 bp, Citrus clementina; identical to SEQ ID NO: 81756
  Intron number 2 from transcript clementine0.9_016822m (loc us clementine0.9_015430m.g) derived from phytozome v7.0 (c hr-ID scaffold_26; pos 1211638 to 1212365 reverse strand)

SEQ ID NO: 86847 - DNA, 811 bp, Citrus clementina
  Intron number 1 from transcript clementine0.9_020473m (loc us clementine0.9_018789m.g) derived from phytozome v7.0 (c hr-ID scaffold_17; pos 1947538 to 1948348 reverse strand)
cagttgggatcgccggtatgtttctctccttgtttcttaagccgttcaaatattgcttttgtctctatgtgttgtgagaaacttgttatttttttttggaaaataagatgaccctttgctagatttcttgtttacttgaggaagagggtgacccctcgattcaattcttgaaaaaactgatgcccatgaatttctctcttttttttctctctctctctttttctgtagtagtgtttttggttcctggatttagctggaagatgaaacaagagcttgagagttggttaaaagagcataaggctttggatatacttatcaggcagcgttaattgtacttaatctctgttgattgtagcttaatgtacagcaatctgttgtcgattgacttttatggggccactttgtggggctattatagaagaactataaaattacagttgaattttgtgccaattctttttcaaccaattggtatccgtttggttgattgctgcacttttgcatgctttgattctcgtgaatgattattatttgaggcaaaatgggcttagatgcttgtaatggcatttggcaagtttggtctttggaattgttttctgtgtaaatttcagaaattagcaatttgttgggaaaatgatctgatttaccaagaatgactagggggataataaaaccaatttatattaaattagaaaactatatatgcattttcctaaatatttgttaatatcaaatgcaattttggttgctattaaattttttcttgcttgttgcagggaacatctttgcttttgggctgtttgtctcacct

SEQ ID NO: 86848 - DNA, 525 bp, Citrus clementina
  Intron number 2 from transcript clementine0.9_009232m (loc us clementine0.9_008022m.g) derived from phytozome v7.0 (c hr-ID scaffold_32; pos 217187 to 217711 reverse strand)
tcggttttccaggtactccttgttgggttttcagaaatttttaatgctttctgtttcggtaattgcttttttttttggtccacgtttacttgtgagttaggagaaccagtccgaatgatttttgtctttatttgtgtcagtaacttgttactgcaatcactggttcattagaaccagttggatcgtttatctttgttgcactagctaatatactcttaaaggcagtgagttggagttcatgttaggttctcacactttttatgctattttacttattcaataactgataagatttcagtgctagtctcttccttgtaactaaatgctctaaaattaataatttgtttttttccttctaaacactatgatgtatgtcatgtgtttacaacatatcatcagaaattgctatggatctgcttatgaaactagttatccagcagtcctttgagatatgtctttgtcgcttaaaagaattgttttcttagagactttattctttggaatgcatttatttgtctgcagatt

SEQ ID NO: 86849 - DNA, 884 bp, Citrus clementina
  Intron number 4 from transcript clementine0.9_006165m (loc us clementine0.9_006159m.g) derived from phytozome v7.0 (c hr-ID scaffold_34; pos 1947782 to 1948665)
gtgggttgaaccagcaacgcttgtcggtatgttttggctctagcataaaatttgttctcttgattctatcagttgtaaggaaattgcagcatgttcttatatgcatgctaccaaaattatgtattagagaatgtagttgcatatggtttgatttgttacaatgtggttctcgccattcactagaatatgatcaagatgcatgggatggtgtattagataataatatacttaatattgtcctagatggacattttggggcttatttttggaactttgagatttgacttcatcttttggtggttgttccttatggattgtcagattaaggcatctgtcatctagattcatttattacagtaggcatatccttcgaaactagcatttaccaattaattgttgcatgaagaatgggaatgattggattttggatgcgtcttgaaatgactgctaaactatttttgctaagattttcttactgcactcgtccctattgctttcctctttctcttggtaaaattatttgggttttgatgttgaataagttatagctataagacacttcattttgtgttgcatgagcgtggttgtttattactaactttccatatgaaaatattgattaattgatctaaatattaaatttacacttggtgcatattgttacattttaaatatacattgcgaactataggcttggtgtatattgttacattttaaaaatatattgctagttatgggaatgttgttgcaataatagggccagatacggcctgccaatgatacaaactcaacattctatgccttgataataggggtgtcaaccttcaaattacatctttgatgtgtaacttttctctgttttatttatttgtttatttacagat

SEQ ID NO: 86850 - DNA, 227 bp, Citrus clementina; identical to SEQ ID NO: 78040
  Intron number 1 from transcript clementine0.9_008630m (loc us clementine0.9_006461m.g) derived from phytozome v7.0 (c hr-ID scaffold_22; pos 890270 to 890496)

SEQ ID NO: 86851 - DNA, 873 bp, Citrus clementina
  Intron number 4 from transcript clementine0.9_022412m (loc us clementine0.9_021376m.g) derived from phytozome v7.0 (c hr-ID scaffold_19; pos 4096086 to 4096958)
ccactcttgctgcatcctctcccagaggtaacattttcattaattagacataccaaagtcaacccttagaaaataattcgatgaaggatttgggctaacagagtattcaccaaaagagagagaatgttactctttgctggaaggtggaatttcaaatttgtatgaaagagagcgttaaagaaactttagccgtagaccgttcgattacattgatcaacttagcttggctggttgccgaatagtttgtttgatctcttactggtccccgatttgccagggagatgcaaatcgctagaaaacaatacttggaataaaattaagatttggccaaatatgatatatgtttgtcgtatatatgctaaattacaaatattttatctccaagactccaacctgtactggtctctcattgagctgggtgaccccaatcgtctaatgccacgtcccccgatcctccatgtgcttgttgttgttgttgttattattagtactaccatggatgaattagtcggactgttataatttggttgttgtaatcttagtcttctgaatttaagtgttgtatggggtcaaagaagttggtgatcctacggttgagaaagtgaaatgttaccaaactgctggatcaactacaggtgggtcatgaaacttaaattgggactcgggcctttttgttttatcaactagtttggtgcaagtttggttgaagaatatcattgttttgcgtgctgctttacatgattgggaatttggtggtgaaatgttagctagctagcaaagtggtacactctcaagtgcaaatttggtctcaatttactaagtgcaactgttcatgcagggcctggcacgcctgaaaagccagcgggggctgcc

SEQ ID NO: 86852 - DNA, 650 bp, Citrus clementina
  Intron number 3 from transcript clementine0.9_016427m (loc us clementine0.9_016427m.g) derived from phytozome v7.0 (c hr-ID scaffold_9; pos 125284 to 125933 reverse strand)
tctcgcaagcactctttccttcggtccctgacctggtagctctctctggttttttactttcaattgtcaaatattgactgattgcattgtagttgtaaagagatctcacttacaagcttaggccaatttcatttagactaacactagggatacaaacactatctgtacaacctgatgtggcaacattgtgtcattgccacttgtctctacattttcaaggaaatatgaagaaaataaattataaaggacgtttcacaatgatataatacgccacgttggttgtacaggtaagagtttatatctctaatattactctttatttattatgcttccaccctgtgtgtctttgtacatagatggcctgcactatatggtcactgtttataggactctgtttctaatttagcaaatgcattaacaaacacaccttagggattgtaagttgtaattacatggcaataattgctaatgaattcaaatagtttgttacttttttattgaggcaaccttattggaaaactcttctctggatgaaacagcacaaaatacatggccttgttgtctagaaattatggtgcatgaaggtatttcattttactagttcttaatatgcctaatttttctgtttataggtaatcagtggcataaac

SEQ ID NO: 86853 - DNA, 764 bp, Citrus clementina
  Intron number 4 from transcript clementine0.9_021329m (loc us clementine0.9_015106m.g) derived from phytozome v7.0 (c hr-ID scaffold_30; pos 770167 to 770930)
tggacaataacactgttgggtaagcttggctgaagaggagctgtgtgtttcgtggtggtgtttttcatttattttactagacgctttatatacgtgtactttactagtcttcaatcttatgcaagctaggatctaaattaactatggttaggttccatgtgagtgtatagtcccagaactctcgtctaattttcaattcttcacataattcccgtacatcaccttaaaccctgtaatcatgacggaaaacagaaaatttctaaggtttgcttggatgtagaggttcatttgtttggtttggtaaattgagatagaaataggattttattggaattctggaatcctaattccttatcaaatggtgagaaattgggatttctaacctgtacaatctttaacttccactgttacccttaaattttttttattgttaatcagatttaatttacaaaaatattaaattataatttaataatatttaattactaaatagaatatctaatcatactttaaaacttaatgaattcaaaaattgtgaaaattctggtaatttgtgtagctagaaaattgattcattaaagacgccacctgcagcatctaaacagaaatcgggtgataacttctagctttttttctgcttgatcacatatgtgttagttttcttaaatagataacagagttttgtttcttatataaatattagttggccgacgtgtggaaccttacttcgttttttaataaatattttaaggtaccaatcaaca

SEQ ID NO: 86854 - DNA, 873 bp, Citrus clementina
  Intron number 1 from transcript clementine0.9_001759m (loc us clementine0.9_001755m.g) derived from phytozome v7.0 (c hr-ID scaffold_9; pos 3447975 to 3448847)
aagttattaatctacttgatgtaaaaatcccaccttttgtttttgttctttattatctcttcatgtatttgtttctaatttttctgtgttttgaattttattacttgttgtttggtcaaatgggttttttgttgtttgtcgattaatttcttataaaggtgtaatcttctggtgtttttgttttttttttttatgggtctttcaattagtccaatggaatgtgaaataaggagctataatttggacagggtttatcattgtttgtaggtttaatggtttcatgttcttgttataatttgtttgtttagatcacccatttgcatgttgaatgatagataatatagacttttcaggttgattttctgtttgtgttatgagcatagtgagtgtcgatgattgttagttttatgtgggcttttctttataaattcatggtgcaatgtttggtacttcgaatgtgtttatatagcctgcattttgttgttttcatgggttgataattgttaattttatgtctttcctttttgcaactgataattgacaggttttggtactttcatctgataaatgtttgtttgtttgataaaatgatgcgaatgttagcattgttaatattcaaagtatttttgggctctatgttcatataattgtttatagtttaggttttggcacatttgatgaattgattgtgttttaaatcaacttttatgtttgagtcatagcttctgtatttcttctaatgcatatcttgactgttttgttctgaaatcattaccctttttgcccaattcttaccagttcattatgtgccttcatataatgttaaatccttttggttctgtctctgttagaaagttgagcacttgcttgcaa

SEQ ID NO: 86855 - DNA, 780 bp, Citrus clementina
  Intron number 1 from transcript clementine0.9_033724m (loc us clementine0.9_033724m.g) derived from phytozome v7.0 (c hr-ID scaffold_19; pos 1948909 to 1949688)
catcgccttctcatccttgcatcgccgactctcgggtctcagcttcacccccgacttcccctcaattatctgttttatatttatatttagaatacatgtttcatgcaacacgttgtcattttcttgtgtaattctaactctacctcacatcacatgctaactgtatgcttgtatgctccatgtaataggttcaaatgactgcatgaattagttagttggtgcaactttgagttttctttttctttttcttttttttttcaaaaagaaaaattcatttgttggatttatgggcgttttaattaatgtatttatttaactgaataaactgtactgcagggttttggtagaaaatttactaggaattctctagatcatcagttgctgtcctcctcattgcccaagccatttcttcaagttaataatgctcggaacactttcctttaccgacgcagctcttctaggtttccttcgacagcttctagaggaatcatatcagctgaagcttgggacttcggccgatttttgaaaacattatatttcttcaacggacccctttctcctgctaaggtatcgagagtgtcttgtgttccaattttcttgttatctaaagttgaattctgttttgcattgcctgacatgggttgttgtttgggaagtttgttggatttctagtccagaaaatatctgggccatcaccccaaaaaaccggtgaaatccatgaaaacttcaggcgttgtccctgtagctggagccactggtgggtggtgggttagaaaaaaa

SEQ ID NO: 86856 - DNA, 656 bp, Citrus clementina
  Intron number 1 from transcript clementine0.9_009116m (loc us clementine0.9_006748m.g) derived from phytozome v7.0 (c hr-ID scaffold_34; pos 1202045 to 1202700)
gaacggaccaaacaccatttaggtaaattaaaagatcagagccaccacagatgtttcataaactatgtcgttttggtagaacatgaagtaatacttttgttaatgaagggtacttttgtaactacaaacgaaagtgtttgatttaatgattcggtcactcgcttgtcatccaccatttatgcttaaggttaaaatgattaaaacccgccgtacgggaaacgcaatgatgaacttgtgcttcctcagttttagtaacttgtcatggaagttttgttggttgttagtttagttgctaaatgccaactgcctgaagagaggaacaagttgcctagtttcatgggtcgtgattaagcattaccatgtctcagaaaattgttatcatcatcatttgttattttttcatttctttgctactgggtggtgatgacatgtagtaatgtaatatcagaaatttttaatgcaagttaggttacttatgtgtatgctgatgtttgagttaaaaaaatggaaaacttaaagaaggtgaaaaaattgctgcttccaagattttttttttttttccattttttgcacattacttcttttttctattttgtgaccagttgtgttgactggtgtcattgtttcaggttatccttataatctggacttcgatt

SEQ ID NO: 86857 - DNA, 410 bp, Citrus clementina; identical to SEQ ID NO: 82972
  Intron number 1 from transcript clementine0.9_004380m (loc us clementine0.9_004380m.g) derived from phytozome v7.0 (c hr-ID scaffold_9; pos 727467 to 727876)

SEQ ID NO: 86858 - DNA, 547 bp, Citrus clementina
  Intron number 5 from transcript clementine0.9_013510m (loc us clementine0.9_013510m.g) derived from phytozome v7.0 (c hr-ID scaffold_34; pos 1355172 to 1355718)
ccttattgtctctaagctggataccagtggtaaaggtacctcttgtcttaatctttgtcatggcaggcattgcctaatccaaatgtttacaatgcgtatgcaatgttctttacatgtgtatgttggcaattatctaattgttgcatgtctcagaggaaaaagatatgaagttggattttttgtcttactcgacaatctggtggctgcaggcacaatgttgttgtaatgtttggttaaattttattttattttaattttagacaatgttttaaattctgtccacgttctgccttgctaaatttacagagttcaattgtttgtgtgcatttgtcccattgtcgtataaatctttccattgttctctgaatgaaattttgtcaagcataattttaccaattttgagggacatataatgcttttcttcattgaattacaaggctatagctgaatgtatttccattatttgtttttctggtggtttctgcttcatttttacctctatggctctgtaaaactgcttatcaatgtatgccactgaaattttcag

SEQ ID NO: 86859 - DNA, 641 bp, Citrus clementina; identical to SEQ ID NO: 78673
  Intron number 2 from transcript clementine0.9_025130m (loc us clementine0.9_025055m.g) derived from phytozome v7.0 (c hr-ID scaffold_22; pos 3250330 to 3250970 reverse strand)

SEQ ID NO: 86860 - DNA, 430 bp, Citrus clementina; identical to SEQ ID NO: 81544
  Intron number 2 from transcript clementine0.9_013470m (loc us clementine0.9_007759m.g) derived from phytozome v7.0 (c hr-ID scaffold_6; pos 971359 to 971788)

SEQ ID NO: 86861 - DNA, 865 bp, Citrus clementina
  Intron number 3 from transcript clementine0.9_013470m (loc us clementine0.9_007759m.g) derived from phytozome v7.0 (c hr-ID scaffold_6; pos 971818 to 972682)
agttgattgagattagtatttaggaataatgcggctgtctttttctctttagaaagctgaataagatctatgtgattgaactaaataatatctttgcacattgtgctaggctgtcggaatgctcagaacctaatgctcaagcccgataaagagaatatcatttgttcattttcattaactgacatcactgttagtctgtcagcaacttaattaattttattttctattttttcttaattattgtcaagtattaaaactagaaaggtttccatcccttgttagaaaacatggcatattcttacaaaaaatgcttcggaaactactaatgcaatgtggctgaaaagccactgttgcttactcattagattattagaacaacagaaggagcagttccttttatcagatggaactgtttgtccgtgacttttatctttatgaggaggaaacaaactaagaatcaggttccataaatctctcaaaagtaggagcctagatgtcttctctctgtataatttcgagccagtacgtatattttacaatgcagaataaatttcagtagtactcttcctggcgcgataatgctgttcaggtgcttagacaatttatcaggttgaacataggcagggtttcatctttattttgtttcaactcaagtttttttttgaatagtttggaattaaacttcctttttcttttgattgatgaaaatttcttgttcttcaaaaaatgtaattactttctgaattgctaatatgtctccttgtgaaatgaaatggtatggctcatgttcctcttgttctatagtcagttaaaataaaatatcttaattctgagagctggttgtggtcaacaggggagaggcttg

SEQ ID NO: 86862 - DNA, 822 bp, Citrus clementina
  Intron number 1 from transcript clementine0.9_029932m (loc us clementine0.9_029932m.g) derived from phytozome v7.0 (c hr-ID scaffold_19; pos 3906593 to 3907414 reverse strand)
gtggacaaggtagcgcgcatctactgtaatcctcgcaactttttctattcaagctgttatacatgacatatttactaccaagtgatgaattttcggtttggttctttttcttccgtttgagtaatgacttttgtcctcacaaaatgtcaacttcattttttgtcaattttcctttcctcttttttttttttttttccggtgcagcatttatttcctagttcttctcagagattttacacacacacacacacactcttttagtccttccttccacgttgcaggccgaagtagtttctattttggccaccttgacgttcttgcatttagtagcaatcatttttaactacttttgttcttcttctcgtgctcattcaatacctactctggcttcccattaaatttttaccaatcataaaattatctctgtttctgtgatacatatttgacaattttcttttggttttccagaagctattctttccactcgagcttttatggtttcacttttgacaaattgtattgaaagtacgacacatgacaaattattgctgatagcagcatctcaccataattttcctatgattgaaagattctcttagtatatggtttgatgcatttaaatcttcagttgagttggtagctactgaagcattacgtggctgttgtttattatagctttcacacctttatttaggcagaaatttggattctcaatttcacaagttcgagactatgtatgtatgtacatttcattaatcattaaattccactccgtccaccttggcagaaaattcttgcatccttctcaggcagattcagcaa

SEQ ID NO: 86863 - DNA, 851 bp, Citrus clementina
  Intron number 1 from transcript clementine0.9_034354m (loc us clementine0.9_034354m.g) derived from phytozome v7.0 (c hr-ID scaffold_9; pos 5403532 to 5404382)
ctgagcttggtaactgtaagaattttaaatcagtggtgctttcttgaaagctaatttttcctaaacttttaataacattattataaatgtcaaccatgacattgaattgttgatatctattcattttacttttctctttattaggtaatgaaacaaataattttttgcttccataattataaattactttccacatttaagttttaaaatttttatcatcacataaatttttacttcatgtatgtttgatatattttctggacagaataaataaaaaacaaaaaagtgtttaatgatcgaatgattttagatttgattttaatttatttaatggttttagatcaatgaaattcaaaggagagcttcttcgtcttctctaccaattttctctctaaagacaaatgttgaataaaaagaaactcaatatatataaatcgaacgttatcttcttttgtcataaaagatttactagtttcgcaccgatgacaaataaagttgagcaatccaaaatacttttaatttgaaatttacaaatctgaaagaaagcttgaaaaatatattgaaactacaacgaaatttcatgtttgatttatattacaaatgttgataatgggttgaagttgcaagctttgaagatatagaagaagattagagtttacataaagtgggattcttttttgctattagatttttgttttaaaaatattctttacgttattattaagggaaaaaaacataaataaatgaatgtaagtcctataatgttatagtcgccatgtgtcataatcatattaatccgggtcattgcctgagcagctggccgagctacagatttttacattttctgctgg

SEQ ID NO: 86864 - DNA, 682 bp, Citrus clementina
  Intron number 2 from transcript clementine0.9_020819m (loc us clementine0.9_020795m.g) derived from phytozome v7.0 (c hr-ID scaffold_32; pos 1651743 to 1652424)
gaaagagtggacatttagagttcattatcttgtaagtttcaactcccctttcttttgttcagttgtgttgaattttaactgttttagttgcttgatttgtgaaagaaatgggatttttttttttttgtttgtgtaattagtgtcttgatggcataatgtttctctgttttgcagggttggaataaaaggtgagtatatcttctcacttaatgaccgatacttatcttgagttctgatttgtgttcatgagggaggcaggcaggtgatttgttagcgttacaagtgatattgtaggtgtttatttaagatggttccacttccagtttttttgaataatagaacttggaattgtagccgaagttagttccaatacttcacattttacatttgctttcatgctttatgactcttattttcatttttaagtaataattattgtgtttattgatacagtttttttattttccttttttgggttaaagttaatatttttctatacaaattttgctgaaattttctatttttttctcctcctgataaataagaaacaaatgacatcgtctcaacactcttttttaaattttatctgcttatacttctgtgatttactaatggcttagtctatgaatcactatctctggaagtcgtaattgcttgaacttttgttttttcaacagctggg

SEQ ID NO: 86865 - DNA, 609 bp, Citrus clementina
  Intron number 4 from transcript clementine0.9_025384m (loc us clementine0.9_023794m.g) derived from phytozome v7.0 (c hr-ID scaffold_26; pos 3096684 to 3097292)
cagaatttgtggagcttaacaagttccttctaaaggttagcaactgtcactttatccattttgtgatgattttaatctgttaagtgaaaatttgtaattttaactaaaatatatgagcttgattcaataagaagcttagttactgtactgctctgtgatctgcaatctgaatgcagttgtatgttttcgaaaataactgatacattcattttttatccagtcaaatactagtctccaaactgtaaagagttcgtggctctatggttcgacatgaagacaatggcctgtttaattttactattttagtgtaggtctttgattccatacatgttttcgcagttttgaaaaatgtgttctgttgagagtctttgaaaatagttttcaaactcattccaaaaactagcttctttaagattatatcctattatatctaaaaaatcttcagttgtactttagttttgaaagtgtttctagattatgaatgaaatgtacccttaacttatttgttgtttctcttaagtgcaagttataatctgtattattatgtatatccacgagcatagaagaagaaatgataattatttactcaaacttgtttgcaggttcaac

SEQ ID NO: 86866 - DNA, 842 bp, Citrus clementina
  Intron number 1 from transcript clementine0.9_029362m (loc us clementine0.9_029362m.g) derived from phytozome v7.0 (c hr-ID scaffold_22; pos 1894689 to 1895530)
tgggctcgtgttagttactttttttttttttggcttctttaagaaagcggctcttaattacttaaaaacctttaattatgtgcagtgaccaaaaagcaaggggacgccgttcttgccgtttgtttctctctgtttgttaatttaaattgccatcgacttccgtgacgctagatcttcgttccgtttacgtcggtgagccggtttagcggtccgaaatgtgattgtaatgcgtgattgctgccgattacgttgcctgcgagatcaaattattccgtttttgggacaaaatcaatcgcttcaatggaacatcagacttcgagcccaacaaagagttgggccgaggcctatattttcatctcgacccagagaaaacgtcaaaacagtaaaagattattcatgccaatccaagaaatctattaggattttttgagcaccatggttgataataaattaataatcatcgggatcaggttgcgtttggaccttgggtaatcatattagcgtagagcattttcggcaaaaataaagtcactttttattgaggttcttaatggattgggttcgctaatttttgtcggttaaagaacctcgaataataagtgatcactactcaaattttgaatcacttttcgtatataaaattctaaggggctaccatttaacattgccgctcagttctccatattacatgccctgactctagtcacccttcagtgcagcatttctcactcttgaacgatgatggtaacaaacataacgctctgctttttgtttgcaaatttaaattcatttaagatgtttgagaactaaactaataggcatggtgtgatacatgtagagtt

SEQ ID NO: 86867 - DNA, 396 bp, Citrus clementina
  Intron number 1 from transcript clementine0.9_004835m (loc us clementine0.9_004835m.g) derived from phytozome v7.0 (c hr-ID scaffold_9; pos 453781 to 454176)
atccttcacttggtgcccaaaaaggtttattacttgggtttttttttttttcatttttttccttgtgctttactgtctttaaggttaactattttgaacttgagagaagattatttagctgttgtagtgtttaagagattttgtttgatttataatgtcttgaactatttgctataatagttgttgaaattttgccatatcaaatacccaaatgggcttttcatttactgagcttatttgtatgaaacaaaaaattccttatgatgtgagtgagtggctctttagatttgggcttggccaacatactaatctgatttatgaactaatctgatttatgaactaatctgatttatgaacttgctgatatatccgttgttgtttctctaggattttttt

SEQ ID NO: 86868 - DNA, 685 bp, Citrus clementina
  Intron number 2 from transcript clementine0.9_018950m (loc us clementine0.9_018950m.g) derived from phytozome v7.0 (c hr-ID scaffold_46; pos 1626555 to 1627239)
aaaataagtaagtttgaaaaaaaatgttttagcttcaattggtagtgtttgaaaatggaaaaggggcaggaatgtttgataggtcttcaagatattgaaagtactaagagggtttttgctaagatttgtcttgcatgagtttatagtgcccatttgaggtctctatttttggtttttggtggctttttttttaaaattttttgaaaataattgacactttcaatgtcatggatgatgtggaagataatagtgttgagaaatgatgttacttttgagttttacattagagtacatcactcgtttgataatatgcttgagagactctaatacattgattacaagaatgtgattgatacaatggatacaactttgccggaatttgtatttcggcatgttgcttaattgtaggttgaaaagttaaaagatcactcatctcttgtttatttagcaaattaattgacagacataattatattctccatcttgtgtggatctgaagtaaaattgttatgaagctgaaaagtaccctgccaagctgcaccaattgtcagcttctggagggccaggtcatgttcccatgttatcaagcatgacagaatctgttaatagcatccacatataagtaaataatgtattgcatttttttgtaggtcacctggagcgcacgactacccctgatcaaagc

SEQ ID NO: 86869 - DNA, 313 bp, Citrus clementina
  Intron number 3 from transcript clementine0.9_015587m (loc us clementine0.9_015587m.g) derived from phytozome v7.0 (c hr-ID scaffold_9; pos 2347993 to 2348305 reverse strand)
actgcaagggtaagccacaatagtcatttgttcaggtatatcttcttggctcaattgtttttttttttgttttgtacagtagttgaatagaactcattattatcaacacagtatgttcagctcaatgctttactatctgggaccagtcagatctttgtaggatttgaggatttccttgcattataattcttaaagtgaatccatttgaatgttaccatgtttcctcggtaaatttcattcttttcattcagaattctttattttctcaaaaatggcaggttttcatttgatccatctgccaagttgggtttgg

SEQ ID NO: 86870 - DNA, 857 bp, Citrus clementina
  Intron number 1 from transcript clementine0.9_004084m (loc us clementine0.9_004084m.g) derived from phytozome v7.0 (c hr-ID scaffold_46; pos 38525 to 39381)
tctgagagctttcaagattctaatatcgggaattggtaattcaccttcacactcttttaattactcattcacattgtttccattttcagaattccgaaaccctagttgaatttttactacccattttcagttctttgttgggttttgggtttttgcttaaactttgatcataaaacttttaagttcaccatctgggtttattgcgcggttcatttgggattttttttaaccttttttttttttccttttgttggataatattagatcatatgtttggtaaactgagacttaagcctgtgcttatgtttgttttaattgccaaaaggttaaatgctgtgaagggaaattaattaaaagatttaaagatttaattttactagagcattgaataattttacctcaaagtttcatattaggaatttgatggtctgtttgggtaaaaaagttaatcttttctggagaacggcttagcaagattttattttattgtactttttattttttattttttaagtttcttgggagaaaaagatgactgagaaaataatacaatgtatgggtgtgcataattttttatattttatatatcttctcaattgttggacttggcttgggtgctgaaggctgaagctataaaggaaatgcattttttttcccttttttcttttgataagcagtgaaaagcgagaaatttgcataattggacaattacgcatgctttcgcggtggactgtgacataaatgcatatcagaatttcttggacttctttgataaagctttgagagtaaacctgaatcttggtatttgcttttctaatacagatattaatttgagtagagttttgctcggaaagaac

SEQ ID NO: 86871 - DNA, 812 bp, Citrus clementina
  Intron number 2 from transcript clementine0.9_018445m (loc us clementine0.9_018445m.g) derived from phytozome v7.0 (c hr-ID scaffold_22; pos 1393897 to 1394708)
ttgtaagtcctctcatttagtgtcatgaatgttgcctgcttgctttgaatattaactgtggcgttttctttttcttgcaataattgatgatggctcaatgtctgcgaaagctaggatggagaaaccctaagattcagttttgggcacttcccttagcttacacatatgttgattagtttgaaaattgaatttctaagctcttgttctgctttttgttaagtgcttaaaacatttttttagtagtttgatgagtgtttctatggagaattgcatttcagatgttgataccttttttcacattccaaacaatttatagtccagaatcaaaacatgctggaactcaactaatgggcttatcggcaatcatgctctcactgtgtttattatgaggtctaaaacgcatcttaaactttcctcaacctgtgtttagcttacatattttgtactcaggaatctggttttctaattctttacgttttttgggatatttctttactttgttaattatctcaattatggagttacttgaactgaaattaaaactttgcatctagtttggtgtagctctttgcatcttggtttgcctttggtttcattgcttcacgtgtcttctattgtccctgcagactttcttggatctgctatttatttgtaggcttattaaaaaatcatatttttttaagccttttgtgttattcatttaatttgtttgttaaaagtttcgtgaatttattttgtgttggtcttctgactctcgctttttttacctcgatgtagttgataccttgtgctgttctatcttttctcattca

SEQ ID NO: 86872 - DNA, 344 bp, Citrus clementina
  Intron number 1 from transcript clementine0.9_001632m (loc us clementine0.9_001632m.g) derived from phytozome v7.0 (c hr-ID scaffold_19; pos 811931 to 812274)
ttcccttatcccaggtccctctctttctcttctcttcttttgtatttgttgaagaatgaatatagccaattaagacttctgaaatggcaattcccatttatggttggttttttatatcatgcaaatgcagtcactgatgagtttcttcttctatattattatatcatcggtatgctaaaatactgaggttatggttattgttgctgagttgttttgttgtatttattctggaatgataagtttcagtgacgtcttttgaattttcggtagtctgattttcacaacccactaaacttcctttgtttgagtggattttttgggttgttgcagcggagccggtttac

SEQ ID NO: 86873 - DNA, 324 bp, Citrus clementina
  Intron number 1 from transcript clementine0.9_015851m (loc us clementine0.9_015851m.g) derived from phytozome v7.0 (c hr-ID scaffold_130; pos 216345 to 216668 reverse strand)
gccttttaccttccccacttctctcagacacactggtgactgtctttcaatttcattcccttttcaatgcgtatgcttacgtttttcttttgtctgctttgtctttgtgtaatttgatatacccattaagctctttttttttttttgaacatgtgatattgtgtgtgttagctgaaacatatgcaagagctaagaaaacgatggataagaattaaaagaaggtttctttattgaatcttgatttaaagtttgttactttataagggttttgatttgttttgcattgaagcttcagggatacgtcacctgatacaagctgtaaag

SEQ ID NO: 86874 - DNA, 437 bp, Citrus clementina
  Intron number 2 from transcript clementine0.9_008018m (loc us clementine0.9_008018m.g) derived from phytozome v7.0 (c hr-ID scaffold_2; pos 5199404 to 5199840)
gaggaagtatgataaaataattaatttattctttatttcttagttgtcttttctattattttctcttcattgatatcatcaccaattcaccacgttatattaaaattctcaccacctgtgaaagttaaacacatttaaagatgtaggtttcaactagataacaatgtttcctttacaaattttagctataatttaatattgtgcacattatagtcgctcactattgtctggtacgaaagttatatttttaaagatgcaaatgtccgtattaaaaaaataactttaattttatctttatcatatttgtatataaattaaacaacataaaatatacgcgataaagaaatttaattaagtttttgattgggattgattaacaacgaagtttatttgtttttgcagtgctggcagcttggtttaggttaaaatacccacat

SEQ ID NO: 86875 - DNA, 887 bp, Citrus clementina
  Intron number 3 from transcript clementine0.9_025039m (loc us clementine0.9_022909m.g) derived from phytozome v7.0 (c hr-ID scaffold_22; pos 3773876 to 3774762 reverse strand)
tgcactgtatagttgcccgcaattccaccaatcaggtcaaaccttttccttttcttaaaaatgatccccccacaagtgtttaattttttggaactaccttcatgaaaaccttttgctttgaaaatttttcatctttcttttgttgtaatggttatattagtttatctttgggaattcaaagaggaaagagaacaaattgcttccaaggggagaagatcttgaaaatttctgtaggaggcaaggaaggaaaaaaaaaatttgatgcatttatttgtggaatgaagataatttcaatatgggctatttttttcctttttctcttttctatttgacaaatcggcactgattctggcaagatgttgaagaatcttaaattttatttctgcttgtgttctctgctgatgttttccattaaatccagttcctggttggttgatgaattgttgttgggaagtctatacaaatggtcatgtatgaataatttatttgaagtaaagtttaaaacttattcaaagggttatgcagttatcatatttattcctctttaaaaatgggtttctacaaacgattgcattatttttaatttggtattgtctactccaacgcaggttgaaaactagtgactggtaactcttgttaatcgccacatctttgtttgctaaagtctgcttgcaattaatatgcatgaagaatttcctttagacttgttaatctagctgttgattcatatggctgcagttaggcactgccttgtgctattaaatattgattactattgatattgacatgtgcagctgtttgctacataaatgtggttcgaatattttatctacttctctttctgatattcatcttttttacttgtcagattgtaactggttctgagg

SEQ ID NO: 86876 - DNA, 653 bp, Citrus clementina
  Intron number 2 from transcript clementine0.9_018534m (loc us clementine0.9_018538m.g) derived from phytozome v7.0 (c hr-ID scaffold_46; pos 475224 to 475876)
taactaaggctgttcaagtgagtttaggtttcgtattcatttttcgaatgctatagatgtacatataggattaggattgctgttatgagtaaagaataatgtctattacagttttgagattttgaatctaatgggtacaactgttcaagttataaagacttacaatgatgcttattcttgctaataaacaataacaaattatggcgttccccacattttcctagggattatgatttgagaagagttgttgagattttaagggactggtgcattttactgtcattttctgactcatggactatagggaatgtcctttcttagttatgtgatttctatgccaacttctgagaccactttacatttttcttttatgaataaagaaaaagtgtgctctcaatctagcacccaataatatgctatctttgggaatgattaaaaaaaaaaagagagagagagagggaatatgtctaatcacgtggtaattgttactgatgaatgtattggccatgcaagactgcaacaataataaaatcatttgaggttaaccaatatgggaatgagaatctgttgctaagagatgtagaaacttagggagatgatgagtttagatgcttctcaaagcttgttctgactgttattttctgattacagaa

SEQ ID NO: 86877 - DNA, 418 bp, Citrus clementina
  Intron number 3 from transcript clementine0.9_014518m (loc us clementine0.9_014518m.g) derived from phytozome v7.0 (c hr-ID scaffold_9; pos 2607415 to 2607832)
acaagcacattgttcgagcttgttctttttctgaggtgtagttggtttctttgttttcttttatttttatttcaggatagatcatttttttttttgaatgcttcgagctgtacctatgtttccagctccaagttatgcataataccttgaagatatacgtcttcaactgctgcgttaaagtctgtttctggattttaccttttgaatttatgattactgaaaagcctaagcattttgtttggccggtagtatttatttgctatgaccgatcggtaaacttaattcagctggtcattcttgattgagtcattctatggaagtgggagcatggttgtttgttataaatatgcatattcatgcatctcgtttgatgtttctctacctgaaacaggatacgcacctgctactcactggggga

SEQ ID NO: 86878 - DNA, 1040 bp, Citrus clementina
  Intron number 2 from transcript clementine0.9_012808m (loc us clementine0.9_012808m.g) derived from phytozome v7.0 (c hr-ID scaffold_30; pos 232336 to 233375)
agcccttctcattcttgtaaaggtacttctctttttagtttttaatttttaattttactataatcttttcatgttttatcctttcactcaaagctacccttaggttcacggatggttgtttaaatatcaatttaattgtccgggaaatttaactatgttaaacaagttgttttgagttttgcccatccactactttttaaacaaaaataaaaaaatcaatttagccaataaattttatgtttaactattcgatggggtttattctgttgcagtttgtgtagaacaataacccacttaatgacgtaattctttcaaatccttccagccagttccttctcatttctctttctttattgctagatcctctgtcttttaatcatgttttggagcaatggaatagctctttttcacagtcaactgttcatttaatgtttatagtttctccaattcttacttcatattcattttttcttatcaccccaaaacttatgtttgaaatctcttttgtggacatactggaaagtctgagaattagaaattgttacctaaaccttttaattgatccaatgatccatttgcgtgttcattcctaaatggggaacattttcaactctgaatatatagaagacaatgaacaactgctgtttttagttgtaatgcattatctagggagaagtatgcaatctcattccaaatggcatatgctatttcagccaagtgattgatatgcctacccctaatgtgccctatttcaattttttttccccttcattgttctgcaataatcctcattagataaaaaaaatttatgcttccgtgaaacagttgatgggacttaagaccaatttgttattaagacaaatcaatttttcactagtcatatgttgttcattcttatgcactgttgaccacataattacagtttgggtaggtgagtagtttcattgtcaacttactcttgtaccatctgatttggttcttgctaacctcttgctttctttctgtgataccatctcgtttagagccacagaaaagtatac

SEQ ID NO: 86879 - DNA, 425 bp, Citrus clementina
  Intron number 3 from transcript clementine0.9_010907m (loc us clementine0.9_010907m.g) derived from phytozome v7.0 (c hr-ID scaffold_17; pos 640471 to 640895)
gttgtgatcttgaagagtgtcctatttgcttcttggtttgtgtttttctatcattgtctttcttattagttgttggttgtttggttatttgatattggcctttgtcgacctcctctgcttgttggaaaattgaggatgaaattatgatttaggtctgtcaacaaataaaaattttcaatttcaccaagtgggcatgaagtgcaatcttgaccctgttttctgctaggggtctgttctaggaaaaaaatatgaagaatttttttatttttgatttgatgtctgttcctcaatgtaccaaccagaggagaatatcagagccaattgatatagattattttgatggcctttaagtttttaatctaactaaaccaatttggcctttcttgcttctttctgtagtattatccaagtctcaacagatcaag

SEQ ID NO: 86880 - DNA, 613 bp, Citrus clementina; identical to SEQ ID NO: 79739
  Intron number 1 from transcript clementine0.9_020385m (loc us clementine0.9_017817m.g) derived from phytozome v7.0 (c hr-ID scaffold_46; pos 1613125 to 1613737 reverse strand)

SEQ ID NO: 86881 - DNA, 513 bp, Citrus clementina
  Intron number 3 from transcript clementine0.9_008156m (loc us clementine0.9_008156m.g) derived from phytozome v7.0 (c hr-ID scaffold_26; pos 2611468 to 2611980)
ctggtcttgtcaatcttctttggctttcttttcaggtattagggagatttgaagtttattttgcaatttattttgtgctattttaaacttttcatctgttcatttgctgctggcatttaaatcattagtaacttatcctgtgtggaataaagagacggaaactgaatcatgaatcttatgtctgtgttaaaatattcagtgctgaagtctgtgttaaaagttaggtagcttgactccaaaaaggaccattacttgatttaagcctcttttgatgagaggttattttgtacattatgttgtcattctggaataatttttagggttaggtagttttggagtagatcaagaattgcttttacttcctgaaatttgtgatgctctcgttcttgagtggactgatgttattaaataactttatttggtgaaaactctctgttgattcagtgttgaagtgatgttatggtttcttcttgatatgcagcaatctgcaacaaacagggcaaggtatttatt

SEQ ID NO: 86882 - DNA, 830 bp, Citrus clementina
  Intron number 1 from transcript clementine0.9_032698m (loc us clementine0.9_032698m.g) derived from phytozome v7.0 (c hr-ID scaffold_17; pos 2656118 to 2656947 reverse strand)
ttacagaggattcacttctaagcttttcgtcaaaggtattctctctctgtgagtgtttctattatgtcatcttttttctttattttgcaaacaaaatattatgtgatgcatcatgttaaaggaaccgattgtgtggaatataacttttgattagggaagttcaaaatccgattttatattgctcaaattaatcaatcgaatccaaatggggggtccttggttctgaattttgaggttgtggtggaatggacgaatacatatatttgaatactgacctagagatttctttgaataattttatagtgttgctcaagtgatattgtttcatttttcaaaaatcaaagccactctgatttgattttgaacttttctggtgaatagtttcttcaccttgtagccttatcaggtcgttaattattacattcttcactgtagagtaagaccatacggtggtttaatcacgcaggatgtgaatgtgagcttctgtagatgcatcagtaggtttttgctcgtatttaggccctctactctcatagggaaagcaattccattgtccacagttgcactggaattgatgcttttcttaattatctggattcatctgtttgccctttttggtccaaaatatcaaactcagccacacctctatctaattcccttgaacttataactgtttcacaagttactgagattaaaaacatgttcatattttttatttccttccttcagttgtgtaatacttttggctgcagaatttgcaatcttaccatctaattttgataaaataattggcatgttccgcaggcgtttctttctcaaccactaaagag

SEQ ID NO: 86883 - DNA, 787 bp, Citrus clementina
  Intron number 1 from transcript clementine0.9_016273m (loc us clementine0.9_016238m.g) derived from phytozome v7.0 (c hr-ID scaffold_32; pos 1504292 to 1505078)
gaacgttacgtgttcaagcgccgaaacggttcgttttcttaataaccccttttttttttcatctgggtggttttattttctgttatctgctgaaatttttggtcgtagtatgtatgtttatgtattgtgaatatttttttttgggggggggggggggtgggttggtatggttttagatttggagttgtatgtaattcattgggtatacggagatttttgtatcaacatgagatttttttgtgtgtaatgtttgtctatggtttatgatttcggttctgtgattttctgtaactgaactggcaaccgcatgtttgttatgtatgaaagtatgagaattgttggatgatctatgagggattgcaagtttcattatgtcctgatgagctgttcattattcttatgtgatccaaacaaaggaagattagttgtcacctctagatgtttacttttgattttggtgtcctagaaattaaggattgtgaaaggagatgatagtattgttgcatttaaatttctgtaatatgtatttttttgaaatttaaaactgcaacagttctgttttggattactttgatcttatatcagtctaaattggtaaatttggtcggttcatggattgatgctattataattaactaagcaaatcatatggatggcaaggaaatttgctactagctcagcgttgttggaatttatttgatggattgctgaattcttaatctgtttaccggttccatgtttttggtactcaggaatttatattatcaatcttggcaagacttgggag

SEQ ID NO: 86884 - DNA, 603 bp, Citrus clementina
  Intron number 1 from transcript clementine0.9_013298m (loc us clementine0.9_013298m.g) derived from phytozome v7.0 (c hr-ID scaffold_22; pos 2004193 to 2004795 reverse strand)
ccttcaataaagggaacttttttagcttgaagaaggtgacctttttcttctccaaagattagtaaaactcctacaacgtggtactaaatcaaatcgcttttacaattttgtttttacttttcaaattttcttatggtacttcttttattcttgtgcttgattttattttattcaaatctactgttttgtgcatacttttctgggtcagccgtttaaaacttcgtaattcagagaggaaaatggtgtatagtagtttactctacatcatttaacaactagctgacaccgattctgggggatttattttttctcgctccaattactgaattcaaggaaaaccgatgaaggcaatatgctgaaattatcatgttttatccataataaacttcgtttttccagtgaaattttgatgggatggctccaaatctatcgtagatttatatcttaatgaataccttgggtcgtttagataatgaaactctgttgctagtttatgcattatgaatccgactagaagttattaaatgtcttaaactaataaagttttagtccttgctcacggctaaactcttctattttaccttgttcaatgatctgcaggaa

SEQ ID NO: 86885 - DNA, 525 bp, Citrus clementina
  Intron number 1 from transcript clementine0.9_022159m (loc us clementine0.9_022071m.g) derived from phytozome v7.0 (c hr-ID scaffold_26; pos 1820238 to 1820762)
gactgcttttgctctctcagctccatctttgttatgtgagttgctgattgggttttaatttgcttgcgtacaatcgaatttggcattcattgggttttaatttgcttgggaatctttgttatgtgagttgctgattgggttttgggtttgattaatggattataatacaatggatttgttagtgttaatacgtcgatagtttgaaagtgtaatgtaattttcccgctagtgctcatattttctgttttatcatttttaactgtgtctaccaaatacatattattattttttattttataatatatgatacagaaaataataccagatacatatttaaattcaaaatccaacaactgcaagacattatttttatttttattctcaaaaaatacaaatttagaaacaataccaaacgaacccttagcttttggtggttatgtctagaattttcttgtctctgaaaacctaagtagcctgtgcttctttatgtacagggagagaaagaaaaaagaaaggaagaaaggg

SEQ ID NO: 86886 - DNA, 825 bp, Citrus clementina
  Intron number 1 from transcript clementine0.9_015652m (loc us clementine0.9_015652m.g) derived from phytozome v7.0 (c hr-ID scaffold_48; pos 1246104 to 1246928 reverse strand)
aggccaccaccgccaccaccaccataaaaaagaaggtataattatacttaaccaatgtatttttgttttgtttataccttcatagttgaattgcatttcaacatattgtcttttctttgtggattgtgtatattttgttaaataaattgatacctgggagaatgcaatattggctggtggttaaatgttcgaagagaatatggcatattaatctgagtgttcgtgataagctaatcctcgatgattttctgttgtctgccatatttttttcgacatgggaatgtgaaattgtagtttgtggtgttttgttagatgtttgcataccttcattgttggaaatgtattttgggtttttgatctggtcttttgtgttatttatgttatgttttgaagtcaaacttgttaattatgtaataataaatgttcagtaacttaattttgtatagcaatctttgtttgaatttttactttttgagtgtttgtgtaggaaaatcaaacactttaaagttgttctaggaaaatattgctgccttacatgtcttacatgccgtctttggaataatttactgtgttatagatcgttggttttattaatattttagtagaaagttgccattttctgtgtattttgtttcttgacttactttcagaagcttttttgtttggaatggttgatctgaaatgttgatatttgatggtagtttttggagataagctcaacattttttatctgcatgaacagttaagtatcattatttgctttctaattgtctgtaattcgattttgcagaacatttactgcacaagcttgaactggagtgctga

SEQ ID NO: 86887 - DNA, 938 bp, Citrus clementina; identical to SEQ ID NO: 77960
  Intron number 1 from transcript clementine0.9_025242m (loc us clementine0.9_025242m.g) derived from phytozome v7.0 (c hr-ID scaffold_22; pos 656526 to 657463 reverse strand)

SEQ ID NO: 86888 - DNA, 685 bp, Citrus clementina
  Intron number 1 from transcript clementine0.9_011040m (loc us clementine0.9_010972m.g) derived from phytozome v7.0 (c hr-ID scaffold_6; pos 4044855 to 4045539)
atcacattcacagctatcaatcgccgctttcgaaggtaaactccgaacggctcactaacttttttctttcttccgtttaactgttaaatttcgttcgtattctctagcgtttcggttaccgagaaaacgcgagaaaaggaaggaaaagtaggtagatttaaggatttcaattggttgttacggtttgtcttcagtttgttagtactaagcgtcaagatatgctcagatctgagttttatgatttgttttactgtagatctagatcttgattggtgtttatctgaatctttttgtacaattgatctggatcttgctagtcttttacatctttgtttgtgatataattgattttgtatgatgaataaaaaattgctataacatatctttggttttatggcatgtagaatttactgtacatttattcgccttatgcctgaagatgatttcacgcttgttttctttatggaaaataaccgattttaagtatattacaagagcatgtaaaggaaatgggtgaatattttgtataattttgaatggggaaatgatgattttgtctcctattgatgtaaattggtcaatatatcttaggaaacagtgctttgttcttgtggtatttgtttttttttttttcatttttacttgagaaatgcagtaaaaagtttgtctcattttgttagtagct

SEQ ID NO: 86889 - DNA, 798 bp, Citrus clementina
  Intron number 2 from transcript clementine0.9_031839m (loc us clementine0.9_031839m.g) derived from phytozome v7.0 (c hr-ID scaffold_17; pos 1883496 to 1884293 reverse strand)
gggttttttccaggtaaaatgctttagcagagttagaaagatttttcatgcttgtctgtgatttaaaaatcatgaaatctgcaaaaatctcagtcacaaaatatctatttttgaaacccagtttccattgatttagcatgtcatgatttcaaaatttcccatctagtccttttgctgctttcagtgcttctaggaccgcagcttgtgaaatgtcaaggaagttgtctcttgttttattgtacaatttatgaggcaatatgaaaagaaaacactcaccattaattttctgaaacccagattccattgatatatttgtttttgactttctttattactttagctttccatatagccatagatttgttagtataatttgtattaaaagatgcccatgacaaatttcacctattttgtctcaatagcttttggtagcttatgagaaatatgcttctgtcaatatgtgataaaagatataattaattgtataagactcccacagattattagctgttctagaatattcaaatttctccaaaactatgagtaaaaaacacttgtaaaaaccaatcattgattagatttataaacaaaataaaattggtgtttaatgcaacaacaatgtttgcagttgaaatgtaacaaatgcttttagccatcagtaacaacaaatcttgtctctaaatcagtcaaataagttgcaatctgtcttcataaaacgcctggacgattgtgaacctagtggcacgattatcaaatcttagctgcttttcattcctgcataatttcagctggtaaacc

SEQ ID NO: 86890 - DNA, 859 bp, Citrus clementina; identical to SEQ ID NO: 83238
  Intron number 3 from transcript clementine0.9_021380m (loc us clementine0.9_021380m.g) derived from phytozome v7.0 (c hr-ID scaffold_32; pos 1421601 to 1422459 reverse strand)

SEQ ID NO: 86891 - DNA, 653 bp, Citrus clementina
  Intron number 1 from transcript clementine0.9_009311m (loc us clementine0.9_008801m.g) derived from phytozome v7.0 (c hr-ID scaffold_19; pos 3488077 to 3488729 reverse strand)
gtgcgaaaaacttcgtgattttattgattcttttggtaagttcatgttattgttgttgttattctgtacgttgtttaatatgttaatgtggtattgagtatcatgctgttttttttttgttggtgaaatttgtttgttggatttgatttgaaaaacagaggaaattaactgcaatggtatttgtttctaaacttagcagttcaatgtgtttacatatatatggtaataatattatgtccaatatactaggcaaatgtagggtggtttagggagcgtacagactagatattgcttttgaaaaacacggaaacgcctgaaattaattcttgtaagaagtttacttgattaaaagcgcttgaagtatttatatcattcagatatctcattttggctcttctaaagagggctgtgatggttttatttatttctctaaaggacttttggttattttgagagcatttagtgactgtctaatagctcctccattgcaatagtaacattctcttctattgcagtgaaaatagggaaagataaaagcatagagaattaaagatagttgagaatctattggttatttggactccatcatgttatgcactttttcattatgttatataggtcgtccgaagaggctatacatttttgtgaatcca

SEQ ID NO: 86892 - DNA, 640 bp, Citrus clementina
  Intron number 1 from transcript clementine0.9_003462m (loc us clementine0.9_003462m.g) derived from phytozome v7.0 (c hr-ID scaffold_2; pos 2666114 to 2666753 reverse strand)
tctcaaatcaagaactgctcatctctgacatctttgtaagctctctcttgctgcctgatttctgctttgattctgtttgattcacattgttagttgaatgcttttaactttttaaagtttttacatacttacatttgtacttcatcttagtccttcaatagtctgggcacccactggattgaccttttaactcttacaatatgattaactcaatgataccttgagcattattccagaggcctagataatttacgtaaaattattgtacaagacatcaacaataagcttacaatcttaaaattacagccttgatattggtttgaacaaagatgtgaggcagacgaatttgactaattttatgttggcattttcaccctgaaacaagtaatattttttgtgcaagttgatcttttgcttgtggttggcatccttttagagcatataggtgaagaaagatgggccagatcacctgatcttgaaatgtggaatacaaatatggtcctttcatgattttcagttcaaatacaatttcactttctttagtacaagatttgtttccgattttaattttttttcttttctttttctcttttcaaattgttcaggatcctgtctcagaacaacctcactggtccagtcc

SEQ ID NO: 86893 - DNA, 499 bp, Citrus clementina
  Intron number 4 from transcript clementine0.9_009263m (loc us clementine0.9_009263m.g) derived from phytozome v7.0 (c hr-ID scaffold_73; pos 494664 to 495162)
aaggaattgaactctcttggtacagattcttatttcttcatgttcacacttcattgtgtttgataaaatctgttccttggctgatgtttgttagtagattgacattacatgctctagcctatgtttgttcaagtggtgttgtctatatagaactttggcgagaatgggagaggaataagagctgtaattcttagagaagtaacaattacatttttcttagagtcaataatttttaactctataaattttacttgttctaggatttggtttaaaggagtggttggttaaggcatggtcgaaagacttttgagtagagagcaaacctgtttgattttgaggagatagcaaacttgtgtgcaattctttttgattttgcatgttcgtgattgatgatactgtgttcagatcaaagcattattggaatttaagttgattcttgggataaatgtttgtttctcatgcagttctttctcgaaatccaattcgcaaaattggcgat

SEQ ID NO: 86894 - DNA, 371 bp, Citrus clementina
  Intron number 2 from transcript clementine0.9_008787m (loc us clementine0.9_008787m.g) derived from phytozome v7.0 (c hr-ID scaffold_19; pos 2542391 to 2542761 reverse strand)
agccctctcccgcatcttccttgcaacaagtatacttatttatctaagtttaatgtacctccttagaatgtgtatgtatgcatcttcctgcatcttcccacattttaaatgaactcgtatgtattattgttagtgccattttagtacttgaatgttaatttgtatatagatatctatgtttatggttatagagtggtgagctctgatgattttctgtttgctgcctattattcccctgttgagtacctgccttaaactaaattaattattaaataaatcatgtactcatgacttgtgctttttacaggtagtatactatatatcattagttgtgattgttagtttttgatttattaatggttgatggcagg

SEQ ID NO: 86895 - DNA, 645 bp, Citrus clementina
  Intron number 1 from transcript clementine0.9_008787m (loc us clementine0.9_008787m.g) derived from phytozome v7.0 (c hr-ID scaffold_19; pos 2542965 to 2543609 reverse strand)
cttttctctcatccactcttcaagaaacaaagtgggtatgttatgtacaaattcattatacaaagcatctctttgtttggttcttcgaatatttttactttatatatgcctttctttctctcacaatttcttaagaatttcgtctctaaaactattaagagaaaatttctctaactttgtgatcgcagctcttaattatttggatgtttgtatgtcttgtgcgtgtgatctgatattttgatcgtgcttaatcggtttcgtcttgtaaggtcatttggacagtttttttttttccttgttcttttttggttttttgaatttctaatatatcactaattgcagctccaagtggatgatgctttagtttgattttattcggttatattgtgaagtcttgggggctctgattgtttattatcgtgattcaactattattagtattttcgattgctttgattttttatctggggcggatatggttttcacttctttacacttgtatgggtttccttttattttattgtgtaatactgctatttgaactttttttttttaaattatataaatctgggttgatctcgagttggctccttttggttctgaattgtaggtgtatcgcttaagactggcaaaaagggagcgtgt

SEQ ID NO: 86896 - DNA, 730 bp, Citrus clementina
  Intron number 3 from transcript clementine0.9_019349m (loc us clementine0.9_019319m.g) derived from phytozome v7.0 (c hr-ID scaffold_32; pos 1991257 to 1991986)
cccacgtggagttaaacagaccaaagttcgttaaggtaacaagatgtgaaactgtttattgggttttcctttttcttggactccatttttgtgatgcacagagcattcattctcgtctttaaagaaaatttgccattttgagacaagcaggacatgcatttcggggctgtgaacatgttgttcaaatgattgcttcttgcatagctactgcttaagtccaaacttctcattaatttaactttggtcctagtagattgttgtactataatacactgatcgttcattcttgtatttatataaatgctctacttcataccaacaggatatgcagttaagagttgtaaacacggtgtatcaattggagttcttcttgtgtacctactgctttagttcaaacttcttgttaactgtgcaattcttgctctatacctttttgaattgagatcgagatgaaagtcttaaatgtaggatattgctgctagctttaccatgaaatggaataaaagatgaaatatgaccacctactccgagccagtatgtgcaatggtggagtcatttgttggtcatttcatttttgcgatatcttagaactctaagacggtccttactgtaggtgattttgatttccaaatgttttctccttttggctgttgaatttttatggtcttaaatttttgttctgctttattttacagacaaccgcatcagacagttccctttttgaccatct

SEQ ID NO: 86897 - DNA, 789 bp, Citrus clementina
  Intron number 1 from transcript clementine0.9_014826m (loc us clementine0.9_014826m.g) derived from phytozome v7.0 (c hr-ID scaffold_6; pos 3298365 to 3299153)
tccgcatcgagaccaaaaccaaggtatcttttctatttacttttgtttatcatttttttttttaattttgtgcatgtttacgattgcttaagcccaaagtttcgatcctgacttttattttagttaatgatatgtcgttcttttatttttgctatggattttgtgagtaaattcttatttgttagtttaattgaaagatgtgtttgatgataagcgttcattaaggttagcccaaagttgatagaaactttaaagatgaaagaaaggtttgtggtggtgttgataccatgatgtgcatgatgagtaatggtatgtttggttgtgtaagcatgtacacttgcgttccatttcttgattcgtttatcaattctttctagttgggtaaaatccatttggaaagtgatgattatgactttgttggctgtgagagggtagagctgtttgaaaatggagatttggatatcacttagttggagtgtgcttaagatttaaattatatgcataaatttgatgtagttgtagactgtggaaggctagcttatttgatgttttgcactttttacttgaattgccttatatcacaaatcggtctggaagaacacgtccaatgctcctatctattttgtcagatacgaggcatcaaagctaaagaagcaattccgatattaaggaatatttctaccgtacccctaggaagacagccccaaccatgtttttctgtcagcatgtcagtgagttgagatgttgtggctttgtgagtattaatacttgtcttccgcttgcaggaca

SEQ ID NO: 86898 - DNA, 614 bp, Citrus clementina
  Intron number 2 from transcript clementine0.9_024581m (loc us clementine0.9_020440m.g) derived from phytozome v7.0 (c hr-ID scaffold_80; pos 232439 to 233052)
tggtggtatatattggttgatcttacctgcaggatgtaatgcacttttctcccaaaacttcatttgtttgatgctttatccacttttttgtgctattttacatgacttgaaggggttgatgctaaatataatgatgccatatagcaaggtatgggggaaaattttgtaaaattgcatatatatgtggataaatattgatggatactatcatatgtttcatacatgtgtatttgtggactttattagttaaattttttttttctgatatatccctctcccttagttcttctcctcttgtgaggtttgaatcactgtgtcaacgtgttcggggcttgtccgacttgtatacaaaagttgtttgacttttgtcttgttctgagaagatatcaaacacagagaaggcaccccctcaaaaataataatgctatgcctgtcgaaattttgtatccgaaccacaaagagtcaagacttcggtttttgcattaagttatggaatctagtttgttctgatatatatattttatatccttttacaattgggtgaactttggtacgtcacttatggtttttatggttgctctttgcttccagatcttggttcatcattctgggga

SEQ ID NO: 86899 - DNA, 274 bp, Citrus clementina
  Intron number 3 from transcript clementine0.9_015234m (loc us clementine0.9_015018m.g) derived from phytozome v7.0 (c hr-ID scaffold_80; pos 467438 to 467711)
caactcattttccaatttcaggtactaaagttcatttttgtattttgcttaattaattattcttcatgtattagtattaggatcttttctcttgatttgacctctctgaactttagaattataacgtatcattatcttataactaccaattaccaccttgtattttgctcggcagaggatcctgttccaatttttaatgcatttaaagagctaggtggtttgagtcggtttatttaatttagatgcagaaatttcatgtgttacagagaagaaa

SEQ ID NO: 86900 - DNA, 855 bp, Citrus clementina
  Intron number 2 from transcript clementine0.9_030552m (loc us clementine0.9_030552m.g) derived from phytozome v7.0 (c hr-ID scaffold_19; pos 2138183 to 2139037)
aagctggacaaggtgaaatttgcttctctcctcaatagaatagaataatctactctctcctatttgatgaaacaattataaccggaatctatgtgttaaaaaaaaaaatctagacttctcactcaaaatattttatatgtttgacaaggggtcatgagcccattggcaacccatagacttaaggtttcttgagtgcagggttcgagttccaacaatgctccggcttgattccctccaataaaattggatagaaatatacttatctccccatcatttagagtatattagatatccctctagtgttaagtgatagtcaaactttagattatggcgtagtagaattatcaaagagagtcctgatcaatttctaattgtaaatattagtagagtttttattataatattaatatataaaaataaaaaattatagtttagacttctcatcaaagtaatttatatggatataaattgaataaaatttaattgtttctacctagacctaactaaataggtctgtaaacgcatgcaagaagaagtgatgatataattgttttaggttattattctgattaagtggtgctagtcgcaatatccagtaaaagctcaatcactattatgtatatatttttctgaaaaaaagttgaaactatataatagtagtttatatgaaccgaaaatatttatcagatttcatttcttttttcattatcccattaagtagaaatagtaggggataaattacagatttccttaattaataattaaaaaaagcttcgtagaattagaattgattaactgtatcagtaaaaataagcccaaatattaatttggatttgtgttttgtagtgctaagtc

SEQ ID NO: 86901 - DNA, 713 bp, Citrus clementina
  Intron number 2 from transcript clementine0.9_024292m (loc us clementine0.9_022892m.g) derived from phytozome v7.0 (c hr-ID scaffold_32; pos 938673 to 939385 reverse strand)
gaggtactatagcttgctctgttttcattttttattttcattacatcataaaatcacaaattaacaattacattaattgagtcattgtattataagtatgatctttatctagtaaatttcacatattgagatcaagtgatcatgaatctaatgcattggagtagagttctttttctttttccttttttttaatggtgatggcaatttgtgtgaccgaaaattggaaagcacaaatcaaatgtgatgaatgtttttcatagccgtaaggaaacaagagcacaaggatacgtacttttcttcttcattcttcaaataagaaggctttggcattgaatgaaaataaataaataaataaggctctactgagttactacatttgcagctataaaggaataagctacttgaattttcatgatggtagttccgtttataggaaatttactggattctcaatgatgtgtccgaggctgcaatgcgatgatttggtgtggatatattaactcgtctgtatcttgccaatataactcaaaatatgccctcatttctttgactctaatattggaagtaaagcttacattcaattactacattgtttaccacatgggtttagtttctgtaattgaaaggtttttctgaatgacgtatcagttatttcttgttcatctctttattttttatctgcttatattttattgtaggagagccatttgctg

SEQ ID NO: 86902 - DNA, 778 bp, Citrus clementina; identical to SEQ ID NO: 80170
  Intron number 3 from transcript clementine0.9_005180m (loc us clementine0.9_005180m.g) derived from phytozome v7.0 (c hr-ID scaffold_168; pos 84007 to 84784)

SEQ ID NO: 86903 - DNA, 826 bp, Citrus clementina
  Intron number 2 from transcript clementine0.9_026352m (loc us clementine0.9_026352m.g) derived from phytozome v7.0 (c hr-ID scaffold_62; pos 283542 to 284367 reverse strand)
ctaaatatgtaagtatcaaattatatattcgtgaatgtgattatgcttattcatgttgcattttttaattttttctgtttatttgcataaaattttgcaactttaatttttttttctgtggcacatttgggtggattgtcaatttcagtgatagttggttagattccccacccaccccaaaatcaagtgttgaattatttgaattgtttatgttaaggttgacgggaccatcacatagttaaacgaaatttggtaaagttgcgatagagtaattttttcagcatatgtcaggttgaataaaaatatttgcttggtaaatatatttgtgcgagtatgattatggtttatctattttgtctgtatgaaggatgatagaagttatttatggcagatcttttttgaaatttattcatagatttgaagcacttgggttgcctagaatctgctatatatatgtgaggaaattctttgaatgtggaaaataatatgtagaatttgtggatttgaatagaatccactgccgagtgattagtatgtgtctagtctaacaattccctgacttaagtaacatcatagatttattttgttgttgcattgtcatactcttacaactcatgctctttattggtggtggctggtgagttttactttgacctatctatttaacctctttgtttgatgtgtaagaaaggtaacttgaacacttctgattattaatgtcaatatacaatttatcttactgcaattttaaatcattcttttcttttgatcctctaatttgatcctttttctttattggaacagtaagactaagaagggaagacca

SEQ ID NO: 86904 - DNA, 554 bp, Citrus clementina
  Intron number 2 from transcript clementine0.9_019825m (loc us clementine0.9_019825m.g) derived from phytozome v7.0 (c hr-ID scaffold_48; pos 419344 to 419897)
ctgaaagcttatcatgtaaggtcatcccataattaattcaacattcttctcagtgttacaaaaatgtacgatgtttatatttcatccaatatattttggcttagtattgcattattgctggtatagaacatcctctaagcttctagacacaaaagagctatgcaccttttcttcttttaaatggcgattccatgttgttgttgttattgttaccttcacttttatggagcactaaagggtaaacacatttgtgagggagtgtgggtgtgctttacaaatttttgaggacttgacatgtcttctatggatttctactcgatttagttagagatattatatctaaacattgtttctgttttgtaactctgttatctgttttcaagagtttggttgctcaatcatatccttcgatatgcagatcatatatttaaaatttattggatttttcttatgaattaattaagagtgggaacaaaaccaagcttccacatcaaaaccattttcagccttattacatactgatgtttcctgccttatatgtagttgctgtggca

SEQ ID NO: 86905 - DNA, 417 bp, Citrus clementina
  Intron number 1 from transcript clementine0.9_004002m (loc us clementine0.9_004002m.g) derived from phytozome v7.0 (c hr-ID scaffold_2; pos 3257604 to 3258020 reverse strand)
tcgcccgattccatcgcgccggagagtcggagacagtgagttgttgtcttcattttctttattttttatttgtttgatagcataatataacgctttttcgtcttcactgtccgtagacaaattttgaagttttccaatttccaagttcaagttggtggctttcacaagttctgtttatgttgtaaaacttataataaagttttgaatttataattcattgagaattagagattttcaacaccattgtacttcactgtaattggtgcctttcaaagatttctttcttattttattggaaataattgatttttaaatttgaagataattccagcaactaattaagcaagatcgttgggtaacatcaacagtttcaaaattgcaggtctttgtcaaaagaggggaaaaaaggaatacccg

SEQ ID NO: 86906 - DNA, 341 bp, Citrus clementina
  Intron number 1 from transcript clementine0.9_014594m (loc us clementine0.9_014594m.g) derived from phytozome v7.0 (c hr-ID scaffold_80; pos 273405 to 273745 reverse strand)
atatccagcttaatattgatcatattttattgaaggtggttctattctttgcattctttttcatgttattcgcttattggcattcgtttttttaatttgacttatttatttatttatttttatattgttttgttattggaagttgatgatgttaagtgggatttgtttgtggtaaatgaaaagttggtaaaggaaataatttggtccgttgattgttgctgaatcagttgtgttcaatggtgctgatgaagtgttgtactttagaaggatgatggatatatctgtgaatgaagtttatagtttgattattttatttttggctattttgcaggccacttgtg

SEQ ID NO: 86907 - DNA, 623 bp, Citrus clementina
  Intron number 1 from transcript clementine0.9_007021m (loc us clementine0.9_007021m.g) derived from phytozome v7.0 (c hr-ID scaffold_73; pos 242811 to 243433)
gattctctccttctgtatctccgcgtttctcttaggtgagtcgcttgactcgttacctagtcaactctagggttttcgatttgtattttcttttttaagggttacggtgattggtgatagatgatgattctttatttttgcttttttatgtaataatttgatttggttgtagttctgccgggttactctttgtttggttattgagaaatggtgggaaattaatctaaagaatagagaagaaagtagacattttggagtcgttcttttttggcttttgaaagaataagagaatctcagcaaaaaggatgtcgtcaatttgttgaatatggtagattctattggatatttttgtttgttcagaaagtaattttttttaatctttcgtaatgcttcttttcaaggttatgaattacttaaacatgttttagtataccgttaaccctaatttgaaagagtagttaaaagattttagtttgcttgattttcctgccttttcttgggaactgaaaatgaagtagtagggattaggtgcacaaagctatgattcttttgtttattttttgaggaaatgggtattcttgattgcagcttggctttttgaaggcgaatttctttcagactct

SEQ ID NO: 86908 - DNA, 679 bp, Citrus clementina
  Intron number 1 from transcript clementine0.9_012324m (loc us clementine0.9_012237m.g) derived from phytozome v7.0 (c hr-ID scaffold_48; pos 1600964 to 1601642 reverse strand)
aagtatttgccgcaaggggaaaggaccagagtatgtcaatttgaaaattttctttttccttctttcggttatgggaatcaaaacgaggatatatttagaagaatattcgaaattctgattagggttttgcattgcttctccttcttgaatttctaacgtaacggacatgtgtgattggatggaaatgaccaaaatgcccttgagttctgtttggtatgataaatgatgaattgtggatggaatttggtgggaaatttttgtaattgtacttaattggatgataaacatatctaatgataaagctactctttttaccgtcacagaattgtgcattttacaaaattctattaagctgttatgaacatatcatgacttcaacaaccattttagctgagtttctaagggtattttcaggactaacatgctgaagcctcactttgaaagcacgacaacttagagtttgctaagtgcccctcttttcttggtagctgatatttactgccctcgtggacacttgacagctagtgatttcagccattctttttggaaatattcatgcccattttaatttaactgtcatctgtatttaaatgatttcactgaagaagacactttataatttgatttgaaatttcctgtgttaggttcagagacatagggattaccggcagaagataat

SEQ ID NO: 86909 - DNA, 801 bp, Citrus clementina
  Intron number 1 from transcript clementine0.9_002664m (loc us clementine0.9_002664m.g) derived from phytozome v7.0 (c hr-ID scaffold_19; pos 1178569 to 1179369 reverse strand)
gcccgccaaaaaacttgtcatcaagctcctcaaaggtacgcccttgcttactgcttgtttcttttattcgatcattcgtcttttgtttgtttaggttttggttgaggatatcgagggttttgcttctgagtattggagaggctttaaatttggatttttgtttgttttgagctgatcttttcgcgtggttacttgaatttatttggtggacctttgaattggattggttacgggatctgggttctcgtttttcatttgttaatcgaggaactttatccggtggttgaaattgatttgggtatttctcgcttttgctatgtttatttgtaaccattaggaaattgcaatttcggattgattggccgagtctgtttggttccattttattttattccctgaggcacttattaaaccaggagctgactagggttttatttttatcacttgagtaagtaaaaatgagaccaatctagggttttccctggtgatagtttgagtcaatctgatcagttgttagaagtgatttggtagctagggtttcggtgtgctgttctaatttattgttattcattgcaatgatttggtacaattcaattttctatttaatttgggttgcatatgcaaatgtttagtgcaaccggaaaaaccttgttgaggcagatattgctagtctagcaatttgaaacttgaagaattctcaacttatggtctaattttagaagatatgctgacgtgataaataattctgaattttgcgtctgtgaagctaaacccacactgcctacaaattttgaggaggat

SEQ ID NO: 86910 - DNA, 603 bp, Citrus clementina
  Intron number 2 from transcript clementine0.9_013062m (loc us clementine0.9_013062m.g) derived from phytozome v7.0 (c hr-ID scaffold_26; pos 195873 to 196475)
tagtttttcacttagttacaccatccaaatttaaggtaatagaatgaacctagttcatatgttttttcacctttcaactttcattttctctcaaagcatgattccagccactattattctaggactgtaagtcagaatagagtgagtagaaggtgaaattcagagcttttcgaggctatgagattccttgctaaccaagtcttgcaaaatgcagcagctaaaatctttcctgaacacaaaaaggctaaaggaggtattgaaatgatagattttagcatgtatgttatgaagttttagaagaaagaaaacaaaagcattagtgacgatgcccataactgctgacacatggctggggttccagcccaaccattgcaactcataaaaggagagccaaaatgtttcaataacttatccagtgtgcgttcgtagataaagcttggtagatcttactggtgaaaggaggtcttttcttccctgcaagattatcaggcataattccatgatatttcaatgcatgaagaatcttttctattcataatacatctcaaatgcttattgttactgacatctcataggtgtacattgtaagatcaagaggttcag

SEQ ID NO: 86911 - DNA, 563 bp, Citrus clementina
  Intron number 1 from transcript clementine0.9_020655m (loc us clementine0.9_013578m.g) derived from phytozome v7.0 (c hr-ID scaffold_22; pos 1152510 to 1153072 reverse strand)
gaaaggtcccctcagacattttaggtttatgattttccccttttttttcttttttcctgaatgtcaaatatagtataatataagtatacaataatacaaaaatgcctaacgtaacaaagttcaaagtatacaactgaaacccagcataataaattaataaaaacaaactctcataagaaaaaatcaaatccgccactttattgttaagaggaagtgtaatattcaatccaaccatagtgttattgataattttccctctactttctgataacatgcgattgcttaagtttgtggctacacttgctcacactcttcatgtataatacccgctttaattaccccttgacgtgaaaatgttagccccaaaaataaataaataaataaattagttgtttaatctgtggttggaataagtttttctatcaaaagatttaggacataggagacaacaaaacattatgaaaactataggaaaaaaaaattaataattcattttcctctaatcgagtttatttatttttttaatagcggaagaattgggcgtaaaagagctttcgctagca

SEQ ID NO: 86912 - DNA, 737 bp, Citrus clementina; identical to SEQ ID NO: 86802
  Intron number 1 from transcript clementine0.9_006739m (loc us clementine0.9_006739m.g) derived from phytozome v7.0 (c hr-ID scaffold_32; pos 551547 to 552283)

SEQ ID NO: 86913 - DNA, 246 bp, Citrus clementina
  Intron number 1 from transcript clementine0.9_019056m (loc us clementine0.9_019056m.g) derived from phytozome v7.0 (c hr-ID scaffold_2; pos 1939942 to 1940187 reverse strand)
gacgagtgtgaggccgctatcaacgagcagatcaagtcagtttctttccatttacatcttctgcatctacttttttattttattttcttctttttctttataaaggttaaaacgagcgacgttgctcgtgatattatcacgtggggttcatattattaatccagtgaattattcattattgtttagctgtccatttgatttttaacttattatgaatgtgggtttgtgtttacagtgtggaatata

SEQ ID NO: 86914 - DNA, 614 bp, Citrus clementina
  Intron number 2 from transcript clementine0.9_008730m (loc us clementine0.9_008730m.g) derived from phytozome v7.0 (c hr-ID scaffold_19; pos 168134 to 168747 reverse strand)
gaccagttcatcaattttgttattcgccctcccaggtttcttgctctttaactactatgcttcattaattcactcttatcaacaaagtcaatattgttcatatatcatgctatgatgttgttaccagtttaaaacattactaaacgtgcctttcacatttgccttcattactaattttaggtactgataattgttttgtggttcacttctgatggtctttccaattatcttgctttcctgctgttaaaaataaaaaaataaaaattcttcctccttgtagtttggcagttcaggatatgtatgcttttaattcatggctcttttgggttgaaactactagctattaagtatgaatatctgggtgtttaaaacaatagttttcctaaaaaattaaaaacaaaaaaggtgtataccaaacacttcagtggttgtgttggtcaaaattaagcaaaaaagctgcaacgatgacaaacgtactcttctttgaattaatgaaatatttttccatctttcgttggtctagtcctgtatcatttgtatattatttggtcactaatcttggtgcttgtgttgtgctgggcatacagggcggagtataacccagatcagtattt

SEQ ID NO: 86915 - DNA, 484 bp, Citrus clementina
  Intron number 2 from transcript clementine0.9_019884m (loc us clementine0.9_014234m.g) derived from phytozome v7.0 (c hr-ID scaffold_22; pos 125721 to 126204)
cctactctcgtttgcgccacaatcttaataccaaggtacgtatatacgtgaacgtgttcattcactttcactgtataacaaactaagaatcatcacgaacttaattagttaattagtcaccgcgtctacacttactgctcatcgttgtcgttgttgttttatatatatatatatatatatatatacacacacacacacaattttattcttgtagattattggtacatgggatgaccatgattatggattgaatgatgccggtaaagaatttcctgccaaagtttctaatcaaaggcttctccttgatttcttagatgagcctcttgacagtccacggtgagtggttccattcatatgtatgatcaacaacttcttttttattatcatccttcctttcatttctaaatttcaattgctttgccttttcttcatattgtagtcgcatgcaggctggcatctacacatcatatacatttggacctgt

SEQ ID NO: 86916 - DNA, 706 bp, Citrus clementina
  Intron number 2 from transcript clementine0.9_026247m (loc us clementine0.9_026247m.g) derived from phytozome v7.0 (c hr-ID scaffold_62; pos 115683 to 116388 reverse strand)
gaaagaagaacatgtaagaaggtttttgtaagctaggtcttgtatgttatgaaatggttatcatatggttgatgatgagatagccatctttcgccgtttacattgtgaaataattttcattaagattcccatatttatgttgtgtacttcattttgtcaatcatagcttagtaatttcttaattgtgtaagttgagacgaacttattatgatctattgtggtgtattttgagttcatcttcatggttcaatatttaaagaagttgaggtagccagagattgaatatgattttatcattgtaggattatctgtttgtatttgtgggtttatgctggccagcatctgccactcattgcaaagaaaaattatgaaaattaggcaggtctgtgaaaaagggggttaaaaaaatcgtaaatgagccattttcattattggtacaagttggacattttcagtttcatatataaaataaaataaaaataaaaataaatatataattgaattgttatatttttatgtctaatgcagttagtttcacatgtgatgacgtagaaatagttagcttttttgcatttttgatatggcatgatcaggcatgatcaagaagtaacccataatttaaattgctagatgatatgatcaagggtgtttataatttttgtcgtttgcagttcgtgatcatctctgcaactggctggggtttact

SEQ ID NO: 86917 - DNA, 370 bp, Citrus clementina
  Intron number 1 from transcript clementine0.9_026247m (loc us clementine0.9_026247m.g) derived from phytozome v7.0 (c hr-ID scaffold_62; pos 116441 to 116810 reverse strand)
tctcatccatcggcgcggtcttgccggcggcggcggtaatgatttgcaccttttttttgtttttgggaatcaatgccaaattctacttcgtatttaatattttcattattatgttctaaaaaggcgtatttttattgagcttgattcatataataacaaaaatattatattgcttcaaaagcatttctttttcttttctggaatctggaattattagtttttgatatttaaagatctagtggaagatatgcccttcatttagaaaacaaaaaaaattgctattgacaatgtaatatcgtttcggtagaaaatgaatcattttcactgatagttgtttgctttgcatgctttggttgaattgcagaccatc

SEQ ID NO: 86918 - DNA, 833 bp, Citrus clementina
  Intron number 2 from transcript clementine0.9_015562m (loc us clementine0.9_014981m.g) derived from phytozome v7.0 (c hr-ID scaffold_80; pos 1070261 to 1071093 reverse strand)
agaggtacaagttttgatttttttcttccccgttttttgagtgatttgttcttaattgtttgttcagcgtctgagataaagttaaaggaatgtatttgaagtgtgagttatggtgagattatgagcgtgtttagtgtgttttgattcattaataatgattgaagtgctttatgaaagagcacttgacaggtacttctgcttttcaggagcttgacgctactttctctgcaaatggactgagttttccaaatggttgaattaagcttttgaaaattttatctattttcctattctagaacgtaatttttctgtgtgttttggttagacttaaaaaatgaatgtttcagaagtcaaaaaatgtattttctaaatcataccctaatgtcttttagtgctggttgtcaataatgactggaggtggacggctatggaagagaagaaattagagtgctgattgattgcaaccaatttaagattttgatggctgggagctgagttattttttgaatttcaagcacatttattttcaagattgaaactttcttttccagccaaatttactctttactacttggatatgttactggggtgcaaaatgttagataattttgctgtcagtttattactgctttgcttgctttggtttaattttaacgctgtcattatattgtcgggttttagcactcggagagatcagaatattggttttcgcagttattacacatatatttgctcctttcagatgccactccagtcttcatgtatgattaatatgttgacagtgatttgcttctacctgaagaaacaagtatgttttgtatgacagatttcaa

SEQ ID NO: 86919 - DNA, 910 bp, Citrus clementina
  Intron number 1 from transcript clementine0.9_011478m (loc us clementine0.9_011478m.g) derived from phytozome v7.0 (c hr-ID scaffold_9; pos 2507565 to 2508474)
agcgtttctcttcaatcgatacaaggtcagtcaatttttcttctcttttttttttttttggttccttttttttttctgtttcgtaattcagttaatttcttctttctttttttttttataacttttaggatctgattttgcgtttaatttttattatctttgtttggattattaatgtttactgcgcaaagtttaaattttgcttgtttactccttgttttgtgttttctttgataattcagtttctgtttggttgctgagaaaaaaaaaaaacggaaggatactgaaagaaagaaacatcagcatttttttatttttatttttttaaatataaaagagttagaacttagtaaaaacacttatttgaagctcggtttattttaagctttgtttatttaagatttctttgatcagtttgattctttttctttttcctgcattttctcagcaaccaatcagaggctgtaagtgtgtgtatgtagtgccgtttccattttctgatcattgaatctgctttgactgatcgcttcagtattgtttttgttctttgattttcctattaaggtctccattgttgatttctgcatttaaatttttgtaagtctctgtttctttggcaaaaaagagatattgaagaccttcacattactaaatgcagccgtattgttgcatggtggatttgaatttgatcttataaatctcagtcatacatgattaagatcaatgtcttttaattgattaatttcttctgaggatttcatttgtctacaaaacttagcattttgatcatgttatatgaatcttgttcattgtttgttatgctatcttctggcgtgcttcttgtttcttatttcagtcactttgttttgctgcagatttggaaacattgggatttcaggtgataatacag

SEQ ID NO: 86920 - DNA, 307 bp, Citrus clementina
  Intron number 1 from transcript clementine0.9_025545m (loc us clementine0.9_025545m.g) derived from phytozome v7.0 (c hr-ID scaffold_6; pos 4573235 to 4573541 reverse strand)
aggaactgccgccacgcccagcagatcgcaaaggggtaagttcattttgtgctgcaaattgatattgttcacagtttttgttttttggatctagtttttcagataaattattttgcaggcatgcaattttttgtttttgggggggggggttactttgctgtgtcaacttctaatttggtttattagttagtttagaattcaaatttactaatggtgcaagataatgctcagatataatgtggtctcttcttctcttccttgttgacatacagaaaacaagcaaaagggtccacttcgtgaggactgt

SEQ ID NO: 86921 - DNA, 311 bp, Citrus clementina
  Intron number 1 from transcript clementine0.9_010555m (loc us clementine0.9_010489m.g) derived from phytozome v7.0 (c hr-ID scaffold_6; pos 6261243 to 6261553)
gccgttcttcgttcgctgttttgtgttatttctctgtacgtctcaaaaaccattaactttacatcttatttgtccttttttctttttcttcttttggtttcttacgttttcaatttttgctgagaagacgtaaaagttaagtttttaaattccccgaattctaattaattgagcattgagctttaattaagtaaaaatttgattttttttctcctcaagtaattgaacacttggttgaatttgcatatttttctcataagaaatattttatattgtttatggatttgtttcgggaaggttctgttttgaaa

SEQ ID NO: 86922 - DNA, 646 bp, Citrus clementina
  Intron number 1 from transcript clementine0.9_018349m (loc us clementine0.9_012186m.g) derived from phytozome v7.0 (c hr-ID scaffold_19; pos 1007973 to 1008618 reverse strand)
tctttcactaacaggtaattttttttgtttactttgattttttattttcatgtttgggttacttcagtggtttctttgactaaagtatgcattttggcctggtgggtatctgtgcaagatgggtttggtaagaagaattggaaagaaaatgtttgattagcgggcctttactatttacagctatgaatttctgatctttccttcattctctcttcaatattgtggtctattttgtttattggattgtggttaccgcaagtgatcacacatacatccctttggcagataaataatgcgttggccatgaagattccaaaattgagtggagatgtatttagcatttccagtttgatgaatataggcagttaatataaatatgcatatctttctgctgtattattattattatcgcactaactgaagaagcttcagcatcgttgctttagcctttatgtatgtttcttttccattgctttcagatcgtattaaaaatgttatgctacgtattcttatgtcagttttcataaatatttgttattcaatgatttttaagcttcacttttttttttttttttttaacattggttgctatggggcgggatatgttctagttacttgtcaaagtggcttgttcttcagtatagtg

SEQ ID NO: 86923 - DNA, 721 bp, Citrus clementina
  Intron number 1 from transcript clementine0.9_000215m (loc us clementine0.9_000215m.g) derived from phytozome v7.0 (c hr-ID scaffold_19; pos 245721 to 246441 reverse strand)
cttccaccaaagacggtcttgttaagctcttaaaggtttgcattctttatttctcagctaattgcttatatatctatatctctctctctctatatatatatgttaattcaatttttttttttttttttgtttgggtaattagctggtgatagttagccaggtagtcagttaatttagtttctgttcggctgccgagggctgagggagtcgttcatagtgaacgaatgggaggaatcatttgagtttgttgtagttgttgttactgttttcgttgaagaaggtgaagccttcatcttagggttagtgagaagtatagtttatggtgattttttccaatttctagggttgaatctgatagtttgacggtagttcgaggaaattgtcaaattagggtcgtttcgtgtgtcttgttgattttacagagatgctgggttctgtttgtggtgggaaaatttggtgaaattaaattgacttaggggatttgtttattggtctgagggattctttagtcactctgatgtatgttttactggactctagttgctaaaagtcctgtacctatgctatgctcatgtttatacagttattccattatactcgcacatcaattagccacctgagactagtgaaattatttatttatgcccaatgatagcatcttgattctgttacttggcaatgttctgcatttttttcttctctacctgcagcaagctgcgac

SEQ ID NO: 86924 - DNA, 765 bp, Citrus clementina
  Intron number 1 from transcript clementine0.9_033975m (loc us clementine0.9_033975m.g) derived from phytozome v7.0 (c hr-ID scaffold_6; pos 5994286 to 5995050 reverse strand)
atccttgggatcttccaagtatgaactacgtactcaatttgtctttttttttttctttttgggatcaaatttaaaagagcttttaaaggcttaaaagtgtttgttcaactcttctttttccccaatgtgttctaaattccaatcaatctcatttcaaatgaagctattaatgggtttttcagaattgatttgatattaacttagagcttatttgtcttattccttaaaaggagtggggataagcttgcttaagttcttgagtgcaactttcggtttttcacatgaactttaattacaatgattaagttctgatcagtggatcatcaatttgaagtttaagtaaagcttcttttctttcttcttttcattttcttgtgattccaacttccagattttcatttttcttgccacacttgcaaagaaagtccgacgaactataagattcatgctctctcatttaccagcataattagattatcaaccgaaattacatgatggagccccatcttaaatttatatatatatccttcacttacctagaacttaattaggtttaacacttataaagaaattttcatttacttggggaaaccccatcttaaatttatatatactcattttgtgtcggagcatatatatatatgtgtgtgtgtgtgcatgcactccaatcagactgtccaggatatttcttgtaatcatctaattttgctctctttatctcataatgcagaaatcagttctacacctgacaacgaaggatacttc

SEQ ID NO: 86925 - DNA, 679 bp, Citrus clementina
  Intron number 1 from transcript clementine0.9_016399m (loc us clementine0.9_012186m.g) derived from phytozome v7.0 (c hr-ID scaffold_19; pos 1007940 to 1008618 reverse strand)
tctttcactaacaggtaattttttttgtttactttgattttttattttcatgtttgggttacttcagtggtttctttgactaaagtatgcattttggcctggtgggtatctgtgcaagatgggtttggtaagaagaattggaaagaaaatgtttgattagcgggcctttactatttacagctatgaatttctgatctttccttcattctctcttcaatattgtggtctattttgtttattggattgtggttaccgcaagtgatcacacatacatccctttggcagataaataatgcgttggccatgaagattccaaaattgagtggagatgtatttagcatttccagtttgatgaatataggcagttaatataaatatgcatatctttctgctgtattattattattatcgcactaactgaagaagcttcagcatcgttgctttagcctttatgtatgtttcttttccattgctttcagatcgtattaaaaatgttatgctacgtattcttatgtcagttttcataaatatttgttattcaatgatttttaagcttcacttttttttttttttttttaacattggttgctatggggcgggatatgttctagttacttgtcaaagtggcttgttcttcagtatagtgcatgctgtgtaaatcaagaaatgttgtgtcagg

SEQ ID NO: 86926 - DNA, 633 bp, Citrus clementina
  Intron number 3 from transcript clementine0.9_006754m (loc us clementine0.9_006754m.g) derived from phytozome v7.0 (c hr-ID scaffold_80; pos 616634 to 617266 reverse strand)
tggctggttggaagggttcctttttgttgaacgaggtgactatttatacaaataaactccttccttctgctctgtgtatgtgtaatatgaaaacataaatgatgcatcttctagctatagtaggcaagaactttcaacgatgtcatggcattgggatgattaaatggaattcagctgatggtaatggcattaaacaattaattttaggtgttgttgtgtgctcagtagaaacaaccattagattgaataatctaatgcagtaaattgttattaacaaggcaatcaaatgatcacataggcacaatctttgtctgtaaactaaaaaagatttcatgattttgtgctgaatttataagtttagcagtgttattttaacaatcttactgaatgcatcttaagcttttatgtttctatggtttataggaatttacatttctgatgactttctgaatttatttaataactcagaatttgaaccttaggtgccttattaggaggtccaaaacctgtattacagtttcgttcaatagtgtgtgtttaacatttgatgacctgaaactcaatgtctatctttctttttctgttatttttatgacagaacctgttacctaagtttggaaaaagcgagaatac

SEQ ID NO: 86927 - DNA, 778 bp, Citrus clementina
  Intron number 2 from transcript clementine0.9_007677m (loc us clementine0.9_007677m.g) derived from phytozome v7.0 (c hr-ID scaffold_26; pos 3010260 to 3011037 reverse strand)
atactcttgctaagcatttattccattgtgtgtaatctttttctttattttgttttatttcttgttttgttgcatagtgtgcatccaagattgtatacttttgctcttactgcatttgctacattcatggagattcggatggtttgctagaatattaaagatgcatcagtaactgttttcttgtttggttaagtcttaatctgttgtttaaacttcaacttgtgttctctggaatttatcacatagataattgcttgttttcaatcttaaagattgatagtttctcagagttctgacatataaaatccaccagtgaagtggcgatgtaaatttataatatgaattggttgatgctgatgggcacaatttctttttgcctctgttaaatgtgctctgagggtaaatcatattttcctcttcagttcacacacttaaacacaaagcagtggatgctttgattaatctcccaggtagtatttggtgaattggtttattaattgaagaatgaattgaactggtataggcctatcattacaaactggttcttagtgcataatgctagttgttatcatcttgattacgttccaagtgagagcattctatcacagattattgtttttgatttctcttcagtcactaataaaattagaatttcctctagtggatatgctttcagattgagaatgaatatatacatttcctcttgtggttggtttcatttagcccttcttcataccttgcaggggaaaaacaaaccattgagtggccactgcgttta

SEQ ID NO: 86928 - DNA, 599 bp, Citrus clementina
  Intron number 1 from transcript clementine0.9_013791m (loc us clementine0.9_013791m.g) derived from phytozome v7.0 (c hr-ID scaffold_2; pos 1456983 to 1457581 reverse strand)
caggtaatttcttcttaaagtcgttttcattgcaaatttgcaatagcatgatatatacatgtttgtttgtttatttatttatttttaaacttcagtcgtccgtattttacaaaacgcaggctcgtacaaagttgttagtaattaacttttggagtctgaactctgatgcatgcaagcaaattggaaattttatacaggaagaaaggaaaagtagacactgaagaagtggtcctgcaacttttctttcgcactaaagattaacttaataactttatgcttagtcgtttaagtaataattccacctttatcctatgttataatcaggtgttgtactttttgcctagtcattttaagcttgtttaggctaattcaaacaggtatcctacaaaaagtttgaacatcaagaaagtgagtattagattccatgtatcttttgtgcaatttaattgactatataaatatttgttagttaaagatttcgaaaaacaacaaagtctgttttattaaaaaaaatgttcagccacgtgacttttaattgatagaagattaatttttgacacgaatttggaaattcgtatgcagggaattagtatcggaat

SEQ ID NO: 86929 - DNA, 318 bp, Citrus clementina
  Intron number 1 from transcript clementine0.9_013717m (loc us clementine0.9_013717m.g) derived from phytozome v7.0 (c hr-ID scaffold_34; pos 196209 to 196526)
tgacgtggccgctcatcgcgacattgttgataccagtaatttttttttaaactctattatctattttctagggtttacattccctgactgtttcttctaatttcctgtttgtttctggagatattgcaagaaaataaaatccagatacggaaaatattgcacggtttgagttttaacacattgttggatgcaatggttttcgtatccaatggctggtagcaatcgaatgaagaatcacatttttctgatacactttttgtttgtttttaatgcggttaaatagttgataggttgactagcgagaacagactgccccat

SEQ ID NO: 86930 - DNA, 441 bp, Citrus clementina
  Intron number 1 from transcript clementine0.9_027961m (loc us clementine0.9_027961m.g) derived from phytozome v7.0 (c hr-ID scaffold_19; pos 3795088 to 3795528)
agagagaaaaattcagagaagaagaagaaaactaggtccagattttatatatccaatcaaatacaaccatggaaatacttatagcagcaagaatatgctcacagctgtcaaaactaaataacaacctctctctgtaacaaaaaattattctctaaatagctaaggcccttagaaaccgagtcctcagctcatatatgctcagtatgtgtaatccttgaaccatttgggaggcttccttacgcgacttggcttgaggttatcttggggtcgattttggatagcctcacttgagtttgcctgggccttttcttcggtattgatagagctagctgagttgggctcgtttaactgtaatattggggttgtatcaaagtagcatttaaaaaatgttatgaagataatccagtggaggaattagaatcgccgcttttgatctggttt

SEQ ID NO: 86931 - DNA, 794 bp, Citrus clementina
  Intron number 1 from transcript clementine0.9_016534m (loc us clementine0.9_016534m.g) derived from phytozome v7.0 (c hr-ID scaffold_2; pos 1420849 to 1421642)
acaaggttgagaggttcgctagtcgctccgaataaatgaaagagatgaggtcccgaagccctttattaatcattatctgtaagctttttcctttttctttaaatcttatgtagtaagcgggattcaaacttcaaaccgcagtagttgtcgtaatgttttctttgggtgttagttcaatttacacaacttgtcaattgaaaactctgttcttctttaccaatatgaatattttacgctcggaatgtttgttgcggaggttgatgatatgcctggctttttttcaataatgaaaatatatgcggcaaagatctctttttttttttaaaaaaaaaaaatgatctaaagaccatgatgtatctcatgctatgtgtttgctttatgccgttgattcattgactgggagttatgactaaattttctgcagttcgaactttttggtaattgtcgcatctgcaatgtaggcagcagtattaagatttgcatggtcagtgttggtcgattgtttaataatgcagatgtgtaacaatgttctttcaaagggatgctgttgtattaagttgtttgtccattctttttctgttcccgtgtatgcaatatccttttcctatgtctatagtgcgactgagtaatgtaatgctgctgctccttatacttttgctgttcatttcaacatttctttctatatctttgccctttgtttgaattggttgttggtatattatgttctccaaagttaaaagacagattactggtggacagatttttcagtgtgggattcgcggtgggggagctca

SEQ ID NO: 86932 - DNA, 753 bp, Citrus clementina
  Intron number 1 from transcript clementine0.9_034360m (loc us clementine0.9_034360m.g) derived from phytozome v7.0 (c hr-ID scaffold_62; pos 1327702 to 1328454)
ttttctggactccacatctctgaaagtggcaaaaggttacatgtaactgatggggcattaagagttgattgtgcaaaaccccgtaccctgcacactaggacattgttgatgtgtaatttacctgtgattgaagaaatcttggcgagtgaaatcaacctgcgaaactttacagtaaatactctttgattttatgctctaggtttgaatttatactcaacagcacatcattgcttcactacaaacgacaaaatggaaggtcaaaaccggcataattctctcatgcatctgaataaaattccaatccagacctatttgtatcgcagctggactgacctttaaaatccaagatcactaatattggttgccaagattttattatcacatcaaatgggacaggtttagtcgtgtagaatcttgtcttcataacctcatagaaatcgaattttcaactaccagtcactgttgttcaagtttccaccacttgcaacactaaataattgcgttctcgcaagggaatttgagtccagaaacattgacttctagttcaatgccgttaaagatggattattagtcatagtattagcatctatatagtttgttagagagagatctaagtttatacacgaatgggtgtacttttatttttgttcgtttgttgtaatttactatttttcttgcctgattcctcttttggatctgataccattacttcatctcagtctcttagtgatggtaggaccttagtttcaaaag

SEQ ID NO: 86933 - DNA, 497 bp, Citrus clementina
  Intron number 1 from transcript clementine0.9_014460m (loc us clementine0.9_011859m.g) derived from phytozome v7.0 (c hr-ID scaffold_19; pos 3370710 to 3371206)
ttccagtttttttctgttcttttcttttctggaaggtatctgttttcggaaattgtattaacttatggcgtgattgtgtttgtgttgttgctgtgacagctttgaagttttgtcggttcagatttacaacttaactagtccttgttaaccgttattatttgtgttttctttttaaataaaaaaaaatgagttacagatctaacgcaatggactagagattttcttcttctccttttttggcatgtttttttcttacaactgttatttccttttttgcatttttttataaataatatggaacttcttcagtacattaaaaaaaaaaaaaaaaaaaatcaaagctgtcgctgaagatctgaaatgtccattttaaagtgtaaataagctgtttgtttgttaatagagcggaaaaaattaatccttcaatggtttagatggagttagttgttgctaagcattgctttgggttaatgttatttgctctcatgcagcttgtt

SEQ ID NO: 86934 - DNA, 948 bp, Citrus clementina; identical to SEQ ID NO: 78085
  Intron number 3 from transcript clementine0.9_019596m (loc us clementine0.9_017147m.g) derived from phytozome v7.0 (c hr-ID scaffold_22; pos 242039 to 242986)

SEQ ID NO: 86935 - DNA, 746 bp, Citrus clementina
  Intron number 1 from transcript clementine0.9_010514m (loc us clementine0.9_010514m.g) derived from phytozome v7.0 (c hr-ID scaffold_9; pos 3862124 to 3862869 reverse strand)
ctcttaacagatctcattctctctctgctcaaagtgtacggacacttcgactttcgttatttattttattttaatttttcatgtaatatttgttttcttaattatctgccgtgtttttttttttttaaatttgatttcgatttatcttttataattcactccgttcaattcgatctccactatattatcttacagacttcgtgtaaactttacattatttgttctctttcacgatccgtttggtttgcaagaaaacgcgagaaaatcgaaagaatttttttaaaaaaaaaaaaaaagtgaaagcgcgcacacactctgtactgcttcaaaaccgtttacctttttagcgcttagaaaattcaaaagattttgaatgctctgttttactcgacaaacaaggagtcttacaggttcatatccttttcgattatatttatttaattaatttagtttttgtttcattagcttgcgttaatctggtgatcggattggtttaacatgtaatttagttgacttttttttttccccgtgaggttgcttagaaaattatataccaaacctctaaattgcattgtaattattaaaaatatctttattaggtatcaaatgtttccttttttgttttcttatttagaagctaacatttatattgtcgttaatatatgtatgcggtagtgaatgtgaagaatgactgagttttgtgattatttatttatttacctttttggtgctgtttcagaaagaaa

SEQ ID NO: 86936 - DNA, 444 bp, Citrus clementina
  Intron number 2 from transcript clementine0.9_029913m (loc us clementine0.9_029913m.g) derived from phytozome v7.0 (c hr-ID scaffold_26; pos 1962955 to 1963398 reverse strand)
ctaaagtttctgaactatccaaatttggtcgtcctgtaagttattactctttgcaggatttcaatttgttcctaatcctcatagggcttctcatattcctatatattggttggatttgaactaggctgtggacttttacaatttcatttgaatgctgtctttgttactttgaattgatggcatgctaacatttatttgttgagaaacacaattcatacatgtctgatgtttggttggtcgaaatacgactgatatcttgcttactcagttatatgggattattttttattctttttgggttcaaaatatttcagtaagttttggctgtacaggcatagtaattcaagttcttttttttttttttttcgatggaagaaagttgacaccattaaacgttacttttctgtaggccaaattacggagttcaacttggtggataaggta

SEQ ID NO: 86937 - DNA, 641 bp, Citrus clementina
  Intron number 1 from transcript clementine0.9_015419m (loc us clementine0.9_008982m.g) derived from phytozome v7.0 (c hr-ID scaffold_2; pos 5053370 to 5054010)
atcaggaacctgaagcaattgttgttagatctcctgtcagtttttttagccattttaacttcaatttacttttttctcgtttcctttcagtggcttaatttgtaattattgaacgactttttcacttttgaacttattgcttgttcagtttgatgtattgcataattgtgttgatttgaagtttgtttcgtttggcaaaaaaactcgtgtgctatagattggtttttttttttcaatttaatttatccatactcaatttaatacgttcttatctgttttcattcgagttgactatgagctaatcattgactagtttgtgtcgttgttaggatttcatcttcaattttgtaattttaggttatctgcttgattacttactcaaatttgttagagcaagaaaatgcttgtttgattgattaattcgaaatgctatgggtgctaatgataaacaatatggttggctgtgaaagtgtctaaaccataattgtcctgattttaacaatgcaaaactttcatgactcagtcgaatgttcatcacttactctgaacatttaagtagcttgtgctcaagtgcatcaactgcctgttgttagtacaatgcttgaattctgtctgtgattctcagcaattaaagaggaaga

SEQ ID NO: 86938 - DNA, 698 bp, Citrus clementina
  Intron number 2 from transcript clementine0.9_034028m (loc us clementine0.9_034028m.g) derived from phytozome v7.0 (c hr-ID scaffold_164; pos 16497 to 17194 reverse strand)
ttggtgttctgtctgcctgtactcacagtaatgaaacttttgtgataaatagttgcaactaaaggtgagaattggaggaaaggaaatagactgaagttgttcaatcatcagtggttgctatttggttttaagttgttcaatcatcggtcgtctctatttggttttctccaatatctcatcttcagttttgactcagattctatcttaccactagtaattacatagacttgctgccaaaggtaagaatgggaataaattaaatagattatgtcgaaaacgaaataaatttactattgttctgttcattctatttgtttcctacaaaatatttctcctgcctaaaattttttgaatcagtaagtttttaccttatgcaagaattgtgctgagagtaattccatttctcagtctctttatgtttcaatgaagacgtaaaacttgtgttctagtgcaccaatgtttatgcttcttacaatttgactttaatttactttgtaaaacttttgtcaaaaagtactaaaaagtagtgcaccaaacaccaactttattacactttagtttaattttaagagaacactcaaaagaaagagttataaattagtatagaaatatttcacataaataaaagccatcccatgctacaaagatcttgctatcatcaccaaaaactatcgggagcttttagggtttccaaaaaa

SEQ ID NO: 86939 - DNA, 542 bp, Citrus clementina; identical to SEQ ID NO: 80765
  Intron number 2 from transcript clementine0.9_018284m (loc us clementine0.9_018284m.g) derived from phytozome v7.0 (c hr-ID scaffold_86; pos 223148 to 223689)

SEQ ID NO: 86940 - DNA, 969 bp, Citrus clementina
  Intron number 3 from transcript clementine0.9_018284m (loc us clementine0.9_018284m.g) derived from phytozome v7.0 (c hr-ID scaffold_86; pos 223727 to 224695)
atttcaggtacttctttcaagtctatattttcattcgctatttggtggcatttgtggttgtcagggacttgatatttttcatcacttgtctcctactgtagggagcataataatcaaattgtacatatgaaaaggaaagacctaacactatcaagttagcatttttcatcatttgggtagcaggaaaaattagattttaggtattaaaaaaatgttatatttgaagctttacttgagctttaatgtgataatgttgcaaattgtagtcttttcattcttttgttcattataaattttcagctaccaaatggtgcttcagaattctgcaaatcaacctgttagattatgaagtaaataatttggatttagattttctttttccacaatatagcaaacttcctggtttaaaagttctaaaggggttccataaacaaagtcttcctccttttaggaacccacagtgataagtgatgaacaaattataaagaatattatttgttcataatctatcttaggtgtgatggtgctagttgagtcagaaaaatttgaacattttgaattgaaataattttttttttttcaaaaaggaaaagaaaaggaacttcagatacaaggcctccatcttggtttatgtggttttgctaggataaaacaggattttacctatcctataaactaaaacaaaaaaaaaaaaacctaccttaatatattatgtagttgtctgcagagctatagagataaaccatggagttaagagatcagcaacaattgtcagatctaataaatttcatattacttcgtggtgtgtttagtatggtcattttcttgtgttattggcacaacagcagagcttcatctcgcagcctcgtagttcataacactttgttatggttgtccattttctattttttttaccttttatctgaatgcaacaaagcctaacaaattattgatttgacagtttgacag

SEQ ID NO: 86941 - DNA, 631 bp, Citrus clementina
  Intron number 1 from transcript clementine0.9_009284m (loc us clementine0.9_007703m.g) derived from phytozome v7.0 (c hr-ID scaffold_2; pos 3436311 to 3436941 reverse strand)
ccagcaagctccttcaatcatccctcaaatcccaggtttcactttcatcgcgaaaattgaattttatcagttaccaccatgtcttttttttttttttaatgaatattatgctattttacatcttttgatcttcactaggagctacttgtttgcaaaactataaacaaatcctatcacccatttggcctatttttcagttttagactgcttttctgtctctgaggacttcatattcttgctttatatagatcaatatatgtactgggaacttttcaaattcagatttttttttctttttgggttactaatgttgtttttttactatattttgtttcttaatttactaatagggttgatcagttttctcttttttttttctcccttaatcttttgtcattctaaaaggttcacttttcccatgtcattctaaaagtgaagagaagcttcaccttttgtcataaatattataaatatcattcacgaagatgaatctgtgcatatataacatataaaacttattggagcagtacaaaatattcactattaattttttaatcgtaatagattttttttttcctttttcctttggtttacagattggttcatttacaaagcatttttctgcttccaa

SEQ ID NO: 86942 - DNA, 731 bp, Citrus clementina
  Intron number 1 from transcript clementine0.9_007456m (loc us clementine0.9_007456m.g) derived from phytozome v7.0 (c hr-ID scaffold_17; pos 1249304 to 1250034)
attgtatgtatgtcaatcccggcgtgtactcttttaactttactcgttcaaaagtatatttgttctgttctggactcaaatgactcaaatacgccactgcttaaagaattcatcctgtctgatgaaagaaatttgattagacttctgattcagaagagatggttcacgtaaagataattcttgaaacataattttggtgggttaaaacataattttatttttacgcttctttgatcagagaaaaaaatcgatgttgcagctaaacttctctctctctctttttttctttttaattaagtggtgatactttaccactcagccttgaccgagtggctagaaccactattgtcttgatgagataggcgtgtgggtgtaattcaacctgtggatgggctatgccacatgtaaaattcccagagggcagcgtcgttgcttttgctgagtgttgtctgattaattcactgtttcaacgccgttaggcttttacataatcttatgaaatcgtgccatgtttctaattgtttaccttataatgggcaaagttgcttgttagatcttttctgcttgaagtaaaatcaattagtatgaatggttattctttgactgatttgtgaataaaatcactaaatttttacagcttaggtatactaccattttcaatgtaccatctgcctctaacaagtaacatgtgcaaatattggtaaaaaatttctgcaggtaagaattctttc

SEQ ID NO: 86943 - DNA, 811 bp, Citrus clementina
  Intron number 2 from transcript clementine0.9_009025m (loc us clementine0.9_009025m.g) derived from phytozome v7.0 (c hr-ID scaffold_48; pos 1008584 to 1009394)
aacttgttacaaccccatttttccgatacttcaaggtctgattagtgtgcttaattaagcttattttatatgttttcccgtatgttaaatgcacaaagtgattatcgttgaagcttgtttttatattattgtagaaccatgtttagttgggagagggcgttaaggcctttcatttatgccggcattctctctgtttaaaccattctgaaaatgtagctagttcaagtttgatagtagcatttttctgcaactgcacaaaacaactaacgcttgtgctctaaaatatgaagtttgtaccatgcattgttcgccatgttcactgttatttgactttgtttttaaacaccattttcaagatatagtatatgaggcactttattaagttattattttaaaggattaataaaaaataaatgccttatgagatgagtttagcttcgaccaggaaagtaagatattcgctatcgttcaccaatattgctagtcataagccagtctagcaattgtttcctttatggtgctgttgtcattttatgttttctgatgatataatttttttttttttgtttgggggatccttttgtacttgggaaggccatagcttcagtgtgatgttctctttgtctgtgtacaagaattacacaatgattcttcaaaatgtgacaattgtgttttttgcatcctggtttgaaaacaaaattgctctttgggatcaatatggtcatgtttttactgtttagttctttcaggccctgatgtacctttttcctttgtaggctaagctgtggtgtgactgccccttctggccaga

SEQ ID NO: 86944 - DNA, 446 bp, Citrus clementina
  Intron number 1 from transcript clementine0.9_011677m (loc us clementine0.9_011677m.g) derived from phytozome v7.0 (c hr-ID scaffold_26; pos 181507 to 181952)
aattcgcttgtttccaattctcattttctcgacgcgtaagtttcagtgattgtaaaggttttactttttaaatttatttttattattattttaagattgctgtgtaatttagggtaaaaggtgctgttttaataattatttcattgagttttctttctttttttgggggggggggggggagtgaaagttaagaaacatgctgaacagagctatttacttttaagattttgtggttttgttttgtttgattgacactgtctcaatggataagaagttctttgatgagatggttttaattaattatttacttattattcgtaggattggtatggggggttgttgggtatcaatattttttagtggaaatccttgtgtggtatcaaaagttattttgttgaaattattgtgcagattttatcccgagagggctacttcacttgcatttg

SEQ ID NO: 86945 - DNA, 718 bp, Citrus clementina
  Intron number 2 from transcript clementine0.9_023029m (loc us clementine0.9_018664m.g) derived from phytozome v7.0 (c hr-ID scaffold_19; pos 826433 to 827150 reverse strand)
gaacctgcagagcaataaagtgaaacctttattgggtaatgattatttcgctttgtctctattttaattgttcacatttgtattattgccatgggatatgcctgagtaggagaaacagaaacggaaattagagaccagctttaacattttgttatgaatgtatcaagttgggtcactcttgttaagtcagatgtgtgctaagtgaggttgaagcaaaactgaaaaacactgtgttcttgttagttgttactgacaaaatagaactgctttgtacagtgcatgctttagggtacttttgtgtttctgctttaatttgaaagcacagctgtttagcgtttgtagtcacccacatctacttgctagttggtagctaatgtttatgaaccacccacccatttatatttgacaaatagtgattttatttcacaatagttgtggattgaaaatcatagcatctaaatcccaaacagatagattgacttgttaggaattcttcagttaattttgctatcatttgatcattgattaatgcaactttgtctccccttttcttgtttgaggtgatattcatggacaaccttttcttgattaaaagtcaaatctaattgcatctgcattttgtgtcgcacaactttatctcaaattcatgagagaataaaatatgatgtctgatttaaaactcatctactgttttgcagctggtgtgcctaacctggca

SEQ ID NO: 86946 - DNA, 526 bp, Citrus clementina
  Intron number 2 from transcript clementine0.9_028760m (loc us clementine0.9_028760m.g) derived from phytozome v7.0 (c hr-ID scaffold_116; pos 582788 to 583313)
cgggaaggtaagatcgaaaaccttctataatttaaagattcttttcttaaagatgaaatgcgccatctacataattaatgtatctaggtctcatttttgttttgtagtgactgagttaatatgcttaactcttacgaatcgcaatcaattaaatgactaatttatgctagaaaatgaacaaaatctatagttcattttattctaggaaacaaatcaaagggccaccccactgtggatctatgactacttgctctatttgataaaagatactgttgttcattcctagattttctgtgtaaacatgggttgtataatacttgtatttggtacccacttttggcctctagttgcttgatcagtcatttaggatgatttttttttttttttttataagcatgattgtggagtcagtcagatacacatagttgtaaacagaatggctccatccttaagaacattttgagttttttcaattcaaatcaggttctgatatacattagcatgcaggtggaagggagccaggttc

SEQ ID NO: 86947 - DNA, 1020 bp, Citrus clementina
  Intron number 1 from transcript clementine0.9_014121m (loc us clementine0.9_014121m.g) derived from phytozome v7.0 (c hr-ID scaffold_6; pos 2310387 to 2311406 reverse strand)
gaggaagttaacaccgcagtctctgctcttcaacagtaagaattttttttcccttcatttatttacatgtttaggtgttcataattgtgtaacacaatgaaattaatctgttgtttctttggttcttcatggaaaatatgctttcttctttttgattattgaataatatgttgtttaatgatataattgttcgccttcatatctttactgtttatgggattgttgaaattaccagtctgtattgatgctgcaaatcggtaaatgattgctgcttctgtgtctgaaatggattggggtttgcttggagtgttattttgacttttgtggctgtctcggttgtgttgtttaaggctatgttgacagattgtgccacctgtctcagtctttctatttggaaaaattaacggggtgttgttgattaagtatattttgtaaagtttaatcttataatcaataactttaacgtggaaaatgatggggaccacagagttacgtattgaatgtaactttgactttcgcattaggaaaatttcaagctgatgaagattagagttcagttacaagatttattgacagatatgttttgattgatttctcacaacctgatgcagctctattcttgccattaatggattgcgtttccttggtcaattccaatccatttgatctcagttgattctttgttaagttctaatttcataatggtggtgaatggggttgcatttaaactttgtacgtgtacaactctattgatgcatgggatggccgagtcagtattatttgtgattactgcctttgcacttgttttttaagttttacccaccttgagcaaaatttatatacctgattagttattcatttgattcaaaagatacttatcatctaaagctctttctgcatcaatatctttaagtgctacaaattattaacctgcatcagcaggaaaaaaataataataatacttaacattcacgctaacttctaatgattttgaatttatagggtttttgaccctgcttc

SEQ ID NO: 86948 - DNA, 749 bp, Citrus clementina
  Intron number 1 from transcript clementine0.9_007676m (loc us clementine0.9_007676m.g) derived from phytozome v7.0 (c hr-ID scaffold_32; pos 1083989 to 1084737)
gaaaccgctgctaacaacggagattcttacattcggtaagttaagtttcagactctttttcatatgaatcttgatttctgagtatatttaatggggctttaagtggaagaaattgtgattttgttgttgatttttttttttttgggtgggtttattgatggtcatttggttatgagctgaaagttttgataagactggggaattgcaaaaggaggaaatatttgactgcttagagagtaaatcattgaatttcattgaatttttgttcaaattgattgtcgtctagttttgatgtaagcatctgttatgacaataatgtcatttaaatgcacatagagacacttgttagctctttctttttttaattcaagtgtataaatatgagttagggaactagatgtgcattttctttacacctctaataaacataattgaaaatcccttttgcattgatgaagtctgaatgctatatcttacttagtcaaaattagtggaatgtgagttaattttttataatcttagcagcacaactatataatgtaagctatgagtactgcatctgacttctggttcaaagctgttgattggctttggaattgctatctcattgttttatgtgtttaactttttcatcttttgttatttattcagtagttaacactgaacatgatttgatcttcttgactctcttcttatgtggtaatatcaaaccagtttcgagaagatcacatttcgaagatccatcgaca

SEQ ID NO: 86949 - DNA, 737 bp, Citrus clementina
  Intron number 4 from transcript clementine0.9_018834m (loc us clementine0.9_017634m.g) derived from phytozome v7.0 (c hr-ID scaffold_80; pos 640990 to 641726)
ggattcttgggccgaaagcgtggtctggcatcaaggttcactaagattcagaatttcagatgcatatttattgcaaatagttgattaaatgtaatactgtctttcttttcgaactacaggagatctgctctcacctgattcattaaaagattcgctgattggagtgaactctgtggtatgattagttctgttaccataggtcattataagcctataaccacaaaacaaaatccaggagaaaaatgaagggtagagattttatgaggtcattcatactatcaccgtggtgcagatcagtgcttctttaatttttttgcaaagcacaataggtcaattggtaatagtccgtagtttgttttcaagagaatattcctgtctccatccaatgatttggcatgctctgattggtagttagttggaaactagagaatataaaggcacaattctgaagaaggcatatcaaagttggacaatatcttttggaggattgtagagtttcctattgtgttatgaacttaatttctagtttgcttattgactgccattggtcttctttatgttagtgcaacaagattctcatattttcataaacatctgaaaactctctccctcttctcctatgtttaacatactgaaatctttatgttgatgaattcttaatatgtaactggatgcttagctttttgatttggaacttatagatctcatgtgttggaggtttcggctcaaattcatat

SEQ ID NO: 86950 - DNA, 757 bp, Citrus clementina
  Intron number 1 from transcript clementine0.9_028483m (loc us clementine0.9_028483m.g) derived from phytozome v7.0 (c hr-ID scaffold_6; pos 372224 to 372980 reverse strand)
aaacatatacaagcacagccctacggaactctccggtttgtcttctttaacttattcgtcttttagtgttttgtttctaggtgtatgaaagagtcctagggtttaacaactgaaaacacctagtaatatgtgaaaataataataataaaaattgatactacatttactttgtgtattcttcactgtccattgatattgtttatgttggtacttgcattagtggatgcgttgtaatgcgacttgtcatttatagatattattttgcagattgttgtgcaatcagttatgcattaaaagacagttaatgggtctttatcagaaaatagtaattgtcggcaattttggaatcgaacatatttaacttgcaacacatatatcatattccttttcatgtcaagcattagcattctttattgtcaacttaaaccctaaacacgataacaatgtttgtttgtgagttatttttaattttaagtaaatttatcatagttctatagttagggtttgtagaagtcaattggcttaaggattcttcagagcctggtacaatcatgcatgaaattaactaattaatcgagtgtttcaaagcccaaattaaatttttagccccttttgctagaattcgaaatgggtggtcggaagcagcctggaagcatcaaaacgttttatttgattgcatgacgaacttataattacttgtatcattagtttcttttttcctgattaaataaattgagatctttgacaacagagaaat

SEQ ID NO: 86951 - DNA, 976 bp, Citrus clementina
  Intron number 2 from transcript clementine0.9_011143m (loc us clementine0.9_011086m.g) derived from phytozome v7.0 (c hr-ID scaffold_48; pos 435713 to 436688 reverse strand)
gctcctccatctaaaagagcttcttcacccccaaggtaatcttgtaattcaaaattgtgttagttgattttaaacttttgttttcaagtttttttattaggtttagggtgttaggtaaggcagtttttgcttagctttgttgttgttgttgttgttgttgttgttgttatcttttagaatgtgcttttcagtttacttgtgggaagtatgctttgtaaaaatcacaaaaaaaaagtcgaagaatagactaatttaggccttagttttagagtagtcttggaaacttattaaatttgctgtgaggttactgagcaaatcttttgcgagcagctatttttcctctcttgctataaataaaaatgatgctgttttgcttctagatagctacttgtaaatcaaatggtgcttttttctcttttctttctgagagaagaaacctttaagagggtaatcgagtgatgcctaagcctttgtttttttgtgagtttcatattcatagtttaggaataagactgaggagatactagctacttgttaaacgtatcattagttggttaagtttgacatttcactggatttttaaaattccttaatggtgtgattcactttcctacttgctatgtcatcatctattaactgtgtcattttctattaagttattcattaaatttgaagtaattattagcctaggcaatatattttctcatacaatatgggtgggttactatttctttgcatagttttcatgattttagatctagattgtgcatatgctagaacttgtgttttattcttaaaaatgttttgctgcccccagatttgtccaggggaattattgatactgttcaatattctttggcaatcatgtttttgcttgagttcccatgaaatcaatatcgatccccctaaatgttcgtgcttgaattcttacattttgtctgtactggaaccgatttcaggaaagcttccacagaaa

SEQ ID NO: 86952 - DNA, 368 bp, Citrus clementina
  Intron number 1 from transcript clementine0.9_024133m (loc us clementine0.9_024106m.g) derived from phytozome v7.0 (c hr-ID scaffold_26; pos 2589322 to 2589689)
caaacagccggcggccatctccaacgacttcgtcagtgagttaaacggtgcgtttttgtttgatgttttcccataattgaatataacgaaaaacactttgctttatccaaggttgaagttttgggtatgctctgatttcataaagcaaaattgtaaataaaccaaaaaaaaaaacgtttttgcctatctgggcatctctactcctgcaaacctagttgaaaaagttatttttatcattgaattgagctttcttcttgcaaaattggttaaaaaatgaacatcttttttcattcccttttaagtgagtcatgtacgagaaatagttaatgagagatgctgaagtttatattttgattatgttgcagtag

SEQ ID NO: 86953 - DNA, 202 bp, Citrus clementina
  Intron number 1 from transcript clementine0.9_018523m (loc us clementine0.9_014158m.g) derived from phytozome v7.0 (c hr-ID scaffold_2; pos 3745161 to 3745362 reverse strand)
ccaatctaatctcaatctccttcacagtctctccggtaactctaaacccagatcagttttcttctaattcattcaaaataacctaaaagatttaatttttagctaattttagggttcttttttgtttttgattaattaaaaaaggaaggaagtttgagctaattttcgatttttttttagattcagcagctgtttagttcgc

SEQ ID NO: 86954 - DNA, 976 bp, Citrus clementina; identical to SEQ ID NO: 78783
  Intron number 3 from transcript clementine0.9_021124m (loc us clementine0.9_021124m.g) derived from phytozome v7.0 (c hr-ID scaffold_50; pos 142542 to 143517)

SEQ ID NO: 86955 - DNA, 561 bp, Citrus clementina; identical to SEQ ID NO: 81784
  Intron number 1 from transcript clementine0.9_027025m (loc us clementine0.9_027030m.g) derived from phytozome v7.0 (c hr-ID scaffold_62; pos 149762 to 150322 reverse strand)

SEQ ID NO: 86956 - DNA, 661 bp, Citrus clementina
  Intron number 1 from transcript clementine0.9_013297m (loc us clementine0.9_013297m.g) derived from phytozome v7.0 (c hr-ID scaffold_54; pos 284065 to 284725 reverse strand)
caggtattatacatttgatcattggacaattttgtttatttttttatttttttctctcgcatgaagtgattttatttatgggacttgtttttattatccaatgacatgagtatgatacggtgattatttggcccaggcatagtcgagtgtttattaagtgatcgagtccttttcaagtagttttatttgactggccatgaaaattcaaattccaactcaaacttatgatgaagatataaggataaaaaattattttggtcccacacccttttaagaagaattataaaagaaatatgatgattatttttcaatatcatgtttgtattttggtgtattttaattttttattagtattgataaatgatcaatttcattatttgtaaaaaaatacttagtctttgggattcgaacattagcatcgatcctatgcctaagtaatcattctgagtcaagagtttaacaaaagcctaagctagtaacttgattggtcatagtggaaattcgattttagcattcaaagtctgagattgaaacagtatctgtactaataccggtggctgggcaatgggcatatgtttttcgatttattattatttgctcataattttttcggctacttaactacactcaaatggactatatatatatatatgcagggagc

SEQ ID NO: 86957 - DNA, 965 bp, Citrus clementina
  Intron number 1 from transcript clementine0.9_034086m (loc us clementine0.9_034086m.g) derived from phytozome v7.0 (c hr-ID scaffold_9; pos 1888190 to 1889154 reverse strand)
tagagatctatatactgctaataaccacctacaaggtacgctagctccaccttcgaagcgtgtacatatttgcgtttccatgttgcagaattcatttagatatgtattgtatttggtgcaaaaaatatgctaaaaactagacatgtgtcaaaatctaacccggtgcatggctgatgcaaaagatttcagtttttctctatttgagtggtatcaattcgaattaccatataattgtgtataattaattgttttattttaaaaagtcgaccacttaataatcgagagtgatatatgccaaaaaaaaacccacaaaaaataataaaccatcactagaagataaaaagaaataactataagattaaaaaaaaaaaatcactacaagataagatttttttttggtcttttataccctttgtactaaattttgtcttatcttcaatatacatatagcattatttcttaataattatatattcatgttgacactcatggtcatgggtcaaggggcagatccataggtgggctatgacgagctatagccccgtataatctaggaaaaaatcattattaataggaatgtcaaatacattattaataagtaaatttgtggatttatgattttgttgtattttattcatgttgaattattaattttggattatgattgaattttatttgatatgattaggtaaattattgaattttattttaaattaaaaattaaattaaacatatatattaaaaatgaaataaaaaataaaaaaaattattttatttgtagatttatgagattattgtatgttattcatgttgaattattaattgttgaattatcatttaattttatttgatattattagataaattattgaatttttaaattatttattaaattattaaattttaatttttacggatccggatatccagaatattcgcccgcatccgttgcggatattacccgc

SEQ ID NO: 86958 - DNA, 1057 bp, Citrus clementina
  Intron number 1 from transcript clementine0.9_023180m (loc us clementine0.9_015633m.g) derived from phytozome v7.0 (c hr-ID scaffold_6; pos 4974669 to 4975725 reverse strand)
cccgagcacgacaagttccttgaagctcttcagctgtaagtatgcattaaactcttcatttccctctcgttttgaagctctttaaactgtttggtttttaattgagttgtgtatgctttagttgaatgttcgtatttgttattgatacttttggtggcttttctctaatttttggttagggtttgagagtttggaagtgattggattttgtttggatgtcgagaaaattttgaatgagaataaacgagtttagctcctatttggattttaagaaatccagtgagggaattcaagaaattttacttttttttacttcaaatttttgttaaaattagttttttattatttcaaactttgaatttttgttcccaaaaaaaaggtttgagggaagctgaggaaaattaacattttttctatttgaaacattcagtttatttcttttttgaaaagaaaaaaagggggaagaaaatgttagctattaattaagttattagaagctatttcatttgcaaaatggatgttttctatatgaattgactgatttgtttctttgcttgagttggtcatttgttgggaatttatattactcaaattgacaattgaaagaaaaaagtctcaaatttttagatggggattcgcaaatagttaattctcttattaggtgcatcaaagaagcccatttttaaagttaatttcttctggaaaacattcattgtattgtgaggcacgggcaactgctgtggaaacaaagtaaaaggtacccagtaggtgcttctaaatagtgtatgttgtatgatcctcatgaatggagcattttttaaaaccaattctaaatattgtttaaaactttcaggattactggttctttattgatgcgagagagaatattgtcttggagaaattcatttaaggttgaaatttaattgactatccacagagacagaggatgcttttatgttaattcttattctggtgcctgtttttctttcccgatggccttatattatcatgattctgttcagatttgaccgtgactggaagaagattgaagcattta

SEQ ID NO: 86959 - DNA, 994 bp, Citrus clementina
  Intron number 2 from transcript clementine0.9_033963m (loc us clementine0.9_033963m.g) derived from phytozome v7.0 (c hr-ID scaffold_125; pos 108563 to 109556)
ctcccgcggcaaacaagtacgtatgcttgaccacattgttattattcccgttgtcctagtactaactagaaccaggttttttgttttagggttgggtgtggaagataatgaagagcaacaaaccattcttcatcatttatcatggcagaaaagtttatgaaatatccataggccagaacaaaactccaatagtttcactctaagttatcttaatcatcttctaacacagtgcttaacagtagatgtccactaaaacacaaccaaaccaaacaatggttgaggtttctctttgaaggagtaaatggtgcagtggctgcaaaagcatcgtttcaacagaacgtagcttcgacaattccccctaacttgcacactttttaagctgggaaactttgatccactctaggtcatatactcatataaatgcttattaaatcaccgtgatcaccaggtctgggataaccattttgctgaaatgtgagtttttaaatttctaaagaaacgcaaaaggttcaaaacttatttcagaacctgaaggtatattagtcttgagtttgcaagtgagtatgttgggcggagtcttagtagaactggtaacattttcgataagcaccgtatgacagcaagaaaatcagacacatggactgcatcaaattgtcaacaacacaagacaataaacacgctattacaagggaagaactaaataggcatggttcatggattattttagtttttttttgtttcgcaaaaataagcaatcttcaattcactagacttctttgcttgactaagaagtgtcgacattcgatcataattgttaagacttcttcatcaggtaacacatcctaggaaagatctggatggtgattcctttcctttctataggagtcctgtctgaaaatcattgtgatattatatatgttgtttaatgttattccatagcatttaaccactgcctatagtccaatttttgcagagatagttcctgagagatctc

SEQ ID NO: 86960 - DNA, 401 bp, Citrus clementina
  Intron number 2 from transcript clementine0.9_021229m (loc us clementine0.9_021229m.g) derived from phytozome v7.0 (c hr-ID scaffold_9; pos 2537953 to 2538353 reverse strand)
cttcaaactcgtcatagtcggcgacggtggcactggtaatcttcctccctttactgtttgttctttttttaaattgaactaggttttatgatactgactgctagggttttttttttttttaattttctgcgttggctcttaactgtgattaactggaaatggaaaataaattatctaattgaaaagactctattgtttgggaaaaaaaaaatttaatgttgttgttgttgttatttggttaattagtttgagagaatgtggctatgctatgcattgaatagttactaaaaattcttctttttgaaatgagactgtgtgttaatggtatttgatattttactactgtgttggtgtttgtggtttcagggaagactacctttgtgaagaggcatctgactggg

SEQ ID NO: 86961 - DNA, 816 bp, Citrus clementina
  Intron number 1 from transcript clementine0.9_034386m (loc us clementine0.9_034386m.g) derived from phytozome v7.0 (c hr-ID scaffold_94; pos 319829 to 320644)
tgctggctacaacctagagaaagcatattgctcaggtacatattggattatgtgttaaagagaaatttttttttttcccaaagagaatatccgaacgacaagaagaaaagggaaaatccttggtgctccaggagcatttagatgctatttccataagaacattagcaataagtgtgatgagaaacggaaaatgctattggagcaccctagagtttactagagttaaatgtcaaatgatgtaacagtcctccgttggatggtaagatgatcagaaaagagttgtaaaatttatcatccaatagatgattgaaattattgatttttaaaatatccatcaaattacttgtaaatgagtaaagttttcccattactgtaactatctttgtaaacaaagaattagagactaaaaatggtggagttttatttagttgtagccatgatttagtttgatcttccctttgatttatttttatttgttattttccgggcaggtgacttgatctgtaatatctcaagcggctacaattgctccaattgtcccgacggttataatcgtctctcgtaccgttgcattaaaattttcaacaaatctaacagatctaacaaatctcgggttaaattcattattataggtatgcatgtcgatcgtttattttacatcataataaattaataatatttttcaacatatatttcaaatgaaaatactaagtgtttatacgttcatttagtttgatgatatctttcctattatgatatgtttcattattgtcctcgagagccgcaggttgcggtggtgggcttgcgttattcttt

SEQ ID NO: 86962 - DNA, 778 bp, Citrus clementina
  Intron number 1 from transcript clementine0.9_020162m (loc us clementine0.9_020162m.g) derived from phytozome v7.0 (c hr-ID scaffold_9; pos 1928481 to 1929258)
aaagaaaaaggttaggacacgtccatactgtgcttattacttttaggttgtttaaatttttgcataatatggacatgcctacatttcaatgtgttacacttctgcttaaagtttactgttctctttgtgttctgttggaaacttggaattcaaataatttatttgatagttaatagatagaactagagaatacatgaattcatttttctaatgatgagatttttaaaatgtggagttaaggacgtggtttcttaaattattggccactttaaataacttagcaacagaaagttcatggtttgcactcatgatagagaattgaaggggtccaggaataattctcggtagagtttaatttgatcatctttaatttgtcttatagtaaatttggaaggtgattctcctatgatttgtttgatttgatccaatctgggtatgaatatggatatttagtagtcaacattgatagcttatggctttgctatttccatcaaaatattcaattctagtgccggttcttgtctttggtgtgataaggaaacaaattcttatgtttcggggcctgaaatagctcttaattatactgatgctttgattggtttgtaacgtaaatctggtgctgaagttatgcatggtttgcttttgctcgtcaacatagttagttgaatattaaggagggggttatatttttttcctctcattgtcgcctccctgaccttacatgtcaaagtatcttgatgcaggatatttgcaggatctagtgtacaagctgagcaaa

SEQ ID NO: 86963 - DNA, 787 bp, Citrus clementina
  Intron number 1 from transcript clementine0.9_013489m (loc us clementine0.9_013489m.g) derived from phytozome v7.0 (c hr-ID scaffold_22; pos 2541078 to 2541864)
ttttaggcagcatagttttgctacgaccggagcaggtataaatctttccctttattaaataataaatattatgttttatgtttctagtcatcaaaacaattagatgctagccttaatatagggattttgtttattccaacttgtctgatttttttttttcctttaaaatatctttatatgaaaattcacctacattacatatatactgtaaatcaggagcggggtcaggacagcggaaatctgaagaattgtattggaggaacactcaatcaatagcaagtgagagggtggttaaaaaatgaaacttggaatattgaacaaaagtgtttgattggctatacacgctcattctttaattgatttcggattaaaagacgaagtgagctgacatgatgaccggccttctgccacattcagttttcccctttctagagacctttgcgcccaaaaacgtggatctgtcatctatggttatgggcaggaccgagttgcgcattcagttatttcatttaattctttgcaaagtggtaaaagaataaacataaataaataaataaataaataaaagcgtttgtttgagctctgtccggtgcgggtggtgtgttgtctgtacaacggtgggaattaaaagtactttatgagtttatttgcttgtcaatctgactcgcacgtgatgattaagagacgagacgttacgtcataattgaaaattgtcctagatgaagactttctttgagaatgataataatgcgatccagctatttgatgattacaggtggcaaaatcg

SEQ ID NO: 86964 - DNA, 704 bp, Citrus clementina
  Intron number 3 from transcript clementine0.9_004621m (loc us clementine0.9_004621m.g) derived from phytozome v7.0 (c hr-ID scaffold_6; pos 810787 to 811490 reverse strand)
ttcttcctgctcacaaggtgtttcatttctgtcccattttgttttcattactgcaatgaaaattgaagcatggtatctttagtgttagcaattgaattgaaggttggtgaggcataatatgattgttttatcagatatgagtaaagtattttatttttattgcttccattatgggtctgactacagtgtgcacacttcatgtttgattcgtaaacatgttaacagtttaaggattaatgttattgttatccatataaggtttcttgttctcatttgttatattaccaatgtgacattccatgctaatttcattattagtttggtgaccaattttagcagtaggaaaatctctccagcatcattaacagaattttcatcacgaaatcatacaaaatccatcaatcatatgatcgataaacggaaaagaatttgttagcactggacaattcattaaggggcttataaatctgccattagatactgtagttttcagtctgttgttgttccccttcaagtagttctcgttttccttgttcttctcactggagatagggattcattatttcttaactattaggaaatgatcctgactgtgtttatgttgactcatagtgaaatttataacattcttttgcttcaattccccatttactcctcttttgggaattcctgatgtatcgttgacctggtgcagtttggaaccc

SEQ ID NO: 86965 - DNA, 535 bp, Citrus clementina; identical to SEQ ID NO: 77805
  Intron number 1 from transcript clementine0.9_008969m (loc us clementine0.9_008969m.g) derived from phytozome v7.0 (c hr-ID scaffold_34; pos 1007581 to 1008115 reverse strand)

SEQ ID NO: 86966 - DNA, 169 bp, Citrus clementina
  Intron number 1 from transcript clementine0.9_022876m (loc us clementine0.9_021421m.g) derived from phytozome v7.0 (c hr-ID scaffold_6; pos 51477 to 51645)
gactcttcgcaattccagcacactccatattactggtacggttttgattcaaaattcaatgtatttatcacattaatgaaaacaaataaataattaattagttagttagtaatttttcttttcaaaaagattgtgattattgtttgttcaattacatccagtgaggaga

SEQ ID NO: 86967 - DNA, 423 bp, Citrus clementina
  Intron number 2 from transcript clementine0.9_022876m (loc us clementine0.9_021421m.g) derived from phytozome v7.0 (c hr-ID scaffold_6; pos 51733 to 52155)
aaaagaaacaggcatgtaggttttcttttccttctatcaattttaggcttcttttgagttgatcaagataaaaaggcatcaattcttttttttctttcaaattatttatgaacttcagccacttgtctttaattgaagtgttgattataagatgataattacaagctgaattactactactactactattattattattgtttagaaaatttttgtataattgtttacttgctaagtacatggttctggcaatttcctgggttcaaaaagaactgggaaaaaggtatctctgtgttgggaattagtcatgttatgtagggtttagtataagattgttcttattttttgtttattaatatatttattttttttaatgattatattctagattccactgtggcatcaaaaggccagccagagggc

SEQ ID NO: 86968 - DNA, 527 bp, Citrus clementina
  Intron number 3 from transcript clementine0.9_025694m (loc us clementine0.9_024161m.g) derived from phytozome v7.0 (c hr-ID scaffold_6; pos 5931876 to 5932402 reverse strand)
ttattcacctttggcaacttgttggctgttgggaggtatgttcactggtttacttaattgacagatgggctttactgattatatagtcttctcaatgttacttctactgagtctgatatcctaagttttggaccacaacaagtttattggtcctggtgatgacggcatcactcatgtttgaggaccatggtttttgtaatatgagaaactgtactcctctttttcattttcgtgcttatgctgaagaaaatcaagtaactggtgactgattctagctcgggatatcatgaaaaaagaataaaaataataaagaaaagagcattgtggtatttaatgatcaattttggactttgattagctattgaaatttgaaggatgattttgtaatgttcaaaaggacaatcatgtctcattttcagaattggttttctcctgcaatgatgttcttcccaacatttctcagattctaattctttttcgatcttttggcagcacagccttcgttatcgggcctgctcagcaaataa

SEQ ID NO: 86969 - DNA, 709 bp, Citrus clementina
  Intron number 2 from transcript clementine0.9_025694m (loc us clementine0.9_024161m.g) derived from phytozome v7.0 (c hr-ID scaffold_6; pos 5932407 to 5933115 reverse strand)
ttcttggtatgaccatttatgctcttttcatttgcttattttatcaagaaaacaaatgggtctttgtgtttatatgaaatttttattatttattgtcttagctttttggaagcaagaatttcttgtgaagagctgaattgctgataagcaagccacaaagcagatcgctgactacatattagattcataatagttgatgtgcaaaacttatagtgtgctggattatgttcagagctagcaatcttaagttagtgtatagaaatgttattgggtgcatatctctgatactcaaggcagagttatagcttaggcaagatagttgtgtagttcccggaagcagtaatgttccgactaggagatctattttgcctcaaaataaaacagaaaaaatcttcgtattgtgggtgctaattggttcaactagtaaaatcgcctattatggtacgggaggtaaagttgtaaaatttagtttgcggggacagaattttggaatgttataatgagaaattgctatgatcaaagtaaaaaatgctggatttaatggaaattaacttctcaaatttgcaatgtttaatagagtcatgtgaattttttaggtcagttgataagtggactgaaattttgaaatttggtggttctactactttttctcataactttggcttcttttgcagtcaataattgtgtttgtcaggcccatcaaatttgc

SEQ ID NO: 86970 - DNA, 308 bp, Citrus clementina; identical to SEQ ID NO: 78569
  Intron number 1 from transcript clementine0.9_005602m (loc us clementine0.9_005602m.g) derived from phytozome v7.0 (c hr-ID scaffold_26; pos 352701 to 353008 reverse strand)

SEQ ID NO: 86971 - DNA, 799 bp, Citrus clementina
  Intron number 2 from transcript clementine0.9_028754m (loc us clementine0.9_028754m.g) derived from phytozome v7.0 (c hr-ID scaffold_94; pos 554349 to 555147)
tgctggctacaacctagagaaagcatactgctcaggtacttgttggattatgtgttaaagagaattttttttttttttcaaagaaaatatccgaacgacaagacttggtgctccaggagcatttagatgctatttccgtatgaacattagcaataagtgtgatgagaaacggaaaatgctattggagaaccctagagtttactagagttaaatgtcaaatgatgtaacagtcctccgttggatggtaagatgatcagaaaagagttgtaaaatttatcatccaatagatgattgaaattattgatttttaaaatatctatcgaattacctgtaaatgagtaaagttttcccattactgtaactatctttgtaaacagagaattagagactaaaaatggtggagttttatttagttgtagccatgatttagtttgatcttccctttgatttatttttatttgttattttccgggcatgtgacttgatctgtaatatctcaagcggctacagttgctccaattgtcccgagggttgtaatcgtctctcatatcgttgcattaaaattttcaacaaatctaacagatctaacaaatctcgggttaaattcattattataggtatgcatggcgatcgtttattttacatcataataaattaataatatttttcaacatatatttcaaatgaaaatactaagtgttcatacgttcatttagattgatgatatctttcctatcatgatatctttcattattgtcctcgagagccgcaggttgcggtggtgggcttgcgttattct

SEQ ID NO: 86972 - DNA, 790 bp, Citrus clementina
  Intron number 1 from transcript clementine0.9_014196m (loc us clementine0.9_014197m.g) derived from phytozome v7.0 (c hr-ID scaffold_80; pos 260777 to 261566)
ccaaactctgacgatcgaggatcttctaatttcaggtaacaaaaataaatctcaaattcagttttccttttgccgttttgttcttcaattgcttggggcttttgcaaaaccctagctttctgtttggtttaatcgctaagaaattttttgaatttaatttcacgctttaatgtaggttcattagaggctgaattatagtatttagtatcagctgactatgtactcgaataagctcgtaatcttcgagcttaaatgaagagaaaatgaaaaaaaccaaagtaaaatctctagttctatgtttttcgttttctgccaagaactattgaaacaaattgaaaacaaaaaatgaatcattttgtttagtaatgttggcctcagttgagtgaaatatgcaatgttagttgactgatccagtgatattgcaacaactgtgaaccgcggttgagccaaatacataccatgaatctcatgtggatttgcgtatcagtacactgttgtactgaattattctctaaatgacttcttgtgtattgttttggcgtttgagttgtaagtgttaataatatgaaaatcatttgttttaattttaggtagttccacatgtcagttgcaagaacagaaatgaaaaattcttagcttttcagttttcactccattggtatttgcttattttttctcttttctttttggtgctggatattcgtagcaagtagcaacttgtaatgatttacttttctatgcatgttttccactaggcatactccattacagatacttcatataattgcaa

SEQ ID NO: 86973 - DNA, 512 bp, Citrus clementina
  Intron number 1 from transcript clementine0.9_018452m (loc us clementine0.9_014731m.g) derived from phytozome v7.0 (c hr-ID scaffold_9; pos 1777078 to 1777589 reverse strand)
ttgcaccttttgaacggactaaaatactcttgcaggtgaatacggtttttcagtttcattcactcaatttttatgttccagacagtgtaaatatttctaaaggattgtatgaatgagggtaattttatctgcatggtatgtgcacattttatattgtagattttttctttggttacattgcatttatttgtgctgatggtttgtttatggtggttttgatactaatagttctggggtcaatgtgtaaacatcaattaaatgatcaaaatgtgtatttagcttgggatgaaaaagttttatctgttaatgtagttgtgttagtttattacattatgctttcttatcttttgagcgagctgggcatattgcatgttagctcattctcatgttgctgagttatttgtttgaagcttatcacatatgatctctaaatagttctaactctctcattatcacttgcattgactgattctgtagacaagaactgaagggttccagtctcgtggagtgta

SEQ ID NO: 86974 - DNA, 492 bp, Citrus clementina
  Intron number 2 from transcript clementine0.9_034561m (loc us clementine0.9_034561m.g) derived from phytozome v7.0 (c hr-ID scaffold_19; pos 2370933 to 2371424 reverse strand)
taaccactgtatccttgaagcggaaaaagacagaggtattttaaattccaaagtactaattgctttaataattaatatagatttttatgagctatgtcattgctatggatgttttgaagcctcaaattctgtcctgtgatttcctgaaattattgtgacattccactaatgtttattttgagctattgcacaggaatcaaatgcagaattaatgtcattgaaatcccttaaacgtctttctgagtcaccaaaggaaagcaggtcacatagtactttttgactgtatcatcatctaactgtaagtttttggttttggttgtgtgctggaattatgtgtttctctaaaacctacagatattttaaagaatcttcaggaagagttattgaaggaaaggtatcttactcaagaaagcttgtagttcaacacatctatggatattgctgaaagaatattattttacttaccatgatgttttggccaggtctgcaatc

SEQ ID NO: 86975 - DNA, 375 bp, Citrus clementina
  Intron number 2 from transcript clementine0.9_007903m (loc us clementine0.9_007312m.g) derived from phytozome v7.0 (c hr-ID scaffold_19; pos 2277404 to 2277778)
cggtggaagtaccgctgaaattgttcgcgtcctcggtaattactcatcagtcatcacttctattgtaaatgcctttggttggtcacttattttcttttatttggggatgaaattaataataatttacaaattttcagattctaaacattgtgttcaagttgaaaacattacaagcaaaaatatatttattttttaatgattgatattgtttaactttaacaattgattgcaaatcaaatgacagatggacgatatgctgccacattttcttcccgtttcttttttaatgattgtatttgcggttataaacttcttgatcgctaaagttgcttctgtgtgattaggtggtcctgctgtaggagatatacggtccag

SEQ ID NO: 86976 - DNA, 767 bp, Citrus clementina
  Intron number 1 from transcript clementine0.9_022381m (loc us clementine0.9_022381m.g) derived from phytozome v7.0 (c hr-ID scaffold_22; pos 2033868 to 2034634)
tcgtttctgcaggagcttggcacgaaactcaaattgtaagccattttctatcatgctttggagctatgttataatttgtgtgaaagtcaatcagagaaattttcttcttttttcagttcttaggcacacattacattttgttaaatgtctattaggattctgtcccataaaaccaggcatttaggttcatagtagaaatttctctcttttctatcggaaagtgaaaacatgcatgcttttatctgaaactagttattattattttatatatatatgatttcaagtgaatttagtttcatctttgattcctggcatgtttgtggttattgatcaggttcattctatgcttgtctcctctgacattcatattgtgtggcataacactcttcttctctgactagatgaaaataaatcttttgttgtttctttcagctgggtagttttatagtttcctgttatgtcctgtagaccccctacatgttgaatgagggctaaaagccattacgctttcgtgtagaaacaacaacccccccccccccccccccacaaaaaaaaacaacatgagataatgaatatgctcttacaatgaatgagctgctaacagcttcctactagtccttctacttgtttcatccaatgattgaccctttagaaaggatttatgattattgttttgtagcgtctccatagtctattagctaaattttctgtaagagtttcacagtgcagtacttactttcaggcctcaggtgatagtggcgtgtgca

SEQ ID NO: 86977 - DNA, 843 bp, Citrus clementina
  Intron number 1 from transcript clementine0.9_029821m (loc us clementine0.9_029821m.g) derived from phytozome v7.0 (c hr-ID scaffold_66; pos 1004500 to 1005342 reverse strand)
agcactggcctattcaaattaaacctactggagtggtttgtcttttcaatttttttattttgtgattaatttcaatttatgtgtttttaagaaatttatatgttgtttacttgcttttttttttttttttttgcagggtgcggggctggagaatttaggaaacacatgctttataaatgctattttgcaatgctttactcatactctgccccttgttcaagctcttcgttcttttgatcatcccaggccctgcgatggtaaattgcttgttttgggtttattatatgttaatgttagtaatatgttatcttgttaatgtgatttaagttttaagaaagttgcgaatttttaggtgctactgaagggttctgtgttatctgtgctcttagagatcacattgaactatcattagcttcttcaggaaaagttctctctccacggaaacttgttgacaatttgaactgtatccttgtggaatactctttgattttcatatatatttgatatttgtaagggctcttattttgattagttcttccgatcaaatgcaatccttaacttatttgtataatcagatatttcatcattttttcaaaggtatcagcaagaagatgctcatgaattcctgcaatgcttgttagatagacttgaaagttgttgcttggattctaagacaaaggatgagagtttgtcttctcaaggagataacatagtacagcgggtttttggtggttgtctcattagcaaagtatgaaatgtctcagtatcttgatgctttattgtatggttttattaattccttttattgtttgttttaaatcatggttctgcttttcagttgca

SEQ ID NO: 86978 - DNA, 658 bp, Citrus clementina; identical to SEQ ID NO: 77997
  Intron number 4 from transcript clementine0.9_015593m (loc us clementine0.9_015593m.g) derived from phytozome v7.0 (c hr-ID scaffold_22; pos 968501 to 969158)

SEQ ID NO: 86979 - DNA, 575 bp, Citrus clementina
  Intron number 2 from transcript clementine0.9_014797m (loc us clementine0.9_014797m.g) derived from phytozome v7.0 (c hr-ID scaffold_48; pos 184724 to 185298 reverse strand)
ctttctggtcctttatacctcactgctgttgattggtaaaaccacttctttcttactttgaaagacggtacttcatgatggattagtgcttttattttatctggaatatccacattggcaatgcgactgcattatgttgttagtctacttgatgtaacagagagattattgaagtttctggggttttgtgcttaaatattaatgtgtaaaccattttcatgccttgtctagtacatggatatcagttttttaaatcagcagtcttcgtggctccatcaatgagggatttatgaaaagtggttgaaattagtgtgagagtcagaaatgaattctaaagagaatgatgcagaaaattaattggagtagcataaccagtattattattatttttagttgtaggaatgattcattgctgctaatctttggcttcctgagcatgtctcttgcacctaatagcgagttactgtatgagtttgatttaaccttttattaactatatttttggataagttattctttgagttattaagctatttacaggaaaaatccacatcatcgaagatctgttgctgcca

SEQ ID NO: 86980 - DNA, 584 bp, Citrus clementina
  Intron number 1 from transcript clementine0.9_014797m (loc us clementine0.9_014797m.g) derived from phytozome v7.0 (c hr-ID scaffold_48; pos 185342 to 185925 reverse strand)
cttgtaacacttgcaaaatcatttttcacaacaaggtgcttaattctttatgcttttaaatcaatatatgcattataggatctgtatttttgaggtcatttgcgtttcatggggttcaatttcatagatggaaacaattttatgaacttattatttttgtcatttacaaaattacaaggcttgaatgttgagtggaaataatgtcaagaaatttcacaagatgagtaacctatgatgcatatcggtatgatctggagtagcttttatgaatcactttttgagcacaagtatattatctgctagattatctagaaagcactttctcttgaaaatgagcttatcttgaattctagtgtttgtaacaagaaaatttttgcttattgtataaccaaaggggtgacattgaagaattcagaaaattaaacatttggaaaatctttattgcgatgttcgctgagttgtcttttcctgagcttgatgtgcactatattctgttgtgaactcatctaatttgttttttaatggaacatttctttcattctgtggcagatcctattaaacgaatataaggaagagaggaaaat

SEQ ID NO: 86981 - DNA, 996 bp, Citrus clementina
  Intron number 2 from transcript clementine0.9_023031m (loc us clementine0.9_020868m.g) derived from phytozome v7.0 (c hr-ID scaffold_26; pos 3088348 to 3089343)
atcaagctcggttggctggagagttattcctaaaggtatttacatttcatgcttgtcattcctttattcatgtttttcttgctaagcaaaatgaattgtcttaggttttcattttgtcaagaattattatttctagaaccaaaattttatcttttgtatggctgtttgctagtgtatgccttctggggtactcaatagtgtttgtgaggagtgcatccattaaggggtagttgcttaatcattaggaatggtattggattctggtgcgtgctttcctgaagattatgtgtacgatgataatagcttgagtcaatgatccacctttgataaacccagatttgcaagataggtaggtactataacagtaagcgggtacctataaatgaagatcaagaagaaatagattttggttgtctccgatggtcattatcttatccagactcatttggccaatgagaaagagaaaaatgtattttcttcttcacatactgggtaactttattatgtgtgtaggaactgaatgaaaataatattccgctggaaaatgttcgcatatgctactctccattttcaagaacaacacacacagctgaagtcgttgcatctgttttgaatcttccttttgaaggtcctcaatgtaaggtaagctgctttaatttgcaaagatttatcttattgagattacccagatgcttttgcattgaaatgctttgaataatagacagaacatacatgtgtatgttaaatgcttcagctaatgcttactgacttgtccagagatgaggataaatactttgcatttgtgtatttgttttctcaaaagagacttatattcagtcaaacagaacttcacactctattttcagtattctttcctttctattgtaggtttgggacaaaaaattgctaatttattttgacaaataaaatgaaacatttgtttttcatcacgcacttgcttgcactgatcttgaagttaattttgctgggcaggtg

SEQ ID NO: 86982 - DNA, 845 bp, Citrus clementina
  Intron number 1 from transcript clementine0.9_000512m (loc us clementine0.9_000512m.g) derived from phytozome v7.0 (c hr-ID scaffold_2; pos 2327205 to 2328049 reverse strand)
gcggcccaaggacagagtaagtgctcatttttaaaccattatcgtgaaaattgttttcttttggttaattttgagtttattgatgcgccattggtcgtttcaattgatttggtacatgaactaaccttagagaaatagtatctttaaaaaaattgatttttttagggttatgtacttgttttagtcaagattttgtgctattggtttgattttttgagttctgtttaagtttctgattaagttctttttgtccaacttgattttaactcttggtgacatataccttgcttggttgcctaagtattgaagtggttcttttacatctgttaattgttacatgcctaatgtgtaagagcagcatctgttgctctgcttattatgataaattttgggaaaagtgtattttataccttaaataggtatgggtggagtatgcaggcttgaaatttgataaagaaactgttacatgattaaaagagttaccgaagaaccgtgatctccaaaatttatttaaaaaaataatatattacaccaatgtcatacctcccaatgctgcttgagccgacgcgtaggtccttgctcagaattgtatgagtcattgtctttctggttgctcaaaataaattgaagagacagggatgctgtgttgagggttgatttctatttagttttaccttttatggtctgttgctcatgttgtgtccattatttaagctactgctttttttttttggagggggggggggggggaggaagatgttctgaagggatatgcttgcttgtcttgttgtagatgctatgttttgatgttattcatttgtctatttggttttaatcttgtgcag

SEQ ID NO: 86983 - DNA, 389 bp, Citrus clementina
  Intron number 1 from transcript clementine0.9_016247m (loc us clementine0.9_010898m.g) derived from phytozome v7.0 (c hr-ID scaffold_32; pos 1113109 to 1113497)
cctcctggttttgatccaagtacttgccgcagtgtgtgagtgtttgcctagacatttttcttcttatttttgtttctcttgtttttttctctttttttcattttttttggtttgttgttttgtgcttgcttatgcaactttcacccttatcgttgtttccattgatttgtgtgtgtgtttatttttccttctttttttaatcttttaaatcttatgaaaagcatttaaaaatgctgattgtattgagtttagaaatcgctagtttttcttttttgtgatgtctactttctcaccttgccatttttaacaactgagggtgttacatatagttatactttttgttttgattctaaaacatcttgtttctaaattttttgtaaaattcaggt

SEQ ID NO: 86984 - DNA, 739 bp, Citrus clementina
  Intron number 1 from transcript clementine0.9_004284m (loc us clementine0.9_004279m.g) derived from phytozome v7.0 (c hr-ID scaffold_17; pos 1972058 to 1972796)
gggtttgactcgtcttcgttgatctgatcgtctttgtgagtcagaaaaagaaaaaaaagaaacgttaattctttcttttcagttcatgattttcacataatgattgttatttatgtcttcaattttgcgttttttcattgattgaactgtcttctgatctaggtatggcttagttttttgagatctgtgatcaatgttgaagatttgtttatcccttttgattggttattgccatttgtttttgttgcattgttgtgcataattggatctggatcttgtgtgatgattatagaattttgaactacttgttgagatcatagctttagaagttttttatgaaatgggatcgtttgaattattcatggtgattgtgatattcaagtaaagatctgattttttttttcctttcgtcttttgtattttactatctccagtgttggatctggtacttaggtttaagttcttagtatcattcattgaaggctatgatgtgattattttgatagtgcactgatcttaattttttgtttaattttctcattctgctgttattgtgtgatctgcatctttcttctttattatttttgtgattgtgatctaactttctattttatacatctctataagaagtttccagaaacttcttatatatttagtatgtgttcatttatttgtagtttgtgactggtggttttgattttaatttatgtactttttattatgtagaagttgatttgca

SEQ ID NO: 86985 - DNA, 931 bp, Citrus clementina
  Intron number 1 from transcript clementine0.9_007740m (loc us clementine0.9_007702m.g) derived from phytozome v7.0 (c hr-ID scaffold_9; pos 1393459 to 1394389 reverse strand)
cggagaacggactgctggagaggaagtgcaggaaggtacaatcttcatttttgctttatctgattctgcatatggttctacttttattttattttttattttttattacaaaattatggatatgtcttgagagatctatgatatgcaatttggatttgatagttagaaccggcgttattgtgataatttatatgcgtctacattattgaagagcaattgagttagttgtaatattgatgttgcatgcatgagttacttttgttgttgctttgctttttattgcaaatatacctcatcatagctcagcttggagcttaaatattgtgcttggtgctgttagctcatgaattacatggtcaatgaacttgtgaaagcattggtactatggcatgccatatgggaatgcgtcatagtttcatcaaggcaaaggtgttgggcctgtcggacatctgatcaatgggttgatttcctgagtctccagtttatataagcagagcaaaatatttggtttgttgtgcttgctccatgctggctctgattctgaaagttaatatcattgaacaacaaactgagtcacattgttgattctgggcttgagttgactaatcgagttcttaacactaaaacttttatctctggtttggctctctgttaatcgttaatgtaggcagtctgttatactagttattaactattgaaaaatgtgaggtaccccttgaatagttgtcatcatgggagggacttgacttgaagacataaaacattctacattatatttcttatatgatgaaagttttcttttcattgtaattgcgatttgtgcatggcagaagtgttttgtatatgctttttctcccatgctgcctttgatttatttctggaccttatgtttgcagttgatatcatatccgctattgaatttgataaatct

SEQ ID NO: 86986 - DNA, 626 bp, Citrus clementina
  Intron number 1 from transcript clementine0.9_011568m (loc us clementine0.9_006849m.g) derived from phytozome v7.0 (c hr-ID scaffold_26; pos 2038052 to 2038677 reverse strand)
acaacttcgccgatatcgcgcagtatattattgatgtaatgcaatttttctcaattgctttaattgtgcagctactctgcgtgtggcattttagttatatttcaaatgctgctattttctttttatatttgagtaatatgaacaccttttatcaacagatcacataggaactctaatagaaactgtgatacaagttatggtacaacttgtggctactggactaatgcattatgaatggttgagattgcatttaatatgtgttatttctaaggtgtatttgttacacgtgttggataaaatcttagttgttgaaaattcacttatccaatgacttgaaagttgtttttataaatgaggcactgttgatttgcagctttaaatgtggtaagaattgaaaagaaaaggtcaaaataggaaatagattaaataaaacactttctatatgcttttgactaattttgcttgtggttgattgatgaggtatctttagcatttttgtgttttttttttttcttttgggcttgaatagaaaagtttatgttaatacgggtttttatattttcttgaattggttttcttgttttatatggaatatttataaattctattctgactgctgttgaagc

SEQ ID NO: 86987 - DNA, 429 bp, Citrus clementina
  Intron number 2 from transcript clementine0.9_030958m (loc us clementine0.9_030958m.g) derived from phytozome v7.0 (c hr-ID scaffold_110; pos 545272 to 545700)
gccgcgacgccgtttttgatcttatagctcttcccgtatgtattgcagctcacctcagcgcatgccaatttatgtgatttttgtataattatagatgattactgctgatactgaatgttaagctaaataattcgttgttaagtcatcttcatttaattttcgattgaaaatgaaaaaaatagtaattttaagcaaagaaaaatgtagaaaatgtttattttgttttatttttattttttaattttttgggatttccttattgtggctgttatcattcattatatggtcctagttaaatgtttcaagttgttgtagtcagtgaaattcttttcgatatttattctggcatgtatatttttccttttcaatttcttttgttgctgattctttgattatgttatatcctttttgtttcccttgtagggtggc

SEQ ID NO: 86988 - DNA, 905 bp, Citrus clementina
  Intron number 2 from transcript clementine0.9_013392m (loc us clementine0.9_013372m.g) derived from phytozome v7.0 (c hr-ID scaffold_6; pos 4547989 to 4548893)
cttggtcttggtgacgtatgcttgtctttcgctaaaagtgtttctgcattgattttttcaaattaaaaaggttgttaatactgttgtagtactagtatccctacacagagatgtgtaacatctaattttccactcctggttttgcatgaatggaccaccaaaagtattgaaggtggtgcctgctattttgtttggtcaaaaagcattagttgagtttgtaagtgcaggatttgtgttagactgtgagaaacttttcccttttgagaattgcagcatggagttcatcatgctgtttggtactggcgtactgcattccgggtgcatctatcttagctttattgctatgcctttgtcttgtattatgctttgtccatatgctctgtgtctttattattgtcctagagcttgttattactgagtcttctgtttgaaaaaatgatgattgtaagtttgagttgatatctagacaagtccttttatctatgcttgtggaatgaataaccaacatgatagactttctgctctataatttcacatcagtcattattatgcatttgcagccttttcatgatctcgctgttttaatagcattttccttttggcttgctttccatctttcaggctgaataagttttttctttttcagaaatttgtgcaataatttcattcttaaaccaaaacttaaaacaattaaaaaataaaaaagaaaaccagaatttatgataatccaggtattatgacctgtttttgctttttgtagagatattagtctgttggaataaatgaaataaggattggtttgtctgtcattagattcttcttctatttcatctgtgtgaggcaagctcttgtatagttaatgtctaaatcagtgtgcttattcctgttatcttttattgtaggca

SEQ ID NO: 86989 - DNA, 328 bp, Citrus clementina
  Intron number 1 from transcript clementine0.9_021881m (loc us clementine0.9_021881m.g) derived from phytozome v7.0 (c hr-ID scaffold_9; pos 2161277 to 2161604)
tctcttatcaacttccagattcctcccttcactcagtaagctttctacagtgtcttaatcttcaaacttatgaatttgcgtttatttattgtgctgttatgtccttgtagtatttttttatgttgctccattttagtatctttcttgcatttttttttttttgcattttcctatagtttgctgaaaaaaaaaaatccaagtattgagttttttctgaactgtgaactattcttttgattattcaagcgagaaatgaatctgtatgggactaattatctgcttattttaaacagataaggaagtgggtggtggttatttgaggcattgc

SEQ ID NO: 86990 - DNA, 566 bp, Citrus clementina
  Intron number 3 from transcript clementine0.9_021881m (loc us clementine0.9_021881m.g) derived from phytozome v7.0 (c hr-ID scaffold_9; pos 2161995 to 2162560)
cgatccagattatcgaatcccaattgtacttattggtgggtaaaataagtaatcttttggcgtatgttttatcgtgtactgcattctaataaacaaagcttacaattatctgttgtagataggctgtgggctatattaaaatgccattgaaatgcaagccaggttctcttatctcaagttttgtttcattcattgactgtaaatttcataaaataaaagtattattaaaattaagacttctagaatccttgaattatcatcttcattgtttgtagacgcataaaaaaattgtagactgtgggagccagccccattgcaaatctaacattacaaatgccatttgccctcaggcctgtcagcaagtcttttttccatttgtgtcaggatacaatttgagttttctcactagtcaatgagacaaatctgataccttgtacctttatagttgctaattattcattcttcctttctttgaacttgattatatttatgcttaacatttatatcttatataaattgtttataatacaggtgcggctggtgggttagcttatacaaataatctg

SEQ ID NO: 86991 - DNA, 292 bp, Citrus clementina
  Intron number 1 from transcript clementine0.9_005740m (loc us clementine0.9_005104m.g) derived from phytozome v7.0 (c hr-ID scaffold_19; pos 3912248 to 3912539 reverse strand)
tatccccaccgatcttcctctcccttctgcccctggtgtgtaagtcccagtttcattcactcttcttttttttttttttcattttctttgttgtttattctttaatccttattatacccagtttcgtttttctttcttgtttgattggagttgctttagatctattctttttttttttccaattctttattatgagtattcgttttagatagcatcgattatttgagatactagatctggagctggaaacttttaaaccctagctatttttgtgattgttttatttaacaga

SEQ ID NO: 86992 - DNA, 455 bp, Citrus clementina
  Intron number 1 from transcript clementine0.9_007402m (loc us clementine0.9_007402m.g) derived from phytozome v7.0 (c hr-ID scaffold_6; pos 4428762 to 4429216 reverse strand)
acgtcgttgcactcaccttcccaaacaccgtcgaggtttgagttttttaattttattttatttatattcataatttcattgtatttgttcaatttaattattcaaagttcttcaaaccgtcaagcgcatgttacgtgtcggtcctatcgattacaatatttaaaaataaataaataaataaataaatacataaagaatttattaaatgtttacgttattcatattagtaattattttatgtcgaacctaatttaacaatcgggcgttttctgtcctttcttctggaatcgagttgggtacttatttgttttttgagaagagagttgggtacttatttgatacaaatgtattatgtttgtcctggtctgagaaatcgtaaaattacaaggcacattgttattatttgaagaaaaatgacgtaatttattttcttatgacaattgcagtttgtaatt

SEQ ID NO: 86993 - DNA, 968 bp, Citrus clementina
  Intron number 1 from transcript clementine0.9_026956m (loc us clementine0.9_026956m.g) derived from phytozome v7.0 (c hr-ID scaffold_6; pos 5899891 to 5900858)
gttcccacagagacaccccaaatcatcagcctcaggtaaatttttctctttgtttcttagttttaatctttattacttcttttatgaaattgtatataaatttatatgattgcctttgacattttgcttccttgttgcttgcgcttgctgggttccaaatgttctttgtattaagtcatggctttgcctgcttaaattttgctctttgattggaataattggtgggttttccaatttggttgaaaattttgatctttaatagaatttggacttcgtatgttgaaatttagtggaatgatcttcagtttgactcatttttgtgtctgaaagtattttgagctttttgaattgaacgaaatgccttgagttacagatgctggatttagtatacagttggttgttgtgaatctatttagtgttgaggacactgttatcgaaagatagttataatatatgaagtttcaatgaggaaaagaataagattagtggggagggtcccattaatgtgggaatagggcaaagactgctaccatagagaaggaactcgaacatgaacatactttgcatatgtatatcagtatgagacattaataattggttcttgaaacgacatttcttcttagatggcttaattccaattcctcagacagagaggaggattttgaatctatgtttatcctgaagatttgatttcttgaaattgctttgtgtacattgtatcccaaacaaggaaacacgaataagttgagatagctggtttcatccagataacacagattttgacaatcttgaaagttaagagtgaaagttgtgtatctgtcacaattttataaggttgaactctatttatttcttgttttatattctccgttctggataaatcatgtttcatattcataatcatcttaaagaatcttgattgtctatgaataggctctgtttcacaaacccaatctgcatcaaatcaa

SEQ ID NO: 86994 - DNA, 604 bp, Citrus clementina
  Intron number 2 from transcript clementine0.9_005645m (loc us clementine0.9_004753m.g) derived from phytozome v7.0 (c hr-ID scaffold_46; pos 570429 to 571032)
gaaacaggaagaggtgtgtgctatctgcctactatagttcttgtatttttttttttttttcactacttttaatattataatcttgctcaataatacatatgttaattgatgttgtaatagtgggaaagattgatgaagctcccttcttgcgaatgttatttaagtttcttatgtgagaaaagtttaacactattttgggttcgtcatatttgattcagttaaaaactattttgatctgattctgtcatatacttgttagattatgatggtaaagcaactgtacaaatgaatgatagggattatatagcttttgtaaattttgttatggctaacttcttgttagatcttttttgacatagttttcatgctttaaactcaaagtagtgtacatagattgtccaatctttcatgctttgaacatgacagccataaattgctccaatagttataatacaaggactagcagatggtcatgtggtgcatgacttataaacaagcaaaaatgaataatctactaccacttacatctttgtaatcaaaacacgtgttctttgcgagcttttttgcaggctcctataagggtccctgtttcttcagacaaatt

SEQ ID NO: 86995 - DNA, 647 bp, Citrus clementina
  Intron number 2 from transcript clementine0.9_013536m (loc us clementine0.9_013540m.g) derived from phytozome v7.0 (c hr-ID scaffold_78; pos 763495 to 764141 reverse strand)
tggtagttgatcctcttcctgctggtcttgatcgggtgagtttttctcatctggttggttcttgttgtgttcttgtttatatgcaacattttacaagattcctcaatgtcccagctatttacggaactcaatttctttgatacttttactatttaacttttcaagcagaaatttaaattataggaaaaagagtgattagttgaactactaattcagcattgctgtttcagacattatgttgtaggagctgcaatcttttgctttcggttacatcaggagacttaatcaatggttgttaattcacaatgtattcttcaaacttgcacgtcttacctaatgttttgttttttacatataaatgcaataagttgcttgtcattctcctaagattaatttgaattttaagttaaaagacatgtgagaggcctacctatcgccaactcaaccgtaaagtgtccacattatatcttggcaaaagctgtactacaatgatatctgggttttcttttctttgtttaaattacatttaatgagtgtctgaaatgtcagaatacgtttcgcagaagtttttttttttttttttcccttgtactcattttgaaatgtttccatttctatactcagggatacattgtcttaaacagacc

SEQ ID NO: 86996 - DNA, 517 bp, Citrus clementina
  Intron number 1 from transcript clementine0.9_013536m (loc us clementine0.9_013540m.g) derived from phytozome v7.0 (c hr-ID scaffold_78; pos 764695 to 765211 reverse strand)
tacatatttttaagctttccaccttgtgctgttcagtgagtactgcatttacattcatttccaaagggttttaatttcattgtcatttttttttattttttttcctggatacccatttggcttatttattgattaattctctatttgcctttcaattgtgtttttcctggatacaacttttgcttcttccttttttttacgctttagtaggaatcacattgatatattcggtgactcaattattgatttgtattctttctatgtggattcataatgatgatcattcgaaagtctgatttccttttgtcccttattcattctgtcatattttgaaccttaaatactcgctgattgcatattggcacttacatttatgtgggttctgcaaaaaatgcatattttgcattatttgattgtgacagttcttgtataaatttgttgaaatctacgtcaagttgaatctaatgttaatttttatgcaggtattttgatttgtccattttgtgtgacagaggta

SEQ ID NO: 86997 - DNA, 566 bp, Citrus clementina
  Intron number 1 from transcript clementine0.9_034372m (loc us clementine0.9_034372m.g) derived from phytozome v7.0 (c hr-ID scaffold_46; pos 1559122 to 1559687)
aataccgtaaactatcaatcaagtttggcaggcaagtatccgctttctcctacatagaggagagagacacgcacatacatgtacacaagtgggtttcttggtttaggtgattatatgttgtaattgcttttgttttgaatatcttcttttgcttacagtcgagccttgccctgctgcaaccccacttagtttctaggttatactgcgagtttatgtccttacataatattttgaagtttaaatttttactccaatttgggtaattactgtttttcaaatgccagttctctaatctccaactgtttccattttttgtatatttgattgatgccttttgtactgaaggcacttgcattttcattttctactcggattcttgttattgcttgtggaaggatatgctcgtaggaatttaatggttatttgtttattatctttagttatgcatagaggatagcttcagtttctttgtgttattgcaatgtttctgttttattagttcggtaatagacatttggatgtctattttccttttgagttgatggtgtgatgtacatgcagggaag

SEQ ID NO: 86998 - DNA, 570 bp, Citrus clementina; identical to SEQ ID NO: 83507
  Intron number 2 from transcript clementine0.9_034522m (loc us clementine0.9_034522m.g) derived from phytozome v7.0 (c hr-ID scaffold_22; pos 682635 to 683204)

SEQ ID NO: 86999 - DNA, 408 bp, Citrus clementina
  Intron number 3 from transcript clementine0.9_011962m (loc us clementine0.9_011962m.g) derived from phytozome v7.0 (c hr-ID scaffold_19; pos 1206241 to 1206648 reverse strand)
gagttttggctaacgtaatcaacgagagactgtaagagctattgattcattttatactcctatgcattattaagaaaaagaaaaaaaaaaaaagggtctgatgccttttttactttattgtaaatgtgatgaattatttttgagatggatttcataatcttgtctacttgttgtgttgttatgccattgcctatcgcatccaatgcaaaagtcaaccataaaagcaaatgcatggtccaatagtaattagttctatgagaagatatgatgccatcatattttttgtgttagcaaatttttattgtttttttattactgctggcatactgcctattcctttgacaaactgctgattttgatttttctgtttcagacagaagcctctgcttcctaattttgattctgcag

SEQ ID NO: 87000 - DNA, 894 bp, Citrus clementina
  Intron number 1 from transcript clementine0.9_019814m (loc us clementine0.9_019846m.g) derived from phytozome v7.0 (c hr-ID scaffold_54; pos 700059 to 700952)
gtatagttagtagcctgcaatatcaaagattctatgtaagaaacctatctcctacgctagagattcgttacatgctttttcttgctagtgtgttacagtttatttgttaatatagccgaaatggtttgcagtggatttgtttttttctgaaactttgctataattcccttgtgttgatgctgctgcttctgcttcttgttttgaactttaattggttatgatactgctggataggaagaggcttcttctagatctcatgtgatttgtaagatgaaaaattttcaggtattatatggttgttaattacttaaatgaatagcggatatttgaaaatgatttagttttctcttatttactttccctatcctcaacccctccctcccttttcaatcattccctctttttgaaatactttagataagacagtattcatgctgagagagcactttctagctgggaaagcagcgaaagagagggacatggagagaaagaagatagacagaacgatgaacctttagatacttgcagagagggggtcataagtgacttatatgttgttcctacatcatatccttgttatgatgatccaattcagatgtgattcttgcattttagcagcagctcttcaaggtttatttcatctataacaaaggttttggtgattgacaagctttgattgttctgatgcatgaaataaattttattaatgtcgatctagaaagtctttttccaatactttttaccctaaagattgtcttgacataaagtattatttattgtagaatattttcctttgccgatgtggactgaagtattattggtcttcctcatctttttaaaagtataatttgtgcatctcttgttttcctgcagaagaagtttacgattcgtggt

SEQ ID NO: 87001 - DNA, 279 bp, Citrus clementina; identical to SEQ ID NO: 78055
  Intron number 1 from transcript clementine0.9_031947m (loc us clementine0.9_031947m.g) derived from phytozome v7.0 (c hr-ID scaffold_34; pos 1612058 to 1612336 reverse strand)

SEQ ID NO: 87002 - DNA, 665 bp, Citrus clementina
  Intron number 3 from transcript clementine0.9_015795m (loc us clementine0.9_015795m.g) derived from phytozome v7.0 (c hr-ID scaffold_6; pos 2304067 to 2304731)
aggctgaagcccagcgactcttgcgccaattcaatgtactcaaaatcttttcctttttctttgaaattttttatttccttaatcgttgtcttttattaaattccagaaatttttttttaaatatgaattagtaataaaatcttaaaataagggcgtgtttgggttcttgtttttgagagttcccaagcttctttacacgtcacaagaagtcaaaaaatctattttatttcatgctataattagggaatacgagaaaggaaccacgtccacgtgtccctcacatctttttatcaaaatgttaaagataattatcatagaaacgtgggctcaaggtgtgtccaaggaatcattgcttaatgtctaccgacttgtttgtttcgctttgttgctccattatttaaaaaaaaatcatcataaaattattggaatttcagtttgttatgtgttcttacaaatcatgacgtgtgtatatattgggatgaattgttaaatagtgtgactagtgccaataggtggcttataagattgtgaagaatatgacaataaattggatgatctgcattttacttcagatattgttgatttgttgtatgctgttttatcctcacttttcaaattcgtgaagtgataattgatttttatgtcaccgtaattgcaggaagcaa

SEQ ID NO: 87003 - DNA, 429 bp, Citrus clementina
  Intron number 2 from transcript clementine0.9_033307m (loc us clementine0.9_033307m.g) derived from phytozome v7.0 (c hr-ID scaffold_110; pos 598622 to 599050)
gccgcgacgccgtttttgatcttatagcacttcccgtatgtattgcagctcacctcagctcatgctaatttatgtgatgtttgtataattatagatgattacagctgatactgaatgttaagctaaataattcgttcttaagtcatcttcatttaattttcgattgaaaatgaaaaaataataattttaagcaaagaaaaatatagaaaatgtttattttgttttaattttattttttaattttcagggatttccttattgtgactgttatcattcattatatggtcctagttaaatgtttcaaattgttgtagtcagtgaaattcttttccatatttattctggcatgtatatttttccttttcaatttcttttgttgctgattctttgattatgttatatccttttttgtttcctttgtagggtggc

SEQ ID NO: 87004 - DNA, 451 bp, Citrus clementina
  Intron number 1 from transcript clementine0.9_014500m (loc us clementine0.9_014500m.g) derived from phytozome v7.0 (c hr-ID scaffold_46; pos 834305 to 834755 reverse strand)
aaatttaagaggtaattcagagatacccttttgtcttattcggctatttgaagtttctcgtatcaaattaatctgatttgagtcgatttttttttttatcttttctggttgcattgttccagcaatcaagaacaattttgttttcttctccattattattatggggcctttctcgtattggtaatttggtattaagtattatttatgcttgcttgattattgacatagttttggagattggttaaactctaatgcgactttaaaaggggaaaaaagaaagaaaacaccattaggggctataatcgtcttagatttctgtctatagtgtctatgatcccctttttttttttggcccttttcatgtgtgggggtttgaatggggtttaacatgattgtcacttttatgtttattacagttacatttggtccgtagctgctgtgttgcaaccgc

SEQ ID NO: 87005 - DNA, 598 bp, Citrus clementina
  Intron number 2 from transcript clementine0.9_032802m (loc us clementine0.9_032802m.g) derived from phytozome v7.0 (c hr-ID scaffold_6; pos 2359948 to 2360545 reverse strand)
ttcaggtgcgcatcacttttcttcccttacataatttgagtcttaattatactcagtggcagaatctgtgtgattcttacatgagatgaggagaataccatatcacctcttaatcattgttatttattcgaaaaaagcatacagcataaaagagaaacaacaacttgaagaggccgtaatctaaaaacagtatgttttgggggccaatacataaaacttatacgcaaattggctaatgtttcagttaaaccccactatatataaattaatattattatgcttttgtatttgaattatatatatatatatatattagtagttttctggtccaagatcttaaagtgtaggaaaaatatgagaatactttaaaaatgcgggattttaaagactaatttaaagcacttaaactgcatagtttatgtatttttccgaacgttctcgcagtttaaaattccgactacatgcataatgcccatttctaaatgttttgccacagttttttctaataagaattagtcaatgataccttaaaaaaaaaaagaaattagtcaattgtaattatgattttgttatttgcaggcagacgtgaagtccatct

SEQ ID NO: 87006 - DNA, 436 bp, Citrus clementina
  Intron number 1 from transcript clementine0.9_032802m (loc us clementine0.9_032802m.g) derived from phytozome v7.0 (c hr-ID scaffold_6; pos 2360743 to 2361178 reverse strand)
aagctgccgcggcttctttaaagactgctgctgaggtaaatgatttttcattattaatttaaattctaaaacaatacatttctttgagaattttaaaacaatatatatgctaattagtatcaataattattttttttccctgccaacctaagtgttaaaaaggtatatagatttttaaaaagaaaaactagactcaaattaacatgacaagaaattgaaactaaacttaagttcaaaaagaaactgaagttacactcatttttatgtacctctcagatttatattttttatgaaatgatcttcccaagtttgccccggcaaaccaaaatattgatttcatttgtacggttacggatggtcgtcttgtaaatttacctatatgatttttaaacaattttcagggtaaaatatttggagtgtggctcagagtattaaa

SEQ ID NO: 87007 - DNA, 502 bp, Citrus clementina
  Intron number 1 from transcript clementine0.9_010962m (loc us clementine0.9_010962m.g) derived from phytozome v7.0 (c hr-ID scaffold_22; pos 2451438 to 2451939)
tccaggtttcaaaaatcttgctttgattcatcattgtacctgaatctcaaaatactccgttttcttaggtttttagtttgaattgctaatttgttagtatttctgtttatttgttctcaattggctcaatggcattaactgtgatgctcagttagattaaaatttttaatatttcgtcaacttgagaacgttgacttattttgattgactttttgaaagtgtattgaatgcataatttgtgatgggcaatgaatttcgtttatcgtttatgccctgattaatgtaagtattgtgtttgtatttactcttggtacattgacgttctgggatgttgtagcataaaatgctttgtttttatattcttcgctggtgactactcccttggtgttgttggtatgacaatttgcaattggtattcattattgaagaattgtctttctgtcttacttctactgcttgtttgttaggctggctcttcgtgtgagtcaccagaacgggttaa

SEQ ID NO: 87008 - DNA, 1019 bp, Citrus clementina
  Intron number 1 from transcript clementine0.9_003643m (loc us clementine0.9_003643m.g) derived from phytozome v7.0 (c hr-ID scaffold_9; pos 1715372 to 1716390 reverse strand)
gcttggaggcgcctaatcacagaggtcagttgcatttcttcacacgatttattgattaataattgttttttcatatgctgcgttccttcatattcttgacatatatagaaagttagcttgttttgggtctgcaataaccctagttttaattttagcgaggctttagtttaggttggtcagaaaacccaatttacaatttcagctttggttaatgttgattctgataattttcattatttagtcaaaactatagctgtactcaaaattatagttgtgttaaggtagggaatgaagctaaagctgtgttttgaaccattgattcattgcattttagacaccaggagagagggaatgagagacacatcactggatcttgtttacaagaattttttatgtgtatcttttgaattagtctgttcatgggcaaatattgtcctgtactgaatcttcattgaataaccacattgtgaagctggtatcttgaaagttgtccctgttcctagttttgttgcaaagccagtttttgcagtattgttttttctccttatgttcgttgatcattttgggggtgtagaagatttgaaaggagtaaaagaggacagggctaattttttcccctcaatttgcagatcatgaagaaaatttagaaactattgcttaattcttattatttgttttctttgtattatgtgttcatcacatttgaaatgtccctgcctttagttgctgtactggtagtatcactataggttctttagctcttgtttctaaataatgcatgcttatattagtacatgttctcacatgagtataaaggaagaatcttttggcatcaaagtcttcgtggttggttttgggtgtaccaacttcttttattatcagtttaaatcgtcgaatctcattcttttgtatggcataggatttatcctttctcaattctccttttactctttattactaaaactctgtgtttttcttcaataggtttcaaggcaccgaacagagttggtgccggtcaa

SEQ ID NO: 87009 - DNA, 496 bp, Citrus clementina
  Intron number 1 from transcript clementine0.9_012859m (loc us clementine0.9_012859m.g) derived from phytozome v7.0 (c hr-ID scaffold_26; pos 1155385 to 1155880 reverse strand)
atttgttaacaagcatctctttccttatctgcatagtgagttttgttttgttttattttttggttttgattggagctttgtatgatgcattttcatgttttttgtgtaatgttcatgcaatcatgggttggtttcaaaatttgatcttcttttttaaaattgttttcttttttaatttttgatggggtcattaaagctattgaaaaattttgcttttcagtaaatagaatgtgatttttattttaattggttaaattttgtggaaatagaatgaatttgaatgcagaggaagagaggaagttggaatttgaagttcagtgaatgtttgttagtgcgcttaaatcacagtgaaacaggaatttgacataattgagtttgtctttttgttaaaagtacagaaaattaggtgaattttgatattttgtattttgaagtaacagatttttgtttgtacgtcctctttctaaaattgcatgctttgaatctagaatttgca

SEQ ID NO: 87010 - DNA, 790 bp, Citrus clementina
  Intron number 1 from transcript clementine0.9_021754m (loc us clementine0.9_021754m.g) derived from phytozome v7.0 (c hr-ID scaffold_19; pos 1200515 to 1201304)
ctctcattgactctgagattcataccttggagaaggttggttttccattttggaatttttttgaatttatttgcttttcttttattttcttttctttctttctttctctgttctccccccccaacccaaaaaaaaagtaaatggatactgcttttcatttctgcttgtggagtatgaatttcctaacgagatgtgtgtgtgatgttttcacttgtcgccctgtttggcatgtttcattgaatagaaagaataaggaaattctattaaaatgatttatgattaattgtagcagaatattaaatgaatcatttaacattgtttgttatcattttgtgtttggtacgcatcgtgttttaggatttatgaattaatatgatggaaatccttacttgtagcttttggataccataccaccattgttcgtttaatgatttactgattaaaggaaaaggctgaggctgaggctgtggcaaaatgaagctctggtgctaccccagtctgatgacacttgtgatccggattttaaaagactggcggtgctgataaatgaaaattttgaatcgtgttgaagcagttggtttcatgattgagaataactttctcagtagtatggtagactgttgacttgttgacttttatattttgtgtgtaaacgtgtcatgctatcaaaacctaggctgattgattttctaaatatacctttggttgcttctgtattgcctttaataaaatattctttgacttcaattctgcagttgtcaaaagaggaaggtccagctccagttccaac

SEQ ID NO: 87011 - DNA, 731 bp, Citrus clementina
  Intron number 1 from transcript clementine0.9_026425m (loc us clementine0.9_026425m.g) derived from phytozome v7.0 (c hr-ID scaffold_55; pos 709472 to 710202 reverse strand)
ctgcgcttgaggcattagaaactcttcttattgtggtatgtatatagtaggcaactaggcatggttatagagaatttcttgcctttatgtactattttgcttgagaattaggctctcctcttcttatctcaaaacaataataatgataaatgataaaatttaaaaaaattctcagttttagtgagtgtagtatatttcaagggttctctatatgagtgatcttgtttgattcatgcattattctcactcaaaactaccagttctctttcttttaagttaatacgcaatttgttttatccatcattaatactggtttcaagtatgtgttcaggctgccttacattattttaatagagtgatgattattgaattgagcctggctgaagcaaagctcaataatagagtcatagaaaagctaggctcatcaaatctgtatgatattggagcccaacctcaatgtgttctgtggtcaaacaacttggttaagtgcattttcaggatctcctgaacgtgcatctaaccaagttcctttactcatgtactcagaaaatgatttattatttctaagaatcattgttgtcattatccccaaacaaggaaattattgaatcccttatgaagcactttgcattttgctttgtgtttctgacctaacataagcattgagtagttaaagaactttgtaatatttcacaggctggtgatttgggatcagcatcctggcgacctac

SEQ ID NO: 87012 - DNA, 941 bp, Citrus clementina
  Intron number 1 from transcript clementine0.9_004811m (loc us clementine0.9_004811m.g) derived from phytozome v7.0 (c hr-ID scaffold_6; pos 2832711 to 2833651)
ttggtggtaaattttgtggggaatgacaaatgtagagaaatacaacaataatggtggaactttattatgtaaaataatgtgtttacaactaactctgtatgtaggaagaaactgcagaaattttgtgtgcttcaaggcacgttacaaatgtcgctttccttaagacgttatttgcccccaccaattgagtgatgcacatgggttaagcaaatacgcctccaggatacaatgaagcacttgtttgtttgcttgcgttgtgcatcgacgaaagcaaactagaatactcttgaatgttgcaagcctaccaagaaacaatatattgttcctgcagaaaacaatatattggaatgtgaatgcacaaaagaaatgggtgttttgtgttgagattcgtactagaaaggaatgctaagaaaagagtggtgtaggatcattcattttatgtctaaatggcttaaacatgacccctatttatagatatacttgtgccccctcatttgggttatcatctttcatgataccccttcattcatggccattggatctagatttgattttaatcaatggtctaaattgaaccatcaccatttcaaatgaaatgtcaccatgaaatgatgcatctctaagtgaaatgttgccatgaaaagttatatcatttagtaaaaggataccttttctacaagacacaattaaatggacatgtccttacaacaagacatcatttaattagacaagtctttagtgaaaggtaccttttctataaggcacaattaataggacatgtctttaccataagacacaattattttgaaaatttccaacactacatgtgatcctacttccgagaggagctgctatgatttcttatgcgcccttgctccagatattactcaggttttcaacccagatttatcatacttttattctcaaaatattagccagaa

SEQ ID NO: 87013 - DNA, 518 bp, Citrus clementina
  Intron number 1 from transcript clementine0.9_007743m (loc us clementine0.9_007563m.g) derived from phytozome v7.0 (c hr-ID scaffold_48; pos 1308512 to 1309029)
ggtaagctatcacgcgctgcttcgtttcaattttcactatctggagcttctcatcgaattgcgatttctttttaattaattgtttttgttggatctgctgatttttatttgattaatctctgattgtttatgctctggtctgatttcagttgaactgtccgttacgaattttaattcgttgtgatatttttcccgattttgcggctgagtatataaatgtttctgtgcttcgtttattttattttgcagtggctgggaaatttggttgaagtttagtaaaatatcttggaattgtagtttgtgtttattttttatttaaatttttatttttcatgaatgcatgatgattctggtgttgcaataggagagatttgttttatgttggcatgatgaacttgttaataattatgtttgtattctttgctgatgaccaaatgttcaagaaatgttgtaattaacttgtttgagttccccaattggtagatattgaggaggatatccgctcattacagcttgac

SEQ ID NO: 87014 - DNA, 1031 bp, Citrus clementina
  Intron number 3 from transcript clementine0.9_007743m (loc us clementine0.9_007563m.g) derived from phytozome v7.0 (c hr-ID scaffold_48; pos 1309200 to 1310230)
gaggaaggttggtaggattgataaatttcattgtagcgcttttttgtcagtacaaatttattttgagaaagtgtataaagtgcaattgtggttgatggagataacttttagacctgttcaatgcctaaatttggctttgttgcaatcacataaatatgatcaaaattttgaaatgagaaaatttcaatcaaaatgctccaaaactgaaactattggattttgatggtttttttgtatgtgatatatataactgtgacttactacacattttgatgtaattgtggttggttgtagccctcttgagtgaaatggctttgttttttttgacttgcattcaactctatgatgtttgtgggatcctttatgggagtaagaattatttctcgctggacggaatagtttctcttcacatggtagcatttcagttgatcatgcatatttatttttatttcaacaataataaatgtagagccgtcttattttcttcaacagaattttaagttaaatcttaatgccatgcagtagcttttcatgctgcttgtggatgcctgttaggctagtgcttttgcaatcaaactggttgctgattaacctgttggaatgtcagttcacttgcatttgcccttcctccattgagtgtagtttgatttattcgggaagtcaattatttgctctgttttgaccttatatttagcaattgtagttgctaaaagcattacaaataattgctgcttcaactgtttagtacaatagaaatcgttttggtttttctcacttctctttcctgcaatttggagccatgcccctttttttcacatgttccgaattcccctaagattatttgtaaaacaccaatctcgttgttcggcaagagagtaatcttttttgcattaatagtgcattcttcttgtgccccaatgaaactacaaatggctacaacctgtcatatgaattagatttgaaaatgttttacaaattatgttttgatgcttttagattcagaggaggtgcaagcagtatcccagcctgtt

SEQ ID NO: 87015 - DNA, 685 bp, Citrus clementina
  Intron number 1 from transcript clementine0.9_005661m (loc us clementine0.9_004390m.g) derived from phytozome v7.0 (c hr-ID scaffold_50; pos 774866 to 775550 reverse strand)
agcatatttgcttaatctatccaccacgacaagtattgtatccgttccctctgatttgggcaatttttcaatgaaatccatgcttaaaatgataccgagacattaaacttgaaactcattttttattattataaaaataattttttttattatgtgtcctttaatattaaaataataattcttttatttattatatttgaatattattatatttattatttttaatttatttaagggacaaccgatccaaacaattgtcatacatgcatgtatcacatacatgcatgtatcgtagctgtgcagctaaaacttctttaaaaaaaaaagaaaagaaaaaagagactgaggaagtagagttgactcgtagccactggtaagttgttgtactactgtagagcaaagcatacagcattacaggctttacagctggctagggtttgggttcccctcttaactgttttatatataatattgtcctctactgaacccagcttgtctttttcttttccctattacagtttttccatttttgttttttaaaaacttaaatctctttttctcactacaatgctgtagaacaagttgagtttaaacactctgatgttgtaacgtctgtttgattagaccaacgaatggcaatgcaaatgcagattgagagccaaaatattttcttgctactgcttct

SEQ ID NO: 87016 - DNA, 945 bp, Citrus clementina
  Intron number 1 from transcript clementine0.9_020829m (loc us clementine0.9_019608m.g) derived from phytozome v7.0 (c hr-ID scaffold_34; pos 1062407 to 1063351)
aattggaagattttgaatcatatcctgctttgctggtaatctcctatctgagttgtaagtttctaattaagctatcgtatcctgtttgcttctttgttgatggaaatcttcttatcttgataatgtttgtgtttgttttgtgtaaagcagaaattatatgattgtttgtgtgcgcaaatgatgagaacacttcatacaataatgtattgagaaatggggagtagaacatgacgaccatttgaactttcaatcagaggatttatataaacatagaatttttctctaggaaatcctcatttgaataaagtgaggatgacactgaccgaaaaaaaaaaaaaagcagtttttaatgcattaacagaaaaagaaaaaagaaaaacactgtctctaatatactgaaatctgtgtttttttggtgttttattggcatcctcaagtgaggacatcctcattagaaaagaactctatatacatatatgcacctacaaaaaatgtatttttatatttagtttacagccatttgctgttgttttgtaatgtcttaagcagaatggtgagagtatgagagttataaggaacaaagggaaaattgttttttttgggttgaagggatgatttgttttgtttgacatgcagaacctaggcccattattgttaattttgtttcaaatggcctgctctaacgatttaacgatgaactatctgcgttggtcatagtcattcaaatgaagagaattgtataatcttcagttatttactacttactggtcttaccctcatacttgcagtatatgcagaataatatggcatttgttattgttccctttcctaggtggaaattgtctctcctatatcatctattgaacatgaaccaccagtgttttcctcactctttctcatataagcaattaaaggctgcattctaactgaacgatgatgcaggtt

SEQ ID NO: 87017 - DNA, 730 bp, Citrus clementina
  Intron number 1 from transcript clementine0.9_026470m (loc us clementine0.9_026446m.g) derived from phytozome v7.0 (c hr-ID scaffold_26; pos 1012349 to 1013078)
ctcccctcccgccgcttctcctccgtcgctcccaggtccctttttgtttccggagaaaacaaaaaaaaaatgctgaatatcgtttatttatttttcaattacgctatattatcggataaataagtgaactttcctttaggtgcttcaccggtgtttgtagatctgtatcgttatttattatgtttcatttgtttattattagtgaattatgatttaacatttcaaataattttaattgttatgattttttataagtgtttccagttattgctttgaatagtatgaaaagataaaaaattgttctttttgtttgtgagtacatttccattatagagaatttggaatttgctgttatttgtggaattgatttgcatattgtaaacaatctttttgagtctcagaatgcaataagtgggtcttctatttagatttttaaggttcctaattatcataatgaattttttttaactttactttcctttcagttagactttcttacaaacaaaagtttctttggtttttagtctctttttttgcttgttattgttgtttagtaaggctcatcttatcataatatttttgtttccagcttaacactatttgaattttgatttgtgctattctttttaagagtatacggttaaatgtttttctgttctatttacattggttttgttacatatatttatttgcaggaatttgggggaactaggttgcactgcttcgtttt

SEQ ID NO: 87018 - DNA, 288 bp, Citrus clementina
  Intron number 1 from transcript clementine0.9_010127m (loc us clementine0.9_005104m.g) derived from phytozome v7.0 (c hr-ID scaffold_19; pos 3912248 to 3912535 reverse strand)
cccaccgatcttcctctcccttctgcccctggtgtgtaagtcccagtttcattcactcttcttttttttttttttcattttctttgttgtttattctttaatccttattatacccagtttcgtttttctttcttgtttgattggagttgctttagatctattctttttttttttccaattctttattatgagtattcgttttagatagcatcgattatttgagatactagatctggagctggaaacttttaaaccctagctatttttgtgattgttttatttaacaga

SEQ ID NO: 87019 - DNA, 874 bp, Citrus clementina
  Intron number 1 from transcript clementine0.9_008188m (loc us clementine0.9_007300m.g) derived from phytozome v7.0 (c hr-ID scaffold_55; pos 94830 to 95703)
gagagatcaagattttgcggctcgcttgcagatcggtcggtaactttctttcattttttttttaatttttgagaatttttattttaattgacggagatgctgttgttttatttgtttatttattattattattctttttgcgaagatgattctactttctttcattttggtgttgtaaataatttgcatttgtgtatattttcctctttgactataaatgtgatcatgcattgtatattttattttatttttatttttttgcagcaaacgttgaggatttgctccggctgttatttatttatttatttatataatatttttatttttaattttgatcaattttctagggtgggattgtgagtttcagctttcctgggaaaattgaattcataatgcaaaagaggaatttgtgtgaattgacatgcaacaattattaatgcaagaaggatatatcagtttttgtgtattagcagaaatgaattcttgggctatatattatttggcaataaatgataggattgcattacttgcttctttatgttggcaaaagtgtgcggcttctgctgaatcttttgtgcagttacgtgttatatcaaattgcaatagctaaattggcaattagattttgtttgttttcgaaatggggatgcgtgatcagtatatcatgcagtttggaaggttcttaaatgtgaaagtctatatacgtctaagtggacatgtaaccgtgttgcaaatttgtatgtatatgtaaatttactcgcatgtttctgcttttttcgctcataaaaatttgtatgtaccagcagttggttgtagttaatatttctgtcacttttcaggttataccgcacttccagggaagttggctgtgcgg

SEQ ID NO: 87020 - DNA, 1053 bp, Citrus clementina
  Intron number 2 from transcript clementine0.9_000990m (loc us clementine0.9_000921m.g) derived from phytozome v7.0 (c hr-ID scaffold_9; pos 5916426 to 5917478 reverse strand)
atcgatcttggatttgtcagttaataacttgacaggtaacttccctaacgacatgcacatgtgtcttctttgtaattttacatctcctattataaattctcttatggggacatgtcatgtcatgtccactatttagcattatcttgttaattgttagaaatctatgagattatgcaaaattttgtaaattatgttatagcagatagtctattaataaacaatttcttaaacaggcaccattccttacgctggaaatctatttcagctgcaatggcttgatctcagtgataaccaactctctggttcttttccctctttcaaattcaaaatgcctcgtctacaagttcttgatttgagtgtcaatggactatctggtgaactccctgcaaatttttgcaacaattttccttttctggaagaactttatttgtccaaaaatatgttttatggcgaaataccctccgatctagcaaattgcagctatttgcgaatcttagttttgcagttcaataatttctctggagccattccaaaggaaatcggtaacttgaccaagcttgaaaagttagatcttcagtttaacagactccgaggtgcgtcttattatagtttatggtatacccactcgtgtgatattttaccttaatcagtgatgctcaatcttataagttagaatatcttgaatatcaatcttcaatctttcttctctatcgagtttgaagttgtcatataataacttgtcaggtagtctttgctaataatatgcatttgtgacatcaacataaaatatttgagatgaaatcactgtttatctttatatagttggtgatgccatcgctaacaaatgatttcttaagaggcatcattccttctcaacttgggaaaccatcttcacttcaaaaactttatcttagctataaccagctctccggtccaatcccttcctttatcttatttaagtctttttttctagaaaatattcatttccaatataatatattatttggtgaactcccaggtgaactccccgcaaatatttgcaacaaccttcct

SEQ ID NO: 87021 - DNA, 951 bp, Citrus clementina
  Intron number 2 from transcript clementine0.9_025642m (loc us clementine0.9_025655m.g) derived from phytozome v7.0 (c hr-ID scaffold_34; pos 353960 to 354910 reverse strand)
tcatcagctcactcatattccttgtgtcactgacggtaataagatttcttcaatcagtaggttttggttattcttcttaccctcaaagaagggaaaaagatatgtaggcttaaatgacctaattgctgcaattccagttcattgagtgatagatatatgttacccttggttgcttatgactgaatcaagtattatattgatttatttgtctcaacagcatgtgatgggagcattatgtttatgataacttatcaaagatacactttctatggcaagaggcattttggggtttgaaacttgaattttcttttatgatgaataagaactttattcaaagggaaaaggtagtaattgaagtacacaggacttatacgaagtgagtctttgaatgtagatgtctatttggacttttaataaagaatacaatcagcatgttagacaactcaaaattccctgaatggtaatttcttggaaagaatccgcatgttcaaaagtaagattttgttttggatgatcttttcggttgatgatttccttctctctcctacatttttaccctttcttctactaatattgtgtacaaaggaaataactttatttcactgaaacccacatatttgttcaattgctaaattggtgcagtatgtataattctctttgtttgaatatgtcaatttccagcctcctagcatttgacttggatttagttattaatatgtgttgccatgaattgatggtgatttctgctgtgaattgatcaaatttatattcttcgctttttatggtcaattatcttcattctagaacatgattgatggaaattcttgtattctacaacttcaagttgttattcttatcatgtggctcatattactcaatcataacttgtaatatgtattagcttggttactgtttttgcagttcattggaaattttcaggaaacaagtggt

SEQ ID NO: 87022 - DNA, 724 bp, Citrus clementina
  Intron number 4 from transcript clementine0.9_013567m (loc us clementine0.9_013567m.g) derived from phytozome v7.0 (c hr-ID scaffold_22; pos 1931420 to 1932143 reverse strand)
gaacacctggcattagtgatcctggtactgaattggtgagtatgttgtgcattctgcatttgtattttggtttctttgcaaaagattatgacatttgtagtgaaagagtaaaaatcttatggaattacattgttgttgtgtataataaatgatatcctctatttccttattgtatcatttaaatattctcttgatataaatatcagaacgtcaatttacctgcatttcattaggaaactaagccaaaacaaccaggcaagtctggaactgtatgctaagattctgtattgagtgttgtattggttctgggaacaatgtttttttcatctcccaccaagttgaacagctcgggaaggatttgtcttagtttgactaggatgaatcagattttatttcatacttccattcactctctgcagggaacctaatgtactttctcagtgccaaataaggttgaacttccagatcgtaatcagataaaagctgagccaaaattgttttactttcaacattttgatttctgaatagaacaagtttcctcctgaagaagtgcactgctttattacctgtgttgttctgtaacaattccttagtcctttaaggatcataaaccacacttcaaattgctaaaattatttgtgaaaattccctggaaatttctacttctaattcatcacaaagaatgcaatcattatgtattcaaaatctttatacaggcaaaatt

SEQ ID NO: 87023 - DNA, 581 bp, Citrus clementina
  Intron number 4 from transcript clementine0.9_011925m (loc us clementine0.9_011490m.g) derived from phytozome v7.0 (c hr-ID scaffold_19; pos 225738 to 226318 reverse strand)
cgcccaagtatctagcagaagcaaggttggcatcatcctacctcggttgaacatagtctctttatttaatctttttgaagtttgaaaaagaaaattaaaaattgtctatttgaagctgagtgtgtttattgaatgagcaattgaagggtttctgcttagattttgtgtcagtcaattctaagttgggaacacaaaatgcttccaccagtttctttgtctgaagtttggcttagctgcgggcagtgactaaactaatttgatttagttgagtctcccctttttcttataaaactgctatatactcagatgatgcatcttttaaaaattatattatactctgtttctctggggctgttcatacattcattatgcagctagatgtttatctcaaagagaagaaaagggaattttgtttggttactgtctcatctatttgtgtggttatgctggcagttgcttgctaagaaaatgtctctgaacttgatgttttagccttttccgttgtcccttctgtaaaaacttgaggaaatagatcagtagatgattcttttttgctagcagaaagggatctcgactgggac

SEQ ID NO: 87024 - DNA, 429 bp, Citrus clementina
  Intron number 2 from transcript clementine0.9_007951m (loc us clementine0.9_007951m.g) derived from phytozome v7.0 (c hr-ID scaffold_9; pos 4684241 to 4684669)
agcttgaaagagatcacattaaggcatcaatccaggtcgttacctaaattttatatttgtgtacgctacctaatttcatctttgttgatttgatcagctctaatttgattagttatttttgggttggaacattactcacatagataaattaaagtgaagagtctaattttgattcatgattttttcaaagaaaaatcgaaataaacaaaaatctgaattgtaattttcgggcataatacatatgtacattgaaatgaaaattaatttcatttatattgattttaattgtcctacaaattaaaagcgaacatcatgagcacagctatccaagtatctcttgcattgaaaatctgaatcgtatttctctttttgttattttttatgatatttttaggatcttttacttgctggaatagacacctcctcgat

SEQ ID NO: 87025 - DNA, 490 bp, Citrus clementina
  Intron number 2 from transcript clementine0.9_016412m (loc us clementine0.9_016307m.g) derived from phytozome v7.0 (c hr-ID scaffold_19; pos 3162750 to 3163239 reverse strand)
tcctcgccattttggatcatctcggactagctaaggttactatttatctttcccagccagcctctatgttcaatattaggatatgtttcattactaatttcaatagtttatacgtttgatttaaaagtgaaaacagtagtttagttggttcaactggcaattgctcttggagcgttacaaaagaaaggtctgaggttctaatctccgtcacattggggtaggatttttcatattttgtagtttattcatttccatgtgccctttagtaaaaactatatagctactatagaagagggagagggagagggagatatatatatacatatgcctacctttgtggtagaaccatatattgatgcttcaggcctaatgtatttagcaaaagagatggctttatatatttaagattatttagcggttgttaatgattttggctctctacatatattgtataggtttttcttgttgcaaaagattttggagctctgac

SEQ ID NO: 87026 - DNA, 838 bp, Citrus clementina
  Intron number 1 from transcript clementine0.9_006057m (loc us clementine0.9_006057m.g) derived from phytozome v7.0 (c hr-ID scaffold_6; pos 4918483 to 4919320 reverse strand)
ggttatctgcactcgccaagctcgctctcaaacaagtaagctcttttttttttttttttgggaggtcaaaacactgacttgattttctgtttgattgctgagaaagtggttgagaaggaggaaatcttaagtaaaataaagaaatcttttatgtttcgctcactatttgcttcatttgttaagaatacgaaaagggcgggcttagattgttaaatataactctgttaagtccattttgatgaactcaattcatcacactaaatgagttattcagtattgttgtgattatataccccaagacaaggtacaacggttgggaaggggacatgatcaatggaacctggctagatccaggctgggatagtggtgctcattcctaactagttccgaatggtcaatcttagcttccgttcttaagaatccccagtcctttggtatggagccatcatcgccttcacctttgcagtcactacaggtttcatgtctgggttgacctccacactactttcgtttcacctgcacgagttagttagctttccagtccgtcctccctcgcctactatgagctctggattgagagaccaagggtgctattcctggctgaaggcctaactagagtgattcctctgttattcacttttgctgttagctttcttcttcttcttttttttttcaaaaaaaaaatttgattatgaatgttgattggctttctattagtaaatttcttcagtgattaaaatagaaattcgatgaactaaattgcaaactgggtgaagtttttagtaacttgtatttggtttaagggttttgaggttagtggctcagatttagtgtggag

SEQ ID NO: 87027 - DNA, 1013 bp, Citrus clementina
  Intron number 2 from transcript clementine0.9_008176m (loc us clementine0.9_003729m.g) derived from phytozome v7.0 (c hr-ID scaffold_6; pos 5605002 to 5606014 reverse strand)
cttgctagccatgtaagtttaatttcatggttgatacttgtgactttaaagtttcgcctagaacagtactcagttttctagttgttcatctatcttaatctgaagatgcagagagtttttgattctccaaaaaattttaccttttgattttggatcctaaccattggattagatggatgaatgattgggttttgaagacaaaatttattgatggacataaaaggccatcttggattaactgttggacatgtgtcaagtatggtatctaatgctctgttgattactagtgagagcatattacgcttacctttttgagcagaaatagttttgttgggtttggccgaacctacatccattaactgctttaaaagagatttttttttgggggggggggggggggggtggggtggaaaggtggggtttagggaatttatgattatggccctttcccactaaagatttttaaaatttcttttttttttttgggtttttttaaaacttatcatgttatttaatcccgaaacctcctttttcccacttttttttttttttggttaacctttctgtgattgggactcccattttgctaaaatcccggtagggaaaatttatggagggacaaaagccctttttggattaaattttggacatgtttcaagtatagtatctaatactcttttgattacaagtgagaccattttatgcttacattttttaacaaaattattttttttggttttgcccgaacctacatccattaactgctttaaaagagatttttctttttgttggaggtgaggtgggggggggggggggtgtgggtggagaggtggcggtaggggatgtatgattatgggcctttgccactgaagagttttactttttgatttgtgagtctgtcaaaatttatcatgttattttagtccagaacctttgtttacatactgttatttactaaactgtaagcttctcttttaggtacttggagcatcttggtatctgttttctataga

SEQ ID NO: 87028 - DNA, 459 bp, Citrus clementina
  Intron number 3 from transcript clementine0.9_018450m (loc us clementine0.9_018450m.g) derived from phytozome v7.0 (c hr-ID scaffold_32; pos 36057 to 36515)
tgcaaggtaattcattacgtacaccaataacgtatgagagagttgttttctgggattaatgttggcacattttaaaatataaatttgaggtagcgatcttatttagctacaaaagacagaaacatcaccacgaaaatttgaagattgttgggtcgttaaggttaatgaaaaacaagaatttataaattaattaggccgatcagctctttctatcgatcggatctaaacacatgggagcttacttttttgttcaattgctgttcctgttacttgagtgtcggtaccatactttttttttttttctctcttttggtatatatatgttgagattagttccggcctgcttaggttaatcaaatgaggaatatgacaaaattatcacatgcagtagtcaagtatcataattcttaattaattaatacctaacagggagtggtgatagaaaaaatccaggaatca

SEQ ID NO: 87029 - DNA, 316 bp, Citrus clementina
  Intron number 2 from transcript clementine0.9_001298m (loc us clementine0.9_001298m.g) derived from phytozome v7.0 (c hr-ID scaffold_19; pos 1475612 to 1475927 reverse strand)
gcagtgtatttgtgcctgagcttaaggaatctctggtatttcttttttctgtagatttaaattttatagctgactgttatttcttaatccagcaattgagtatgcgacatgttccacgcaagtactttatcattcagataactgactggaaatgatgacttattattttattttgatttgtactttgcaatgcaacttgtagttggtatttgtagtttaatttgacaatgagcattggtaaaactaaggaagtttaatttgacaatgaacattggtaaaactaaggaagtttctttcttccaggtcttaaattgcg

SEQ ID NO: 87030 - DNA, 657 bp, Citrus clementina
  Intron number 2 from transcript clementine0.9_023463m (loc us clementine0.9_023463m.g) derived from phytozome v7.0 (c hr-ID scaffold_6; pos 4894410 to 4895066 reverse strand)
atatttgtctactccccgcttttggtggtaccgtaaagttaatccctaaatcatattagtgaatatttattttttgttatttgcatgcattggatatttagttcacttatatgatggattttatgtgcttaatttatgttcatatttaatctaacttcatattttgtgctgattgttgggttgtagtgtctttgatcatatgatcatgtttcagtggatcgttcttgttgttttgcattccatgttatagaatgacgttaaactgatgatcataagttgaggattagtagccttgtggaaatgttttgcctttatttttgttggaccaattataatcttccccttaggtgttaggtgattgtctgtgtcaaatcctccagcagtttgccgaagttttttttttttcactatgtaagtcgtataatcatattcattatcttctatgaggtgggggttcattctttatgttaccttttacttgttcttttggtcttttagttgcaacctaagtctgccagttgttttagaagatattcttgagtggaggttaaagttagaggaagttcagattaaatggacttcatggaagatttcatctcttacatgatatatctgaggcatctaataattttgaattgcatgttgattatatgcagg

SEQ ID NO: 87031 - DNA, 841 bp, Citrus clementina; identical to SEQ ID NO: 78767
  Intron number 2 from transcript clementine0.9_020020m (loc us clementine0.9_019555m.g) derived from phytozome v7.0 (c hr-ID scaffold_172; pos 28718 to 29558 reverse strand)

SEQ ID NO: 87032 - DNA, 525 bp, Citrus clementina
  Intron number 4 from transcript clementine0.9_003415m (loc us clementine0.9_003415m.g) derived from phytozome v7.0 (c hr-ID scaffold_62; pos 352657 to 353181 reverse strand)
gttgttagcgaccaggctgtaaattttcaaaataagtaatgacctattgtgcatttaagcttactaccgtttatattagatctttaattctggcttctctctctctctgtccactcacacacacagagagacagagaacagaggtattctgagtgtatttcctggtgtacttactcatgacttgatcaataaacttgaattttgattgtgctaataatttgaggttatttataaaactatctaccttgggataatattctaattctgagtttgtatgtttttcttcttccatctatgttaaattggttaattagcctgagttttcctttaaatattttggtattaaaatttttctttgcttacaaagccatataattaagcttattatagttgcatcatgtctattcatggactgagagacgaacactcacatgtacgcgtatgcatctacttattacaaaatcatatgtatattggaaaatattattcagttcgtggtacatgctattcttgacagatttggtc

SEQ ID NO: 87033 - DNA, 480 bp, Citrus clementina
  Intron number 1 from transcript clementine0.9_010950m (loc us clementine0.9_010950m.g) derived from phytozome v7.0 (c hr-ID scaffold_22; pos 1452886 to 1453365)
tagaagacacgcattccgctttttctaggcttgaggtaagttttagtttagttttttcaatttctttttttttttttttgtgctttcggtatttccgtttcattgcatgtcaaatttgtatcttgaattcataattatttgttaccttattatgtttattcaggcttaattgttgtgcactcaattgcattgacacattttctggttatttgatatctcttataggtcttcttgaattgtttgtagaagtcttatggttagtcaaaattaggtacttcgtcaattcgtacttttgaaatatgtgtttgtaactgtggtgcttctatttaactttgaaactgcaaatctaaagtgtattttacttgacagctaatgtttctatttcaaaataatagttgtggactaaaagcggcagcacctcattcctgtacatgccattaatgtaattgctttaatgatttttgcagttgaaacaaacaa

SEQ ID NO: 87034 - DNA, 845 bp, Citrus clementina
  Intron number 5 from transcript clementine0.9_002983m (loc us clementine0.9_002983m.g) derived from phytozome v7.0 (c hr-ID scaffold_2; pos 3122863 to 3123707)
ttggtgtgttttttctttctgactgtcacaattgttattttggtactacatttcaacatgttctcactaattctctttagcaatagcaataaatttaatcctactgatatcttccgtagaaattgtgtcacttgcaaattagggttcaaggaatcaagaaattaaaaagataatttggagtaaagccacgatcaaacagagagagaagttacaagagagtgaaaagatagattaaaccgtgtctaggatttaaaaagagagaaagtgggcaaatgagagaaaatgggtcttcataattctccttccagccaaaattttgtcaccactttgaaaatcctaatttagatcttaatatatgcttaatatctaacaaaacacttgaaacaaatacaaataaggtaagggctggaagttaatatttgagatacaaatccaagaaagatgtttctcctcttaaaataccagttcttttggtgaaaaggatcacttaatacaacgttaataaactgacctgcttcaaaaaattttgaacaaataaacatgaataagtaaatatctttatcaaaggtgaaataccagtcagcttgcttaacttcttgttcccagaagttggctttccggaatatgttgtcaaaaatgaagcaagatttttgcagattcatagttggtcatgttttggttgaaacaatagggtagaaaagttagcctcgtaattagtcttacaaaatccctaacaacaatttactaaaatttttttgcatgtcctttttatatcttttatgagcttatctctgctgcatttgctaccaggatcggatatatcatctgggcctatttggttggaa

SEQ ID NO: 87035 - DNA, 1042 bp, Citrus clementina
  Intron number 1 from transcript clementine0.9_034330m (loc us clementine0.9_034330m.g) derived from phytozome v7.0 (c hr-ID scaffold_6; pos 5875812 to 5876853 reverse strand)
ttctgggtggttttcagaatctcagtctacctctggttattatctacaattttttttcaagtccaatttttttttttcattttttgtttagttgtaaacgcatttgcatgttggttgttcaaacatatggatgtcatcattgattcattaactttcctaattttctctatttcagataaaactggcaaaacaatgtacttcaacaatccaatgtggccaggtgggttttactctcatggtttggttttctctatcatctaatccttcccattttggttcgcctacaaagccatttctacttggcatctaggtgctaaacctcttcctaagtactaggaagcttcataaattattattattattttataagaaactacgagtatttgtattaataaataatggactaaatacactttagttgtggaccaggtagctcatgattaccttttgttcataattaccttttgttctctctctctctttctccccctttttttagattgttgtttattgaaactaaatcataagatgttgattatatgtgaaaaaaaactctggcaaatttatacacttttttctatgtggaatgaagacatataaggtcaatgttggacaactttattagacacagtttcttatgctcacttaacgagaaaaattgcttgtttatatgtctctctttacaagagaactgtttttattgtaaatatttacctgtttagttaataagcatctttgtttttatctttagcataccgcttgctgcaccacgtatgttccatatgttgttcatgttcatttgcaggagaggcccattcattgaaagtaaaagaaattttattcaagggaaagtctgagtaccaagaggtcctggtttttgaggtttgacattttcctcttcttactagattgttcagatagatctggcttgttattggttgtttgccttgcctttctactttttctcacattttgtccgtctgtttgttcaaacatatgaggtgttttttcccccacttttttttattgcagtcattggcat

SEQ ID NO: 87036 - DNA, 572 bp, Citrus clementina; identical to SEQ ID NO: 79699
  Intron number 1 from transcript clementine0.9_012797m (loc us clementine0.9_012778m.g) derived from phytozome v7.0 (c hr-ID scaffold_17; pos 659876 to 660447)

SEQ ID NO: 87037 - DNA, 827 bp, Citrus clementina
  Intron number 1 from transcript clementine0.9_010022m (loc us clementine0.9_010043m.g) derived from phytozome v7.0 (c hr-ID scaffold_26; pos 2132269 to 2133095 reverse strand)
tgagctagattctgtggagcttgaactggataaaggtaatttcatttagcaatgtacacgcgcgcgcacacacagagacacacacacacatatatagtttttgtgctgaacaatcttcctagagaaacttatttgcatgtctggtcatgaaatttaatttcatgctttcctcttagttgtaatgtggttggaatttctagggcaataataaggtggccaccaatgtgattatttaaactgagccttttttttttaattctttttgttctttactctcaattcatacagtagatttttgcacctactattattgacagatcttgttatgatattctgatgccaacactgtaaacgtaatatggtttcgattttaaaaaaaatgataaatactgaatcaattcaaagtcatattgttgtgcgattttaaaaaaaatgataaatactgaatcaattcaaagtcatattgttgtgcattgatgtttgataatttcgatgatcttaatgtatctgataggcaaagccaaccattttattcatgacttgctactgcaagttattctttataaatggatagatgaaagagaaaaatggaaggaacaccatattatggttggtaatgatgtaaacaataattggatttctaattttttttttttggttaaataagcacagtatctcctaatttgtatctgcattctgcatatattatcactcgagtttctttcaggcttgtttctgttctctgtttgaattggcattagttgctcttagacaaatttctataactattgagctccactacaggtggttttgccttaaagaaacaa

SEQ ID NO: 87038 - DNA, 787 bp, Citrus clementina
  Intron number 2 from transcript clementine0.9_024176m (loc us clementine0.9_024176m.g) derived from phytozome v7.0 (c hr-ID scaffold_32; pos 1782161 to 1782947)
tgatctgggagtgtatcattcctggcaagactggggttagtctttcttttactgagagaatgaaagttgtgattttttttttttggggggggcggatggggggcgcctttgtataaagttttgatctcgaagtttaaacctttgaatgattcaaggtactgtgtattagttagggcttagaattaaaagttgttatatttttcatatattcttcaattatctgtcaatgtgaggctatcaatgatgttttttaattgtattaccttttatacagcattgtctgatctctgcccttcggggattactgtacagttttgtagttcttatcaattttattcccctgtttcttgtcccgcggctcttttcaagatgcccagtaatttggaagatgtagtctcagtttaaatttgctggatgctccaaattccagtcttgtctaaatgtcccatcaactaaaagatcgatattgttgattacgtttttgagatgcaaacaatatcagatgattagtttaacagacagagtggagatactggtgccatttgcttgtccactattgaatctccaatttaagacaattttatggtgatttacaattttattttttttcccccactgaaaaaaaaaaagaggcagggcttagctttaagttttcagggatgtgtatggttactttcttgttagtacccatagtgattacaatgagatgttactgcctcatttgaatagtaccatccttcttaatcttgcagactgattgggaaggtggctactttcctcttactct

SEQ ID NO: 87039 - DNA, 349 bp, Citrus clementina
  Intron number 2 from transcript clementine0.9_034609m (loc us clementine0.9_034609m.g) derived from phytozome v7.0 (c hr-ID scaffold_36; pos 1186397 to 1186745 reverse strand)
gaatctggtgttttcgaatccggaggctactattggtgcgtctgcacgttcatccatgcttgctttctttattggatttgaattcagtactgagttttttttttttttctaggttattatgattagtagcagatattcgatgaaagataaatgatagaagattataaaattacactggatcaaaattcttctttatcgtacaatatgaattgcattgagagtacccggactcaaaggttctctctctctgtgactggagatcaaatatataattgcttggcgattaatataatttttcttgaatttaatggcaggagattggtattttacccaaagggaaaagggatca

SEQ ID NO: 87040 - DNA, 854 bp, Citrus clementina
  Intron number 3 from transcript clementine0.9_024284m (loc us clementine0.9_024284m.g) derived from phytozome v7.0 (c hr-ID scaffold_22; pos 1469777 to 1470630)
tcagccgtgcttcccctgcagtggctccggtgctcgtaagtaactctttagtccttaaattaaatttacttatttctctagctatatgtatttttgacaattgagctcgaagggcaagggcatacgtaatttcgtccttacaatttaaacattggttggtgattctaaaactcgcttatggttttatgtcgtgttggaaaatttaggatatatgttgagtgtttcacaccgtgctaaataaaaattatgtaattgcacattatgctttgatgtcgttgtctcgctgtattggtgtattagtagtccaaacatttgtttattttatctgatgtttcagaagagactaaatgcatatttatttaaacacttgtttccatccaatttcagaagcgcttctgtaaacttttttccccctttttcttcatcaactctattgtcttggcccacagatgtgtatgttattaaattccgaaccaagcttagattatgggttcggtgtatctcttactttgattttgttttcaacttagaagattgttatccacaatttacacatatgcattgaaagttactcacgttctgaagtatgaatcagttacattttgaccagtagcatcaaagggagccctgctatgaaatttagaatggtaggatcatctttcttatatagtgccattaaattctgtcttcaagtttccatttcttacctatatagtgtgccaatgaaatttgattagtactagctcaatataacaaatatttttcatggttccttgagatgatcttacgggattccttttatatggtattttggtatcatgtcaccatctcagccctttatggcatctagaaag

SEQ ID NO: 87041 - DNA, 469 bp, Citrus clementina
  Intron number 3 from transcript clementine0.9_016626m (loc us clementine0.9_016626m.g) derived from phytozome v7.0 (c hr-ID scaffold_55; pos 436689 to 437157 reverse strand)
gaaatcctaaaggtaaaataaatttagctcattgctcataacaagattgttgaaacaagcatgattaaggccctgtttgttattgcagttttaatattatggccaaaaactgttgtagtatagaagatatagtaaattaatttagggtctgtttggtatggtagtttggaaagcttaaaagcaattaaaaagtgtttggtaaataattgcattaaactaagatgattttatctaatagttgtttgattaaaacttataatccttgactaattttgtcaaaaatactgtcttctttttttttttttttgtgagcacctcaatactaaataaatccaaataactgtaagataaagtaattactaaacactttaactgcttaactgctacatcacaactgtaacaaaatagtttaatgaatctaagctaactggtttcgtcatttgattttcagctgtttataacaaggaag

SEQ ID NO: 87042 - DNA, 665 bp, Citrus clementina
  Intron number 2 from transcript clementine0.9_032312m (loc us clementine0.9_032312m.g) derived from phytozome v7.0 (c hr-ID scaffold_55; pos 120346 to 121010 reverse strand)
gtcctccagggactggcaagtcaagcttgatttgcggccatggctaattatctcaatttctatatctatgacttggagttgtctaatcttcggtggcgtaatggtgtgcgttgatggtggggtggctaattggtagaaaacagtgattggagtgcccgtgtggatacttgatggatggaccgaagttacttggctattcgttgcttttgttaaaggtcataggcccgtgtgttgtcggccttcttttgaaaggaaggcattgtaattggttagtcggtttgcactttaaagtaggtgagtcggtggtttaatttaaacaatttgttttgattatggtttggtttacgtagttttgtgtttgtcaatccttgtagtttgttgtgattggtggatttcaattagttatcaaatttagtttattggaaggaatttgaagaagttgaattaatattcggtttcccgctcagtgtttggctataaatatgtgttgatcggcttcattttgggagcaggagagcaggatcgtagaggttagagagagaatggagaggaaaggtatgtgtggttctcatttgagtttcagtaaggggtggatgcatagtatagtttctgaaatatgtgagcatgattttgtgtttgtattaatcccttttaatatggagagg

SEQ ID NO: 87043 - DNA, 495 bp, Citrus clementina
  Intron number 1 from transcript clementine0.9_017607m (loc us clementine0.9_013626m.g) derived from phytozome v7.0 (c hr-ID scaffold_80; pos 903867 to 904361)
ctctcattctttcccacatcgccactcaccataaggtttgattctcttgccttttttgtttaatgaaaaaaaattgtttcacataattaggaattttagattcttaagggattattgaaattcaactttttgctcatatggttttgtattttgacttcaattgtaatttgctgtctaagcttctgtgaaaacccgtagtatttgaagcttatctgagaaaccaattttgtcttttacccaaaaaaggtatttttctttttaataaaaatctgggttcaattattcaattgctttacactttaattgagcgttagtgagtcaagtttcaagggtaacaacgtttgctgctagaatttagtgggtggctcgagtgtccaacttgaattctctgagctgcttgggaatttctgatgatgaacaaacaattacactaagtacagttgtgcccgtctatcttatagttttttattttattgattcttttctatcaggaag

SEQ ID NO: 87044 - DNA, 513 bp, Citrus clementina
  Intron number 2 from transcript clementine0.9_017607m (loc us clementine0.9_013626m.g) derived from phytozome v7.0 (c hr-ID scaffold_80; pos 904469 to 904981)
ctgagtcatttgcttgaggtatttcagaataattgttgggcatctttccttttccacagagttctttttcaagagtacattcattgtggtctttttcctgttgcatggcaaaattcctctgctgatgtcttgttttataatccttcatcaagaaaagaactttcaatacctagttagtgggatccttttcatattgtttgtgccaattaaagatcaataattttgcaggaattttggtttttgagaaatctgaaaaaaaccatggaatttgtagcgtgaagcattggatccctcacagagaactccaaaatgcaagaggttgcaattttaaacttgaatggaccagtatcaggttgggagacctcctgagaagctccatcaagtaagcctcattcacgcaatcttccgaatcgaggtttggatatgtatgcttgcacttaggtttgtcaactatgcagtggatcactgctgattcatttgatttgctgcagaggccatttcgctgctcggttg

SEQ ID NO: 87045 - DNA, 708 bp, Citrus clementina
  Intron number 2 from transcript clementine0.9_021916m (loc us clementine0.9_021916m.g) derived from phytozome v7.0 (c hr-ID scaffold_19; pos 424528 to 425235 reverse strand)
gcagctcctgtcagcagttactcggctggagatatgtaagtttctcttctcttctcttctcattggttcaactaggatccgttctcctggatattacaagttttgaatttgatgttaccccatttcacctgttttgtagttttttttttttttttttttatgttctttctaagtaaatttaattacaatgcattagctcgagaaatctactgaaaaatttgatacatgctagatgctacaaactggaaaacagaataaaataaaattcatgtggatttgggggggcaattcagcattcatgtgtaaatttaatgccatagcatatttgatattcttacaatgatcatatttgattcctgtaaacgcacctcttgttattggggaaaaaggaattatggctgtagggtttgagtaactgatttactgctaccacaggacatataaaaactattctctgatatgcatcaacagccagccaacaaataggattactcttttgcgcccgccctagtttattataaatgtttttcaacataaattaatattgttttgtttttgtggaaacaactattttatttgtaatttgtaaatttgtatgtagtttttctatggttaaagtgatgtcgcttctcacttgaagcttgctaatgttgcttttatcattttttggtcttttgttaaaattccaatgactccaggagaaggcat

SEQ ID NO: 87046 - DNA, 513 bp, Citrus clementina
  Intron number 1 from transcript clementine0.9_020977m (loc us clementine0.9_020977m.g) derived from phytozome v7.0 (c hr-ID scaffold_42; pos 313093 to 313605)
ctctggggctctctcattgggtatatcgctaacaggcaagtgtcttttgtttcctccgcagctacattgtagaatgtgcattttttcgcttgtgggtgtttcatttctgttaaatttgagttattatatatttacttgacatgtttcattcatgtttagtttttattaattaatggtggccttggtttgttagccgcacatttatttagcttcaatacatgttaatttgaagataacaatggattggttatatgttgtatctgcattcacgaataatctttggcatttgtgttaacattttttttttccgcccttacttgattttgtcaattgatataatatgggtatggttttgtttttggtaactctcttccagagattctgattgctagtgctagagcaatgatcttttttatttttttattttttcgctgtgtcatataatatttatatattcttttaatatacaatgcaatgactaaaacagaatcaacgaatgtttttaggagtggg

SEQ ID NO: 87047 - DNA, 653 bp, Citrus clementina
  Intron number 1 from transcript clementine0.9_001377m (loc us clementine0.9_001375m.g) derived from phytozome v7.0 (c hr-ID scaffold_26; pos 3383341 to 3383993 reverse strand)
tggattgatctcatttttacacctgaactttaacagtgagaacttggttccttccccaactttttgttttctttgacccttgtcttcccttgtatcattttttcaaaagcaaagcactttcttggaaattttgcccattgtatgtataaagaaaattaattgcagaataaagtcgactcaatttttaagtggagttgaattaatggacttacctctaggactaggattgtattacactttatttattttttaatcgttccattttataatacagtatttaaggtgaattctagttctataatgaattgcaaatttggcattatttttctttttatttgtgtgtgtaattcatggtatgaacaaattctatttaaattactatctgaatgagaaagctcagtttttcaggttagaaacataccttggtcagctggattttcaagtttctttactcttgtttttcagttgatttataaaagaaagcctaacatttttatgaacagaacagaatttttacctcattctttcagcaagaactggttttagctttgaactttctttcgcttgtcaaaatgcagtgagtgtatttgcaccatgtttcgtgactgggattaaaatttaaacatgcaggattttgagaagatagttcaaat

SEQ ID NO: 87048 - DNA, 838 bp, Citrus clementina
  Intron number 1 from transcript clementine0.9_025121m (loc us clementine0.9_025121m.g) derived from phytozome v7.0 (c hr-ID scaffold_73; pos 335803 to 336640)
ttacagaggattcacttctaagcttttcgtcaaaggtattctctctctgggagtgtttctattatgtcatcttttttctttattttgcaaacaaaatattatgtgatggatcatgttaaaggaaccgattgtgtggaatataaattttgattagggaagttcaagatccgattttatattgctcaaattaatcaatcgaatccaaatggggggtccttggttctgatttttgaggttgtggtggaatggacgaatccatatatttgaatactgacctagagatttctttgaataattttatattgttgctcaagtgatgttgtttcattttttcaaaaatcaaagccactctgattttattttgaacttttctggtgaatagtttcttcaccttgtagccttatcaggtcgttaattattacattcttcactgtatagtaagaccatccggtggtttaatcacgcagcatgtgatttgtgaatgtgagcttctgtagatgcatcagtaggtttttgctcgttttcaggccctctactctcatagggaaggcaattccgttgtccacagttgcattggaattgatgcttttcttaattatctggattcatctgtttgccctttttggtccaaaatatcaaacttagccacgcatctatctaattcccttgaacttgtaaatgtttcacaagtaactgagactgaaaacatgttcatattttttatttccttccttcagttgtgtactacttttggctgcagaacttgcaatcttaccatctaattgtgataaaataattggcatgttccacaggcgtatctttctcaaccactgaagag

SEQ ID NO: 87049 - DNA, 314 bp, Citrus clementina
  Intron number 1 from transcript clementine0.9_004918m (loc us clementine0.9_004918m.g) derived from phytozome v7.0 (c hr-ID scaffold_9; pos 2030251 to 2030564 reverse strand)
cctgctctcgtcaactaccgtggtacggtcgtttcccttttcttggcttttgttttaggctcttggtttgtcaagatatgatttctttatcatctgcttaggacgtttagatttgattcaactgataaataactttagctggatgaaatgatctgttagctgaataattttgttaagatatatttttgtgggtactttagtggaagattagtttgggaagaaattgatcttaggaattagttagcaattgaatcaatcattttactgcagatttagctcattctaagtgccttgtttgatgggttttgcaggag

SEQ ID NO: 87050 - DNA, 843 bp, Citrus clementina
  Intron number 1 from transcript clementine0.9_008103m (loc us clementine0.9_008092m.g) derived from phytozome v7.0 (c hr-ID scaffold_80; pos 621889 to 622731 reverse strand)
ctgacgatttgctactgccatctatctctattctagtaagaataaactacgtcgtctcttgtctgcggttttttttttttaaaaagaaaatataaaatcctttaattagggttatttcaaagttttttacaagcagttttcttccaaaatcttcatttgtaaattggcagtccaccatatgattgttatttaattttttttttgtcttttttttatttttcttaagtttctatttgaattcttggggtttagtgaagcatttgaaaccttaattaatagaagaaaaatatatttttagtgattataatgttatttggtaagttctatcgctgtggagacagctttcatttcttgcctgctgtaaggtgatggtaacatgcaggagttattcgggttttgaatttgacttcagcattgtcattgacgtttcttgattttgataatcttattgaattttactacaattttttagaaagtggaaaatgggttaatttcaattgtttaaccatatgaattccttcctaatcagtctttgaatatgtgaatacttcccataatctgtgtgataattgcaaactcttgactgatatgctttcaagtgcttcacataatttgtacactgacgagaagattttgtaattaggaaaaatgtaaactttgcattcttatcttatcttaatttcaatctttttattgctgtagttgagtatgatttgtcactgtactgcttctagttctagaacttgccaagtactttcataattacatttctcattttccctgctagaaccagcttgcttattgttggtatttcttgtatcaggtcataactgagtgattgag

SEQ ID NO: 87051 - DNA, 836 bp, Citrus clementina; identical to SEQ ID NO: 78298
  Intron number 2 from transcript clementine0.9_019714m (loc us clementine0.9_019555m.g) derived from phytozome v7.0 (c hr-ID scaffold_172; pos 28723 to 29558 reverse strand)

SEQ ID NO: 87052 - DNA, 530 bp, Citrus clementina
  Intron number 2 from transcript clementine0.9_008595m (loc us clementine0.9_008595m.g) derived from phytozome v7.0 (c hr-ID scaffold_9; pos 2092725 to 2093254 reverse strand)
gaggaggcttgcgtgctactgcttggaaggtagggcttaatttttctgtcactattatgttgtgatcatgtaaactgctaacaatttcgaagtataagaattattcgagcagggaaatctaacttgatttgtgactttacacctttgtcagtgttgaagcttactgcattccaccagaagcagtaggaatttgatataatctgataacactttttaatggatattgatcatggtcgcggaagaagaagacctcaaaaataaaagattaatagtggcacttgaatccccctcccttcttttttcatcagtgcttgttgattacgtatatatgattaattatgctaacgcttataattttgaaatgtgaaaacttgtaaaacaatagctatgctaccaccaataatgcagacatttcagtgacaaaattatatgaactttaactgattgctgtttgttttgaattgtgtatcatttcccttgcacgttttattacagcagctgctcttaggttatttgccttcttgtcgtga

SEQ ID NO: 87053 - DNA, 460 bp, Citrus clementina
  Intron number 1 from transcript clementine0.9_008595m (loc us clementine0.9_008595m.g) derived from phytozome v7.0 (c hr-ID scaffold_9; pos 2093284 to 2093743 reverse strand)
ataaaaggtccgatcttgaatacgaggtgagaatgtgatgtttcattgtttaattttcttgtaagtgctcttgagtttcatttgtattgaaatattgttcttctaagttgaatgtgtgttttttccccagctcgtatgtatgcaatgtgacaaatggaaagtttggtattaaattcttagttcttttctttctgtgggtaaaaaaaaaaaagtaaattagggtttattactcgtattgtgcatgtcatcattgattgttaaaaatgatttttgaaaattgatgtcaaatgcttcattacttttttcttttgatttattcctcagtaaacaaaaaggttatgttgtttacgcgtatcctccactatttgtaatgtttgataatttgttctgcattgcttatttatatatttatattatgtggacagctatcacagaaggagataaacttggaaaagttaca

SEQ ID NO: 87054 - DNA, 698 bp, Citrus clementina
  Intron number 1 from transcript clementine0.9_028067m (loc us clementine0.9_028067m.g) derived from phytozome v7.0 (c hr-ID scaffold_42; pos 767518 to 768215)
gtggtcttgcctactacactggtattgtttttgaggttagatgtgggaaatggtctctcttctttaatctttgtatacgtgcgtgtttcgcattcttatcaaactcaaagtactcgaactcaatttcgcatgaatacatgaccaccattcaccaaccacttgtgtactgggctgactctctcttctttaatctatatgtgtacactttaatacaagttaaagttaaatacatcactcatgtctacttgtatcatgctgtgctggtggggatgatgcaccttcctaagctacccccaactatggcattgatgttatccatatcaaggttgcttttggttggcatatttctgtttcaggatcttaaatctgagaacatgactgatgaccatacttattccaaaaaaattttgaagttggagaccttaatggattcaaggatatagaaatctacatacacaagtgcattatttaggtgaagtatagctaaatatcatccaaattaaaatttgtaattttcttttcgcctatcaattgtcctctgttgatagaagtaatgatcaaactaaattttttctttttaaagtatcagccatcgtctattgatagaaatagaaattggaattgtcttcttaccttgcttatgacttaaaaaatccttgacagtgttttgacagggacggaaagttgagagcaatttg

SEQ ID NO: 87055 - DNA, 693 bp, Citrus clementina
  Intron number 1 from transcript clementine0.9_011310m (loc us clementine0.9_011167m.g) derived from phytozome v7.0 (c hr-ID scaffold_22; pos 2178970 to 2179662)
cgaaggagacgacgacctgaaacggctttttggtgaggactcgctcggcatttttctattttctcttatagcgatttgttaagagttaaaaaagttttgtttcgttcaagttatcgagaaatttgtccaaattgtctctcgtctctcttcccgattcgctatttatttagagaattcgagatcttacatgaatttgtctctcatttggttcatgaatctgtcatctctatcgtttacgtgttagatctggagtttataaatttatttccttttttttttcaattcttaatttttttatctaattaattgtctatttatttgtttatacgcttcaaattttcatttttgcgatgacgctggttttgttatagttatatacatataacggagatatcgttaaaatcatcttgtaggccaaaacgtttcggaacttatagaaatttgtgctttacaagtgaaactttgagctatatatatgatcgagccttcatttttagtcatgaatctcaatcaaattataatctttacaaggcagcaagccatgatctgtgacataaactgaagaatagaaacatagaagcttatacgtcatgtaaacttaagcaattagatgtaaaaagatagtaaatctgtatgaaattgtaattattatttgcaattgtttctgtagtgaaaattgctagttgattgaag

SEQ ID NO: 87056 - DNA, 697 bp, Citrus clementina
  Intron number 3 from transcript clementine0.9_011310m (loc us clementine0.9_011167m.g) derived from phytozome v7.0 (c hr-ID scaffold_22; pos 2180172 to 2180868)
tggcgcatacagactttatcttggtctcagcccaggtaaaatattgatatgtttttatttttttatctctttttccttttcttctctgggttttactaatggatttgaaacaaattggtctcagacccaggtacttgttgcttttttttttaattaaattttttcccttttctttgttggaatcaacttgtatattttaaaactaacaatttggttagataaaccgctaaatgtacttttctttttctaattttgaggatcagtttatttagagtccactgaggagaatgcttcatccagtcatacaattagtttttatcttcaaattgcttatcaaatctgtggcgtgatttgtggttgatactctgaatattattgaaacattagttgatcaatgtagcagtacgtttgatataacatgtttgaaactcatataagaacttagctgtggtctgtggggttatcatcttatttgcaactctccagggatccaattgttgaaatctcacatttttatttcattctatataattttctctgttgttgatattacacttgattattattattattttttatgttccactcctgatgatttctttaatatcagatgatcaagagggataacaatcatttgtttcagttgctgatatactctgctgataattttaattaaacaacagctctttcaggtgat

SEQ ID NO: 87057 - DNA, 359 bp, Citrus clementina
  Intron number 1 from transcript clementine0.9_000736m (loc us clementine0.9_000682m.g) derived from phytozome v7.0 (c hr-ID scaffold_62; pos 292551 to 292909)
tgtttttggaaaacaagagaaaacggaccgcaaaggttagtttcaatttccggtttcgctttcataatctgttctggtttttgtcaaacaaacttaatctctttggtcactctttatcttcgtaattttcgtaatttttttagtgaaacaagcctcgttttggcaaattttcagtttaaccgttttgattttttgattttttgattttttgcaacaagaaaagcaaaaccgttttttctgcttcctccatttttgtgtgtgcgtgttctttgttatcttattatcaaatttcaataaattagtcctaaatttttacctattctgaatcttaattagggttttgagctcagttttcggca

SEQ ID NO: 87058 - DNA, 809 bp, Citrus clementina; identical to SEQ ID NO: 81358
  Intron number 1 from transcript clementine0.9_022823m (loc us clementine0.9_022823m.g) derived from phytozome v7.0 (c hr-ID scaffold_6; pos 5530600 to 5531408 reverse strand)

SEQ ID NO: 87059 - DNA, 673 bp, Citrus clementina
  Intron number 1 from transcript clementine0.9_007017m (loc us clementine0.9_006911m.g) derived from phytozome v7.0 (c hr-ID scaffold_34; pos 61580 to 62252)
cgaaaaaggttttattttttatttattggaacttttaaatgatttattttgtctgggtagtttctaaatttggtgggaaattcagtttagttagttaatgctttagtttaatatttagcgtatgtttgtgctgctgaagcctgaaagctcattattcatgtatttataaatgtttctttgttaagtttacgtgggcagttgctaaactgatctttttataatgcgtgtttgatttgatttttagctgaattcatctaggcgtttacttaacatggagcgaaattaaactcagtaattggttccatagcaacaaaataatgatagaacatatgatacatttgtaattaaatcctgtgctgttattctgatcctgctccctactaacaagaggaatattttttttaaatctttaaatttggatgcctcttattggttgagcagcttgaaaatctaattgtttctcttcttaaattttatctgtttactaaagtggcttttttttttttcttggaaacgacttatatattcatttatcccaaggagataagagcagttgttaggttatgttccactgtgataagggaaaatttatctgtggtaatgtttaatcaggatactaattggtgagtggttttcagagtgttcgaggaggatttagggtgtttgctctatt

SEQ ID NO: 87060 - DNA, 315 bp, Citrus clementina
  Intron number 2 from transcript clementine0.9_007017m (loc us clementine0.9_006911m.g) derived from phytozome v7.0 (c hr-ID scaffold_34; pos 62450 to 62764)
aaaaggtctcagtaatttctggactcttcaattattaagaataactaattgaaatcatatagctatacaagcatttatgtttatgcttatgcttaatgttgtggaattttgtccctgaatcctaaatcattcagaaaaacaaaagatgccaaaacaaaatgtctataaatgagttaaaagagatgatctgatttgattttatcttagaactagaataaaaggatttaagatttttattgcttcatttggataattctcacatttataggtattggtgtaggttgtggaagttttaaatcctttagcacgtgatta

SEQ ID NO: 87061 - DNA, 644 bp, Citrus clementina
  Intron number 2 from transcript clementine0.9_006121m (loc us clementine0.9_006121m.g) derived from phytozome v7.0 (c hr-ID scaffold_9; pos 5269834 to 5270477)
cccgtaccaacaccacccctaagtattttatattgcttccatttgtctatctctatttatgctatgcttgtaattatgggagctagtgacatcggggttgccgagggtttagatttatagttatgttattttcagaaaaaataatggtatggtttataattagtttatttgtaaatgtactctttaaaaactttaactgataagtggaggtaaatagagattgaaacattgtttgtgtgattcatgggcttttagaatttaacatttgtctgttattctgaggttgttatatgactgttctttgagtctgaagtttaactgaaaagtctaaggaatgatggagtgttttggaagttggttttcaatgcaaatggattaaggatttgatgattttggtattattggatccaaaataattggatgggtcatgcatgaagtgtcatgtggcatgaaaatgtccagggaagtttgaaaaggaaaaattttggaagagggaattttaattttttttaataagaaacaaaagagggaattttagattaaatcaattaaagatagtcattttgttgctagcagttttattgagttaatgatataacatttttgagctgtctttcaggcaagatattttgggtcaatattct

SEQ ID NO: 87062 - DNA, 723 bp, Citrus clementina
  Intron number 1 from transcript clementine0.9_000391m (loc us clementine0.9_000391m.g) derived from phytozome v7.0 (c hr-ID scaffold_32; pos 1450264 to 1450986 reverse strand)
ttgagatagatctcactgattttccactcaggtacgctttatctgcaacgatccgtcccacatttgtttaatttttttgataaaatttggattatttttaacatgcaatatctgcgtgcatgtgttcattcattgcaagtggaaatggattttggtttttttgtcagttgagtgtagtttttttgtaatgtgaaaatgcaagtgggttttggttaatttggtattccgttttggttttgaaggaatcagatctgatttatgtaggaatagtgttggtttctttttttggtgcatttttttattttgagttgggtttttggatgaagatccaatttttatttttggtaagtttttgggtctaatactagtagttctatagctattgcctattggttatttagttgtttttttatttttaatactttttggactctttttagtgtaatttattttcttttccctggaaatgtaggctaatgtaaaaacttgtttccttatttgacttgggtatattgaaaacttgattcattctttagcaaattttagtatattctgtttttcaggtgcttagatgattaactgtaatttctttttctggagaaaatggaaatctagaatttatttggtttttatttacttgaattacctgagtttgctttggggctttgctattatttgattgagactttgaggatctgggctcaattttatagagaagtacac

SEQ ID NO: 87063 - DNA, 500 bp, Citrus clementina
  Intron number 1 from transcript clementine0.9_017933m (loc us clementine0.9_017933m.g) derived from phytozome v7.0 (c hr-ID scaffold_147; pos 144417 to 144916)
ctcagcttaatactctgtttgcagccctcaatacggtaccgcttttcatcattgacaccacatgcagtcttttcttttcttttcttttttttcatttattgatttattatcatcatttatttattttagaagattataaatttttacaatctttggttttagctgtaggggtttctttgtttttaatggttttgtggctagaacaagaaatttcaagattagtttaatcagcctcattattttcattaatgacaattgaataagatttttaaaaaaaattcttctctttttttttttaatgtgctttttgtttggattggaattagaatttcacatgcaattgcatttcctgacagagacatatcaatcaattggatatgatatgcacatgcaatgtttattttattcatttctatttttcgtaaaattcacagcactctaatgtaatatgttatgtatttgttgggtaatgttgcataatttattaggcgtttgtgggg

SEQ ID NO: 87064 - DNA, 551 bp, Citrus clementina
  Intron number 2 from transcript clementine0.9_017933m (loc us clementine0.9_017933m.g) derived from phytozome v7.0 (c hr-ID scaffold_147; pos 145008 to 145558)
ttcttggttactccacacagcttccgttgcctcaggtacattttcaacctcacttcatgagttcaactacatttttcacaccaatgccctttattgcttcgtttgagtcatcatggaatcaatattttggtttggttgccaagaaaagaaaatttagtgatttaactagtagtactttcttgggatattattaaaacaaagggagtagatacatgcctgtaattggtaagtaatgaaaaaattatctacggtaaaccgtgactggtgactacgaatgtataagttaatgaaagagtgtctatgtttggtgtaagcttctagaaattataggaaaatagcttccaatggaaaaattaattcttaaaagggacgagattctctcttgatttcagccaagactaaaattttgtagtgtacaatttctcgtttgtggtttctttgggttacattcaatagcataagcagtgtattatagctctattgacgattcagtcacttgttgctcatcgttctcagggatttttgggttctggcgtggattttccagtagg

SEQ ID NO: 87065 - DNA, 855 bp, Citrus clementina
  Intron number 1 from transcript clementine0.9_013430m (loc us clementine0.9_008405m.g) derived from phytozome v7.0 (c hr-ID scaffold_9; pos 1299014 to 1299868 reverse strand)
gtggccctggggtgctaggttagtagccacgattcttcataagttccccactctgtcttatattgtatgtgttttttttgtgctgtttgaatagtggctgtagttacccgaattagatggtggtggtccttgggcttggatttcttccatcttatggtcaatttctggttttagttcagcgcgtgtcataaaacttgattttgattctgaagtgatttttagaaaatagacaccatagaattggattatctttttttcttttggcccaaatcaaaccggttttggtggtatatgactgtcactagaaaaaccctgttagagaacgtctcacatggtttaaagattcaaaattattttctttaaccactaaaggcatttcttttatggtaatattatatttactgagtcgggattcatagtttgtatctcaagtgatgaatcaccaatcattaatggtcatgtttaagttttggttgattttatcatttatcaatagggtgtcaatcttgcaacgtcagatgccacatcacttgcggtgcaagctatgtatataaacaaattcttctattattattattattattattattatttatttattttcatatttgtgattttactgggaataaaaatttgattgtgttgttatgctgttgcatgttgtttgaagcctaggccaacatgactcatgtaaaaattggttactcagaaggttaaaagtgtattggttttacttgaaatatcctaccttattttttcaacagagtggatatatatgttataaccgacactatttttaaacttctgttgtaaaattgacttcttagttcacctgttttgtgatctattttaggg

SEQ ID NO: 87066 - DNA, 524 bp, Citrus clementina
  Intron number 2 from transcript clementine0.9_025950m (loc us clementine0.9_025950m.g) derived from phytozome v7.0 (c hr-ID scaffold_2; pos 5864695 to 5865218)
atattaagggaatccttggctctggtatttatttaatcttttattttaatcatgttgttgttttttttaaaaaaaatagggtctgttttcttatttcttcatgcccttttaaccatgtaagcttggaggaaaaacatttaatgtcaacatttataatggaattgtggtgttattgatatgcttagccagcactaaattggatctattgaacttgttttgtttaaaaataataataataatcatgacccttttgttccaatttattattgtggagtttgaattgtgtcattctggtctttgcttgtatgcagctctatttatttgaaacttaccatctttatctttttggagtttaatgaatagctctgctatagtataggatgagcatttgtgttattagtagagtattgagaatgtggtattgttgtcattcgtgcgcatcatttcattcttgcacctgaagggctgaaatatgaatctgttgtgcagttggagctgattgcgaggacaataggcttgagctc

SEQ ID NO: 87067 - DNA, 542 bp, Citrus clementina
  Intron number 6 from transcript clementine0.9_013478m (loc us clementine0.9_008777m.g) derived from phytozome v7.0 (c hr-ID scaffold_22; pos 2234537 to 2235078)
gagaatactggcagttttaggtagttcttgtgtttattgattcccttggccttttttttttggaaatctcttagatgaaaaggtaacagttgtaaaattttgaggaatgggacggccatattgcaatttgtaggtgagcaatggcagccaaatatgtttgttacagaggaagcatcgttttccataattttcatattgcttttgcaaaatgtgaagacatttcaggatataattcttttataacaccatcctcgcatgatctttgagttagctgtggtgaccagctaaaaaagacaattctcaacaagctttcttcaattcattgctggtgttcaagataattcttcacatactagatcttgcgcttttttgttacattgtcaatttgcacaaacaccttaaatcactagttgaagctcttcctcctcctttagaggggaaaactatctcaatatttgatttcaatatgctttattaattaatggtgattatattatcgcgttgaactctgtcaacctttttcttcttgcaggaatattacc

SEQ ID NO: 87068 - DNA, 439 bp, Citrus clementina
  Intron number 2 from transcript clementine0.9_012616m (loc us clementine0.9_012616m.g) derived from phytozome v7.0 (c hr-ID scaffold_22; pos 3355431 to 3355869)
gagttcggattgtctcccagactgaaactgaagctgtaagatatttatattgtgataactatgttgaaatgaatggtattgttcctttctttgaatatctgttctttgatattttaggattttagattttttatgcttgaattaaagtggaactagtagaaaaaagaaggagaaatatgaaaaataaaaaagaaacttgaactcactttcttgtcgaattcatttataattagatagtatttatgtatggtttttgtgacattgtcttaatgtagtgaacacttgtatttgtttatataattctgtgattggaatcgcaattttgcatctctggtttctggatctgtgactatttctgactaatttcttgcctcatctgtttatgtgtatgtctgtttgctcagccaccgccgattaagccatctgacaaccagttgaa

SEQ ID NO: 87069 - DNA, 797 bp, Citrus clementina
  Intron number 4 from transcript clementine0.9_008252m (loc us clementine0.9_008239m.g) derived from phytozome v7.0 (c hr-ID scaffold_6; pos 727904 to 728700 reverse strand)
ttctctggttgacacagcattcattggccagataggtttgtgtttgctatacccacctagtttcctgaaacattatacttcatatttgatcttaattcaaatacgtgactaattttggatatgtaacactgaatgtttttttcctttctgactgatgatgttattaccactgcatctatattactctgtggtaatgtcaacatgaagaattaaatgaacacggaaagtgtcaaagacgattacaaaataagaactttattccctctaattatagtgttgaactagctgcttataagttaagatgcatgtcaaagtactaaaatcatcataaaattttggttctgttgcttccaaggtaatttaatgactgtatcacatcgagaaacaatgaagtttaatatgttatttaagtttctttttgctgtatacataatagtgtgagatttgacataatttattttttaagcaatcaagtaaaagctgtgaagtggcataaaaataacaagatttgttttctttctaatttcttaaaatactgattaaagattgcatttaatagatgaacaaacaatgcccttctcctacaaagcagtcattatcagttgttcattttcgtttgtacctcttcattagttggtagacatgaataccatgagcatttagttaattatgaaatttttcattagttatcaaaaattgagctcatactgagccagtagattatgtaatatttggtttctttttaacttttcatgcataaaggacctgtggagcttgctgctgtgggagtttccata

SEQ ID NO: 87070 - DNA, 1030 bp, Citrus clementina
  Intron number 3 from transcript clementine0.9_022920m (loc us clementine0.9_022908m.g) derived from phytozome v7.0 (c hr-ID scaffold_19; pos 2878161 to 2879190 reverse strand)
gtagtgcattttgaagtatacggtaagatgcatgattccttttttatggaggaagcatgtaaggttcatcactcaatatctttgcatcaatgtgatctagaaacctaaatgctctaattaaaaagtgtgcccattgaggattttttgttcttagtagtctttccatcttggtttttgtgtagatgcagttgaaaaaaagaactgtatttgactgtctagctatcgacacaataaccctaggtaattaaagtgtgattagagttctgtgtgttattaattaattctagttaaactacggctagtgcagcagcttttgaatatttcatctggtaatgtgttcagacgactatttgctttcaaatgctacgataattgcttgattaatattggattacacttagttgcttgattaattttgggttacacttaatttgatgatcataatgtggatttgataaagctagcgttaattatttatgcttctgctggttatatcttattggctacaaatgggcacatttgatctggtctgtttagattaatatataaaaatcttgacctctcaatgttccttgttcatcacatgttgactttgacattccttccattcttatattaaatagctagattaacatgtaatgtttacatacaagtacagcatgtatcttctaaattgttagaggagataatcaatttggttgcgacttttgaatttgagattggtaatggaaaatcatgtttgtattcaacttatatatacaatagatatatatggctactagttttgaagactttagcaagatgagtggcgactggcaagagtataaagatcttctaaacgtgtcaaattgtttgtaaaattagatacacttttttttaggtgtgaaaaaatgagttttttttttttgaaagagtgaaaaactgagtttatttccttcttcttcccttttttttgccctttctttttccccacttcaaagatgattgatgactggtcatttatatgtttgaagcagtcaataagactgac

SEQ ID NO: 87071 - DNA, 428 bp, Citrus clementina
  Intron number 1 from transcript clementine0.9_032929m (loc us clementine0.9_032929m.g) derived from phytozome v7.0 (c hr-ID scaffold_110; pos 422465 to 422892)
cgacgccgtttttgatcttatagctcttcccgtatgtattgcagctcacctcagctcatgctaatttatgtgatgtttgtataattatagatgattattgctgatactgaatgttaagctaaataattcgtcgttaagtcatcttcatttaattttcgattgaaaatgaaaaaatagtaattttgagcaaagaaaaatatagaaaatgttttttttgttttattttaatttttaatttttggagatttccttattgtgggtgttatcattcattatatggccatagttaaatatttcaagttattgtagtcagtgaaactcttttcgatatttattctggcatgtatatttttcctttcaatttcttttgttgctgattctttgattgattatgttatatcctttttttgtttcctttgtaaggtggc

SEQ ID NO: 87072 - DNA, 384 bp, Citrus clementina
  Intron number 2 from transcript clementine0.9_010653m (loc us clementine0.9_010653m.g) derived from phytozome v7.0 (c hr-ID scaffold_6; pos 3953600 to 3953983 reverse strand)
agactgttagagtttgggattgtgcttctggacaggtttttcttttaaattacttttcttttcttattttgtaagttgaattaattttagttcttatatgagttagctcgcttgttggaatttagtttttgattatctggtcgaactatgaatgtatgtctgaaggaaaaggtggaatagaaagaaagttattggtcgtaaacagttgatacttgatgcattttgtcataatcattaatcaaatgtaaatatagatgccttgtgttttcatttctctacattgtctctttgtatcgcgattgagaagcttattaattagcggctgatggtctttttctttttcttttagtgtgcaggtgtgattaatcttggtggtgaagttgg

SEQ ID NO: 87073 - DNA, 203 bp, Citrus clementina
  Intron number 1 from transcript clementine0.9_024101m (loc us clementine0.9_024101m.g) derived from phytozome v7.0 (c hr-ID scaffold_22; pos 1936300 to 1936502 reverse strand)
accagttcatctgctccttcacgcaaggtctctctctcactctccatgaacgaacaaacaaacgcgcataattatttacttattttttgaacgttgcctaatttcgttttaattcttttctgtaatttttgatttgattgtattttttgacttttttattttgcgtaggctttaagcaagatcgcaagtaatagactgcaaaa

SEQ ID NO: 87074 - DNA, 770 bp, Citrus clementina
  Intron number 3 from transcript clementine0.9_006369m (loc us clementine0.9_006367m.g) derived from phytozome v7.0 (c hr-ID scaffold_9; pos 1217088 to 1217857)
tgaaggttttgaaggttccggagattgaacagaaggtaagacattcattttgttatatatactttgacgatttgctgatgtttaatgtggattttttttttttttaactatgagatttaatgaattttattgtatttgatttgttggaaattcaagatttatactgtaataaaaaattaaagataggttgcaatttggtaagatatgatttatgctgactgactttgctactatgattcacatattttcactttgatcaattgatttcactgaaacaatgttaatattggaatttccttgctgatctttagtttttgactccagctttcatcttttagcttaggattgtaagttggtgcaattagaaatggtttgtggtgaaactcttaaaggcggtttacctaaatgatatttagtttgtgtttatgtctgtaatagcaagcgatttcaagttttgcactttacattcattgtttctattctacactcacctattaatatctaaactcatgttcctgttgcttcgtatggttatgtaatttttaattttttttttcataatcagatgggccgatttgaaattttggggtgatgatatgcatgtgttaatttgtgctaatcatatcatcggtttctaggttcagattgggcttcaagttgaaagctttaagctttggagcatatgcatcactcctaccattatgagattactttttctttgcattttttttttcaaatatgaattttgtcattactaatgcaggtattgg

SEQ ID NO: 87075 - DNA, 484 bp, Citrus clementina
  Intron number 2 from transcript clementine0.9_013386m (loc us clementine0.9_013386m.g) derived from phytozome v7.0 (c hr-ID scaffold_59; pos 273856 to 274339 reverse strand)
agtggtagccaaccagaaggtatttttgaagtttagtgttttgtatgcattgtgattgagtagtcaattaatctctttggccaacccgtaatggattcatttatgtaatattctggaaggatttctccattattgtgtcatttcaatttccagcccttgtacacaaggtccaccatccctttggtttttgcctatttcgaatgatatgttttcttctagcaccttttcttttccaaggtctctggttgctttaagaagtggcatatagttctagatcatgaatatttgatactggtcatcctgtcatgttggaaaaacattgctatttaattgtttgcatttgttatgctagggttcctatgtttaggaacataatgggtttcaaggtaatttttttcctttttgcttttgaaaccaaatggttcttggtgctctttatcatctttgttttgtctttagtaattgccttttttctactgtagaa

SEQ ID NO: 87076 - DNA, 357 bp, Citrus clementina
  Intron number 1 from transcript clementine0.9_013386m (loc us clementine0.9_013386m.g) derived from phytozome v7.0 (c hr-ID scaffold_59; pos 274437 to 274793 reverse strand)
gcgctacttgcggcaaaccttgccgatcaaaaacggtaccgttttcccttcccttccctgccattccatttcatgcactttttcttcacctaactttatgctatgctgctgcaacttctatgtattcaattgagatttgatcattaactttctgcttaattgaaaccatattaggacttagaattttgcgatcgtgtttgtgaatgaatgttcctgattaacgacagattgtttctccgaaacgaactccaaaaaatgttttttttttcttttttatgcattgtttgtaactgttggggtttggttttgtttgattgtgtaggaaactgatctgcatacgaagagaactggtcatac

SEQ ID NO: 87077 - DNA, 544 bp, Citrus clementina
  Intron number 2 from transcript clementine0.9_024901m (loc us clementine0.9_024901m.g) derived from phytozome v7.0 (c hr-ID scaffold_17; pos 4187632 to 4188175 reverse strand)
aagatacagagaaccttgctcgtaagtttctttttttcacatcagtgtttatactctatattgtaggaatttttttcatctgttatacagttcttggatagtgaaatttgttctttgtttggagtttggagttcttgtagtgattttgcattgtttgtgttgaaacaattaatctgatgtgcttttattgtgtacgtaaatgtgcatgaatgatctgtttgcaatgtatgctctgccattttaattttgaagatcgtttaagggcataatttcaaagttattttctttattcactcaaccaccattggtgatttacatctcattgtgaccaccactaagtctttatgttcaagtgggtatgccaatgattctgtcaaacttggcccctattggcatagaatttagttatttaatctttgagttcacttttgttgctccgcattttactttgcggcattttcacttatgtcagcagatttttaacacctctcaacaagaggataaatgtatactaaagtgcttttatctgttctatattgtacag

SEQ ID NO: 87078 - DNA, 778 bp, Citrus clementina
  Intron number 1 from transcript clementine0.9_024901m (loc us clementine0.9_024901m.g) derived from phytozome v7.0 (c hr-ID scaffold_17; pos 4188236 to 4189013 reverse strand)
acgcgccggtgccgatatcgagactgtcagaaaatgtaatattttttgttgttattttatcagatcagtcctccttctctaattaattgttcttttttttcaatgaaagaaaaacccatgtgccgtgtttgatgatatcttatctcatggaaagtagggttttatattttataatttgtaattattatgatctctatatttttgttttaattaatccttgtagaccgttcatgaatatacaatagcgtgtgtgtttatgattgcaggttcttttttgaattttcttttctagggttttgaatttttttgtgatggattcacagattagggtggtttctgtgattttgatggaaaagacaaagatagacgataatgggatttattttttattttttaatttttggttctagatgatatcgtgatttatatttgtttttaaaatatgtagaaaataaattcagaagttcatgtaagataaaatgtatgttatgaaatatgttataagcccatcttgtatgattttgtgccttctttttagtatatctatgactttttctacgattgagtaaagggttaaatctaatgagctttatatatcaacctcttctgatcactgtggaagctttatttgattttttttttaattcttgagatttgttttcatatgtatgtgtcaggacttgtgcaaatctgtgatctttcaaacttatgtttgtaattgtaagtgtccccatgatttgtagtccagttgcttacatcttaatttcccatacagcac

SEQ ID NO: 87079 - DNA, 436 bp, Citrus clementina
  Intron number 1 from transcript clementine0.9_006917m (loc us clementine0.9_006917m.g) derived from phytozome v7.0 (c hr-ID scaffold_9; pos 2343505 to 2343940 reverse strand)
caagaaggtgaagtttcgtcatcgtaatcatcgattatgagctaactaactaatcttcttgttaatttccattaatcgtcttctggttttgttttgttttccaaacgcaagaaatggaaaatgatcttacttttggcttccatcactgttctacaacctgccactcttgaaatgaaccctacattttgacgatctttcttactctagcctttgattttaatattttgcttgatctagcgttaatttatgaatgtgataataatactgcgataattacattgttctattgttgtttccattccaactgaacagtgctctctttgcttactctataaagctaaattctacgatttcttttgatacgttgagtaattgagtttgttgttctgtgtttcttgcgcttcttttcaggggcttgattgtgaatatcgtcaca

SEQ ID NO: 87080 - DNA, 1061 bp, Citrus clementina
  Intron number 1 from transcript clementine0.9_015398m (loc us clementine0.9_014082m.g) derived from phytozome v7.0 (c hr-ID scaffold_6; pos 4616196 to 4617256 reverse strand)
tctggaaaaaaattgtcttcgtttaagcttcggcggtaaggtaatcaaaattctgtaattctcttatgaccaaaaatatgttatttttattatggattatgaacttaattaatgaaaatgttaaatgtatttttttatcaaaatgatgtttggcttgttagttagcttagttcaactatataggaaaggaaattgcaaaattgtaaacttcttttatttttttagcatctatttgattacttgttcttaaaatttatctgcatcccagcttaattttattttttaacgaacttgatactatagtatagcattagcttattgctgcaccggaataatctataataacttaatgatgttatcaaattggaaaacaaatttctcttgatatagctgaatgaattttggcttgcattttatgggttttgaaaatggtagactgtcattgtttcattctagcgatgtctaaagtggaatttttggccgggaaaagagtggaatttatgctacggagaatgattcatggagaattttttggatacgaagtggcatatgatagtctcatttgaactctgcagcaacaagcactattttgaatggtatttgaaaaaaattgaagtctcaaaataagtctttggaagtttttctgacaggacaagcatcgagagcccctcctcttgtccaatttctctttgtttcttcggaaggtttggtcgcacctttaatgggaaaacggtttggatttcacatattaatgaaacaggggcccacaaaaatatagctcctaaaaagcaacattaattcttctattaagttttcgtgtatatatgttcattatcggtagaactcggatcattcctagatgctttctgtggagtagatgtcttggctttgtacaaataactcctgcatgctataataccaaattttcatttttagtctaaatagaatttggttttagttaaaacactagcattttcttttgaaatgtaatttcaattgtaacatttcatgttgtactgtttatagagtgacaactgaaaagactgaggaagttttcctga

SEQ ID NO: 87081 - DNA, 918 bp, Citrus clementina
  Intron number 2 from transcript clementine0.9_022604m (loc us clementine0.9_022579m.g) derived from phytozome v7.0 (c hr-ID scaffold_22; pos 2157435 to 2158352)
ccattcattcgccgtcttcctgagtttaagttctggtaatttaagaacttctcttttccccaattattatatgctagtgtgatgaactctattccttctgttccataatttttctttgttatgatgtcaaagtgttatattccagggtctagcaagcaccatcatgtgtttaaacttattttcaaatattgggattcatcacataaaagtcataaatcttgatagttttggttattgcaaatacttttcataggttgctccattcttggcttttcattgaagttgatcttcttataacttttgaaacacagatgtcatacttgtgcttaactaatgatggacactttgttaaaagagactctcctatccaagagggatccaaaataattgcatgcatgtattctgctctttgatgtgcattcttagacagtggccgtcgggcaagttaaaatactactttagtatgactacaagggaatgaatgatcacactgaacagagtggcacattctttaaggtagcctgaagaatggagcattcaagcttgcttggggctccttgggtaatgatatagaacactgagtttcacgagaaattcaactgattctctacagatattctctggtgatttttttctttttcttcaaagtatcattttagcttctccccttctctagtgcagcaactttgaatccaatttgcgtattttactgtaagaagagtaatggattattcagataagttagcactgatcttagcagttgaacgagattttgaatagttgagaagaatcatctaacaagcatgttgtttatcagaccttattttgtgtttgtttagattggtttcccaacaatctcatacttttttacctaattcggctcaagattaagttaatttttcaattgttgtttcaggt

SEQ ID NO: 87082 - DNA, 371 bp, Citrus clementina
  Intron number 1 from transcript clementine0.9_023449m (loc us clementine0.9_020780m.g) derived from phytozome v7.0 (c hr-ID scaffold_32; pos 1482472 to 1482842 reverse strand)
gacttcccatcggcagtgacggcttcaaaacactggtgagtctctctttgcagctgttatcatcttcaaatcacctaaaaatctcaactttcaacagttgctgaatctgtttgtagttaaagatttcgatttaaaatattaacttctcagtgctttcattacttctggtgaagattttggacaaattcttataatgggtattcacaaaaaccaagtgggtaatttttatttttggaaaaatgattccattaactaatcaaatattctatgagctaaacaggtcttaatttctctttattattgttattattactactacttctattactattttcttattgtgtaggagctttgtgaattgcttaagagat

SEQ ID NO: 87083 - DNA, 348 bp, Citrus clementina
  Intron number 1 from transcript clementine0.9_019371m (loc us clementine0.9_019371m.g) derived from phytozome v7.0 (c hr-ID scaffold_19; pos 1361116 to 1361463)
ctcaagaactccggcgtcgacgcccgcgctctcaagtagctcccctcttctttcatatttatttatttagttatttcttttttcaagttttaagatttaattatttaggacttaatataaatgaggattatcatttagaaccctaatttcgtttaatgtttgagcacttaaaattttgattttttttattcaattttcagtggtggtgttgagttaataataaactgctccaataattggcttggacttcggcgtattaagcgattgcgtgtttgattcttttactgagattaatcatgcttgcttgtgtatatacatctagggacaagcttgagttgaaagcagcta

SEQ ID NO: 87084 - DNA, 967 bp, Citrus clementina
  Intron number 2 from transcript clementine0.9_019371m (loc us clementine0.9_019371m.g) derived from phytozome v7.0 (c hr-ID scaffold_19; pos 1361727 to 1362693)
gacaacagtgaacacaagcgttttgtgaggtaaagcttaattcttttcttctttttttctcctctatctttctctctgtttgtatgacatttggtattgggcatactgtgaaggttaaataaacatgatgtgggagttttgactcgcaattttaatagtctatatggcacacgttgtgactgttaaatttgtgggtaggggtctaatatatggattgtcacttgtattttatctaaagataccattcagtgggcttagaattgcttgtgatccttggtggaacggctgcgagttcatgcaacagaaattatgtagtaatatatttctatattgcgcaattaagctactatatattgtcaattgaagaaacaagggtacattccggctttaggctttcttaggtcgatgtacggggtataccttgtagaaggaataaaaagaattaactggaggggtgacaggagaatatggccataattgacaagcttgaggactgtcatttttgtaagtaggtaacaatagaaagaatgtaaataagtatttgtgataggaaaactggaaaaaaattgggaaagtaggacaagtagagcaattataaaatgagagaaccagagagtaatttggaaagaggatattcctttcgtattatctcctgatggtggtgtacttgactaacatcctgagacaaacaaacaatatgctaacatataatatcatgcaaaagaagaacagagccaatgaaaattgaataattgttcaaaattcgagtgtaggaacagtaaatttcataaaattattttatataacagctttcgtacataaaatttggttattattcttttattgtttgcttttattttatttttttgatctgattgcagttattacatgctaggctctgtacatcatgccactgagatccatacaacgattgattagtggttttctttccatttcagggaagttc

SEQ ID NO: 87085 - DNA, 1027 bp, Citrus clementina
  Intron number 2 from transcript clementine0.9_003306m (loc us clementine0.9_002852m.g) derived from phytozome v7.0 (c hr-ID scaffold_6; pos 4153929 to 4154955)
ttttcttactctcactgtcaaaaaaatataaaaaggtaccgcaccttttatgtttcatttatccacttcacacttgacagtgaagaagaagaagagaggtcaactgggtccttttttgatgatttggttggtgttattattattattatttatttttaattatgtgcatcattattatttcacaataatggttttccttattgaaaagtgttacttgtgtgtagtgtgaatgtgagagagaagttttgaaactttttatctttggttcccctttttcatgcatctttttaaggacccttctccttttcttcgtttttggatccttcttcgttttcaatactgacaaataattggtcaagcatttgctgtgctttagggtttccttttcatatttgacagtagaaaaaaaaaacttaaaaaacgagtctttcttgacaagtttctcattctaaacctgattattttctggagaaagtcagagctttccagagagccttgtggcttttgttgtactgagtcatgcatgagcgttgacaaggaggcatcatttttcattgtaatttttttaattttttaattattttttccacaatctgggcattgtttaaaggtcaaaactttttaaacgagaaagttgaactcaaacctaagcgtttctttttggtgaaagtgatagtgcctattttcagagaacctagacaagtgacttcaccgtcaaaatccaaaaacgaaaaaaagaaagatcttttctaagattttgatgagttttgggagtaatagtgttggtatgggctcaagggttgtggctgaaatttttccacactgtcacagtatggcaagtggtgccattgctcagtttcctctctctctatctattgtatgctcattttattttatttatttattttttattcatgctctattttattgttgttagttgtgatcttggttttgtgtttgggattatgttctttttgatatatgtgttgttgatttttaaatgggttttttttggcagaagaacgca

SEQ ID NO: 87086 - DNA, 714 bp, Citrus clementina
  Intron number 3 from transcript clementine0.9_016366m (loc us clementine0.9_014046m.g) derived from phytozome v7.0 (c hr-ID scaffold_19; pos 1769261 to 1769974 reverse strand)
aactcgattttactaatagcgttgagattactaaggtaatttgttgtttttcaatatttggatagctgggaagtgaagttgtattttaattctagtgattgattggttagataatgcccataaatatggtaaatttgattacataataataccttacagaagatgaatgtgtagtaatccaggggacttacttatcagaagtgttgtaagatggaatatgataatctgcatagttctttgctggaggttgacattgattactagtggaggaagttgagttgctttattcctggaattgtttgttttagcaatgtatcagaatacacaggagggatcttaaggttagatattgcaatgcaggtctcgcttaaggggttataggagatttgccaattagagcaaggttaatgcaattttgtgaaatatgctgaaatgaaggttcaagcaagtggaaggccctagctgacagcttaaaggaatttttataaagttaacattgttcaaagaaggaggcaaaagagaaaatacatcaaattaaattctcaaaaattttatttgtcaaattgctgatgttgaggaaatgaggtttttttttttttttccccttcagaagtgtagtggctctgtttccgcttgccactgtttcatctttaacaaagttattattaatatatgccaggggacattcattcttggattttggcgtggaattca

SEQ ID NO: 87087 - DNA, 556 bp, Citrus clementina
  Intron number 1 from transcript clementine0.9_014086m (loc us clementine0.9_010309m.g) derived from phytozome v7.0 (c hr-ID scaffold_6; pos 6459469 to 6460024)
gaatcttcaacagattgcttcttctcaacccaaaggtatcacatggtatctctctttccatctctttttacatgtatgtatgtatgtatgtatgcatggatgcatgcgttttctcattcataaactgtgtcttttttctttttttcttcagttttgatgggaaatgggttctttccttttctttttttatgaaacaattatgaaaatgcatttatttggtatgttattgaatacctctacttttctgttaataggtatcttctatgacattggaaagaaatgagttatgtattaatgaaaatcgtaaaatagaaggaaaattattgaagaaattttgaagtttttcagattgtttgaactgacttatgaatttcttagcaattttaatttcattctttcccatttgtagcttacttgaattatttagtttctgcaagctgtcatatgggagacttcttttactaattatgtgtgaattctgacttgcatttgtgaattttttcctgattggtttgcactaggtgttgctaaggttgtgcttaaaaaagggaagacc

SEQ ID NO: 87088 - DNA, 803 bp, Citrus clementina
  Intron number 1 from transcript clementine0.9_013018m (loc us clementine0.9_010171m.g) derived from phytozome v7.0 (c hr-ID scaffold_172; pos 44697 to 45499)
tttacagtaggaaattcactagagttgctttgcaggtaacatatattagtattttattttcttcatttttttcatttttttaaaccctagtaaaatctcgggtttctaattttaaagaaatttcgttattttctttttgattttaaatatttggctttgccttttaaacaatggaagataaaggtttatttttgttagtttaaataaagaattttgaagtagctttgtttagcatgattgaattttctaggcagcaaaacagagattttcctggaaactcaatccataagaaaaagagatgagaattaaaagcttgactcgcatgccaaggataaacttttattagtttagaccacttgataagtttatttatgattctttttttttttggttgattcaactattgagattaaattcattagtatgttactaatccatgcttaatatcgcattagtaacaatcatgcagcaataagatccataaacttttatcgctgattcaataggacggctaagtatctctgaggcttggcagtcatgggagtacgcttgcaagtataaaatccaatatttagttttccgaatcaaattattgtataaataaataaaattggtgtaatcttaactcatatgtgtatatttatttaagtaatcatgcaagcatgtttaaaggtgtctggggatcctgaggattagaatttctattgatttattaattaatttccttgtttttatttaatttaagcttttagtgattttagtttccagataatttattgaaggattcaataagaatagtgcga

SEQ ID NO: 87089 - DNA, 769 bp, Citrus clementina; identical to SEQ ID NO: 78947
  Intron number 2 from transcript clementine0.9_013018m (loc us clementine0.9_010171m.g) derived from phytozome v7.0 (c hr-ID scaffold_172; pos 45663 to 46431)

SEQ ID NO: 87090 - DNA, 831 bp, Citrus clementina
  Intron number 1 from transcript clementine0.9_030141m (loc us clementine0.9_030141m.g) derived from phytozome v7.0 (c hr-ID scaffold_34; pos 1184703 to 1185533 reverse strand)
ctcacttcaatcgattccctgctaggtactcgcttgtacatgcatatgtatgtatatatggatgtatgcatcttttgtgatgagtgaaacgtttttgagtttgtcactaagtttagtgtctcgattttgaatgtgaacgaagaatgattcagattgtgcggatggaatcctccactggtttgtctagtagatttcttttcttttttctttttcttttttctggtaaacgacgtgccgtttgacgttgccatatggagttcaaaaaaatatgtgtaatgattttcggagatgtagtagttaggtactgttggagaagtattttcggcttagtttttattatatgtattatatttttcgatttgtgaaaaataggagcaccctcaataacatatatttgcagattggatctatatgtttatatgtttggttcatttgtttattttgtttttacatggtgtttggaggcttagcatcttgagcagtatgggaatcattaaaattggaagatgaattcaggagtaggagacggtcaaagactcaataatttattctgaaatgaaattcatctcccttcccaatttggggatttacacatatcctctaatcttaaatatatgctacggtatttggctatccctgaataaatttttaccttaagtctccgtatatgatagtgaaaatataaaagtagatataactttcatgaagaaagaaacaaatagggaaaattaaattttacttccactttttttataatatctcatctcaaattccatcactttttggctaattagataattaaatgcacattttttcattttggtatcagtt

SEQ ID NO: 87091 - DNA, 757 bp, Citrus clementina
  Intron number 1 from transcript clementine0.9_001344m (loc us clementine0.9_001344m.g) derived from phytozome v7.0 (c hr-ID scaffold_19; pos 2596016 to 2596772)
gagctcgccaaggcaaaagctttatcttgaatcaggtaaatttttgtttctttcggctattttctttatgaaattcgcaaacttctgctttgtttttttttttttttgttttcccttgcaaagctgtgaagtctagggtttttgtgattttgtgatttggattgttgtaattagagtgtcggaagtgattttgctgcttctagcgagttaaaatacagtgattcttgctgaaattctgtcaaggcgatggctttttcacagtggtaaaagttttgtagcttttggtcagtgtgaattgaaagatggaaaaattttgacctagcgaagttgtggactctagggtttgttattctagatagagttgtgcaattttgatgtgcttttgctgatgctggaaaggagaaatgtgttgaaggaaccctttttttaatttaatttaatttaattttgttgttttgtatgccgagtttgcatctccgttcttttaggaaattggaaattaaaatgtggttgctgttccttcaactttgctagggaagacctttgaattaaaatgttttggcatttgtgctcttggttattagaaatgagtttgcaggtatcttggttgtgacttcatgtttgtttttctatttttccttgtatctattgagcataaaaatgcatttattataagtgcagatttgtagataagagcgaagcttaccattaatgttttacagcttcttgggagaagcagtggatttcaagtagcatc

SEQ ID NO: 87092 - DNA, 644 bp, Citrus clementina
  Intron number 5 from transcript clementine0.9_006857m (loc us clementine0.9_003579m.g) derived from phytozome v7.0 (c hr-ID scaffold_6; pos 3148840 to 3149483)
agcttgctcaggttggtaactataatatggtccggaagatgcatatagtgccatgagacatttggatattaggagatattgtttgatctgataaattctctgtacctatgtctgtatgattttccataatggatgtatatcttataatatttaaaactgaatattcttaaagttttgacaatggagaaatctctctaattttcttgggaagtcatttgctgtatgtatttaggggtgaaacactcataactaatgaattatactttcattggtggattatcaagttatattacacatttttgttgctctttcttttggccaaattattggtggaagttacaaaaataactcatcagtaacatattgtgaaataagataaatacataattcgcaaaatgagaacttaaacaaagtgactttcatctatgtttgtatttcacttaaaaagtacattgtagttgcatagacacaagcatttcggtaacccaaaaaaaaaaaagcatttctctgcaagcttttaccattttgagtgaaaagacagtgggtcatatgctatcctttgaccgtttgcttcctgacttcaaaccatatgttttatttatttatttatttatcattattcttcaaattgagatatgcagata

SEQ ID NO: 87093 - DNA, 296 bp, Citrus clementina
  Intron number 2 from transcript clementine0.9_032421m (loc us clementine0.9_032421m.g) derived from phytozome v7.0 (c hr-ID scaffold_46; pos 712294 to 712589 reverse strand)
ataagggtattaaatattttggagagcttgatgggttttcttattcttttctgcattgatgtgatattttattaacatgttcgaaatttatgcagatttgagttgttttgtgttcttgttcaatgtttttgaatgtgaaatattattggcatggtttacagaataattttaaagaaacaaatgctttaaattgccgaatcttgtctttggaatttatgtttataccatttaacttgtgcttggtcaacgtgagattgataggcccagaaatcatgcaggtattcagacatataacg

SEQ ID NO: 87094 - DNA, 547 bp, Citrus clementina
  Intron number 1 from transcript clementine0.9_032421m (loc us clementine0.9_032421m.g) derived from phytozome v7.0 (c hr-ID scaffold_46; pos 712692 to 713238 reverse strand)
ttcctcagaaatctttttcgaagagcgcttcgaaggtaagtgaatgcacttttgagtaaattaacttcctttgcagaagcacctttttctagttctctaagcgctttggctaattggtagcgcttttgacccaaaaaaaaaagcagcaatattgaatgctttcttattgtcgtttattgatttgaatgttttatattcttcaatgtgtgtgaccttgatcgcttgttgtggaagtagtagttctacaagcttctattatttactacttaatgatttggggagttgaaagcactttgagcatagtcgcttttttgtagaaacacttattaagtgattcattatcattaataagtgcacctctcgaagtgcctttttaaaaaagcaattttctgggtagcacttatctctttaacaatcactttgtacgcttcttagaaaatcactaatggaaattcagtttttcataccaaaatgagctttattgaatgctgccttattgtttatcaagttggaagctgaatattgttgctcttgaatgtgttgcaag

SEQ ID NO: 87095 - DNA, 549 bp, Citrus clementina
  Intron number 1 from transcript clementine0.9_006131m (loc us clementine0.9_006131m.g) derived from phytozome v7.0 (c hr-ID scaffold_125; pos 237500 to 238048 reverse strand)
gcaaaacgctcccgtatcatcgagctctccagaaggtattttccttccttgtttctctcatttcccatccagtttctgctccaatggctctgctagtacaagctcaattgatgagctgagggtggtgatattttgtcatttcgttgaattagaggtggttctctgtaatttttcagttttctgacgaaagtgaaggttcacaaatgtttgatcctgattgttttttgattgcactgttttacagctgtgaggtaatatgcagttgtgttcattggttcattttattaattttcatttttgcaaaacaatttttaggattgtattcgaatactgtttcctaaacacatccattcaaaagttttttaagaaaaaaaaaaaagaagaaaaagtttattgtctggcctgtttgatcttctttggttatttcatgatcaaattggtgttgaattttgtagtgataaaacattgttgtttcaattgctgtgatcacgattttactggtttgaatgtgtaggttgcggcacagaggtcctgattggagtggcctgc

SEQ ID NO: 87096 - DNA, 848 bp, Citrus clementina
  Intron number 1 from transcript clementine0.9_016821m (loc us clementine0.9_016821m.g) derived from phytozome v7.0 (c hr-ID scaffold_19; pos 715288 to 716135)
gcacctcaagagtattacactggtggcgagaagaggtccatttcttctaaatctccctctcgttttcgctgaagctatcatagtttatccaattttcgccattttttagtcaaatttaatttaataatgttaaatttctatgcttgtttgtcctttttttgtgttgtactgttcttagtttgtttggttagggaaagagggtgtttttcatgcaactgcttttaactctatgaattacataagatcatttcgtgtgcacccagcagtgttaggttaggaataggatcgtgtgatagcttgctttggacaaacctaacatgttttaaataaatttaaaacattagtgtccttggaggaaattaatcgggtaatttggaattatcaagattcaaatctgaaaccccaggtcatatgctggagctaatttagggttataagtggggttaaatcttattttgttgaataattttactgttcaaggggggccttcattgctctggactgtttcattttgtttaataggacttcaacaagatgctatatacttgaataattcctacatatgattgatgaacggctgatttagacattgtttgcaacctaaggcttttactgttgctctacatgccagcccttgatagtcctggtttcgagtattcgcaaggaattagttcttagcgtgattggccaagtctgtatgttctggtacatatatgttcgtggctctaatttgggtagtggttttttacatttattttgtttctgagtttaaacatgcacttttgtatattgtaggtttttttttttaaaattatgtgagtgtcttatatttttaattttgcagtggt

SEQ ID NO: 87097 - DNA, 528 bp, Citrus clementina; identical to SEQ ID NO: 78139
  Intron number 2 from transcript clementine0.9_001710m (loc us clementine0.9_001712m.g) derived from phytozome v7.0 (c hr-ID scaffold_22; pos 610647 to 611174 reverse strand)

SEQ ID NO: 87098 - DNA, 541 bp, Citrus clementina
  Intron number 1 from transcript clementine0.9_000327m (loc us clementine0.9_000327m.g) derived from phytozome v7.0 (c hr-ID scaffold_32; pos 116760 to 117300 reverse strand)
gctttcttgggaaccttacttggtatacatcttctcatttcttgatcttcattgttcatttcatatatatatatatatgatttccttgtacttttatttttctctcccccttctttgaatctttgtgtgaatatttatggttctatggttggttcttgagtatgattgtacaggaatcttaacagttatgaacaaaaagggagtgtagagtttgttgaacacacagttcattctttgctgcttcattaattgtctgagttgttttcttccatactgagaaactttgtaatcttctcttaacattaagtttcttgaatgttttaatgtagtatgaacagagaatatatattaagcagcatcgctgagtaatcttccttttgacgttgtctttttgttatcttatattttcgaccaatacgtgtaaatatgttctttgtttcttggctaatttaacttccctatggaggtttctgatcccagttcgctctgtttcaatgaatatgcagggggactttcttggacctgtgagggtgaatttgat

SEQ ID NO: 87099 - DNA, 556 bp, Citrus clementina
  Intron number 2 from transcript clementine0.9_001526m (loc us clementine0.9_001526m.g) derived from phytozome v7.0 (c hr-ID scaffold_110; pos 151305 to 151860)
gagaggatctcaaagaaacggtgtgtcattttctcttttgaccttttgtcaatctattcttttgattaatggttgactttcattgttgcccatgtgaccaaaagtttatatttttaatgattgttgattgattcacggtttggagtgtgaaaagtgtgagactgacgtgatttatgactttttttttaaaaaaaaaaaaaaaaggtttggtagtggaggttttaattgatcccagattgcagttttgttcagattgaaaggatcagtaagaatcacagtctatgatgataagtcaatgtgtttgttgttggtatggattgaatgttttaatgtttgggtttaaaatgcaagctcttgtttgcaaacttggagctgtttgaattgatttagagccacatttggagtgttcaaggggctctatggacctgtggtcaaatggtcctcggatatctcttttgatatggaagatttataaaataattttaaagaagatatggtttgtctgattgaattactcagactaatgatgttaaggttgtgtaggttcaagagtgtt

SEQ ID NO: 87100 - DNA, 693 bp, Citrus clementina
  Intron number 1 from transcript clementine0.9_002045m (loc us clementine0.9_002045m.g) derived from phytozome v7.0 (c hr-ID scaffold_32; pos 2470963 to 2471655 reverse strand)
gctaaaccgagagtactcgcactctccagtacgcttactttcttttctagctatcaaatttggtttcattgttctgatctgttctcattcagcattgtttttgcttttttggttagagaaatgttctattgtattctgacaattgatgtgttgatgatgacctggattagtagtattagttcgaattcaagaaatgtgaagttaccgggacacgcctttgaaattttgatgaaactagactcagtcagaattcagctagattttatgccttgttaggttttcagattcatcatcagttactttgtggtgattgagattttgaactttttaaaaaaaaaaattgtagttctgacattggtaaaaaagcaaaggatatttgtgtcctagtctttattgcggtgactgtaggataagctgggttcaatataatcttgccaatttggagggtcatatcgtcatctctgatgcttcttgattttgtggtttagagaacagcaacaccctcttatgaaaatccccttcttctcatttagccttgaaagttaaatatcattgcagctttttcttgttttccttggggcttttaattgattccttagaccatttagtgatacattatttatgtggcatcatctgtgataacatgttgcctgtgcagcaaaagccaagggtcagcggaccaaagcttttctt

SEQ ID NO: 87101 - DNA, 736 bp, Citrus clementina
  Intron number 2 from transcript clementine0.9_024863m (loc us clementine0.9_024171m.g) derived from phytozome v7.0 (c hr-ID scaffold_26; pos 2304563 to 2305298)
aattgccggaagagcaagatcttcttcattgcgttcgttcgcattttttgttctcttggtaccacatatcatattagatgctctttgatcttagaatagttgttattttacgtacattttttgctacttgttataaagggtatcattttaagtgctttcgctgctgtcaaaaacaatttcagataagttcaaaacgtttcttaaagcataaggaagcagtagcaatcctttttttcttcttctttttctttttccttttttaagattgaatgctttttctaggatttattgccatcccttttgcggaatttgcttttgccgaaaagcacttttgcacaaacgctttttttagagtgattttgtataaagcagtttcaagtttacagtcaagttttacaaaataaatataaatacattttattttatttttttctgaaaatactttcacatatgctacaaggccaaaatggtcgcaaatgatgagattacaaactactggggcatcctcaattcctgaaataggtaaaatatcaagtttggtgatttcagattcagaagcatagtgaagaatcatcaatcgaccccaccaaatttttaatcattataaaaagtaaatcgcagccgtcaattagtttccgcatcaaatcagttggctaagaaatcatgtcaatttaatttaatttattttatttttataatgaacagggccccgacagcgtcgagaatcagagcaaaa

SEQ ID NO: 87102 - DNA, 157 bp, Citrus clementina
  Intron number 1 from transcript clementine0.9_035343m (loc us clementine0.9_035343m.g) derived from phytozome v7.0 (c hr-ID scaffold_26; pos 708826 to 708982)
ttcaagggcagcctcttgaggtcactggtatgatgatatattaccaaaaaaaaacaaagggatcaatttttcttttcttttataataattgtgatgcataaataaattgacccatttgattttttttaatatatacttttttatatgtagtcatcgc

SEQ ID NO: 87103 - DNA, 427 bp, Citrus clementina
  Intron number 3 from transcript clementine0.9_035343m (loc us clementine0.9_035343m.g) derived from phytozome v7.0 (c hr-ID scaffold_26; pos 709280 to 709706)
accatcaccggagacgatttcatcggcagtggaaagtgattaattatcctttacttcacttctgtttttatgttatcatctctatagaaattcatagatttatagtatagtgcgtgagtaaattaaacataactcgtagatttatgtctaataaattcgaaacttatactacatttataaataatgtttataagagaggcattaagttcccgaaatggggacttttcttcttcatgataattgataaggctaggtatgttttagcgcctgaacaaatttgatggtcttttcatttttttgttatttgtcaaaatttagtttgataacccttttgaatttttttaaattattatttttaaaatgttgatgtccgcattttattttgctttgtgtagggttcgattgactaaggctattacacaaggtt

SEQ ID NO: 87104 - DNA, 943 bp, Citrus clementina
  Intron number 6 from transcript clementine0.9_015917m (loc us clementine0.9_015917m.g) derived from phytozome v7.0 (c hr-ID scaffold_22; pos 1463960 to 1464902 reverse strand)
cttcacagtcgacacctaggcctcgccctgcccaggtatatgttaaaaagaataaaaaggaagtaaatttcactctcacttaactttatatcctaccatgtaccctgtatagcactgtagctcaaccgtgtttgttaactaagtaactggagccgactagacttgccaaattgttttaaacttatgcatagattttgcagaatgcctggatttatttgtgtactcacaaagggaaaggtatatgtgattcttggaaatttctggctgtttggctacaccattagtggcaaaaggccacatgtgatgatcatggtggtccccttataattatttttcccttgtgtatcatgaaaggttctaatcaaaagtattttagaatggagccgctaacctttttattatagaccaagtaatggacagtgttgatccaactgaagaaacagagtgacaattttcagcttaaatgcgatggttttgttaataatttaatatcttatagttaggttacgattttggttgagggatgtcataattgctctccgatccttgctgcagtaggctgagtagtctgtttgaacatataaacaagttgtattctctaaatttgttgagatttatgtccttcaagtggttgaatatgatggcattatcaatgattttgataacaatttggaggtagcatcccaataaaggcgtttaacaaaaatcatagtaatattcttgttcatagtagcatcttctttttttttttcggtgatatgcaactaatgtcagttcttccctgagcttagaattgggtctgtgacaatctttcaatgaacattttattatataatggattcatgcttgtgtttatggttggtttgggaagaaagattgttggatgaaatgagctcaatttgttcatgcttaatttgtattttcacattgcagccacaacaaa

SEQ ID NO: 87105 - DNA, 877 bp, Citrus clementina
  Intron number 3 from transcript clementine0.9_032465m (loc us clementine0.9_032465m.g) derived from phytozome v7.0 (c hr-ID scaffold_9; pos 717951 to 718827 reverse strand)
tgaagattttccagaaggtgtttatataagaagttggtacctcaatcttattgttttatattgatttatcatctatgtgattatgaaagaaaaagatatgaagagttctcttttatatatgatcgtgatttatgccttcaagttgaaaccttctttagtcactgctaatccggcaaggcaaaaaggcaatagatgagaacaaaaattgagaggcttacaatgtaatgggggttacttccaagagacagtgaacaagacataggttaagatgtccgtatgattattgtctaattcaaggcttcaagacataaaagttgaatacattaacatacagattaggaccaaccaaagaaaagtctcatggatgcaaattgaccattgtcagatttcattttctggcaaagtcttaaaacaaaaaacaaaaatagtcagtcggctcaacatcctcaggtggattattttcaatgatatctttaggttagaatcattgtcatattcaacaaactgacttaaaccatgcgttgaatagaaaattaagttaaattttatcattagaagtcaaccaccccatgtaaatacaacagggggaatcatattggcttttcatcagcggggttcttctcataacaatccaaaaaattaaactgagtaacattctttgcaaggtccaaaagaccagcgactcttcgattattttatacttgttcctttttctgacgcaaagcaattggtgacgacgactttttcccaagaaacaaactgattgtttagagaaccatgccaagtttgtccacttatgtaaagaatctgggtctaactggtagatgttaacgtgactgcaggaccaaatcctcttttcggaggactgaagtcaacg

SEQ ID NO: 87106 - DNA, 619 bp, Citrus clementina
  Intron number 2 from transcript clementine0.9_013418m (loc us clementine0.9_013418m.g) derived from phytozome v7.0 (c hr-ID scaffold_19; pos 3125789 to 3126407)
gagcgctgagcgcgaggctccacaaggagtaggtgaggacttgaatgagttcttgtactgaacattacatgatatgttattggagctaatgaaaaccgaaatctcgttaattgttccatgatagttacatatatgtagtagatttcgatgagattgacattgcatttcttgttgtcactgtggctttatttccttggattgtatgagctatatgatttaatcaatactttcattttgatgtgagatttataccattactaagaaagaatgggtcttgatatgaactgccaaccaatttgacatgtttgagtgtttttcttatatcactttgtacaaacagcaaatgaaagttctatgccggattataaagttatgaagttgcatttgtctatttcttcctgaaatcttaggcctattatggtgaaatggaagttattgtgagaaactgttctaaatgacccagtttaagcagtttgagtacacaatcttaattttaagtgatcttcttaccattttagatttgatttagttcaaaatcccattataaatttaactgctcagcttcttttggttggttctaagtaaattttgttgctctggctaggggaattactgagga

SEQ ID NO: 87107 - DNA, 641 bp, Citrus clementina
  Intron number 1 from transcript clementine0.9_025418m (loc us clementine0.9_025418m.g) derived from phytozome v7.0 (c hr-ID scaffold_32; pos 1079324 to 1079964)
ctacctctctacttctcttgccagttatttagacagtaagctctcatattctcttatgcgtgttcaaataaatttgaattgctctcaaggtctcaacttcgagtgattatacatgtccgttatgcaattgggttatggaattattggtttttatgtatagtatagcatgtatctttgtttcaatcgtgttgtttatgttcttcccatcacctttatatggacatatgtttgtgtgtgcttatagattgcttgtgcttgaaaattctgggttttgatctataatcctttacaaacattccataatttggtgttgaacttttcaatttatggatgtacgagttaggagggaaaggaagcaaagtacagtactttttcccagtttcaaatttctgtgcttattctgtaatatgtgatagcgcattgatgttaatagttttttactgtgtaaacagtttaatcaccattccttccaaagttatcagtacataaatgtgttaaactgtgtattgtgtttattttgttggtcattgctagttgtgtagctcttgtatctagccatactctccgattgtgggttggagcactttgttttctttcttacacttgttattctgcagagaaattgcttgtactgcttcgcg

SEQ ID NO: 87108 - DNA, 398 bp, Citrus clementina
  Intron number 3 from transcript clementine0.9_008651m (loc us clementine0.9_008676m.g) derived from phytozome v7.0 (c hr-ID scaffold_224; pos 1572 to 1969)
gcctgatacccgacagttcttggtaagtttatcttccttctgtccagcattcttactaattttgttctcttgggttactcgatggactcatgtctaaatgaatttagtagtcaaataaatacctttttctgctgggggcatatcatagcctgttgaaaaagggttttctcactatcaccagcatcattaaaaaagaattctctgtaaaagtttcatggtccattccattggcttgcttcatctttctttcattttagtgtataaatggtttctgatgcagaattttttttttttggggggggggggggttcactgcaatatgagaattattagctgtttaactttgactttctgctactgtaggaagaagcaagagccgttggccagcttcgaaacag

SEQ ID NO: 87109 - DNA, 454 bp, Citrus clementina; identical to SEQ ID NO: 77943
  Intron number 1 from transcript clementine0.9_011565m (loc us clementine0.9_011565m.g) derived from phytozome v7.0 (c hr-ID scaffold_22; pos 2285772 to 2286225 reverse strand)

SEQ ID NO: 87110 - DNA, 929 bp, Citrus clementina; identical to SEQ ID NO: 83781
  Intron number 2 from transcript clementine0.9_032850m (loc us clementine0.9_032850m.g) derived from phytozome v7.0 (c hr-ID scaffold_46; pos 828135 to 829063 reverse strand)

SEQ ID NO: 87111 - DNA, 607 bp, Citrus clementina
  Intron number 1 from transcript clementine0.9_016370m (loc us clementine0.9_016325m.g) derived from phytozome v7.0 (c hr-ID scaffold_46; pos 556847 to 557453 reverse strand)
catcaggaagaccagggtgaaggctctagaaagtaaatgttttattctatgatcactgttagattttattttttgaagcatattagaatttaactgaaggttggtgttctggtctgtattaatggataatgaaacagatagagaaaagaaacattttctgaagagattaatcatatttttgttgctggtaccacctgaatattatagttttacaaattcgttagatgttcaaagtccagttcatcttttttagaaaatctctctcttgcaaacactctggcggttttattcttctcttagtttgcaagttcatcagtatattactttttcacaagaatgatgatgcgtcaccatttaactttcagcacatatttcatcttacatttgtagccaaggaaaatcaaaaatcaagattctcataaaagcgaaaatcgtgtaatatctagggcttcctgttacatttacattatcagccaatcatggaacttggctattgtatttattttttttccttggatatttcttcattttatagattgttgtacttaacagaatcatttcgataattgcagattaattgggcatttctgacagcgacaattgttac

SEQ ID NO: 87112 - DNA, 353 bp, Citrus clementina
  Intron number 2 from transcript clementine0.9_021683m (loc us clementine0.9_021683m.g) derived from phytozome v7.0 (c hr-ID scaffold_36; pos 916601 to 916953 reverse strand)
gaatctggtgttttcgaatccggaggctactattggtgcgtctgcacgtttatacatgcttgctttctttatcagatttgaattcagtgctgagttgtttttttttttttttggttgttatgattatgattagtagtagatattcgattgaagataaatgatagaagattataaaataaactggatcaaaattcttctttatcgtatgatatgaattccactgagagtacccggacccaaagactctctctttgtgtctgaagatcaaatatgtaattgtttggcgactaatataatttttcttgaatttaatggcaggagattggttttttacccaaagggaaacgagagca

SEQ ID NO: 87113 - DNA, 566 bp, Citrus clementina
  Intron number 3 from transcript clementine0.9_023879m (loc us clementine0.9_023879m.g) derived from phytozome v7.0 (c hr-ID scaffold_94; pos 841896 to 842461)
gtcgtggtcggcgtgtttggcggcgaagaaaattggtactaaatattttagttgcataattcttctatatcgccgcttgtttctttacactaaaggattaataactattcaactagttttagggaaatgaaataagatcagtgactaagaaatttcattagaggaagttcttaaaataataataattaaaaaaaattgaattaaaaaaaaaagaagaaatttaactgaagctctccaaatgctgaaaaagttccttccatttctaatgactgtacagttgtcaaataatttataattttgctccaatttaatatactggctttgtataagccttgatgagcctctggaaaatattggcaagttctgttgaggttctgattggggattttgcgtgctatgtttgcgtattcataattgggaattaatgattgcatttatgatggataaaatttgattgtgttcaagcagtcaattggtgcgaagtgcagctctgctgatttcttgtgctgtatataatcatggaaaaatgcttacggaaaagttatctttgtttcagtcaaagaagg

SEQ ID NO: 87114 - DNA, 621 bp, Citrus clementina; identical to SEQ ID NO: 78736
  Intron number 3 from transcript clementine0.9_012402m (loc us clementine0.9_011875m.g) derived from phytozome v7.0 (c hr-ID scaffold_26; pos 2298306 to 2298926)

SEQ ID NO: 87115 - DNA, 541 bp, Citrus clementina
  Intron number 2 from transcript clementine0.9_019743m (loc us clementine0.9_018036m.g) derived from phytozome v7.0 (c hr-ID scaffold_26; pos 747912 to 748452 reverse strand)
ttccgagggataagaacataacgggtatgttacttcgatgccctttgccgcattgcgcagataattctgattattttgttttccttgttaattgactatgttttgactgattctgtggtaagcacttttatatgaagtgcttctctggcctagacttaccgttgtttatgactttaggtctcaaattatatttagtaggaatttaaaaacaaaattttggatttctggtggcctgcagcagcttaaagggccattttttttcaactacaaatactaattgcccatggagcgatccaataatattaagagaatgctatttcattgattttggtttcacttcgtactagtgtgaacgccaccaatttcctctcattttctttattgtctttggtaatataaagataagctagaaaaaattataaagcaattcgaaattcaaaaactgtgctatactggacaaatgacaagaataattttttgtttctatttttctttaattcagatatgtttgtgatgaactctattttccacagctgaagtt

SEQ ID NO: 87116 - DNA, 590 bp, Citrus clementina
  Intron number 1 from transcript clementine0.9_005702m (loc us clementine0.9_005702m.g) derived from phytozome v7.0 (c hr-ID scaffold_94; pos 20130 to 20719 reverse strand)
atttagtttcagttcttcatttcagctcctccgaggtattttcttattttaatttatttttaatattttattgcctttggatttgattgtaaagattctacattgttctaatctgtttggtatatagaataattaagatttttttatatatctttgttgatcgcttgaatccgctgttattttttatgatttaatggaaataagcttagatttcgattatttgttactgctgagaaattgttaaataaattattaattacaaaaatcaggatattatgctttgagaagtctccctaaataagtcaccctaaatcgagtcttattcaacagttttgcttggtcaaattacatgttatcttcttttatatttagaaatataattcattttactctacaaaaaaaaaaaaaacttattttcacttaaaaaagaagagaattgaatagaaaatgagcagctttattatttttttttcatcaagcatttagtttctgaaaagttggacatagtggtgtgtcttgttgtttctgatcttcgaaattttttgtttattgtagggatttggtcttgaagaggctacataaaccctagc

SEQ ID NO: 87117 - DNA, 512 bp, Citrus clementina
  Intron number 1 from transcript clementine0.9_021831m (loc us clementine0.9_021846m.g) derived from phytozome v7.0 (c hr-ID scaffold_19; pos 3459704 to 3460215)
ttcacgacaatcaaagccgcgtttcaactactctcgtaagtcttttctttctttcaagtctttcttctctcctttcctctctggggccttttcttttcatcgatttagccatgatctgaggtgaaagattagtcgctgcatttgatattttgatttgtaattctgggttactttacttttagttttatgtatttttatgacctgtttctttgctagtctcgtcattttatcttttcatgtaccgcaatttaacagaagcatctgctacgtttttgtctttgcttattatctatcgtaatatatttgcattttaatttctggctgtaatctaagaattacttttattgtgtttaattgaatttatgcatttgttatcctagaatactccgtataattttgtatattgagaagattaaggggatttgattgattttatctcattttcttgcctttattctgttgcattttttcttgcagtgaagaagattagttctctttgcgcgtgtcccgtt

SEQ ID NO: 87118 - DNA, 438 bp, Citrus clementina
  Intron number 1 from transcript clementine0.9_002626m (loc us clementine0.9_002626m.g) derived from phytozome v7.0 (c hr-ID scaffold_34; pos 671836 to 672273 reverse strand)
tcagaggcaacaaatcgaagcgaataatatcagaggtaacacgttgatagtttctgcgctcgtttcgtcattttgaagcgtgggaaagtcattgttttctttgaggcattcatcaaacacttgtgttttcattgccctgctgcaacaaatggatccacttctctttagcttttcgtttgacccatgccattttattttcttttgtttagatctataagattttggttttgttactttccattgcgtgcttgcacgaattagatagaaagacatcatcatcatgattcaataccatcattgcccacataaaataaaaagcgaaaattgattttttttccctctctttttatagactcctggggagtcactgaaaaataacctttttttcttttcattgtgtgtgtgtgtgtgtggcgtgattgcagggtatccgtgttg

SEQ ID NO: 87119 - DNA, 946 bp, Citrus clementina
  Intron number 1 from transcript clementine0.9_030736m (loc us clementine0.9_030736m.g) derived from phytozome v7.0 (c hr-ID scaffold_17; pos 3102993 to 3103938)
cgacggcattccagtagtggtttggcagagttccggtgaaagtctggcagatgttcggtgacggtttgtcggagttccggcggcggttaatttatatttctatattttcatattaaataaataaataagtttatttattttgttaagtttcttaaatcattcattaaatttaattaatataaaattatttataacattaaattgatgatataaaattataaataataattactaagggtattaaataagctaaaaagttgaaggtaattttggaagttttggtttctaatataagaggaatttaaattcttcactctttagtgtggaaatcaaattatacattaattcttatatattttgtctaactaaacaatgaaaataaaaatagaacttaaattactttcctctcctccattctctgctcccaaccaaacaacacctaaagatttatttaaaatttttgtaataaatacagataaattattaaaataaatataataatttgtatgctaaagttatttttatatattataaaatattctaatattctattagataaattagattatttaaattatatttgtctttattagaaaaatctaaaaaccaatttttttagttaccattcacaaaggatattatagtcaaaagaggattttggtgtcccttattgaattcttgagggtacataactattttcccaaacttaaagtgtaagtgttctttttccttgtttgtgcctcaaaaacttatttgaatatttaaaaaagacttctaatagatttttgatgcaataaatgacaaaatttggcatacatttctaattagttctattcctcacgttgactgcagtaacttactcaaacagctctctgaaagataacaaaatgaatagtccttcgtgactgcagtcttctttcttctccttgcctttgccacaaaaccg

SEQ ID NO: 87120 - DNA, 1046 bp, Citrus clementina
  Intron number 1 from transcript clementine0.9_018227m (loc us clementine0.9_017510m.g) derived from phytozome v7.0 (c hr-ID scaffold_26; pos 2044625 to 2045670)
acagagtctttttcgtcaacaattctggcaaaaaggttcttttttttatttagcaaaaaaaattctattttgtgtgtttgggttgccggaaaatgtgggaaaagaaaactattcaatgggaaaacttggaattcaacaggttttagagttaggctatagttggaatgagtagttgttgcttgaaatgtttctcttataccatgtttggctgctgggaaaatgttgggagtgaaagaaaagggaatctattgacaggttgatgccaagttttaatttcttaggagataatcttttgcatttggatatatgttaatttggggcaaatttgtcttcgaaaattccaattgattgtcattgttagtttacatataattttgcttctgggttctgtttgggcgattaaaatttggatggaaaggaggaagacgagtataattgggtttttgggtttgataattgtattttttttaatgattgaacgacttgattataagaaatttggtcttattcatctgccaattcgcagctgtcgtggattgagttcattgaaattggattaattttacttcttctcatttctgaaaatgagcaaatagaacacacagtaaatgtggttgaaaatctgagcttcatgactagttttggtcgaatttggtggctgattgaggtcaggcatataatgaaatatcacaattatgattgaaagaaatctgtgattaatttattctattctggaaaactactgggatctgaaacatcttgtgaataaaatggtgaatattgagaaataggaagtttccaggaactaagtctatgagggaataagggtacaacattggatagttggatacccacgcatttgtctttgacggctattatgaattattttttaacttttctggattcacaacagatgaatgttcattttcaattgagttttatgtatgaacttatgaattgaatttctttaacagttatagcaaatagttacattttgtgtgcctactaaaacatacatgtccttgccatgcaggtttctccctggc

SEQ ID NO: 87121 - DNA, 918 bp, Citrus clementina
  Intron number 1 from transcript clementine0.9_004998m (loc us clementine0.9_004998m.g) derived from phytozome v7.0 (c hr-ID scaffold_19; pos 3503128 to 3504045)
ggccagccggacaggaaacgacctgctttggccaggtaattattattactattatttttccttaataaataaattttttattcatttttattaactttggttggttaatttattagtcgattagcgagtagaattcgtttgagtttgttcgttgaatcttgacttggatataagtaacttttaatttggttgaaaatatgcaagtttgaaagagaatattcttaatttaattacagagagaaccgaaagctaggaactgattttggcttctaacggacaagaagtaatagtatgagcattttttttttcaagttcgtattcagattagatgtattctgaaacctgatcctgtagagacagaaaggtaaatttgagtaattggttgactctggtgtcagtcatattgattctgtgatgaaatgacctaggacctttgcatttgtttggcataactaggaataactgaggagcttttaagaatgtttttgttgctaatcttgttgttgtggtgatggttgcacttgcagtggttgtcgctgtattcagtgcaaaatggctgactaggtaatttaacataatttaagcatgaaaaggccaacaacttcttatcttaaggtgcatgcttttcttaaaattagttatttaacaaaaaggctttctgattttgttatgttttacttttggtaagaccacttgttttagggtgttactgtgtaggtcccaaatttattatttctagttgccaagctaaagagaatatatttgaacgtaaaatttgaattgtgaatatttctgctccattctttagttctttagttactgaatttcaacttaatttacttagtggttttgatggctaagtcagacattgtttaatatgcagcgtaattgttgaggctcttaaggtggatagtttac

SEQ ID NO: 87122 - DNA, 927 bp, Citrus clementina
  Intron number 3 from transcript clementine0.9_022392m (loc us clementine0.9_018327m.g) derived from phytozome v7.0 (c hr-ID scaffold_22; pos 327719 to 328645)
ggtaagttgtaagttttgattataaattaaaatttgttaattactaaagtccacagcagaatcagtttggcttctgctcctccctttgtgcttttgtcaaagctaatggacttgcaaattttagtgttagagcttctcgccttgcatgtgactgactgactgactgagtaactctttagtcggccaggtcatggccctgcactccatgtagagaaagatatgcatatttccctatattggcctttatatctgtttgtaagtgacagctttagggtgaatgtgtcttaatagccttatgttgtcaatatgtgatcatcaattctttcctatgtctggtggaaagattagcagtcgttcagtttaattgggtacatctcctttgcaactacatttctttcttccatcattctgttttcctttgttgccagtttatgcatttaccaatcacaaaattgaatgtgagtttagggtttaagttgctctaggaataattaaacatttccctagatttcaaggttgatgatgtggtccaaactacagagatgtgacatagtgtgattggtaattgcaggtggtagttgcagatgatatgtgcccaagttcaatgtttattgtacaggcaagaatcatgttcttttttctataagaaccataaaagaaactgataaatcttggtttcagttttcaggtctatcttttattagtttattttggatgtactagggatggctccttcatagaataggagaatgttgcctttagtgcagatggtacacttggatcccatctatgctatggataatgtatataacattcaccatttattccatgcagtgtcatctctcacacctacattctcaatctacccccaaagttttgttaatattgatattccgtttattgaatggttgtcgtacctatgcaggt

SEQ ID NO: 87123 - DNA, 748 bp, Citrus clementina
  Intron number 1 from transcript clementine0.9_025351m (loc us clementine0.9_025351m.g) derived from phytozome v7.0 (c hr-ID scaffold_6; pos 3466157 to 3466904)
accgagctctccaagcccctcaccgcgtattgcaggtactttaatttggttctgtttcgtaatttaaataccagattaatttagagacgcctttttttttttcaaattattgttgttatttgttattatttacaggatgtgttcggaataggaaattgatttatgagataattgttagagaaccacaaatagaaatagaaattacttgagagcgtttggacttggggaatttgaatagaaaattacaaatagaaataggaagtactcttctgaaagagaaaaaaaaaaaaaagttaaacgctagagctctttctgctccgaagtgctttctatataaaatatacatatatagtagaaaattaaatgttatcaacttacctactaggactaacttacgtacccagagttttaatcctcactaatattcgagggatgaaaatacgagcttatgggggtgcttgtgataacttacctactaagatcaacttatatcaatacttatggagttcgactcagatttttaaccatcactaatattcgagagatgaaaatactccacattgcgcttgtggggttacttgtgggggttcgctgccctctaagtaataatcttatttgtaaatatcagttctaatctcatacaatatgagttatagtttaagtaatagtctcgtgtaattaaaaaaaaaaataacttgtgatgtcgaggttttgatcatttgggtttgtttgattgttttgagtgtag

SEQ ID NO: 87124 - DNA, 672 bp, Citrus clementina
  Intron number 2 from transcript clementine0.9_029487m (loc us clementine0.9_029487m.g) derived from phytozome v7.0 (c hr-ID scaffold_54; pos 1211870 to 1212541 reverse strand)
ttgtaggtgttgtcaaggaggctgtaaccatattggtaaaacttttctatggtagttagtctttctagattaatttggtaaaatgttggctgttgtatgtgctttattgtttgttctatcttattttctagccgttaccttgtgaaatcctttagttacaacaccgttctgtttcaaacattaaatattcgaactctcctattagataagataaataccctgtttgtcatgaggttgcaattatttatgattatggctattgtcttaaaacattttgcatggtctgagccctcttttgtaacttttgattgtgatctatacttatatttagatttttgtttgaggatgcttgatgcatctataagatgtaagaatcccgctttgattgttttactagttttgttgtcacagtgtagctatctcctgcatagacggaccctgtgctttgattgttttactggttttattgtcacaatgtagctgtctcctgcatagacagacactgtatagaattaaaccctagtcttatgttttcttatcgtgttttttcatttggttaattattttattaataattacaaatataaaaaacatgaatggctacacagtataaagactctcaaaggattctacttcaatatgtgaatgtacaggttgcagtgttttactttc

SEQ ID NO: 87125 - DNA, 570 bp, Citrus clementina
  Intron number 3 from transcript clementine0.9_012655m (loc us clementine0.9_012655m.g) derived from phytozome v7.0 (c hr-ID scaffold_9; pos 532109 to 532678)
ggttagtaaattttgcgtcaaaacaagtattgccatttgattttcatttattctattctaattttgaaactttgccttcttccctttagttgtaatttccactcgagtgaaatcatgttattagttatacaatggaccaaaaattatcctttacttttacttgaacttttgagctaactgtgtctggagtttttcatgtaactttgttgtaatcatttgtgaatcttgcttcaatcattttttagctagtataacaaccaatgttttcatgtgttgtttctgcaagtgaaccatatgacataccctcgttttagttgcaccagaatgtctctctataatgttcacatattcttgttcaaaatgttccatcttcacaatgcctaattcaaagttttgatcaagttcatgtaaagaaaagcatgtgttagttttgatcatcgattttctagaaatgacgaacaactgtcattccaattcaatatgtgtattgttgttctttattcttaggctacctataatcatgctactatcttatctctataatgataattccacttttcagatacctct

SEQ ID NO: 87126 - DNA, 705 bp, Citrus clementina
  Intron number 1 from transcript clementine0.9_024785m (loc us clementine0.9_023402m.g) derived from phytozome v7.0 (c hr-ID scaffold_19; pos 1549460 to 1550164)
tgcagacgaccaggtttaatcgaacgacaagcgtaagtttcttcgaattctctatttgtagtgttagaattctcaagggtttattcttttcttataaattttatgagatctagttggctatgcttcgttttcgatgtcgacgatgcagatccgacttgtttacttaaaatatgaattggtcttacttttgattcttgtttaatgttctgtaataactttaaggatggtcccaggtttttgtttgccacacattgtagatcttatatattctataaatgacctgggttttattggttctactgaagttgtgtattatttagattgatcttagtttttgatgtattatcaactcactgaaattggtaaagtaaaatgatctaagtttggagataattggtagtcttgtgcagttgaacttctgaattgctaactgtgattagatctcgattgtgactggatgctataatgttctgtttgagctgttattgccacaacaaagatgtcaaatgcaaaatttctaattgatcagttttaagagtgttgttagtattaataggccatagttacatggtcaaggttcggtggttgcttctttttatttgtaaatgaggagtagaaaggttgatgtgaagtgattcgcattgaatggtggtctgaatatcttttgcaggatacttgtccgtccataaagaatatccttctcct

SEQ ID NO: 87127 - DNA, 868 bp, Citrus clementina
  Intron number 1 from transcript clementine0.9_026064m (loc us clementine0.9_026064m.g) derived from phytozome v7.0 (c hr-ID scaffold_32; pos 773949 to 774816 reverse strand)
tcatccgcgcctcacgtagttgctgccattttaaggtgagtggtcaagaaaaggccaataaactcagcctaagttcaataaataattgtgattgtttaattgtacaggcaccgtcaatttttcttttggttttggcgtttttggtttgttcttttatagttgttctctggtaatctctgatgcttttgaaaaaaaaaggctggcttttgtttttccactttgagatatattataacattagcatagtacatagatctctgtcatgccattgatgtatcaatttagtactcgttatttctgcaacacaaaaagtgttttcagtgatttcacttattttaatggtcacctgtaatacacactccactgtttcccagaaactcaacagggcctttgggattttttttgtttttgaagaacacaaaagaataaaaagctctcttttttatgggaaaggtgtctgcttttatgacacagaacactaccatatttgtgtttttctgcttcattcgctgtctcctttgcacttctggtaattctctctgtttggttcatgagaaaattataggaaagtaggactcatgaattaggctcaatttgttggagggtcttaatcgctattgtgctatatatatatatatatatatatatatatatataataatgcttgattaaggtgtaaaagtgtttttttctttcagcaaccaattatgctagctcaatgatttgtgggctttgaagtatgcatttgagtttctttattgtaatgagtatgtttagagatgagataaaattataggcacccaccaaaataggcgtactgactgggggtgattgatgcaggaaacaggagaatattgtgataattgaa

SEQ ID NO: 87128 - DNA, 834 bp, Citrus clementina
  Intron number 1 from transcript clementine0.9_011013m (loc us clementine0.9_011013m.g) derived from phytozome v7.0 (c hr-ID scaffold_46; pos 583225 to 584058 reverse strand)
gaactagcactcattgatccaaagcgtgcaaagaggtattattagaaatcctttgaatgatcttttgttttgtcgctaactcagaattgagttagtttacatcttcaagcataaaataagcataagatacttgttaaacgtattgatattacccatactagagtactgctccctttgagtatatttattccttgcatactcattttcttgataatgtatgaagatctcatgtcatgaagtttctagggagaaaagagctcctcctacatgttgttagtgctcattgttctcgtagtaagaatagtcaaccagggaaagtcccattaggaagtgcaaggggcactgcagatgacttcctagtctagttccatgctgttctaattaaaatgaagaatcgcaggcggtaaagctccgtaaaacctttctttgaagattctgggcagaaccaaatgcctaacaccttcttctgcattgaaaaattctgatagttctcatctagaagtttgataactatccctggccattgtacctgcactcattctctgtcctagaagatgcccgtcaggaagtgggttgtgaatttatacagctatttgctctgtcctcatggatctttctattatattatctttattatctgtatgattctttctcttctgatgattattcttgtcctccttcttttgtttgttgtctacctatattatttcatatttccgtaagagactaaagaaacaaactacaatttactattttatgcattttatattaacactacaaactctctgcaatgtgatagaatctgggcaaataggcagtcagctgcaaggtcga

SEQ ID NO: 87129 - DNA, 532 bp, Citrus clementina
  Intron number 1 from transcript clementine0.9_006569m (loc us clementine0.9_004907m.g) derived from phytozome v7.0 (c hr-ID scaffold_147; pos 90988 to 91519 reverse strand)
agtttcagagctccacaatttctcctcactctacggtaagtttctctctctctgtctgtttctttgcttggtccccagaaactgaaagaaaataaaagaaacaattttttggttaagaatctataataagtgttaaaagtggtaaagatgaagagggttgatgggaattatagattttgaattgtatagatttctttttaatttaaagttgattaattattgattgatcaaaattgtttttgactttttggtttctttgaccccccttttaaaacaaattgttttaagttctgtagattctgataaaagtgggtcttagctttttgaaagaggtaagcttgtgtttgaattagaaagaatttgggttcctaatggtttagtttttgcttcttcttgtatgatagttgatcgaaattagtggtggtgttgattttttttttttttttggttggtttgttctctctgtgatattggttttaggagaaatggctgaacagattagagctcccaagccagccgcttcctttgagta

SEQ ID NO: 87130 - DNA, 669 bp, Citrus clementina
  Intron number 1 from transcript clementine0.9_002037m (loc us clementine0.9_002037m.g) derived from phytozome v7.0 (c hr-ID scaffold_9; pos 2574953 to 2575621)
atcgtcgttacaggtgcttgcccctctgttttccctgagacttgctttttctctttctgtttcatttttttaatggctggtatgttgacttgagtgtctttaacattatttttgacgtgggatctacaaacaagccacattgattctcgcgaacctttcttttcatattcaactaaactattattattttcccattaaaaaaatagttttttttttctaatgtattttgtttttatttgtgttttattatttttttcccattttattgttcttcatcaaattctgtttgtttcttcacttgcatgctatttcaatcatggattcttgttctaaaagtgccatccgtacggcatgtttttgtggaatttcctggagtcaagacttagcagttcctaattggggggctaagcatcacatggttgactcctatcctgaagattctttcttttctttttcatgatgaaactgatgcacatagatttttctatcacttgttgcatttccaaattgttagttcttgtgcttcttgatcatttgacagaaagacagggaaaaaaatgttttctgatatcagacaagaagaacaagtaacattgtgctaaaactagttctgaattttatgtaatgcatgcagggtttgggagacttatcttgtgcttctggtcatct

SEQ ID NO: 87131 - DNA, 754 bp, Citrus clementina
  Intron number 2 from transcript clementine0.9_023909m (loc us clementine0.9_023909m.g) derived from phytozome v7.0 (c hr-ID scaffold_22; pos 1703643 to 1704396)
ctggtgtcaggtattttcttttaaaattattttggttcttttattttcaatttgctttctcaaatctcaattattattttgacttttgagcttcattctgggatgatttttgtataacttgatgttttaggaacagtataaattgaattgatttgtactcttttttttttttaaaaaaaaaaaaggaaaaaacacatgctgtgctgataaacatttgctggcttatccaaatcttgtgctttgttcatgtagatagtgctttactgtttgctgtgcttactcttcccaaatttgatctcaaatttccgtgtggtatgtgatgtgggatttatcaggatttatcaagtgaactcttgttcacgattaagataatctgtcactgcactattcacgtgatgaatgccatgttattttgtaggtgaaaattttgggatcaatttaggacaagtggcgttattcttgttaggacttgtcactagtcaccattggcttgccatcatgtgctatcagatccattcgtctttgaagatacttcatgctatctaatttgacccccttcaacataaaaatcattattagcacctttctttgaggactttgaacttgatgcggtcagcttcgttgcattttaattgtttgtttgtttaagtttctttttatgacacttgcatttcctcttacaaaaatggctagtaaatgttgtagattttgcaaagttcttccttttgaattgaaattgtaatgtgcagagcca

SEQ ID NO: 87132 - DNA, 911 bp, Citrus clementina
  Intron number 2 from transcript clementine0.9_018767m (loc us clementine0.9_012998m.g) derived from phytozome v7.0 (c hr-ID scaffold_55; pos 866337 to 867247)
tttgttgtaggaccttgcaaggccacgctggcaaggtctctttttttcccccttcaaaaaagaaaatcacatgtgtatttttatttatttagattttattttgactaatttaaataaaatttattagaattgaagaaattgtaggtgatcatcagtagatgtattttgttactaatggagtagagatacgaaattctcagagtaaagagtaaaaatgtggtgaggatttagaacttaaatattaaaaatagaaggaatatttgtagcttgacatgataagagatgcaataatggcttttgattgtgtttgttgagttttcaattttggttattgggttgaacagaatggaacaactgagggtactttgatagcaaggagtaggtgaaaagaaggaaatactgcaattgttatgattacttttcaggatgaatgctttatcagcttccttgcatgttgatatttagacgtgtcaattgtgatcagctttaacagatcttatagtttaatgatagttgagaaatgaaaaaaaaggggttcttctgttctggtgtgtatgattctttaggaatggaagtgaattcagctttgtattagtgaaacctttgttttactaacctttccacttacaaatttgcgagaaaagaagtgtagctttagagataatgacgatagttgagtgaatggggctctgtagcctctttaagcagaatatattatgtactttattggtggtaggtcgagacaaattatgttaaccgatgagcaattcgaggctatggctgacaaagttactaaatatcaggacagttttcaattacttgtatttttcttctatatggtggggtgaagtaaaattttcatcttttgaatctcaggtatattcattggactggacttccgaaaggaatcg

SEQ ID NO: 87133 - DNA, 576 bp, Citrus clementina
  Intron number 3 from transcript clementine0.9_021327m (loc us clementine0.9_021327m.g) derived from phytozome v7.0 (c hr-ID scaffold_129; pos 116332 to 116907)
aaacaggagtcagctcggcggaagttcttgcagaggtttggctttttacttattataaatttgactgccagactggccttttggagaaaagaaaacagaaatgttttgataggctttaatgtgctggcttttggagaaactcagttattgtttctttgatgcttaaatttgatggtaaaggttttagatcttggtaggttttgtggaggtgaatgaaattgggtcattgaatctgtgggtgccagctggtttagttggtaaaatctcttcagttgaaacaagagatctaggatttgaacctcactcacatgggtatgaagggaatttatctaccggtaatgctaatgcttaaataaaatttttttaaaaaagaaaaatgttcattgaataaagctatacatgccttcaggctgataaatgtcagtggcatctatatcagtttaggattcatttcaatatgtatctacatctgctcttattgtttttcgtgttcaagttagatggcagtttctaatgaaagtgtaatgctaatttaaatatttcaaatatgcatgcaggtgccttattggttgacat

SEQ ID NO: 87134 - DNA, 545 bp, Citrus clementina
  Intron number 1 from transcript clementine0.9_026439m (loc us clementine0.9_026439m.g) derived from phytozome v7.0 (c hr-ID scaffold_32; pos 485091 to 485635)
agaaccaaaaccagacccatcagtcaatcaatcaggtataaatatattgtcaatatgtcatttatttcaagtttccatctgattattatataaggtttaattaaaaaagtgtaattattttgaaaatattgcattactttaataataatgcaaaactgtgaaattgacatatcgctcatgaaatttgatattatttgttttaatcttctctataaacaatcatgttcaatgggtgcttttcatttcatgctaatttgttttctttgtatgatgccagaatattgaaagtttcaatctttagtacaagcacaaactaaaaacttcagcttttgattaatgagaatcgagttttgtagataacatttgattccattgtttaatacaaaatgtcaaaccactgttataagttgaggtttagaatttagatgcataattttcgtaaggatcttgctagtaaaatttttgtgggagttggaactataattgtagctgatataatttacattgcttttttctttttttttcaattcctgttaaagaaaaat

SEQ ID NO: 87135 - DNA, 278 bp, Citrus clementina
  Intron number 3 from transcript clementine0.9_004400m (loc us clementine0.9_004400m.g) derived from phytozome v7.0 (c hr-ID scaffold_32; pos 753588 to 753865 reverse strand)
cccaagttagaaagctcagaaggtctacctttgttaacattacggacgaaaatttgaatgccaattttaaacacatgaaagaaaagcaatcgtatgaaacatttttaaaattaattttacaatgaaacagaagctgcttttcctagtactatacttttcttaagaggatgaataagacattgctttgttttttgcattttgttttatcttatatcatttgttcatatgttttccgaatctgaattagctattcttgtcaggattgtcaaattctgaaa

SEQ ID NO: 87136 - DNA, 610 bp, Citrus clementina; identical to SEQ ID NO: 81829
  Intron number 2 from transcript clementine0.9_004400m (loc us clementine0.9_004400m.g) derived from phytozome v7.0 (c hr-ID scaffold_32; pos 754015 to 754624 reverse strand)

SEQ ID NO: 87137 - DNA, 1054 bp, Citrus clementina
  Intron number 1 from transcript clementine0.9_034566m (loc us clementine0.9_034566m.g) derived from phytozome v7.0 (c hr-ID scaffold_6; pos 1975547 to 1976600 reverse strand)
ttctgcatcttgcagcgcagaacaaattaacctcggtaagctctccccgctgtctctcacactttctcgcacaaacacacaaaacttttgactacaattaatttgtacatggagaaattaatcataaacttaggtagatcatgataagcatagtatctataaaattgagtaggccagtagctagctagtgtcaactctctagagaatttgaggcgaaagttttgtttcaaagccttttttatcagagttataataaaaatactagtttccttcacgtatttctaacggttcaatcgcatatttatttttctatgatttttctaattaacaaatatacatacatatatacaatttagcttttgttacaagggaaaaatatagaaaatagctaaaggtaaggggggggggggaaattgtcttgatgagggaaatttgtttttaagatttcatttgaaaaataaaagttaaaacatttcttttggaaagaataatttagaggattttattttaggaactagaaagtgtgcacatatgtaagaaaatttacttaatactaattaataaattttaaaaaataaacttcaattattcaatgatttagggatctaaactgaactgatagatgccttagttaattatcaaagccaaaagagaaaaatagacattcctagtttgttaaaatgagatatcactaaaataaaataaaacataaatttaaatttaattatctgttaatgtgttgaaatatatatatatatatttttcatgctaacattctcacttatattaaagtgaaagtgttatatgtatatatatagtggaggcccaaacatagagaaaatttgaatggacaggcgcaccatttaccgggacccataatctaaataacaaaataatatttctattctattcaaattaggtcttggctattttcgttacgattccttcaactaaattcctccccactctgcccagtcttctgcctagttctacttcttggtgatgtttaataattgcagattgtgaatctgcttcttgagagttcctacagtca

SEQ ID NO: 87138 - DNA, 552 bp, Citrus clementina
  Intron number 1 from transcript clementine0.9_015591m (loc us clementine0.9_015591m.g) derived from phytozome v7.0 (c hr-ID scaffold_26; pos 1350941 to 1351492 reverse strand)
agacgacaccgttctcgattcgaccgtgaacccaggtgtccgttttacttatcctttgtatttatgttctcttatattgtatgttaatggttatataatgatgaactgcaaatgggtttcatgtttagaggcgagccttaattggaaaaagtaaataaatggagttgacgtatggataatgacctatcgtttaagggtttttggttatttgttgaaattgggtaggtgaaactaatgggaattcaatggtgtttgaaagtttgaatttttttcctcaactgcaagaaccattagaagattattattttaaggcgagaagggcaggctatttgaattacaaatcaatatattttgcatgaaagtatattattttatttatttttatgcttgggttggattttcattttaactttgaatggagttgttggcagagttgggtaacttgtgttagtgactagaggcttttaaatcctgatgaggcttttttttttttttttccttcaattattattatcatcatcggtggcattagtcctaagaggtctcggaggg

SEQ ID NO: 87139 - DNA, 493 bp, Citrus clementina; identical to SEQ ID NO: 82565
  Intron number 2 from transcript clementine0.9_013346m (loc us clementine0.9_013346m.g) derived from phytozome v7.0 (c hr-ID scaffold_80; pos 52205 to 52697 reverse strand)

SEQ ID NO: 87140 - DNA, 787 bp, Citrus clementina
  Intron number 2 from transcript clementine0.9_019477m (loc us clementine0.9_019401m.g) derived from phytozome v7.0 (c hr-ID scaffold_34; pos 1819567 to 1820353 reverse strand)
tagttgatttcttcatcaacgttgtacctttggcggtatgtcaattttaattttttttgttacttttttaacaagactcatagtagtgttaaatttttgttaggcttattcattgtttcgtttatggtgactaacaacctctgtacaattctcgtttgaattaatggtgttcgtttttggcgtgggatttttgtccaaaaagtgattttgtgtttaggagtttcatttttcaacatgacaagtagttgcatattcaattgagaaatcttggggaacatttgttagagtaaaaattcttagctgcagacgttggcattttatcaaaatttggatctcaaatttttgtgaaaaacaaaatttgtcaactccaatgtattgatacattattcatgaaaggggggaaaagaaaaaagaaaaactattgatagccagtgtcgagtaatgtaattttgtgatgtgaatcgtttctggtgttatatgtgtgaaacatatgctggtgcagattcatggtctcatctatttttatcttgtaatattcgtatataaatccttttctattcgcttaaatgttcggttgatccttattaattgcataatcttttattgatttttggtgctcattcatgactttatttggtatttatgtagcaatgggcagtgcacggctgcacgcgatccttataagaattctgtgatagggttagctcgttggacagtattatgtttacttatatacttcgttattgcaacagacttgggttacctacaaggaatcaaattggattgg

SEQ ID NO: 87141 - DNA, 801 bp, Citrus clementina
  Intron number 1 from transcript clementine0.9_020914m (loc us clementine0.9_020914m.g) derived from phytozome v7.0 (c hr-ID scaffold_80; pos 1004879 to 1005679 reverse strand)
aaaacaaaaaagcttttttatttttctctgtcaaggtatttctttgctctctctctctttaaattttatttgtcttagaatttgttgattttagatggggagtttttattttgtttgatagattatggagctatcgcaaatggatatcctttatttttttggatagtcttatttactgggttattttttttttttcactaagaactttttgatgattgatgtgggtttttttttccctttttgtaaaatatatatatattttttcttttgatgggtttttcgtttagggcgattgtgaatttgtaagggtaatccgtctgcgatggatactttgtcagtgttgaattttagctcgtgatcacaataggaaagaaacttttttctactcttgaagataggtattgaaaggaagaaaatttgtcactttcatgccaaaaattgtaaattttggacaagtgattttttttttcttggataaaaatttgttattgcaacaaggaatctttcattctttttgcattgatttaggatgtaaggtatggcgacatcctttgactagtatgagatttttttttcttctcaaaagttaacctttgaatgctgattaatgaagaaatgtaagttcagattgcattagtttgcacttttagctgcatgggcatttgttatttaagttcatgaatttcttttgagaatagtttgtcgcatgcttttcctttctcttattcaacatggttgtttaatgtgattttcttgtatattccaggtgaatataccacaaaattattagtgcagttacga

SEQ ID NO: 87142 - DNA, 935 bp, Citrus clementina
  Intron number 1 from transcript clementine0.9_000892m (loc us clementine0.9_000892m.g) derived from phytozome v7.0 (c hr-ID scaffold_26; pos 581980 to 582914)
cgaggttctttttctatttctttttttttaatttaaaatttattaatgtgtcatttttcttttaaaaaaaattcatttgttggggatagaaaattaggagaaacatatgtaacttttgaggggattaatgatatttgaattgtatgattttcttggcgagtagattttattattcctctttggatatgtaatttatggaagaagagggggaaaaaaaggtttatttcaattagttgcagttaggatttttagtgggttggtgttggctgttattttatttattcgagttttgagattaatgcttaattgatatgatataatgaaaggggactgagtaccataatgagagaatgaagataactgctggagaaagtatagtgtagaaatgtgcagcagcaaattctttatgtttaatttactattactgcataacattttaattgtgttcctaccattggttctggcaatgtgattttgatgattagacgggctttccctttgggtctcatatcagctgattattgagattttaagatcatgatttaggggtgaatagcatcatacagaccagtatattgcatgactttgataaattacattgcaaaagtgtgtatgatgtatgtgtgtatttcaagaaatttagcacgttaaatgtgtcagtagggagcctgtaataggtctgtaaatgtatgcaaaaagccaaagacaacaaccagaatgaatagagaagtttttatttttatttttaagtcatgtttcctgtcactgtgcaaccattaatatcatttatttggtttgcagtttccaagtgctggaagttgtctgctgttgcttttaactcatcttttgattctgtttatgacgagttctattttctaggtgaagatattaatcctgtaactgagtttacttggtgcttttgtaggtttgtaaac

SEQ ID NO: 87143 - DNA, 850 bp, Citrus clementina
  Intron number 1 from transcript clementine0.9_032847m (loc us clementine0.9_032847m.g) derived from phytozome v7.0 (c hr-ID scaffold_19; pos 2999792 to 3000641 reverse strand)
gacggtcaaaagaagaacgaagagacgatctctaggtaaatttttctcgctaattgattttagcttggacattgaagatttatttgcctataatttgcttataataatttctttaaaaaatatcaaatgtagttattgtttggttagatgatttatttcgtatttttggtgacttattagcttctgtttttttaattcaattttttatgattcatgattcttaattgcttgtgcatgatgcgtaaagaatttgtcatagctaccaaatgaaatgatgatgtatctgattcatttgaattttttctatttgctttttcatttaaacttctgtaatttcgatagtaccttcagcttgagtcacttcatttttttatattccttttcatttaccatatatcaacaatgcaaacaattagtttcacacttacatcagctaagaacgatcgaagcctttttgttactgaaagctagaaaaatactgaaatgatttttagaaaagaatttgatgagtgttttcttgagagtatcttttagatctgaaatgtactcgaagtgtttatgttgagaaacatttgatactcctagctaaaatttataaccatggatcgcataaaaataatgataaatattcctgcaaaagcatatttgcttgtaagtgctgctataaatataagatacctaagctccatttttcagctttgagaaacagtatggtgttttgttaaatgtgctcaagttatattgttatgtttgtgcttccttaatttgctctttatgtaccaattctgcaattatagtgaataatttatgtttcgatacagtgttgctactgaaatccggtctaagattg

SEQ ID NO: 87144 - DNA, 628 bp, Citrus clementina
  Intron number 1 from transcript clementine0.9_011256m (loc us clementine0.9_011256m.g) derived from phytozome v7.0 (c hr-ID scaffold_19; pos 548433 to 549060 reverse strand)
gcccgatcctcaaggactctgattgctttctccaggttcttcttaacacatttttgctgattaccaaaaagtgaaaataaggcaaagaacgttgtcgttcgtagtacttgagtttgaatttgccgtttaaagtaagtttagtgtttttatagatgatcggctgccaggattttttgagaatcaaccacttatcctcttttttgctactgagaaaccgccagttaaataaactaaatggatgattaacttatggattgattattgtttaaatgtttagtttatatcaatttttttccggattattagttgatgattgatacttatgctgttcaagtatgaaaatgtattttatattctcatttattgcatggattttttttctttttttgttttcactcttttcaatcatatatgatgactagtcagtttgaatggatagtttgtatgtgaagtattacttatttgttaattgttatgggtattagtttgtatagatggatccttgctcataaaagcagaagataagtgcagtttgtgtctgtgtttctcagttaactaattgcttgttatgtgatgcaatgatttcgtggcagcctaatctgaacaagttcttgtctttggggaggcc

SEQ ID NO: 87145 - DNA, 917 bp, Citrus clementina
  Intron number 5 from transcript clementine0.9_018268m (loc us clementine0.9_016151m.g) derived from phytozome v7.0 (c hr-ID scaffold_19; pos 267686 to 268602)
gaaagagggaggtatattattgaattttagcactccggattcttactttctctctgctgtgaagctcttatgcacgtataatgatcgtctccttcattttcgtagtcttgggattttcttctccctttatttggtccaatttttcggctatacaaggggatagcactttccactcgcttacatgttttaacaggtctgatagcctccttgcagctgcaagaaggcatatgccgctaggactcaatgctgttccgtttctgtgtaatttaattatgtttggtttcacatctccactttcctgtttttcacagctctgcttccctcggtgctgtgaatttcacttgtcacagtgatacagtctagttattaatgttgcttagtctggtaccaatgggtttctaactgaaacagatttaatcaacctgttgatcatttcaagtgtccaaattcgttcctgaacctgcgttgattttatgcatggcttatggcagtagtaggaaatgagacaaatcctgtatatttagctggtcacttgggtttgaatcttgagggagttaaggggctaaaaaatgaatttcggctctacccactcccttgccttttttttcctccctcaaaaaccaaaaaaaaaaaaaaaaggattctccttagtttatgaattgtttgtgttcttctaaaacctttcttcttgatggcatttttaatttgaacgagcacccttttggtttaaactcataaaagaatactttctatcgcatgctctttcggaggggaactgaattcaatctaaacagttgtgctggaggtctctcaatacatttgattttcacagtggcttcattcatttcttaaaaaatcttggtttgcatatttcgatggtaggtgcttgtagtccaagaaaatagtgggagattccg

SEQ ID NO: 87146 - DNA, 915 bp, Citrus clementina
  Intron number 2 from transcript clementine0.9_032189m (loc us clementine0.9_032189m.g) derived from phytozome v7.0 (c hr-ID scaffold_110; pos 588657 to 589571 reverse strand)
tttcattctgaatctaggttataacaacctacaaggtacgttctacatatttgcatttgcatagttgcaaaattctttttattttataggttggggatattccactcattattcttgcaaacccacctcattttgataaggtagttataataagttcacattatgttatagaattataaattaagtctgaacaattaataaattatttttataatgtttttcttttatgacttagggcttttaacaatctttggccgtttacggttgctttaaaaataagtttaatttgactattttactcttataatataaaatgaccaaatcaccccaaaaaacatgtactattgtatctaatatatagtttcggcattttgttttatgttttgtaatacaatatttctaaaataaaattcaataatttttagtgcaccacatgtcccacaaatacattttgctagtttagttgaagttgaagtaaatttgtaggtatttttgtaattctacctcatgagagtagactagttatattaaatttatgttaaatcaacattagttattatatatgataaaagaatataagtttcaaaaagtagattaagatggatttaattgattaattctccaaacttcttctttatttgaatttttttaagaatcttgttccaataattttctgaaagcgggtggggttttacaaaaattatgaggtagcaatatcaatccgcccccccccccccaaaaaaaacgcaaaaaaaatatattataaaactaataacacacattttgtgggcaaatttgattttcatgcgttatgaaattaaaatttatgtcaagtaaaaagctcaataactcatcaatttggcgtttatctttataacaggtcaaattccaactgagattggcaatctacaaaat

SEQ ID NO: 87147 - DNA, 897 bp, Citrus clementina
  Intron number 2 from transcript clementine0.9_017939m (loc us clementine0.9_016279m.g) derived from phytozome v7.0 (c hr-ID scaffold_26; pos 3120889 to 3121785)
gacacattatcggtatcaacaaatctttgaaagtaaatcaaatgcaaacaactatggtgtctttatggccgttgttgacatttatatatttatggtttgtggttgacttgctatatattaaaagttaccttggtgttcatggtccttgagtccaagcacgtgactgtacttaatttaatttacttaagtttttgttgcgtgaatagtgtttgatactcctttttcccttatgatttgtaaataattacacacttgtggcctatgaataatgaaaaatgggactgtgttaaaaactgttcagggtttatgtgatggtaaaagggaacataatcaaaccagtttattgccatgtggtacagttcatatgctactaggtgtatctcaattagaacttagtttgtcagtttgggttttatgatcaagatggataaaaaaaatgtttgcttcccttcattcttttctattaatatcaaaatgcagttagcataagttggaattaattagctggtggccacttgtttagatcctccgtagctggttttggattttacacttggctgactaaggttactccattaccatttgagctattggaagtggaagatgcattatacttagattttcctggatgtcacattccttttgaaaatattgtgtgttacgaagactgaggaaatacttagcgatacatgtttgtaaaatgtgattttcttctaaaagcatataatgttgggatttctcctggaatgcaatttttaagattgcttctggtctttcaattgttatcttgactagtttagttgtatatgtacgtggtgtctgttgatttggcttctctatcgtaactgatggattctttgaatttacttatacattttatttcttttctttctccag

SEQ ID NO: 87148 - DNA, 717 bp, Citrus clementina
  Intron number 1 from transcript clementine0.9_007741m (loc us clementine0.9_007741m.g) derived from phytozome v7.0 (c hr-ID scaffold_54; pos 520555 to 521271 reverse strand)
gcattcagcagctcgatttgccaattcatttcgcagtgagtctctcgtcctgttttcccttttttcttagaaatcaactagggtttctttactcctcttctgagcttctatttatcatctttgaattatttgattatttgggtttgttttgtatcttaactgagattcaattatctttagggttagttggtcagtttaagtgtaatcgtcaaatgaattaaaaagaagctttaaacttgatcagaaactgaagtaaataggaatttagcttccattttgcttattttggcttccgtagcatttcactaaaccaagtagtgttatctaggtgtagtgtttgcaatgtatctgaaatttgcttctgttagtggacttatattaccgtttaaggggtaattattttgctaaaagagatttaaaatgatgaatgctattgcctgttttgtgatttcctaagtattggcattaagaactctgaaaccgatgagtttattattatttgtagctatttctgagataatgccacccagtttattttgaatctttttaacattttgtataccaatttgaagaaaaactattgtgccaatgaaggatttcaagatcatattctttctaaatcttcttttgttatccttggttatgcatttaatatctctgattaacaggatagtctcttatgttgtatcacattttctctgttttctgtcaaggttt

SEQ ID NO: 87149 - DNA, 1002 bp, Citrus clementina
  Intron number 1 from transcript clementine0.9_001748m (loc us clementine0.9_001588m.g) derived from phytozome v7.0 (c hr-ID scaffold_22; pos 853585 to 854586)
cactctaatttaatttcagatttctgcaactaaaggttcctctcgtgttttccatttttcctgctcttatcgctcttgaatactttgtatctgtttttttttttgttggggggggggggggggggagggctatatatacggattaaacgtgtcacgattttattcttgcacgccctaagcagatagcggaactcgttctgtttagcaattttagtatctaatttttgttttatcttagtgcttttgtatcgaaggattaactttttatttatttaatatttttatttctcttcgccttgatgttatgattgattgcgatctccagcatcttttttataataaaagctgagtaatggttgaagaagtgtttttttttttgtggatttttattgtatgcattcaggatttgatcagcattagggttttataaactcaccatgcataatttcttgctttgaaaactatgtcatcttccttcttgcaatttgatagaattgggatcttgtttgcctttagatgcggcattaggttagattttgataggaaggtatatttcagagagagtgtattatattcgttatgattttatggaggtataggatggctcttattttgtgtattctagcgttaagtaagtgcattggttgcaatgtgtctgttttgtagtatctctttcatgttattgcaacttaagacgagaaagaacatccatatacataaaaatgtatgatgctgacatttaaaacttttcaaagtgctgcatagcatcttttcattttaagcattaaatgtcctttgtcgcattcgttatctgaataattgcatgccggtgcatcagctactaacgccagtgcagatagatagatattctgtaaacttcagattgcaacaaacttagaaaatgacaagtaccattttgcatttgtgatatgcgattgcttgtatgtcagagtttgaatttgtacagtaactgattttgcactcaggttgctgctgcttatc

SEQ ID NO: 87150 - DNA, 640 bp, Citrus clementina
  Intron number 2 from transcript clementine0.9_011924m (loc us clementine0.9_011924m.g) derived from phytozome v7.0 (c hr-ID scaffold_6; pos 6137284 to 6137923 reverse strand)
tattattccattcctcaggttcattacttttcttcattatgctttccattaatttatttatagaggatgcggaagcattgtgagaattgattgaagtttaatatgacattgagttccaagtaattgctgaaagacataaatttgctaggactctttctataaagagttgtttttgagcaactctttgaatagagagttgtttgtccggatttttatcgaaatgtggaagttggcacctgataagttttgcattcatgtaaattttgatgtattatggaatttttcgaggggtgattgttgatggatatgttaggtattgagtatctaggagaaatatatctcaacattgtcataatgcttttgccctttttacttgtaaatggaaacctgtagaaatgggaacattaggagctaagaggtcatgcttattgaaattgatggcaattggcagttgcgtgaagcagtagtattgcagaaataagttttatgattctcatgttgtgtatctagcttactgtatatttaaccttaacactaatgggttttgttaaattggtttagtgggtattttctcgtctaaagattggttatgttgtttcttgtagatagagcttgctaagcgtttggtggcttgttcttt

SEQ ID NO: 87151 - DNA, 591 bp, Citrus clementina
  Intron number 1 from transcript clementine0.9_004158m (loc us clementine0.9_004158m.g) derived from phytozome v7.0 (c hr-ID scaffold_2; pos 8974049 to 8974639)
tcgcctccgcccatctctctgcctgcaaatccgtacgtctgctttttctttatttatttattaatcaatctgtattaaacttgcccgtgttttgcaatttgtgtttttttaaacttgcctgtgttttgcaatttgtggctttttaaacttgcccatgttttgcaatttgtatttagttttgtttttgccatttaaacttggttgcttttatttttttagcgccccaaatttttttttttttatcaaaaaggtttaagttttagcttctggtaataattcaaccaggttttactaaagtctaaagcaaatgatgcgcattatctgaaatttgatgttggtttctgtgtttgattctgagaaaaagaaaagggtatgaaattggttgagggcttttttgcaaaatttgtttagtgtgatgattgatgagacttgcgaatctatagtgtttggttagtgtgtatgtttcttcaagtgattgattaaagttagctgcaaggattgctttctgatagttaaaagtttcggattgagcagattatgtacagaaattcttgttcttataaattggaatacttttgcagttgacgtgca

SEQ ID NO: 87152 - DNA, 916 bp, Citrus clementina
  Intron number 2 from transcript clementine0.9_018943m (loc us clementine0.9_018943m.g) derived from phytozome v7.0 (c hr-ID scaffold_22; pos 1753381 to 1754296)
cctcctttaaggagagaaacacgtcgcagtttcaggttcttggttttctaatggccttttatttttatatgtttttcagaatattggtgcttaaagaggaaaggaatagcctttttttttaataagaattaaagataaacaatcaatgagcatctttgaaaaatgtgtcatttgggatcttctgtttgtagttcatgttctggcttccaaggcaatttttctgtatctgtctttgtccagtggttcccttttctactttttacacttcatactgtaatattcctgaactactctgaacttctgctctttggagagggtggagggtgtactcagtcacacaggggagcatgattcctgtggggcacgaatgagtttagttgttgtggctcactgcctttgcatgaggctgggttcttctattgtttgtatgaagacagaccaagtgaagaagaaactgatgaggatttagactgagttaatttagtcagctttgagaaagggatttagactccaaatccctgattggagctttctttttgagttagatgccttgttggactgcaacctttgcttttttgcctctgagcatcaacattctttcttctttagcttgatgccttgatcagatgctgaattcttcttcttcttcttcttcttcttcttttaattcgggaaagtgaatccttcttagtattaggatgtaaaagaatggtttagttggttattctctgaagatatatctgtgagagttctgtgagatttattttttttgcttaagtaaacattgtgtctctagataattatccattagttgattgaaattgcaagtcttctagattttttttaattgctgcttctttcattgtttaatatgtctctagccaaggcaatctgtgcaacaactgcaagcggcctg

SEQ ID NO: 87153 - DNA, 647 bp, Citrus clementina
  Intron number 1 from transcript clementine0.9_025774m (loc us clementine0.9_025774m.g) derived from phytozome v7.0 (c hr-ID scaffold_19; pos 2547729 to 2548375 reverse strand)
ctcgatttcgtcagttcatcgtcagcattgcccaggtaactctgcaaatttttaaatttctcaaaatttgaaactgtaattgtatcctattaatgagcgatgataagcagcaaagtagaattcatttttcatgtcaatgtgaaatttaaatcttccctaaacaggtctttgctcatttaagattcgaacctgcagtgaaatgtgcctttgattgtaggagcaagagagattttttcatattgaaaaggctagaaaaagattagtagtagcatacttacttggtcattgtttagtgcctgtgtttgatttttccaatcaatacggagctgggtgtgtagttgtttattgcccttattgcatgagaatacttggtttctactttctatagcagggctattgttgttgaattcccacatattccatttttatgttccagtttttgcctttttcgtttagtttcccttgtgtgaaatcatgttgtaagtagctgttttcttatattgggtaactaatcttttgaatgcatatataccacataaaattggatatcttggtttgtagttttggcacagagttactagattattaaatgttcttttcttaatgctgtacatttgaaccaggcaaatcatcgaatcacgacaaga

SEQ ID NO: 87154 - DNA, 717 bp, Citrus clementina
  Intron number 1 from transcript clementine0.9_013372m (loc us clementine0.9_013372m.g) derived from phytozome v7.0 (c hr-ID scaffold_6; pos 4546408 to 4547124)
tgcgtatttatctctatctgcagctgaaaaatagggtgacgttttttaatttctgatttttcatttataaacccttgaatttaggcttttttctggggttgacctcctatttggtttctgggaaattgaggaataaatattgaaattataaatcttgtatttggctcgatttctgaagaaatttgaagtgctcaactgacctgaactcagctgggcagcttaggctccgtctaactgaagattcggatttagggtgaatgcgtgcttaaatttgaattgatgatgaatttttccattttggtcgattagtttctgtgagcttttgtttggctgctgtacttagggagggaatataaaaaggactgaaatattggaaagtttaaatcaattttcctattcaggggtagataaaagatattgatttcttaggtttcggttacaaatgtggaattccatcaaatcatctatgaaataattcctttccaaatattaaaaggcaagtgcttgcagaactttatagaatgcgaaatttttggggagaaaccaaaacctctttttctttttttttctctctttttatttttactttgcagcaatgcatgtctgtttagtcaatgtagctgatgagttatcatagcaattgcatgcaataatgtatattttcggcttgattttcttgcaggttgcatcccttcattggtcaagtgttcatcagag

SEQ ID NO: 87155 - DNA, 720 bp, Citrus clementina
  Intron number 1 from transcript clementine0.9_014248m (loc us clementine0.9_014248m.g) derived from phytozome v7.0 (c hr-ID scaffold_26; pos 2004712 to 2005431)
gaatctctgctcatctttaccctccaaatctccaggtatttacatgtattattgttcttcaatagtgtgttttatttatgaatcttttatcatatgatatggtgactcattctttgcatatggtttagttgttttctgggtcatggctgttgtttttgtgcacatatataccaagagtagtttgtttgggattgtggcatcgtggcttaaatatgatagttgcttgctgtactcaaagctcaagccatcaaagaaaaaattaatgagtgatttcataaatacctctggatgttagttttagcatattgggatgttgtagtatttttaatagagaataaaatcacttgctgtcaaatataaatgagtgggtaacggcaacaaatattagctgccaaataaaaactattgctaatcaccttttaactgctgtgtttttcaatgtcaaagtagaagtaacgctctacccataagattattaataattcataagaagagtaattaactccaattttttttatagccaaaattgctttgtctggggtcagttcatatatatcaggaattgaataaattgagaatggagtctactgttaatatttgtattgtgtataaattttggtggacgttagagatcaaattaattactactgaagttgttggatgtgctctgtggattgtgtgctggtaaatggaggagaattcttgcttgaggcaagctaa

SEQ ID NO: 87156 - DNA, 1033 bp, Citrus clementina
  Intron number 1 from transcript clementine0.9_008700m (loc us clementine0.9_008700m.g) derived from phytozome v7.0 (c hr-ID scaffold_80; pos 741654 to 742686 reverse strand)
agattttagaagaagaagaagaagaattttttaaggtttgattctttcgtaactccttaaagtcttttgtgttctatgattttggtataattttataggagactgagcaaagtaatgatctttctgcgttttatttagattttgctcatctgggtttgctttctatttgttctgagtttatatgatccacttgttttaagaatccttttatctgcaagatcattcttgtgccttattcttgtgcctttgtttttatttcatttttactcacgaaagtcacaattttaggcgcttgtagattagtagttggatcttattgtttatgaatcattcatttattttattgtttatttttgcattattatattataatcaactgatattacaaactagtttatcataagtctaaaatacatacaatgatagtagcgtcggggctctactcgcattgcttgaaaatccgctccaatagagatttactcccattttatcaaaggaaaaaaccgcttctacatttcacttctaggggactgaaaccaagtgggagagcccatttggaggtgacttccatctggctaaggatggcttatctattcagttatctaattttgcttccttttgacgtaactagtgaatcactatgttcctaacaatggccttctaagtatgcgggtttcctgaaaaagtgcatttttcagctggagacctttttaagatgcaagggtgcattggctaattgatttttactaaattatgttaatcacatgatgatgctggttcgataattttttactttttacaatttgattatctcaggagtacatgcatgaccatcactcatttcattattgcatctgatatttctttcactgaaataatccacttcattcttaaaaatagatcataagttggcattgagtcatgggtggtgcttcattaaaatatttattcaaggatctcaaatttgtttgatttgtgaaaatcattttgaattaatctcactatcaatctcaaatgtggaacagaggaagat

SEQ ID NO: 87157 - DNA, 1000 bp, Citrus clementina
  Intron number 1 from transcript clementine0.9_011905m (loc us clementine0.9_011721m.g) derived from phytozome v7.0 (c hr-ID scaffold_2; pos 4442690 to 4443689)
agacccaacattgtttcggaggtaagctcagtcagatctaacacactacaactctgtgttgttagggtttcataattcgaataatcgtgattttttttattgcaaagtaaaaacgttactttctttcgtacttgccgagaaagtgtgagaaaatgtaacgaaatgaaagttcttggatcgtatctgttgttctttctaaaatttgtgcttctttatgttagtttctagcttgtgagcttcattgtgttaatgctgttactcttctgatgtaaaattgtgcattcgagttgctgttggtgttcgaaaagtgtgagtgattgtcaattttagaggattcttactgtagctaaagagctggtcgaaaaattaaaatgtgtttatgaatgaatgaatgaagtagagagatcaaggactcattggttttggtcagtttctttgagcttatagttgctctttttttttttttttttttaaaaatgctaaagttggatattaatttgtttaatgtttctaaaacatgtttgtaattgctgtgtttttacttaattttgaaagtaatgcagctgaagtgttagataaatgatccgcgtatacttgacacctagtaattttatgtctcatagcaactatggatttgtcactgcaaccgaattccaaacatatccttaatcatatggagcttttagcatgaaggatgtgattgcttcttacgcctttatctgatactgtctttctataatgatctgagagtgtgcttttctcatttccatattagatgaaatgctaattaatgtgctaattattgtgcctctagaaatccagttctatagattggtctagacggggggttgttctgtcagtgtttttggttgaaaagaatatccattacgaatagtttttcaactttatgtaattgatgtctcacttgaatcttaacttggtgtttattggtttatactttataggcggggttgtccaccagagcgaatcagtggtggga

SEQ ID NO: 87158 - DNA, 832 bp, Citrus clementina
  Intron number 1 from transcript clementine0.9_017653m (loc us clementine0.9_017650m.g) derived from phytozome v7.0 (c hr-ID scaffold_17; pos 2090551 to 2091382)
cccaagtgtgatatctgtcaggtttagtaaatctttttttttccaattgttaaatgcaaattaattggatgaaacatgctgatctttccttaattatgccttaaaatacaaaattaatccacgtgatttatcggaaatttagggaagggcccccgacgaaactataggggggttctttgatattttctctgatacgtgtttgtgtaaattagttcgtgtttaccagtcttgcagaatggttgtcgtagattgaatgcagggagtttggaagtaagtttggggaataatatatgttgacaagcttcggatatatcttgaagatctctatgtgtaatctggatatggaatgtgacaccaacttattttattacttattatttatttatttattttggttggggggggggggggggaggatattccaatgataatttgaatttaataagccggctttggataaggaaggaattgtatcttttgtttttaactaggaaaatggaaaccctcttttgtctttttgtaagcaaaagagaagctatgtgaggatcgagcaagtttataaacaatgtggggatatcgtgtgaacagaattaagatttttgctttacttgggaaaagatttccaatctgttgtaaaaagatattttggttgcattctaaaaatctatagatatatcttagttgtggtatggatgtatactttccaaaatgattaactaaccttcttgaatttgctggtttctgatttcttgatcttcatttagattaactactgagaatgcgatgatcctttgcaggaaacatctggctttttcttttgtctacaagatcg

SEQ ID NO: 87159 - DNA, 668 bp, Citrus clementina
  Intron number 1 from transcript clementine0.9_021984m (loc us clementine0.9_021984m.g) derived from phytozome v7.0 (c hr-ID scaffold_125; pos 223293 to 223960 reverse strand)
ctgagcaactccacaaagccttccaaggtcttttttttttttttcattcatattttgtgttggattcgatgttacattaggttgacgtcattacttttatcatctatgtttcatccgatctgtttgttattacaacgtttcatccgatctgtttgttattacaacgttcggtgtcatttgtctttggtgtttttgttcttgaaccgatgttgttgatgaacttttgagtgaatcttagacgatgtgaacgatgatcgactgccatttcacgtgttgtaaaatgatcttgatcaagttcttgtttttgacccttttggagtcatcaagaaagagctaataaaaattttacagggtgatcatttggggattatgtagtgtttgatcggttagtatgaagatctattacctatatatctcatagatggtgtaggtccctccctttgttattttgattgtactaaccaattaaagatcaaaattttcagtgtcatcacatgaacttattgcctcgatataaggatttgagtctctgtttgtatcttggttgtaatggctttttctattggaagactgagaactactatttagcacaaaaaatgctggttgcctgcgaagtgttgtttgtgtgtcaagcaattgattgctttctttaatggtatgtttgcagg

SEQ ID NO: 87160 - DNA, 770 bp, Citrus clementina; identical to SEQ ID NO: 83255
  Intron number 1 from transcript clementine0.9_022753m (loc us clementine0.9_022753m.g) derived from phytozome v7.0 (c hr-ID scaffold_86; pos 406879 to 407648 reverse strand)

SEQ ID NO: 87161 - DNA, 1040 bp, Citrus clementina
  Intron number 1 from transcript clementine0.9_000537m (loc us clementine0.9_000537m.g) derived from phytozome v7.0 (c hr-ID scaffold_32; pos 1157856 to 1158895)
gttcaaaggaaaactctcaaaataaaaaacgggaggtaaaattttgaaactgaataagtctttctgatttctataatgacaattttaggaaaagaaattgcgctgaaaagaaatgatgggtgttattcttttaatcttcttgtttttgattcaatataggaaaacgattcacttatacatcctgttatctgcatgtatgtgtatgtactttaagccataaatgacctaatgaacttttttccccaatatttcccccccaaccccccgtttttatgtattgatacacgggtttgtggaagtaaaagctttcgtatttagctcgatttaaagtatctggctcaagtgattttgagttttagcttttgaaacttaattagttgaaattttttatccagaactttgtttaatgttttcccttccttatttttaattcatggttgtgaaattctgaatttggattttcttttcagtaggttaatgcatggtgtcattttagatagttttattcttttggtgcaaagattgatattttttgaatagttagattatgtggttttaaaataatttctgctgctctatctggagatgttagctggtggtattcaatcgtgtgatgaactgctgtttaaagcattcatatcgtttcattagtgatatgttgattatgcttcatctggttcataaattggagaattcaaaaaatgaggactttgaatcttgcaattcgtgtatttggtatttaaggaaccaaaagctgctgcttatggtcaatcttaacaaactgcaacaagtttgctcttctggaagatttcctttttagggactagataaactgagaacacaatattagaagatcaattattaatttattttgcatgttcttctgagagattatatatctcttatattttctgctgcataggaaacggtttagactttggttttgttaaaattattagaggtcatttcgttatttgatgtggaactttgatatctatgttctcacctattttgatgtggagctttgatataggttgagg

SEQ ID NO: 87162 - DNA, 707 bp, Citrus clementina
  Intron number 5 from transcript clementine0.9_009905m (loc us clementine0.9_004323m.g) derived from phytozome v7.0 (c hr-ID scaffold_17; pos 2562074 to 2562780 reverse strand)
cttccctttctcgcagattttgggtatggcttctctgtttgatatatttctccaatgttcttgtatactgttgtactgatttgttagtttttttttctttttctttacaactacatgtaaagcctgaaatcaacacttctattgcctcctgcatggacacctaaatatccagtaggtttatacctatgctaagatttaattaattttttgtgctaatccttgagagtcactttggtttgaaattagcttcaattaattggttcaaaattagcttcaactaatctgtttgctatcttgttcgtgatcaaagcttactacaagtactgataagtgttggtgatgtttttctctatttgtggggtttataatattattatacattgttgctatttttaatgctttgaaaatttgcacatcttctctatatagtatatgtacattatacgctcttttgtcatgttcaggaatattggagactaaaattgctatattagttgggacaaaatctcacaacatttttggtttttgattgcattgttagtgtactgttgcctttcacagttacaaattctgttcatatgattatatctactcttttttctttaagtaaataaaaatagagcatattgaggtgctacatgtaaattgtaattgtgcctgtgcttttgtcagacttaagcaaaatcgtcactttgagagccatccaa

SEQ ID NO: 87163 - DNA, 900 bp, Citrus clementina
  Intron number 1 from transcript clementine0.9_009905m (loc us clementine0.9_004323m.g) derived from phytozome v7.0 (c hr-ID scaffold_17; pos 2565710 to 2566609 reverse strand)
tcctgtggcgaatcggctcaagtatacggtataaatgctaattttcatgattgtatggcttttttggtattcttttattttattattctacttgctgatttgaatttgggagttatgcatatgatggttacgtaaaatggtctgacttaaatttatatgtacataatttttctcttttttttccctaaaggtaaagggggtggccaaagctttttttttttttcttttcttacatccccgaagatatcaatttggatggacaatcaaataaagctgcttgaaaactacttggccacacccctaggggcttgtatgtagataattctatatgttaaaagttacaaatatggtaggctgcctgaatttagtctgcttacagtaatcttgtcttatcagtatttaatttgagattcttgacttttaggttttactgttgagtcttttgaaatagaacattttattggtctattttctgtttgtaagtagttccaatcaaatagtcccccccccccccccccccccggcgccgggacgatcactgatttgttttgtgagcttgctattggtgatttcgtagctgaataacttaaccaaactagggtaaagggatttagtaggaaagactggcagaaccacttccaatcagtatataaaattctttatctcatgaatttatcatgtgttgcaaatagcattcatgaaagacaattcttgtttactctgatgtcattttcccttgctcaaaattactgttgaactgtcagcagattttgatatttttaggcttgattaagtacccacatgcaatatttttattcatatagccttcaaactatattttaatatctggattttgaatatggaaacttattgatttatatattagcataataggcttca

SEQ ID NO: 87164 - DNA, 944 bp, Citrus clementina
  Intron number 3 from transcript clementine0.9_004705m (loc us clementine0.9_004704m.g) derived from phytozome v7.0 (c hr-ID scaffold_6; pos 993574 to 994517 reverse strand)
aaactgagaagttcaaacggacagcacttcaagaggttgctttcttcataatttttttgtttcatttatttatttagtgattcttgcaacattatttctgttttttagaagccatcaattttttgacattgcactttgcctatttatattttttcaatcctaatgataatgtgtttagaaattagttctttagatatgcagaatatggttattttcgtttgtatagacttgtttttgaatctttaatgtgtaaaatttgattcgtcactttaattttgcaaagccatttttaaagaactcttgataaaaatctcatttttagcaaaaatgtttcgtatttcattttggaaaaggcttttttattttaattttggacaatttttatctaaacttatattgacctgattgtaaattataggcctgggtacccagtatcctacacagcattcaacaaacgcatatatagtcatctgagaacctttggttatacgtctttatcttaccaacagttagcagattcttcagttcattggctcctcatttgttttactgaattattttttgcacattgataatccaaaattgatctgggaagttcttactgaaattgcacttatgctttccgcttttggattgatctgctgtaatacttaacagaatcatgataatcaatggaaagtgaaatgaagttgtagcttccatcctgaaacttgcagtttggtacttctaaaaagactttcaaacttgccatcttttaatgagattgtatgtcgctgtctggttttaagattgtagattgccatctagttttccttcaacttctaggaagatacttacagtagggcctcaggcccaggcttgaagcctaaattgttttaatcttcaatgctccaagcaaaccaacttttctctcaaaagactatttatgtccatttcttttgcag

SEQ ID NO: 87165 - DNA, 846 bp, Citrus clementina
  Intron number 1 from transcript clementine0.9_031203m (loc us clementine0.9_031203m.g) derived from phytozome v7.0 (c hr-ID scaffold_17; pos 2684173 to 2685018 reverse strand)
ttacagaggattcacttctaagcttttcgtcaaaggtattctctctctgcgagtgtttctattatgtcattttgccaacaaaatattttgtcatgcatcatgttaaaggaaccgattctgtggaatataaattttgattagggaagtttaaaacccgattttatatgctcaaattgatcagtcgaatccaaatggggggatctgatattttaggttgtggtggaaccgacggagcgatataattggatactgaccttgagatttctttgaataattttatagtgttgctcaagttatattgtttcattttttccgaaatcaaaaccactttgatttgattttgaacttttctggtgaatagtttcttcaccttgcagccttatcaggtcgttaattatttcattcttcactgcatagtgagaccatccagtgatttaatcatgcagctagtgaatgtgagcttctggagatgcatcagtaggtttttgcttgtatttaggccctctactctcatagggaaggcaattgcattgtccacactaatttggttgcatggaattgctgtttttcttaattatctggatccatctgtttgccctgttcggtccaaaatatcaaatatttataaattcaaccatgccatcatctaattcccttgaacttataactgtttcacaagttacttatgctactcttaatattttgagattgaaaacatgttcatatttgatttccttcattcagttgcgtactacctttggctgcagaatttgcaatcttaccatctaattttgataaaattaactggcattttttgcaggcgtatctttctcaaccactaaagag

SEQ ID NO: 87166 - DNA, 1051 bp, Citrus clementina
  Intron number 1 from transcript clementine0.9_024117m (loc us clementine0.9_024129m.g) derived from phytozome v7.0 (c hr-ID scaffold_19; pos 2291574 to 2292624 reverse strand)
ttcttccgcttttcattcagctttttcaggttagcagaaagttttgatttttattgcgatttggttgttttttgattcatgggtgtttttcttcttggcaaaatgttgacgtagtaggattgcattggtgttttgagaggatttttggaattgaatcaattttttttataatgttattttatttgttgtttttggattggactgaatgatgcaacactgatatggttcgggttcatttttgaaatattatgctggcttttaagatatttaatggttaagagtttaatttctttcttatgagagtgagaaataatgcagtttttattctggaattgatgaagttaccttttagatgttctggctaaaatggaatgaacaaattggactgcaagttggtttgccagcttgtcaagattaataattttgtttccagtagcagtaaaatagcttcaaaatgctaatcaacctgatccatattaccaaaataccacttgagatacgtgaatgctagaaaagctatttggacacattgttattctgtagttgcaaccccccaaaacggttatgtatgcatggattatctctttccccattatttgaaagaatcggagctttacgtttatttggttgttgtgtaatgaaaagaaaatttaaattcaaaatcttgcatgagcagtaaggctcagtacgtgattgctttcattgttctagttcatatccatgtttctttggcaaatgaacactgaagtttgtagattaggtaaccattttcttgttgctggtgttgaagcttcctctttttcaaacggagtggaacgacttttgattttagtacacctttcttagtttctttgtaaaagcagttgttaagacagatataattctttatgtaaactggttcttcacttgcattttgcgcttgccattattggcgatgtttgaatttgagagagatattgaagtagaaaaagcattgaagtaaattttagggcttgctctcaaccatgtacattatttgcaggtctatccttagggctagatttcaattcta

SEQ ID NO: 87167 - DNA, 826 bp, Citrus clementina
  Intron number 3 from transcript clementine0.9_016099m (loc us clementine0.9_011811m.g) derived from phytozome v7.0 (c hr-ID scaffold_80; pos 576203 to 577028 reverse strand)
gtggtgtttgtaactggtggagcctggattattgggtgagtaattttgagtagctgcctcattaccttcaagatctcctaaaatttcctgtcttttctattattttatgaagtcaaatttctttcaggaacccatataggtaacagttttaggctaaaattcagtcacactcacccttcttctctgctatagaataccaccacctaattgagaaggagagctcgagaagaaagttaaaaaatatgatggctccatatggttttgatactgattttggaagcaatttcttagtctctatatcatagttggcttgagaagccctttgaatcacagagtacttttatctgtgttgtgacattaagaagacatatggagagtccatgtgaatgaggaaacatcaaactttggtgttggatttacttttgcttgcagaaccttgacatcaaagacatgttaagaggtgtaatgtggtcattacgtccttcattttcaacaatagttttggcaattccatgtcttatcaacaatcatctttcccggttgcatttatgatgaccatttaatatatgcacaaaacccattgtctaccttgtttgttacctcactgaaggtgcggacttgttgaactttgttgtgccaactgtttctagcaatactactgtcctcattctctggctgatttgtagtatttttgttttaaattgctgtataattcctttcataatatgacttttctgttggaattattatttagttatttatttatttattttggtttcatgttggtttaggtacaaagcgtggggttctcttctaggaaggcaat

SEQ ID NO: 87168 - DNA, 552 bp, Citrus clementina
  Intron number 1 from transcript clementine0.9_007959m (loc us clementine0.9_007978m.g) derived from phytozome v7.0 (c hr-ID scaffold_19; pos 3059685 to 3060236 reverse strand)
ctcttttctttcttgtttttaaggattctgccaaggtctgattgtcttgattacgtctgtgtttatgtgtgtctgtgcatgcgtgtttttttattttgctcttttgaatgttttgtttggttgacgagaaaatacagaggaaacaaaagaggcaaggaagtgaaaatcggaatgatttttatattgaaaaaaaagaaaaaaaaaaggagatgacaaatagattatagcatgttttgaattagtatataaaacagtttttttttttttttttttaaaagaaaatctctgaagagatttctggagaagtatttcaaagagatggtgtaaaaatgttttttttttttcgaaaggggaaagcacataaaatgttcttttgcaacaagcactttttaagtttcatccccctttcgaactaatcttctcggcacaaaacagaacataattggtctgttctgctatcaaatatgattttagccactggaaggtgatcgcttctttgttgatttatgtgttgcagttatctcacagtgagtgcagtctccttccttacaa

SEQ ID NO: 87169 - DNA, 474 bp, Citrus clementina; identical to SEQ ID NO: 81157
  Intron number 3 from transcript clementine0.9_001354m (loc us clementine0.9_001356m.g) derived from phytozome v7.0 (c hr-ID scaffold_46; pos 85543 to 86016 reverse strand)

SEQ ID NO: 87170 - DNA, 822 bp, Citrus clementina
  Intron number 2 from transcript clementine0.9_025913m (loc us clementine0.9_025913m.g) derived from phytozome v7.0 (c hr-ID scaffold_32; pos 769207 to 770028 reverse strand)
ttgtatcatccacacgatcagttttgcagttttgggtatttgggcgctgttcatccttagttttcgttaagattttggttctggtcagttcaatgcattggtcgtgtttgtttatgtaatttatttatttttatttttttggaaaatcgttgatgctttttcactttgagagatgacacggatctccttcattgatatatcgattcagaactcattgtttttctgttgaaactcattgttttctgcaacagaaaaacattttcttagtttctggtcacccttaatatacttttgttgtttcccaaaaatcccaactgtgaatttaattttcaagcattaaaaaggaaaaagatttcttttctgggaaaagagtctgcttatacgagacagaacaattccgtgtttgtgttcttctgcttctttgttgtttcttatgcaattctgccaattctctgtttggttcctgaggaaatataggaaaagcataggaaatagggactcatgacttcattgaagtcaaattcttggtttacactcaattggtggagggacttaatcactatttttgcataataatgttgtataaagatctgaaagtattttttttttaatttctttttcagcaacaaaatgcatgctgaatgatgtgtggcttgtgaagttttcattttgagttttattataagaagtgtaactacagataagataaagtcatgggaaccgaccaatttactttccccctcaattggctttgcttatactaactttgagtctttggtgcaggaataagtctgctgtttattgagaagaagtaaacttgaa

SEQ ID NO: 87171 - DNA, 854 bp, Citrus clementina; identical to SEQ ID NO: 82990
  Intron number 2 from transcript clementine0.9_004517m (loc us clementine0.9_004525m.g) derived from phytozome v7.0 (c hr-ID scaffold_129; pos 30311 to 31164 reverse strand)

SEQ ID NO: 87172 - DNA, 796 bp, Citrus clementina
  Intron number 1 from transcript clementine0.9_010171m (loc us clementine0.9_010171m.g) derived from phytozome v7.0 (c hr-ID scaffold_172; pos 44697 to 45492)
tttacagtaggaaattcactagagttgctttgcaggtaacatatattagtattttattttcttcatttttttcatttttttaaaccctagtaaaatctcgggtttctaattttaaagaaatttcgttattttctttttgattttaaatatttggctttgccttttaaacaatggaagataaaggtttatttttgttagtttaaataaagaattttgaagtagctttgtttagcatgattgaattttctaggcagcaaaacagagattttcctggaaactcaatccataagaaaaagagatgagaattaaaagcttgactcgcatgccaaggataaacttttattagtttagaccacttgataagtttatttatgattctttttttttttggttgattcaactattgagattaaattcattagtatgttactaatccatgcttaatatcgcattagtaacaatcatgcagcaataagatccataaacttttatcgctgattcaataggacggctaagtatctctgaggcttggcagtcatgggagtacgcttgcaagtataaaatccaatatttagttttccgaatcaaattattgtataaataaataaaattggtgtaatcttaactcatatgtgtatatttatttaagtaatcatgcaagcatgtttaaaggtgtctggggatcctgaggattagaatttctattgatttattaattaatttccttgtttttatttaatttaagcttttagtgattttagtttccagataatttattgaaggattcaataagaat

SEQ ID NO: 87173 - DNA, 374 bp, Citrus clementina
  Intron number 3 from transcript clementine0.9_012967m (loc us clementine0.9_012967m.g) derived from phytozome v7.0 (c hr-ID scaffold_17; pos 2873740 to 2874113)
atcgttagcgaggtaatttctcacccttaacccgttttgattttctggttggttggcatagctttccaattttgtgtctgattaacttgtgctcattttagccttgaaacatgttttgttcgtctcttgattaatatcctgctgttcaatttcaatttggattttgtatgcatattagtgtgtgtgcttcttatggctttactgtatgcttttagtttgtctcttgcgttagaaaaatgtcttttactgcttacaactattataatatgatggtactctttccggcaatgctgattgcttttgctgttcattatttttatttttacttttttctcttcctcaacaataggacagaaacattctggaaacatttg

SEQ ID NO: 87174 - DNA, 653 bp, Citrus clementina
  Intron number 1 from transcript clementine0.9_035285m (loc us clementine0.9_035285m.g) derived from phytozome v7.0 (c hr-ID scaffold_34; pos 869641 to 870293)
gcgactcttgcactcgctgcttcaccggacgacacgtgtgtgacaaatgtgtcagcttattaaattagaaaagcacttatatttttatttctttcacaatccacttgagctactaaaattacaatactgcccttatttttttggcattcaccaatcacgccggtgaccactgctcatgaactttgattcgttgactgactgacgcttccatcttttgtagttctttttcattttgtttaattattacactgattagtttttttttaattttaaaaaaaatcctctacattttgaactattattttgattaaagcatttaacattaaggccttttttttttctctgaatcatcgatgattaatttataattttatatgcaggccttagccaaatcttatgactttataatcgacactgcagcgggtgatcacccatttgatccacatatatatctctcctgaagattgccggtgtttatgtcatcgttgaggttcccaaagaagtcaaatttaaaactgtaaatcttatcatgggtacgtaattgaatattgcctgcacaatatgtttagattttaattaagaatttaatcatttcaaatttcactttttttataaaaataaataaataaatattggttgatactttggcagaa

SEQ ID NO: 87175 - DNA, 1008 bp, Citrus clementina
  Intron number 1 from transcript clementine0.9_023435m (loc us clementine0.9_023435m.g) derived from phytozome v7.0 (c hr-ID scaffold_80; pos 282889 to 283896)
ttgttcgctctaatctgttcggacgattcgttcaggtaaaacgctgcgtttcagtttctaaatttagatcgtgtagatctggtcctctgtatctcccgttaccgttcaaataattctgttaccagtcaaaattcagatctggcctttaatagctgtataatccaaaacaataataaagggaagaatttgttagcatgttttatctgtctatttgtctcctttaaattcgatgcctgagaagttttcacttgctctaaaatcgaaatcgaaccgtttcgtgttgaatcgattcgttcgattttcgagagttttgtagtttgattagtggatgaagtagttcgaagttttttattttttcaaggtttgttgtttgtttctagatctgttgaactcatgagttaatctcgtcgttttctgttttgttccctcgaaatatgtgttttcccttctgattttttttaatgtttttgcctaatttttctcgagaattaaagagatttatgaattgggtttgatattttagtttccgatgttgatttaacaggatgagaaaatatgaaaattcggccttgtttgaggttctgttgatgatattgtctaactttcttggctaccaaacagaattttgaattagttttcatatttttctgttcgatgttgattatttttgtgaatgaatcagccgatttgctatttgctttgcagagaaaaatattcatttattttttgttatttctttgcttgatttttattttttttattttcatactagacgttgatcatcatagttgaacatgattttgatttttttttctcttttttctttttggcgaaaaaatctcctgatttcctgctgggttcctaagagaattttctgttgtttttcctgaaacaagagagacatgtgatttgagttctatattttattgtaacagaagctgatcttttgattttttttttttcttttgaacaggcgtttttctgtttattaaagcgggtttttgaaga

SEQ ID NO: 87176 - DNA, 602 bp, Citrus clementina; identical to SEQ ID NO: 79708
  Intron number 1 from transcript clementine0.9_011447m (loc us clementine0.9_011447m.g) derived from phytozome v7.0 (c hr-ID scaffold_9; pos 4849120 to 4849721)

SEQ ID NO: 87177 - DNA, 559 bp, Citrus clementina; identical to SEQ ID NO: 78986
  Intron number 1 from transcript clementine0.9_017633m (loc us clementine0.9_017633m.g) derived from phytozome v7.0 (c hr-ID scaffold_9; pos 1006188 to 1006746 reverse strand)

SEQ ID NO: 87178 - DNA, 816 bp, Citrus clementina
  Intron number 2 from transcript clementine0.9_033334m (loc us clementine0.9_033334m.g) derived from phytozome v7.0 (c hr-ID scaffold_36; pos 226963 to 227778)
aaggctgtggtaaggtgaagaatctatccatcctaaagcattttgtcaaaactttgccgaggctaccttatctttttcttttttcttattgctgacattatcataagatatgagaaatattatacatttgttttctgcctgaaacatttctatttgatgattgattccattgtcttatggtcccttgcccacaattttaaaattttaggtcatttggtaaataatattaataccttggatgtttaataatattttgaaaagagaagtacagtttgttgtaccctgtgattgctgaggacatcatgggttttagtaagcaagattctgtgagacgctttgattgccatacaatattaagtgtcatgtatccaatccagggggacccaatgatgttgaagtctcaggctggcacgtggaggatcatggagttcagtcttgagaattgccactatgcaaaagccacttaggggtattagtgtatttggaatccccctataaccttgttttatttggaccgactctctgtgaagacctctcccattattattgagaatgaatgttcggtacttaatatcagggttggttgtattgtaacttggatggatcaaatatgagagactcatgttttttcatcatcttgtaaagggcatagtgctaatcttaccttgaggttgccgttttggcttaagatgttactttattgtacatttctgtatgtacacgcacttgtacttgtacccagcatttgtggtgttcctaattacaaatatgaaatatgcaggcgttctctttggacttcaacctgagatcacacat

SEQ ID NO: 87179 - DNA, 828 bp, Citrus clementina
  Intron number 3 from transcript clementine0.9_017616m (loc us clementine0.9_017616m.g) derived from phytozome v7.0 (c hr-ID scaffold_9; pos 1676597 to 1677424 reverse strand)
ggtaggatgattacagtaaaagcaattaaacatcaactgagtgaacttcgtcttggcagaaaacaattttcagttgcaacccactgggcctttaatttctaagggttcgcttgtggatatattaaaccttgcttagtgatgtgaactctccctagtaatttcatcagccttttcttttcaaattccatttatatttttacagtctattgaatttccattgagaaattttcaacgttgggcatcatcagcatacaatgccaaaattgctcgagagcatgtgaagctgcgagacctttgttactttatcattagtttcttgaagtaattagttcatactgctcttattgctgttgaatccaatgctgcattttctgctaactttggaggctcaacaagtttgtattgcctctagcagtgtaccaagtccggtgttttatggccagtgttctgtttttcttaattagatttgtagcgctgatgcctagtaagggtgtgttttaactggccatttaaggggctttaatggcctcttcttattgtcttcatttcagggatttaaagttgaggtgaacaaacacagtaacttcaaatgaattactttacaccaacctcaaatcacacacgtccagtatctcctcctgctaccagcaaattcagattcacataaaagcatgtaactcatgcgagatttcttagcaaatataatttggacttatgaagtaacaaatgttagactttgatgtaatttctttctaaacacattcttctaatgatgataagcagttgcttgtaatttgttttgtagagaaagtgaagggtcatttttgt

SEQ ID NO: 87180 - DNA, 701 bp, Citrus clementina
  Intron number 4 from transcript clementine0.9_029500m (loc us clementine0.9_029500m.g) derived from phytozome v7.0 (c hr-ID scaffold_26; pos 1645068 to 1645768 reverse strand)
tgacagaacattcaccttcaatctcggaaaatagggtagacagattggaacgtgttattttagcagcaacgaaacaatgtaaacgattactcttgagctgagttatagacttatagtgacaatggatttctgagttgcaatttctactacggctttattgctaattctgcttttgtatatggaggttcaagatgatccctagtgtctcttcaatgaggggatgcctaaagttgtttgtttttcttttgtcttatattcttttcaccgtcgatgcaactcttttaggccaacgtctgcacgaaatggttttgaatcctccaatgaaaattgatggccttctacctcttgtaagttcttctctcttttttcacttaatggtttattagttatttaggattttgatttactgaataaaaaccagctcgaaagtgaattgaacttgaagatacctggaatttttaggttataaaattagatagcatatttataggttacagatttatataccattgtttatgaattacttaaccgtatccagtgccatattcttgaattatggggaatggaatctctgagaaattcagctgttgcttcttggaactattgggaatctatttttgcttgtagtcttggttttgaatttatcttgtatggtgtattctacaggtttcccagtcaaagttagcttttgttgcaatagc

SEQ ID NO: 87181 - DNA, 733 bp, Citrus clementina
  Intron number 1 from transcript clementine0.9_011473m (loc us clementine0.9_011473m.g) derived from phytozome v7.0 (c hr-ID scaffold_26; pos 2087934 to 2088666)
tatcaggtttgtttttcgtttttccagtttctatcttctactcttgtttgcatttcagttactcttgtttcctttagtttgctaatttcagttaatacaatcccatcaattcaagtccagtttctagggcttgacttgctttcgatgagagtggatcagtttggctgctaggactgcttaggcattatggatttttttgtgtgggttatttctgtgcatgctgaaaatggcggacgttgtgtgttacttatatgtgagattgtaatctgacttgtgttttgaccttgacttttgatttgatcaatttgtattctgattgaaaaatggaaaaaaaaaaaaaatcttgatgtaagtgatgagatcttatactaatgtatttgttttcaggttttgatcaccatacaaaagactaaattgggttttgatttctgtgattatgattttccttattgttaacttttgagtattctggtgataatgcaggattgaggaaggtttaatttatgcttctgtcatgactgaaggggtttggctctacagttagtcattagactttgtaactcaaaaattttgaaacaaattttgtcattattaatttgttttaatattctttagaagttgcttgcatggtcgtcttgatgactaacttgtcttatatttatatacaaatacaatatatcattttattgttctgacagtagactctttgtctgaaacaccagaacaagttcat

SEQ ID NO: 87182 - DNA, 264 bp, Citrus clementina
  Intron number 1 from transcript clementine0.9_024137m (loc us clementine0.9_024106m.g) derived from phytozome v7.0 (c hr-ID scaffold_26; pos 2589426 to 2589689)
atccaaggttgaagttttgggtatgctctgatttcataaagcaaaattgtaaataaaccaaaaaaaaaaacgtttttgcctatctgggcatctctactcctgcaaacctagttgaaaaagttatttttatcattgaattgagctttcttcttgcaaaattggttaaaaaatgaacatcttttttcattcccttttaagtgagtcatgtacgagaaatagttaatgagagatgctgaagtttatattttgattatgttgcagtag

SEQ ID NO: 87183 - DNA, 954 bp, Citrus clementina
  Intron number 1 from transcript clementine0.9_007139m (loc us clementine0.9_007139m.g) derived from phytozome v7.0 (c hr-ID scaffold_6; pos 506587 to 507540 reverse strand)
ctgctgtcaccaagactattgtggaggttgttcaggtgagtttttgtcagctttggcttttgatgtttaattctttttacttagatctggcattcatagatctatgtttgaagtgaattgcatacttgaagattgtggaattcacagtacatgaaaaaggtggctgaggattttgtgaatttctaaattgtttgatgagtgtgtatatattgtatattgtaagtttgcatatttagtaattagcttttgatctggtggtataattaataacggtgaattggaagattcaacatcttttatctgtagcttccccttttggaaaattttccgtttgtgctttggacttttattttcctccggcttctgtatcccaatcttccatttttattgatcttagtttggtttgaaattattgaatattgtccactttatcattttgcaatttaacttacatgatcaagctgaaatttttttatatatggtacttacttttggtctgacgaatgattcattttcagttctctctattcccttttcaccttgtagcaataggctttgaaagccaattctttttgtgtacattgtgtgagaagcctagactcttcttgtgatgattggtatcgtctttaatagtgtattgtctaaattcaatcaaaaaagttcttattattacatctggatgctatttttgggatgctactgtttatgctgccacattctgtcattcacctcatgtcaagcaaaaaatgaagtaattgcggcatattaacatcagaagtgcttcattttttttttccccggactttatggccggcattaacaagctttttcgcatgagttccttctttggttgaaaaggtcctttgactgccttagcattttgctttcttgtagataccaagattttgcaatgtgctttggttaataagtttaatgagcaattttgtattatag

SEQ ID NO: 87184 - DNA, 975 bp, Citrus clementina
  Intron number 1 from transcript clementine0.9_015233m (loc us clementine0.9_015195m.g) derived from phytozome v7.0 (c hr-ID scaffold_32; pos 647104 to 648078 reverse strand)
gtgttatttctgtttgctttaccaatcttttaaaggtctggcctttttcttccttcctttctttctttctttcttgcttgcttctcttggattttctttcttctgggtttgttgattttcttctaattcctggttcttagcttgctgttgaatgttttgggtgtggaaagtttgtttctttgttggttgagaatcttgatattgtagcattttgggcttaagacatatgtttgagttgatcttgctgataaaaaaattatataaaaaaaaaactgatgaggtttttcttgttttgtggttatgtaattattgtgttggttttttttttgttttaatcattttttttaaaatctttctaatatttggctcttgggttttgcatgtatctgttgctcccaaatgtgagcttgggatttggtgattataacgtctggttcttgagagaataagtttaatcaagttttctttttctacctcctctatttctgttcttggattcttgttttactattatagttatactctgattatcttctgaatgatcgatttgcatgttggaaaattcaacgaattgtgatttttctttgatttgataatgatatgccccagaatgttatttcagttttagtatcctgtgttgatttttgcatttctggacttgctgggtctcttttgtgttgattttaattagttttgttcgtttttgttgctgaaaatggaattctttgtctaagtttatctaggttgactttattagctttcgtttcaagagatttgccttctatacatgtcccttccttgccaatttgtgtgtccttagctcaagggtgtgagcctttaagtgtttactaaatgttgctgatgtttgatctttgcttgttaattgatagatgttgatgtctgtggttgttgacacttgggtttggctgctgatttgcaggttggctgaatacttgagcaaaggtttttctcttt

SEQ ID NO: 87185 - DNA, 536 bp, Citrus clementina; identical to SEQ ID NO: 78416
  Intron number 2 from transcript clementine0.9_007755m (loc us clementine0.9_007755m.g) derived from phytozome v7.0 (c hr-ID scaffold_26; pos 2484084 to 2484619 reverse strand)

SEQ ID NO: 87186 - DNA, 567 bp, Citrus clementina
  Intron number 1 from transcript clementine0.9_007755m (loc us clementine0.9_007755m.g) derived from phytozome v7.0 (c hr-ID scaffold_26; pos 2484737 to 2485303 reverse strand)
caaccaagcaataatcttgcttaaagctcatctgggtatctcttttttctttctcttgatttttttttttttggctaattcatatgtctttgtatggatttgggtttcttttcttgcgagggattcttagtgcttatggtttgttagtgttagttgaaatggccatgctgttggtttctaatatctctaattatttttgcaattaatcaattagttatgaatttgtaacttcttacatacctctaggattcttgcttcaagggaattttgactctttctgtttctttcttaagtttggtggagaagaatgagtttgaagcccaaaagaaaaataaaaagatgctaaaagatttaatcaatagaacaatgtgcgggaggggcaagaagtcaagggatcgattgcccccgcatacctgaaaattcttttgtagggtggagcggagttagggtgtgtgcaaaagaatttgccaagtaatattagaggggggtaattgtctatttgcttgattaatgtttcttgattttggtacaggctgtgttaatcctcctttgaattagcagtggttt

SEQ ID NO: 87187 - DNA, 449 bp, Citrus clementina; identical to SEQ ID NO: 78318
  Intron number 1 from transcript clementine0.9_006305m (loc us clementine0.9_006298m.g) derived from phytozome v7.0 (c hr-ID scaffold_26; pos 3269980 to 3270428 reverse strand)

SEQ ID NO: 87188 - DNA, 938 bp, Citrus clementina
  Intron number 1 from transcript clementine0.9_025132m (loc us clementine0.9_025132m.g) derived from phytozome v7.0 (c hr-ID scaffold_9; pos 6028720 to 6029657)
tccgtaatcgtaagcgaagcttttcgctgtttctggtacaaagcaaaaatttttatgttcattaatatatgcattcgcttgtctgttttaacttttagggttttggctcttttacccggaagcaaaaccctccaaaattttgttaattggctattgtattttgctttgtttgcttaattatgagtatttaaatctgggttgttttagttatttcaaaatatattatattgaagctcaagacgtttgtattttaggccctgttaagtattgtaaatcttataattctatgaaaaacgaaaatttgactttcttttagtacttaggtttgaagatgtaagggtgtgttggggattgagttgctgtggcatttaatccacataggctgttgaatggaatcattaattttatgggtacatgtgtgtgcaacattagctattattgaatccttttagttaatatgctttcgaggttaagttgcagcattgtctcagaagctgagggaaagcagcctggtactctctgtggtggtttattctgtcccttgcacgcactgagtagcactacttgcccggaagtcagactatggtttggttcaccgcctaatctaatcatacgaaaactatgaacatacctgaagggttagaaataaaattgggaggtttactgaaaatttggttcccgataggaaaatggattttgaaaagctaggatactgttgtagtctttgctatgatttgggtataatcagataggaatgtaggagaatcagccttttcatttcttgtttttaaaacggtcttaaaattgtatcccttttttcttttcttttttttttttgggtgaaaattactgactgaaagcatttgtatatatattttgttttcaaaattgaataattggatctggattgcttgtcaaataggccctgaagtattcct

SEQ ID NO: 87189 - DNA, 774 bp, Citrus clementina
  Intron number 1 from transcript clementine0.9_033086m (loc us clementine0.9_033086m.g) derived from phytozome v7.0 (c hr-ID scaffold_9; pos 5278271 to 5279044)
ggtagaggtgatggaggtgttggtggtgatgatgatgatggagaaacatttctatccttcaattgttcttcaaattctcccattataataaaatctaaaaagaatgaactaaaatgtcctgttttctttttctttctcttttgatttctttgagattggggtagttgtaatttcccgggagttttacttgatttgaattgtaggtatgaacctaacggtctcgggcaaaattaaacctgccagcttcaagcccatttgtgaacctagcaatcatcactttcccaggaaaacgatgttaaaaaaaattggttaattttctaatttttgtaaatttttaatactgtaaattagtaataaaaatgagcaatcacgagggttgtacgtaccgtaaatggaaaagaatttaagaaagaaaagaccaatgaatatgagttttttgactcatgtaatataagttgaaaaattgtcattattattattaggatttagattataatcgaatatgattcttttaaaggcgttcaacaaaaccgtatctaacccaacggttaagatcggcagctggaacttagctgggccccttgtttgaagctcatacaaattcttttttttttttttgaaacgaagctcatacaaattctgcttcttcattgtttcgcttttcacttccagcttccgctatttgtccggtaatgtgttgaatgggactgttccgaggcaaattggcgagttgactcagttgccaaacttactcttgggaaacaatcttctctc

SEQ ID NO: 87190 - DNA, 718 bp, Citrus clementina
  Intron number 1 from transcript clementine0.9_013515m (loc us clementine0.9_013515m.g) derived from phytozome v7.0 (c hr-ID scaffold_80; pos 664719 to 665436)
ccatcgttcatttgctcataactccaaaatcccaggttcgttttcttgtttatctggcgaaaaaactttttttttgcacatggattattgatttaatctgattttattcattttccaattcacaataatcttaattgaattaaggaacgacccatttgttattgatgcaataaaattggtggtttttttttctttcttcttttttccttttttttcacttgcacttttcagtttcatggtgttcctcttgctttactttcttcaatatttgatgttttaggttattgcttatatgttagatttttttatagctaaatttgtcatttgtaaagagcgttttgtttgtgctccaatgatgaggttgcctcggaagaagttgctcaaaggatgaaaatttttggttgtgttgtcatgtcatagcataatttaagcacctttcatttcggatattggcatctggtgttgttttctgtttcctgcatttgatccaaacaattattttgttgtaattctatagtgtcactgcattttaatttccgttggctgatgaaatgagttgttactgatctgcttgtttgattgtctgcattggacgtgttcaccattccaactaagtcgtatgcttaagagtgtttgcgaatgttttgattgtggttgttgcgtaatttcacagacaatatcatgatttcatttctttcctttcagatattgattgtgt

SEQ ID NO: 87191 - DNA, 308 bp, Citrus clementina; identical to SEQ ID NO: 81768
  Intron number 1 from transcript clementine0.9_014055m (loc us clementine0.9_013995m.g) derived from phytozome v7.0 (c hr-ID scaffold_32; pos 293022 to 293329)

SEQ ID NO: 87192 - DNA, 1038 bp, Citrus clementina
  Intron number 1 from transcript clementine0.9_000819m (loc us clementine0.9_000819m.g) derived from phytozome v7.0 (c hr-ID scaffold_78; pos 74384 to 75421)
cgtcgcaccggctgctagagacagtgagctataaagttcgttttttatttattttttgttaatttttgtcattaattgaattattcaaattaattacttagttgagttgtgattaatactttaatagtttaatttaatagattttgtagtagatagtttaatttgtttcttccattcggcattcatactatttatttgatttgatttctgtcatgctgttgttgctaatgaaattggacgcagataattgatgcactgattagaatatattttatgagatggtaacagggttgatgcatttttttcactctgttaatataaagaataatatagaagtgtgtgttgttgtggagttttggcgaatgtcaatggcaatggaactttggtgttgcttttttttccggataatgtgatattgtgaacttttggtgttttattattttattgttttgttattatggatttataatttgtagtgggtatttacctagtgttacactgtagttagtgcagtggaaagcaaaaactatatggttcaattaatacagatgaagagcaaaaattcagttaatacaggtgaaagatgcccaaactgaatctacagaaccaaacagaaatttagagccaaaccaagccaaaatatttcagtttggttcggttcggctctgctctaaattttggttctgcttgagctcatattatttggaaccgattggttttggtttgatttggtttgggaccagaaccgaatctaaactgcgcactcctatgtccattgctgtttcattttaagtaaacgaatggaatcatgaaagaaatagcattagtaaaaatccctaagatattgctagttctgtgtgtcatccagcttagggccatagagttggattgcatatttaattcatcaacggaaagtgaaattttgtagttttagatatgaaaatgcattattattattgttattaagttatcttatttgattttgatacttgtttggtgacagaagctaagaagagtaagctctagcaaatcagttat

SEQ ID NO: 87193 - DNA, 383 bp, Citrus clementina
  Intron number 4 from transcript clementine0.9_000819m (loc us clementine0.9_000819m.g) derived from phytozome v7.0 (c hr-ID scaffold_78; pos 75839 to 76221)
attgtgtccggaattgatccaagtatattcctcaggttaatgtttgctttgatttattttatatagcatttgaaaaattgaaggtgattattcaatatgttgttataacagaaatttaaaaatgatttaggacttacataccactcctcttttttagaatatttacaatcatgaacttcattgctacctgattttattggtttgtttttagctagaattttaatcagaaaatcatgcacaagacaatttggttcacttcaatattcatttatcatccaaatagtcatttaattttgtccagttgtgtaaaatcgtgtagaattattttattcattcattgaattttgttctctcttcaatcaattctttctgcaggtttaaag

SEQ ID NO: 87194 - DNA, 488 bp, Citrus clementina
  Intron number 1 from transcript clementine0.9_005577m (loc us clementine0.9_005577m.g) derived from phytozome v7.0 (c hr-ID scaffold_9; pos 1104801 to 1105288)
atcccgaagtattggtacattttttatttattttacttcaaggagaaaaaaaagccacgtattcattgttatgtttgttcttataaatttgaatttcaatgaattaagctcatgttgctgtattttctgcttaattaaagccctacgtaaacactcaccattactattagcagctgctatgtaagtaattttactggttatgaaattgaatgccatcggtacttggatggaatgttgggtgtaccacttttagagagtggagagtgcgtttatgcatattataccatgtgtcgatgagtcaaattgttacctattttaatcacaaatattttctgtgaagattggaaattaaatttcgatttgtctataaccagcggccaataccattgttcaggcatattctttgttgattcattttgtcaattgtacttgtgtcttatttgcaaaatattttttttcttttgtacatgctgcagaatattgcagaa

SEQ ID NO: 87195 - DNA, 707 bp, Citrus clementina
  Intron number 2 from transcript clementine0.9_001205m (loc us clementine0.9_001205m.g) derived from phytozome v7.0 (c hr-ID scaffold_26; pos 1672919 to 1673625 reverse strand)
ctccttattctggtgcacaggtactgtatgaaagctgattttcatagttgttgcaagttcgtctgctaacatttgcaacttaagaatatctagtgtgttctctgttagtttttagcccaagaactatgagatgaaggctttatgtctcctccattagggcttgctttgttccgtagatagttcctaaaagagtgtcaggtggctgatttttttattccaaaaaaattccattttacacctttagttttcatcatagttaaggtttttatcgttaaaactctgatcgtatacagcaatcgttacaagaattacaaacacaagaattttatatgttctttttgccccctggaggattggattggtggatattttgcatctggtttcttggcacatggagttgacagtttatccaaatttcctcgcctcctgcattttaggaataatattttgaattactaggtttgcaaatttttcacgaaaatatttgtcaaaatagtttaagacaatttactgtgacaattagtttaacaaagtttttcttttttctcaatttatctattcagatgatcactgacgctgtaaaatcattaccaattttattattagctatatttttattttgttaacataatcaataatcttttagctaattttctttaattttttttttcaaattttttaccctgaaggtgcctcatcagcctcca

SEQ ID NO: 87196 - DNA, 850 bp, Citrus clementina
  Intron number 2 from transcript clementine0.9_008044m (loc us clementine0.9_008044m.g) derived from phytozome v7.0 (c hr-ID scaffold_42; pos 998932 to 999781)
ttatacaaagaactcttgctttatactcgtgagtattttcttgcttgtttctttcttttattgtgaattttgcagttttatgttttcattgtgaaatgggttctgagtattttggtcaaagtagatttgataacacattcagttacttgtaagtttgcgtaaagagtatcaaattctgaatattgtgttttacttgttttcattttatgaaaattaattgtagcttgcacacatctgtgtttctttgtaaattgatcatgtctttgctggggttacctttgatgattctcatctggattcaagtttttgtcagtttgtgtagctttttggtatttgctatcttgatcttctctgtgcattgattggataatagagaacctgttataatggtgtcatttcgtttttgcacctgcgtatcacttggaaattgattgaacaatacgttatttggtcatctttgtacaaacttgggttgttcattttgaagtttggatttcgttgatctacacagtaggtatcactcacaggttaagggaaacaaacttgtgtttttcctagttgctttaggaggttgctgttggttttagaatagacttgggtggaagccttcatggtccttgcattgatcacaatgaaatatttaagtctgagcttgcttcacaatgactatcttttccttctgcaagcataaattgatcaattatatcggtctcgcattacacctcaaggaaatgaatgtgaatcttaagcgctctaaactgttatttatccactggtaacaaggatgctgatgcttgaaagtactgaatttgatatctcaacagcattgaagaggttgcctttagtttca

SEQ ID NO: 87197 - DNA, 681 bp, Citrus clementina
  Intron number 4 from transcript clementine0.9_003302m (loc us clementine0.9_003302m.g) derived from phytozome v7.0 (c hr-ID scaffold_32; pos 1955218 to 1955898 reverse strand)
tgggtcttcccctttccttccaaactaacaaggaggtaaccggatatcttactttctttattctgcttgaagcaacatatttgtaagggtttgggtttgaggttttctcatggattgcacttgctctgttgtgattgacacatctatgtttgtttcattttgtagaagcctctctctctctctctctctctctctctttccccttctccttcttggaaaaatgattggctgtgtctgtgaaatggtctgctaggtagtgtatgaaatagttgtgaattcggtcatgaacaagggggctgtctatgtagctaatagtagattgttccatttatgattgctgataatacagttatcatcaaactgagagctattgttttatgtgcgagatcagagcatctttgtagggcttaaagtttgaggttaaggatattagaatgttgacatttgagtgcacttacccttgttttctttcttctctttatagaagagacatagaagttggtgatgtaagagtataactgcataagggatatatctctagatgatggcaatgagagaaaaaagagaaaaaaaaaaagtaaaaaaggacttctatttattgagttgaaatattttgtcattgtccaattattccagtctttgaccttttttctctcccattgacaatttttcagaagagga

SEQ ID NO: 87198 - DNA, 507 bp, Citrus clementina
  Intron number 1 from transcript clementine0.9_008918m (loc us clementine0.9_008918m.g) derived from phytozome v7.0 (c hr-ID scaffold_9; pos 3702076 to 3702582 reverse strand)
agcttgaaagagaacatataaaggcactaatccaggtaaatttgaatttaattcgtgtactttttttgaaaaactaaatagtagttttcaagtatgacatatttcaatttattttccaaatcttttgaaaataataaaccctttctcatggtttactactgagaagcaaaaggatcgagaaagaatttgattctcgtgtactgataaatgagggctacattgatgtttctaacagcttggggataaattaaaatctaccaatttatctagtcattaatggaaattaactcttttaagtataacgtactaaattgatatgtgcaataaaacagaaaataatttggtttttaaatgattgaggcaatagtttccccacagagtaatttaaacatcaccaaataatgcaactatcaaggtgtcttctgtattggaaatctgtatcatcataattcttttttcattttgatcgtaggatctattaactgctggaactgacacatcggcaat

SEQ ID NO: 87199 - DNA, 941 bp, Citrus clementina
  Intron number 1 from transcript clementine0.9_018162m (loc us clementine0.9_018162m.g) derived from phytozome v7.0 (c hr-ID scaffold_32; pos 528255 to 529195 reverse strand)
cttccctcacccagcgttccaatattgacctcaaggttgctacctatttaccattttttgccactctctttttttcatttggtgaaattagttctaatttacttgtagaattataagactcgttagctttggtgagagttaaattgtgttttggtctaattttggttttattgcgtaattgttgtaaaagtgtttttttttttttttaaggtgttgcaaaggtctggcctgctaatgggtaggtgttgttttcctgacttgaattaatggggaaattatggcaaaaaaatgattgcctttatgcattgcgggtgttctcatggtagttttcattgcattctgggttgtatatgggacatgtgtggttgatgtctactacgtactgcattgtgatgaaattttgtgctgacgatgttcctggcatcatgatgcagaatacagaagcttctgcttctgattatgtagaagctggttgccatttggtgacattctctttattatggtgttgtgaactattgccttcctttcttagtttcagataaatgactctggtgtttttcgttggaaactcaacttgcgtagaagaagggcgtgaatctgtgaatgtgctgtatcataattattggaatatgcatgtgatgtatatgaagcacaaatgtgatgaatgagaacaatagcccacaaaaatgagattgagaaaccttactgtgctgtgaagatgttagtgtatgctttcttatggatgttctggatgcttattagttgctggtatctccgtgaagttcgattgctacttttgttggttaagttcttgtgcagtaaagctttgattaaattgattaccaacactacactccattgtattatggtttctttgtcacaacttcagtcaatctccttgttatttacttgtctcatccttgctcatatttgcaggacaa

SEQ ID NO: 87200 - DNA, 451 bp, Citrus clementina
  Intron number 1 from transcript clementine0.9_026444m (loc us clementine0.9_026444m.g) derived from phytozome v7.0 (c hr-ID scaffold_55; pos 731784 to 732234 reverse strand)
gcaacgtgggtgagaggtaacaaaaaagtccactccaacttttttacggatgtaagattctttgctttcttcaatgaccccctttttcttttttgttaaaagtgcttttgatgagaaccagaatcatcaacgcagataaaaagccagcaggtctgaagccaaaaaccaaacagtgcctttcatccaccacataacaagttaacaacgacaaatcaaacataatataataaactcttttgagtctctctggccatacgcttagatctccataacttgaacttgaatcatcgtacgcctctaattttctaattattttttccgaccccacaagtactttccacgtggcatcaatcatttatgaagtaattatttaaccaacaactatatatgcttatagtatattaaattttaaaatttacccacccttttttttttcaattttttgtgcagg

SEQ ID NO: 87201 - DNA, 593 bp, Citrus clementina
  Intron number 1 from transcript clementine0.9_009981m (loc us clementine0.9_009871m.g) derived from phytozome v7.0 (c hr-ID scaffold_42; pos 1604883 to 1605475 reverse strand)
gaaggtttctttttactcatcttcttttctttttattagggtttacatgtatttaaaaagaataaaagacagaactatgatttttggtaataacggtttagttttacattttaaactgcacccttatggtaattttacgttataattaaacccttttagaagcttcagtaaataatgtagaaaaaggaagcatataaagagagacaggtgttattttcttgtttattgaaacaaattttcagtagttattgggttgggctttcaattttagaaggggaatttaaattgaatcagtagttttgtttagtaaggttttatgacagtcagtgggtacctgacgcttttcaaagcaaaagattaaaacaaagttgatgataatacatcttaactttctctttcaatgctataatgaagctttatttgtatgttcattttatctagttgaaggggaaagaaatttgaagctatatgaactgattgtatgccttttattgattgttgagccataaaagaattgtacggcagtaatttagtttccaacaaatgaattggaagtttgacttctttccttattgtttaaatgctctataggg

SEQ ID NO: 87202 - DNA, 508 bp, Citrus clementina; identical to SEQ ID NO: 80930
  Intron number 1 from transcript clementine0.9_007742m (loc us clementine0.9_007731m.g) derived from phytozome v7.0 (c hr-ID scaffold_6; pos 5484856 to 5485363)

SEQ ID NO: 87203 - DNA, 899 bp, Citrus clementina
  Intron number 4 from transcript clementine0.9_010015m (loc us clementine0.9_002820m.g) derived from phytozome v7.0 (c hr-ID scaffold_6; pos 6695627 to 6696525)
ttcagcgcttcagaagtgcttttgaaaatttgaccgtatgcatatcttttatttcctgttcttttgattctttagttttcactcttacgattacgtcaacaggggatctctgtcgatattgtgtgattgaatttgttaattcagtcaaacctattttcttttgatattggtattaccatttacataactttcataaattttataaacttttggtggatgcatcatgcgtgcatatacatgcaaatatgccagcttcattcttgtcctttccgttctatgtatgactttagaagcattatgattgcagttttcttaataattaggaacatatgacttgaattcatgcatatacatgcaaatatgccagcttcattcttgtcatttccattctatatacaactttagaagcattatgattgcagttttcttaataactagggacatatgacttgaatccaaccgcgccttgttcttgcttacatccttaagctcctggaagaacttcttgtttactgcagaaacaatctttatctctctggattggttttcctggtattctgaggaagctttcatgggcttgaaaaaaaaattcagtttatttctttgcagatggtgctcattaatgtcgaactagggcttgacttatgtattcattggctatacgattttgcatgcctcgaattcagttagtgggcatattttttatagttattatatcataaaagtttcttcgtatctttttattatagttgcttttttatagttatatatcataaaagtttcttcttatctttttattatagttgcaagtgatattctttctgattttgttattttttatgctgcttcttttgttgctttcagcgattgttgatatcctctagaaatctagaattctt

SEQ ID NO: 87204 - DNA, 779 bp, Citrus clementina
  Intron number 1 from transcript clementine0.9_011340m (loc us clementine0.9_009713m.g) derived from phytozome v7.0 (c hr-ID scaffold_34; pos 175538 to 176316)
tatatccccttgggtatgtgtattttcattgcaattgcagctttagattgatttcgtattgcttgtttttgctatctttgtataatctttgattgtttcttttatttgagcttgcttgtggccaacatattgcatgtgtgtaatttggtcgcactaatatattttccttgatgttttttgaaaattttttattctgtgaattctgggattaaagcatctttcgagtaagcctatttgttaattgatttggcttcttgactgtactggagtacttaaaaataaagttttgacgaagctttggaacctttttggacccattttccaaagctctcttgtttgtagttccttagtagaaggtcagagtggaactcttaagttgtgcatttttctcattaaagcttgaatctttgcattaggtaattacccatttgcatttcatcgtgtgggtgataagtttcccttaggttggtcccacttttgcaccttttttggtctctcgggtttgatgggtttcatacacatcaatccaaaatcagtttcttcatcaaataatagtgctggttgtcaaactcaaacactagggagtcttggtagactaattttggggataacgtaatgtagcagcttcctttgtttaattatatgttcgctaatttattttttctacatactttattttgacgttactttttgctcgttcacaatatttccttttttgtaaaaacatgttatttcaatctgcagatactactctgtcacccttaaaataggtaatccac

SEQ ID NO: 87205 - DNA, 564 bp, Citrus clementina
  Intron number 2 from transcript clementine0.9_010258m (loc us clementine0.9_007328m.g) derived from phytozome v7.0 (c hr-ID scaffold_130; pos 155548 to 156111)
tcaaaagaatttcgtgtaagtctgtacaattttctattttctttttctgcattttttcccctcatgttcctttcttcattgtagcatctttatgttctcttttcctacaatccatgccccccccaactcttcccttctgatgttgtttggcaaggtttgtttttgatgatgaactgtcttgttgaggaacttgtggaatcctttgtgaaagggttagaaagcatgagttatccacatatgtgaggacattgtccagaatatggtacttttgacacgcatattttactttctcagtagtacactgattaatctcaatgatatcagctcaggtttatgccatcactgtatttccaaagaatcaactaatggttctgataaagtacttaaaaagatggtgatgttaagcgtcttaagaaggagctgttcctgtgctaggagagaccagatcataaattgatgtgtgattacactctttagcatacataaatgcattcatcaattcataatgttgcctcttttatgttttgatttgcttgtgccttttgcaacctacagataactcac

SEQ ID NO: 87206 - DNA, 477 bp, Citrus clementina
  Intron number 2 from transcript clementine0.9_026541m (loc us clementine0.9_026527m.g) derived from phytozome v7.0 (c hr-ID scaffold_32; pos 565802 to 566278)
taccgacatattacaactgggtgacgtgagccagggtaatcagattcttcttacgcctttattctctaacttagggatcaataattattagattcatggcaactcagcattgccccaatgaaaaattgcttgtttacaatgtgtatgactttggtattagtagttaattttgatggttatgcatagaattccaataacagtatttcgatacattattttcagatttctttgcattgccagaatagttccagctctgtgttaaaatatgcttcagcataaagttgatgtttagactcatgaaacgcagctgcattttcatgcataacaatttttaggcttgatgcttattttgtgaacaagtcgttggatattaaccttcttactaatcgttgaaaatgcctattgcaattgtcctttttttttcttttaattgggaccttaggcaatctgttttgaagtaaaaatttaagtagacaa

SEQ ID NO: 87207 - DNA, 573 bp, Citrus clementina
  Intron number 4 from transcript clementine0.9_005936m (loc us clementine0.9_005936m.g) derived from phytozome v7.0 (c hr-ID scaffold_19; pos 3176127 to 3176699)
ttgttgaggtattgatgaattcatgtgttctacatagtttggttttggcctgtatgtggcttttcccgatttttggtattctagaatggtttattcataattatcttagtaatttatgttctcatcaattttaatatttctcagtgagtttcatacaaagatatgttggcattaattgatgtgctttccttttctaatttttcaaaactggggagcctctgttgcatgttttgttttgagttggggctatttggcgacaatttttttcggctgcttatcttttctgggattttttattaagtgatagatgcatattacacatagtgtagattaatctatatttttttaaaaaaaaagaaagaaaattgaagcagaagcagaagatgtataaggaatcttatatggtgtcaatatgattactggagaattttcataattttggtttatactcttatcctcacttgttattctgaacacatgccttttacttttttgtgccattttccgcaaattgatccatctatttgtggttattcaggtgtgggacgcaactgcgtcagaccctaagttact

SEQ ID NO: 87208 - DNA, 574 bp, Citrus clementina
  Intron number 3 from transcript clementine0.9_005678m (loc us clementine0.9_005031m.g) derived from phytozome v7.0 (c hr-ID scaffold_34; pos 508141 to 508714)
gcttcacaccttctgtaagtaaataaatttgtgtttgcaaacttttgagcttttctttcttttgatatatttgatggtttaatctgctgagagtcatgtataagtttagaataggcgtccatttacagttgctactagtatgtaactttcccaccaagttaggtaccaaccttaatgctgcaatatttctttaatattccattccttaatatgtttttagcctttcattttcaagaacgcgaaagaagttttacaaactggacttccctgttcctgtgtgtgcacctttctggttaagcagattttgcaatttgcatttctggaggcaatatctctttgttatcaaattccctggaacatcacttctatgtgaaaatatacagaatattactcttccaataagtactcaatcagtcaatcttcagtgtacgaggcctgttcatagctcataattcagattattttgtaagatgtttgattccattattgtgagcggtatagtgaagcaaaaaattgggttgatttagggtgattattttgcaggttccaactggagaagttttgaaattcggtg

SEQ ID NO: 87209 - DNA, 445 bp, Citrus clementina
  Intron number 1 from transcript clementine0.9_017342m (loc us clementine0.9_017342m.g) derived from phytozome v7.0 (c hr-ID scaffold_19; pos 578600 to 579044 reverse strand)
cggagacgtcgtcgttttggtcactaataaacccggtaaattacgtttaaattgtcctcacacgttttcgttttaggtgctcagcctctcctttgtattttgaatttgtaattatggacttcattatgagataattctgctttgtttatttaatacgagttcccacgtttacagattgtgtttgtcttctgactctgatcaaaagagtggcttccattcaatgtgtctgtgcttgctgagcagcaatgctataaatatttaaacttgcttgagaagcataatagattgttcaaattaactcatcggtgccctttctatctttttgttctaagttgaaattagctcctctttcccaaaaaggaaaagaaaaaaaaaaggttgaaatttgcattattattaatttatactatgttcctctgtgtaccagattgtggaggtgccgagt

SEQ ID NO: 87210 - DNA, 574 bp, Citrus clementina
  Intron number 3 from transcript clementine0.9_012768m (loc us clementine0.9_008635m.g) derived from phytozome v7.0 (c hr-ID scaffold_6; pos 3327950 to 3328523)
tgaagaattctactcatctgttcccaatagtggaggtaatttaccattctctctctctttcttttttccccctcccttttcttttgttgtaaatttttaactaattggagctggaatattccttttgttgttattgatatggtgttcagcctttcaacataatctaatgatgtttcaaatgttaataagatcctaaatgtgcttttgttctacttacaaatttcttcaagatgattgctggaggtaagttactctactgaatgtatggaacttatggagcttctttaactaaaatattataagttaaactggcagtatagaattcattgctttttttttttccttcttttgtgtactagcagttctctattgttccattgtagcggtatttttagtttattacgtgcgcaatgtttttgcctcatgtattcattttttaatgtttgtttactggatttttatcatattgtggaatattctaatgttttgatttgcaattgctcgagtccctaagatgtttgcattttgtttttttttctttcttttctggcagttgtaattgaggagatagagg

SEQ ID NO: 87211 - DNA, 391 bp, Citrus clementina
  Intron number 3 from transcript clementine0.9_008508m (loc us clementine0.9_008508m.g) derived from phytozome v7.0 (c hr-ID scaffold_46; pos 1273026 to 1273416 reverse strand)
tttgccagatcacacgctggatatctcagaatcaggtatgaaacagtatcccgtttgaagatattttggattaatacctggagcatgcaacattattataaagaaaattatttacaaaattaaaaaaactttatattttttgaaaatgaagatgatacaaccaacttttgaaaatgagaatgaagtagaattattgttcagtaaatttcattggtcctgcaattccttagaaattttattttatctcactgggtcttgagttcctatggcggaattttgatttgatttgatttatctatttgtgtcttgtgagtacgtgttgttttcagtgagtttctgtaaatttcttatgtttcatgtcatctgattctatccatcaatggcagaattt

SEQ ID NO: 87212 - DNA, 339 bp, Citrus clementina
  Intron number 3 from transcript clementine0.9_006020m (loc us clementine0.9_006020m.g) derived from phytozome v7.0 (c hr-ID scaffold_9; pos 1102448 to 1102786 reverse strand)
ctgttattttaacttttgggtcttatcgcttgggggtaagttcgattctttatttgctctttattattgttgaggatttttcttttcttttgtttttatcatcctctcttagtattaatgcactgtctacagctggattaaatttcaccattggtggcatatgaactttgctttatggatactaacagaaagtagaaactgatatttctatatgcttagcaatttagaagcatggtaatgaagagataatggcctaaatgtaatgcccatattgtagtaacattgtctttcttcagtgaattattatctagacatttactgacacactttgacaggcac

SEQ ID NO: 87213 - DNA, 470 bp, Citrus clementina
  Intron number 1 from transcript clementine0.9_013120m (loc us clementine0.9_013120m.g) derived from phytozome v7.0 (c hr-ID scaffold_32; pos 701453 to 701922)
tcaagattccctttttttttcttttctttttcaatgtaagcatatatgaccgctagcttagctaagctagctaactagctagcacgcgtgtctatatgaatgtgtacgtaatacatttttgaggagggaaaaaaaaaatttgtctacgcttatgtgtgttgagttgagtcagttaacggtggataagacttgtgagctgcagttctgagtaattttactttagtttattattattttattttttttgaatgagctcttctttttctgtgcgaagctgatctctgtgtgtgtgtgtgtgtgtgtgtgtttatttttattaattgtatttgttgataatattgaagtccgcactggttattttgatttgtagtttgctactgcgtatgatggatttggatggatataattttgttgttctgttgttggtttttgtagagggatatagaaggtggaatagaatagggaggcga

SEQ ID NO: 87214 - DNA, 1069 bp, Citrus clementina
  Intron number 2 from transcript clementine0.9_024220m (loc us clementine0.9_024220m.g) derived from phytozome v7.0 (c hr-ID scaffold_2; pos 3750057 to 3751125 reverse strand)
ttttgttgctggggcaaccgttctgggctacaaaggtgataattctttctttaggtggtcagctttttctttttgctttgattcttactgtcaagaatttaatgaattagatacgaaaagagtagttaacctagtgtccttctggacttgcatggtttacattaatttcctcattttggtgttttggtttgatgattagctgttgtctagagagatgtacataacaaacattaaatgctttcttccagttgactagctgttcttgttacatcaatttcgttgcattttcttgtatctttatttgtatttttttttttcagtttttgtatttttcttgtgaggaacataaaatataaagtcataactagctgttcttgttgaaatgccaatgcttgcggccaagatctggtatgcagagtctaaacgaagataaaaaattgcctctgttgattaagaggtgctggttagatttagatttcaatttttcttcctggaatgatgtttaatgtcactagataacaacctttttaggtacttgttccaaaatcgtgattaatatatcacggagttggctattatcacttatctcaaatttttgctgtaatccattggtttgggaccttatcctcgtgtctttctctcagtttctgcccatattttgaatcttcaacatgtcaaaatgattcctttaattttcacatccactcaaaagcttcaaatgttgatgaactaaaggcagaatttttcaggcatattaccttgaagatgcggatctaattgcttggatgctgattagtgaacattgttccaactaggagatgttcctacttagcttcttaacctgttttgatattactttcatggaaaggttgttttacagagttataggccataaagattgttcatgatttttaccattccccagcacttgattgaacagtgatttcaatcactagtgcatattagctgtcaatattgtccactttttcatcaatatacatagtataatggttgatgttctctccatgttgcaggaaagagcatttcatcagcaatttctgctggtgcc

SEQ ID NO: 87215 - DNA, 612 bp, Citrus clementina
  Intron number 4 from transcript clementine0.9_007705m (loc us clementine0.9_006798m.g) derived from phytozome v7.0 (c hr-ID scaffold_36; pos 2089431 to 2090042 reverse strand)
gtgctggctggcccttccactatcactgggcttcggtatgtaaaatcttctttttcttcataacacataacactcacggccaggccaattgtgtatacttagttgttttaactcagcagcgacttggacatttttctgtttacttttgatgtttgtagattttaactcatttagtcggaacatttttctttttatcaaatatgtctagttcctatctttataaaatttaaggaccccttcctactttcttcaaccattgctcctttcaagcgcctttctctgtcgctgcattccttgctgttcccgtcaaaaattttatcttcagtcaaaactaccttgactaatgtgccacagaagaaacactgcagtagcttttgaggtcttctttgaaaagcaacctttttcacaatcacaatggcataacttgcatttatgcctaccaaaagaattatttgtcaatattgctctgtatacacactgcagcagctattttaatcttgctatttttcttttttagtttttaatagctgaacatgtccatatgaaaccatatggaaaaggcctggtaattgttgccttcttatttctgaatgcagtgagaatcttcttccc

SEQ ID NO: 87216 - DNA, 783 bp, Citrus clementina
  Intron number 1 from transcript clementine0.9_022754m (loc us clementine0.9_022257m.g) derived from phytozome v7.0 (c hr-ID scaffold_32; pos 1987058 to 1987840)
ctgacaaatcaggcgataaagagccttggagcctggtatggtatcatatatctcttcttcctttgatgtcctttacaagcgctaataaaatcatgaatcctgaccaagcttttatgcataatattaagaaagaccaacaattttgaatattttgtcaactttccttcgtgatatatttggtttctttgatgaactaatcgtgattgaattggggttacctgaaggaataggtaaagttgcttggtttattttcataagggttatcagattaggtcaatgacagtagtttgattacgtcaccatgttaaggtcccaaggccagtttagtattgaggtctgtcgtgggaaaaaagaaaagaaaagaaaaaagttgtagtttttaaatgaaaatcggcaatgtagggtaaatgtaatttttaaataataattgcgataaaaataataatataggcttttcattatgcttagtgtggaaaaatttaactttaactttcaaattacaggaaaaatttaacttaactttcaaattacaatacgtgtttaccaaatattttaaaattacggcttctcaacgacacgtttgaatggctttaagctttgtttagaagaaagtagataaataaaaatgcaattaagtgccaaaatcgatttatgatgttaaacctttacatgtatttcttaaaagtgcttcttgctcccatgttctcagttgaaatctaccttgtttgtttaagggtttctgatcacaatgttaattgcatatcaggattcacgagtaacaga

SEQ ID NO: 87217 - DNA, 856 bp, Citrus clementina
  Intron number 1 from transcript clementine0.9_025251m (loc us clementine0.9_025252m.g) derived from phytozome v7.0 (c hr-ID scaffold_9; pos 1691164 to 1692019 reverse strand)
tgcacattccccacatcattggcctatagtagaaggtgcataactaaattctcaaacgactgcacatttcacttagttgttactcgtgaattaaaattctatgtagtacgtatagtgaattaacattctatattttgtcaatgatatactggaatatgcaatattttcattgttgtatttaaatattactacggtaattaggatttgggattgtcctattctgaaagaacgttacaataagtggtggataggaggagaaggctggtctaactctctaagataacataaatgcaaattaatgttttcaaaggtaatttcttctcttgctctgtttcactctgttttactccattattaatatttttgattgcatgtactattatttggttgtgtggcactccatgagagtacttttactatacctataatgttaaaaactactaaatgatcaaggaagaagattagtatcaattttaatttttggtaatgatcaagatcaaccatttttgataaataatttccatgacgctctttcaatttttgatatgggtaaagtattggtaatatgcacattttgttttatttaatatgactgtaatgtgttgtccagtgtttgagaaactgtcagaactacattagcaatttggatcgagagtctcttttgcttggagtaaccgtttgagaagattggtactagattagtgagacatggcatgttcttcaatattgaaggattggaccaatgcgctaagaaacctaattaagatggctttaattgtggatgcttttagttttctttgaacctcgttcagataaaataattgggtttaattgatgcaggcagcagagctagact

SEQ ID NO: 87218 - DNA, 654 bp, Citrus clementina
  Intron number 1 from transcript clementine0.9_019367m (loc us clementine0.9_018051m.g) derived from phytozome v7.0 (c hr-ID scaffold_26; pos 796165 to 796818)
acgagtccgaaaaagcaaaacttgcccaggttttgaaaaaaaatttctctctctctctctctctgtctctctttttaatgttgattgatttgtctgtttggaaataggaaaattgtgctctttatcatcattgaatgcccaattatgagttttatcactgtttgacttggtgaaatgatttgtccttcattatatttatagacccaaaagccaaatggagggtggaatattgatagattacaagttaatgagttaatttgtagaatgttgaaatttatgtaggaaattacagtctgtcttctttgcaattgtgaagagcattgtttgtgtaaagggaaaatgaaggaacattcaatgcattgaattataagattatatgaggttttgcttatgtttatgaacttggtgacttgtgaatatttgaaagtgtttgtgatttgaactttcaattgatttgatataatgtttgtgtaatttggaaatgagggtaagaagatttgggtttgcatgctgtaaattgcttggttatattctacgcaataagttaaaccattttatgttatattctatgcatgcaatgtttaatgtaagcgaatatggtgggttttacatggtataggtttcgaaaagattagagaacacagcaaggcattt

SEQ ID NO: 87219 - DNA, 940 bp, Citrus clementina
  Intron number 1 from transcript clementine0.9_001846m (loc us clementine0.9_001846m.g) derived from phytozome v7.0 (c hr-ID scaffold_26; pos 974395 to 975334 reverse strand)
aaaattacgagtacgagcttccggagaagtttgaggtttgtgataatgcgattcatttgcatgaattatttttaattttagctatgttttttgggtgcttcttgttgtattattgtggttgatgaactttgatttggccagtttttgttgaacttttgaattagataacaaatttctttgtggaaaaacttagttttgaagttagagtttgatggaagcttgttgaaatattactctaattggttatttaggtgaacggtatgatttaaggagtatgtgatctgaacattatcaggtctaaataacggcatttgtttaaaattttgagccatgaactatatgaacactgaattcgagtgcattgacatgaaattctttacaccaagggttggaaattttttatcatttattgactcatggtgcccggcattgctagtctaaatacagacgtctgggaagataaggacttgtatatgaatatttactatctacattaatcggacaagtaatgtttgaccttgaactctgcagctaggaaaatatggatttggttaggttctgtgaatgaaagtgtgagctgataatggatgttattggttgaagttggaactacaagtttcttaaggagggttggtcatgctaaaagcttgtgtaggctataggtgttaaggaaaaaaagaaaaaaatcacatagaaaaaatttcagcagaaagtccacactttctcgaccagtttgctgtaataaatcaataatagtggtgactcaaaactatacattcctcctgctttatcagttttacattttggaggtagctgtcttacatttctcagtgggccacactttcacctcatggtttttttcctctattgcagattaacgcttggctattttggttcatgtttccaaaattaggaatctgattttgtttgcatttgtagg

SEQ ID NO: 87220 - DNA, 297 bp, Citrus clementina
  Intron number 1 from transcript clementine0.9_013101m (loc us clementine0.9_013120m.g) derived from phytozome v7.0 (c hr-ID scaffold_32; pos 701626 to 701922)
taacggtggataagacttgtgagctgcagttctgagtaattttactttagtttattattattttattttttttgaatgagctcttctttttctgtgcgaagctgatctctgtgtgtgtgtgtgtgtgtgtgtgtttatttttattaattgtatttgttgataatattgaagtccgcactggttattttgatttgtagtttgctactgcgtatgatggatttggatggatataattttgttgttctgttgttggtttttgtagagggatatagaaggtggaatagaatagggaggcga

SEQ ID NO: 87221 - DNA, 553 bp, Citrus clementina
  Intron number 1 from transcript clementine0.9_003561m (loc us clementine0.9_003528m.g) derived from phytozome v7.0 (c hr-ID scaffold_55; pos 54737 to 55289)
cagaggtagtttcttccctttctaattctcttttctttgcagataatttctgtgtatatgttttcggttttcaattgaaaacagtattttttttggccttttggttttgttcggattattaagatagaatcgccgttagaaattttgtgtttttggattaaatttgcattggaggacttataaatataatattttttagagcgcatgtgaaactttaatgtagaaacgcatcattttagaactacttattaatgtagaaccagaacacacacaacacatcaatacaagctccaaatgtttattgaatacggtttcattgtcgagttaagtatgcaacattgttggttccaaaaagaatgacaaaagagaacctagaaacgaagggaattatgaaagatgcgacatgtatgtttatcaatattgagttagaatatactttgagtttatatggattagcctttgatttttcaatcttaatattgaccgcttgacccgctcttggtttccccatctctcaggagttttactgcactgatctgtttcgtttattccc

SEQ ID NO: 87222 - DNA, 869 bp, Citrus clementina; identical to SEQ ID NO: 78434
  Intron number 3 from transcript clementine0.9_012207m (loc us clementine0.9_012207m.g) derived from phytozome v7.0 (c hr-ID scaffold_26; pos 2639418 to 2640286 reverse strand)

SEQ ID NO: 87223 - DNA, 845 bp, Citrus clementina
  Intron number 1 from transcript clementine0.9_013065m (loc us clementine0.9_006057m.g) derived from phytozome v7.0 (c hr-ID scaffold_6; pos 4918476 to 4919320 reverse strand)
ggttatctgcactcgccaagctcgctctcaaacaagtaagctcttttttttttttttttgggaggtcaaaacactgacttgattttctgtttgattgctgagaaagtggttgagaaggaggaaatcttaagtaaaataaagaaatcttttatgtttcgctcactatttgcttcatttgttaagaatacgaaaagggcgggcttagattgttaaatataactctgttaagtccattttgatgaactcaattcatcacactaaatgagttattcagtattgttgtgattatataccccaagacaaggtacaacggttgggaaggggacatgatcaatggaacctggctagatccaggctgggatagtggtgctcattcctaactagttccgaatggtcaatcttagcttccgttcttaagaatccccagtcctttggtatggagccatcatcgccttcacctttgcagtcactacaggtttcatgtctgggttgacctccacactactttcgtttcacctgcacgagttagttagctttccagtccgtcctccctcgcctactatgagctctggattgagagaccaagggtgctattcctggctgaaggcctaactagagtgattcctctgttattcacttttgctgttagctttcttcttcttcttttttttttcaaaaaaaaaatttgattatgaatgttgattggctttctattagtaaatttcttcagtgattaaaatagaaattcgatgaactaaattgcaaactgggtgaagtttttagtaacttgtatttggtttaagggttttgaggttagtggctcagatttagtgtggagcagctac

SEQ ID NO: 87224 - DNA, 878 bp, Citrus clementina
  Intron number 1 from transcript clementine0.9_007054m (loc us clementine0.9_007054m.g) derived from phytozome v7.0 (c hr-ID scaffold_76; pos 648053 to 648930 reverse strand)
cagagatagagggttgaatccgttcattggtgctggtaagttcattgcttgtttagttcaatttcaagaattttgtttttaaatttacttcctgtaatgatcctgaaatcaaacttgcgagccatattagataactgagttcctataatatacatgagcatatgtaaatacaataatgatccagtgggcaatgaaactcacctcgtactatcacgtggtgctgtcctaaacaccttcatcggaggtgtctgtttgttgtgtatgaatttcttatagaacttatgagcagcatcactcaaaatcgacaacttcaaaaccttatgatttagtgggtgatggtactcacaaagatgttggcaatcaattattgtttgttattataatactccaaattgttcaggtttgatgtttatttgtgtaaacataagatcatagttgggagagatttactatgttacaagttcaagttcctatatgatctagtgttaaacctttagtcttaaacacttgtagatgttagcattggagcctctatctaactgttaaaaaattttggtcagtctcgttgaatttatgttacatgtgaaagtttttcttaagccttaaaccttaagacactaatcttatgttaatgttgagatgtgacctactagctttaagattttaaatcaactgactcactctgggcatcattagtgtatttagaatcccaactatgaggatttcttagcatggtcttgttcatagaagtccctgttggctgctgcttgtgtatgaagtagcattacttgaaatctttcagctgctaattacactaggttaattgtctttccatttgtcttgctcagaagacgacttatctaagcttatcagagagg

SEQ ID NO: 87225 - DNA, 616 bp, Citrus clementina
  Intron number 1 from transcript clementine0.9_016440m (loc us clementine0.9_016438m.g) derived from phytozome v7.0 (c hr-ID scaffold_22; pos 2313462 to 2314077)
ggcggagatagagaagtaaatagctgtaattcttggtaggtttatttttattttgatgagaatgcaaagatggtttaagagttcatgagctctgtcccattatttatttatttatttattattattcttagaaatagaattttggtttccttttttctattaattctgaggtgggtattcgtagttgtgatcaaagatataatcaattatttttaagtgcaaataaaattttcttgtgactcgtctataaggagaactgctttaaaattttagctactattggtttagatgttattatggagtatgtgctttttccataactaatgtttgatcaaatggtacagttggtttgcatctttgagttctgttttgatttttttttctttcgtttccttatttcaaggatttcagttcctaaatatttgtttctcttctaatagagtttattagctggctatgttatctttctctggactagtcatctgaatatgactcttaactacttggtttctgggtttgtttgtttctcgtttttcaattatttatctgaatgttgattactttgtttgatcttgaaacaggctctcataggctgtcttgtgttaataactcgatt

SEQ ID NO: 87226 - DNA, 542 bp, Citrus clementina
  Intron number 3 from transcript clementine0.9_010364m (loc us clementine0.9_010364m.g) derived from phytozome v7.0 (c hr-ID scaffold_19; pos 149530 to 150071 reverse strand)
tcttcacagccttcagaagagcgctccagtgcagggtaagtgatatgtggaattttgtttaagttatgagtcaatttttgtgtctcaacctactatttccatatgggaacattaatttaatgcagcgttattatgctacctcctattagccataagaatgctaaaatgcaactgctgtaggctataacattcaccagttcatcctttcatatacgaagaaagtaggtttttatgctcacctgattaaaattggaaattttattgtaatgactttgtttctgttttcaagataacttttatgaatgttctatattccactctagtaaattccacattgacatttttgtatgttcaatatgtttgctttttgatcaaattttatgcatgaagcacaagtactctgtgtccattttctgtagttgtttgcgcagtaatatcgagtattatggtggtcttttaaattttttcttatttttaatattttaattttattgattgtacatacaggagaaatttagaaagatcaggaaaacaagagaata

SEQ ID NO: 87227 - DNA, 418 bp, Citrus clementina
  Intron number 3 from transcript clementine0.9_019098m (loc us clementine0.9_019123m.g) derived from phytozome v7.0 (c hr-ID scaffold_2; pos 5062126 to 5062543 reverse strand)
gagatagaccaactcaggttctggtgcaaatattggtaagattaatctttggtatttggtttgtttttttcttcttcttaatctgttagaaatagtcaataattaattctatgaaaagaagttgagaccatcaatgccagaatgccttgaatagtatgggagttaggttccgcaattatttttctaccggaaactttgattggtaatttcagattgtatttatttttttgatcatcttcttacatgtcgggttaacgaattcaaaagaagaatttattactatattctgaatttatgatgtagctggaagtagagatgaattgattagacaccatccaatcgagtaacttgcccagatcacctttcaggcttcggcaaatgacttatttctctacaattttgcaggatccttgtggca

SEQ ID NO: 87228 - DNA, 764 bp, Citrus clementina
  Intron number 1 from transcript clementine0.9_007528m (loc us clementine0.9_007528m.g) derived from phytozome v7.0 (c hr-ID scaffold_26; pos 359775 to 360538 reverse strand)
agaaagatcctattttggttactggggctgagcaggttagttaaagtttcaaactcttgtcatattttaattggatttctgttctttcattgtgttctagtttaggtgtgataaagttttgttatttatgttgattttaactgtttttgtctagacatgttattcattttttttttttttgggggtaaaatttaagcttcatgagagcttaattttgttgttgataatgttacggaatgaagagtattgcttttgatacttacatagaagttgcagccggaaaatttattttgtagacgggaggaggctccgttttttcttttaataggagtccccgaacataaacaaagagctcttatgcatgtgtaaacatgatatataggtacataaattctatctattttgagcaagaggctgtcttatcttgatagagaatgaatagacctaatttgtacagagcttgcaaatcatctgatatccgtttttgtaatcacagttgtttaattttgacggtagttttagaacaactgagagtctgattagtttcctacaggtaacttttgtgtctgttttcactgaaataggaaatgaacatttagagtgacagaacatctataaaactgtaatcattctgcatcgcttgttgaaattactgatttttacagtagttttagaattcaattaatttaatgttatgtttttgttttatcttgctatatctctgaacttcctgttgcatgctatgtaggagtggagagtttgtg

SEQ ID NO: 87229 - DNA, 520 bp, Citrus clementina
  Intron number 1 from transcript clementine0.9_019447m (loc us clementine0.9_016676m.g) derived from phytozome v7.0 (c hr-ID scaffold_17; pos 4209936 to 4210455)
atttgaaaggtgatctggtgcaccgacaggtaactttattatattttatgtttttggaattaaattatacataacttttttcattaatttcttgaaaaacgttggcattttgaaattgatttaattttgggtcgaaaatgataacttagtgagttaaaaatgggagtttaattcaaagttaagtagaagcacaacaattcttagcacaccacgttgtataataaatgtttttgcattttgtatagctttatgagtgaggcaaagcaatctttagggagtacatggaattaattcttagggacaaggtacattctacgttggaaatgtttcctattaatctggtcggattgcagttctttgataattaggtatgagtaaactcagatggtcatgctattcttgtgtgtgttggtggtctttgctattctgtgcgtattatcattgcaatgatctaggaactaattgattgagatttgtgcttgcagttgatacatcccggacggattctaaagttgcgagt

SEQ ID NO: 87230 - DNA, 928 bp, Citrus clementina
  Intron number 2 from transcript clementine0.9_007020m (loc us clementine0.9_006260m.g) derived from phytozome v7.0 (c hr-ID scaffold_26; pos 409632 to 410559)
ctgaccccggttcttcatttcttgagctttctcaggtttattatttattagtcttgtaggtgctggattgtagtaaaaataatcaattctagagttttaattgggcatgcctaaggcttgaagtttgtgttgataacactgcaaattccaattttggttgccatcttggtggggatctttccttgggattgttttgattgttaaagtgcaattactgttttgttgggttgctagttttactttaaaaatgcaatactttattaattagaattgtataattggtttaaacttggagacagtcgtaagtctgttgattgaatcaattacagaaattgttaaatgaggcatgcacttctgttatctctgttgtaatctttcttatgcttaattcctgtattgatagaaaaatggattaaagcataccgtataggtgcctggaacttataatgaattatctcaaaccatctgcctggatctatataatttcttttctgaggtgagtgttcagggaatttggactaactaattagcaaagccatttgttttatccaattgaatgcaatttagaatatacatatacatgatgtggatttgaataacagaattatgaatcgtatgaactagctaatatgtatatttctcatggctagtcaagagactgagagacattgggagcatgtgttaatttgatgcaagggctgatttctgttttgaaacactctggtccaattaagtacagcaggctattaacactattagcagtggtatgaatattaaaacaagcttgcattgtcgactcatgccaagaaacaattcgcattaaatgaagactagttctcactattagttgattcaacaagatatgttgcttgctatttggtacattgcagtatcttatcatatacaccgtatataaagcttgcaggac

SEQ ID NO: 87231 - DNA, 619 bp, Citrus clementina
  Intron number 1 from transcript clementine0.9_003433m (loc us clementine0.9_002220m.g) derived from phytozome v7.0 (c hr-ID scaffold_22; pos 661090 to 661708)
gttcctcacttccatcaagcaaaacttacacacgagtaaaatcagcttcactttcatatttttattttttcacatttgatgttagttattacttgtatttgagttaacttcagtttacatggaagtcattcttgtatttatgaaatgatcaatattcgatttgagctgaagtgagtttttacggggggagtgggtgtgttcacatgaattttgatgttgcttgaatatattttgcagtatgtagtacttcatttgaattttactcgaaatttaatattagaatcttagatgcacgggatatttagataggtgagcttgctaaaattaaggtgctgatggaatgatgggttcacgtttcttcagaatgatggtaagtttcattttacgcgtgatcttcgtgaagggaaatgtaagtaaagaaataaagaaattgggaaaattattttgaggctcaagaaggctattgttgttgcctattggaggaattccactattacaacctacttttgaattgtagagtagtttatatgctttgagattttgtttattgacttacttttaagaagtctatctctttgaagttgatatgctcaatgttttcaacaggttgcagaaaaca

SEQ ID NO: 87232 - DNA, 543 bp, Citrus clementina
  Intron number 2 from transcript clementine0.9_003433m (loc us clementine0.9_002220m.g) derived from phytozome v7.0 (c hr-ID scaffold_22; pos 661772 to 662314)
acataagtacttcaagatttctggtgccccagagagtatgtttgacatttctaatattaaacactgggaaactgtgcgtgattcatgttgcattgaagttatgtgggagtaaactggtccttggtttgatgaaattattgattttgcatgttaaatttgttggattggttggtttttgactgtatgaaccaagactcattgattgttcatcatagagaaacctgggtcaagaaattctcattcgcattacatctaaaattcaacttcactgtcattgtcataaattaaataaaacgaattcaaaagtagaatctagaactcctattgaatttgaaacattaaatcctctatggtgaatatttatagttataaaacaaggattcgcttcatatcccctgcattgcctctacaaaatattttctgttaattcttctgcaggtatatttcttttctgagttggtaatcaggtgcttctctgttgctattttttattctattaccttagcaggtgaagcaaaacttcccaatctcgtctgttttgac

SEQ ID NO: 87233 - DNA, 742 bp, Citrus clementina
  Intron number 2 from transcript clementine0.9_023802m (loc us clementine0.9_023755m.g) derived from phytozome v7.0 (c hr-ID scaffold_6; pos 5051900 to 5052641)
gatcccactaagtatatgcttcattttcattttcacatttatcaatttcaatatgaagtttcgagagccaaagtgtattggttcatagcaggcttagttttgaaattcgatttggaatttgaattggatggttttggaggtctttgttttgaaaaattagagattgaatacttagttctgctaaatttttattttcggaatacgaagaaatattttgttagaattgtagagctatgattgctgaaagttggttttattgtgctcaagggacttggttcagatgaaacgaacaacattgtgaatttactatctattccacatgatgcacaaacgaatgcaattttcatgatagtatatgttgtttggatattcttttgttcatcaattcatgatattttgcttctgaaggtataatttcacttctagattgatagaatggtgttttgttgaggttcgttagatgattcccatgtatgttgtaactcatgggggttcttattgatgtcttttggagtgaattatgataaatcttggtaaacagttgacttagctgatgaattctctaagaggtgaacaataggtttgggaattaagagacttctgcattttaattatacaagatttgagatcaagtcttggctatcaacttttatgtaatgtttatatggtttcattgcagtaatcatttgattattttatttgtgcagtgcagagaaaggaaacttgggggtgccccaattat

SEQ ID NO: 87234 - DNA, 312 bp, Citrus clementina; identical to SEQ ID NO: 81806
  Intron number 4 from transcript clementine0.9_018677m (loc us clementine0.9_018684m.g) derived from phytozome v7.0 (c hr-ID scaffold_9; pos 6267584 to 6267895)

SEQ ID NO: 87235 - DNA, 1064 bp, Citrus clementina
  Intron number 1 from transcript clementine0.9_025790m (loc us clementine0.9_025790m.g) derived from phytozome v7.0 (c hr-ID scaffold_26; pos 3241228 to 3242291)
aagccgcttggaaggccgaactctcccgccgcgaggtttccttaaattatttattttgttttaattctatttttccttttcttttatttattttccaatttcatttttctttctctttacaccaaaaaaaaaaaaaaaaaaattgatttttggcatttgtttgttgtcgattagagtgaaatttaatttagttcctgtaaaactaaaataagatgctgttgcctgtttgaatgtgctttcagtagaagaatagggccaaaagcacttctaaatccaaacatgagcatgtttgtctgaggataccaccgagcagtgccggtgttgcttctgggcactgtcaatggcgctgccaagctttcacctttcctaatcttgtcctggcatttgtctacagtggggtgttttttctttcccataactaattaaattcagatactacttaggtgatgccatgccctccatgagtttccccaccatagatttgtgggataataatgggtaaattcaaaagggctgattttttttttttttggcagcttttaatttattgaacagagtcagctactcactttatactttttttttcaagtaatcacttttctatttcatttggtttctaaatgatccaaaggttatatatacatttttccccccttttttctccttttatggctgtgctattttctgttttctggtttcttgtacatttaatagtttctgttgcgctttagaagcaagcttgttgctttgtgtctgttgggaattaatgacgtgtttacttgtgtggatgcctggatggcctttttgtctttgtaaccatatgcggaagtagccattgttgtctcatgttcttttgaaaactgtgtgcatgctcatgagttgaacttacagatgaaaggcaaacttagaattacgcatctataatgttgatttaataatttctctctgtcattttagtattagatgtcactagagtttggggctggtggtttttgagcaagttctcatatgttgttatccattttccaggccgagattgcccgtcaggaagcaagattgaagat

SEQ ID NO: 87236 - DNA, 625 bp, Citrus clementina
  Intron number 2 from transcript clementine0.9_008717m (loc us clementine0.9_008717m.g) derived from phytozome v7.0 (c hr-ID scaffold_59; pos 1121001 to 1121625 reverse strand)
gctcaacggcgttttcttgtcttgccttctttggtgtaagaaatcaacatctactttatattacaggcttgcatctaattctcagtgtaaggaataccagatgagtaataaacttagaatttggcttctatttttgtcatatcaaaatctgaatatcatttcagatgcttgataattcattttagtcaatgaatatcgcttccgactgaggataatgttttcatagatttacctgacagacaaaacttatttggctctaaacacagtgattgattttgaaaggtcaaaatgtcccctaatttgacaagttttgctccctttttttttctaataacttagtttgcaggatccatctgttatatataactatttttttcacttcttatcttccttaacgtagttatcaatgttattgtttgtcattaaccagatataccaatgcacaatattcatagcctatataaattgtattcatttggggtaagtgagggcatcatctaggaaaatcaaaacacattgcacgtattatataaatgcatcaagatttgtaaagaaaaagaatttaaataaattatcgttgttactttcagatctggtcgtatatacgtagttgacacacaaaaaa

SEQ ID NO: 87237 - DNA, 700 bp, Citrus clementina
  Intron number 1 from transcript clementine0.9_013973m (loc us clementine0.9_013973m.g) derived from phytozome v7.0 (c hr-ID scaffold_78; pos 15220 to 15919)
tttaaaatcgaaattaaaatctcttctctttcgaggtgcgtattgaggatatatatatatatatatatatattcggtgcgtttcgctgttgcaaaaacgtaaatgcattgtgctgatccattgcagaatattattagtattagattcaaagaagttgccttttttgtttgattgaggagaaatttttaatgatgtgatgaaattcctgttctgaccttgagggcataaggaactagatctaattatcaaagagaaggaaaatgtatggttttgattgattttgctgataattttttagtcgtttacgtatccttttagttaaataaaatcaattccaatagtattggattcaaagaatatgcttttgtttgattcacgagaaaaattcatggattaaaatagaaattttaaatcataatcgtacagaaaaattagatcaaattgctagaaaatgaaaagatattcctgaggtaagtaaaatcgagtcccaaagaaattataatatgataaaattgcaaaatatatttagaatagaaatttttatgatatatattgatattgtctttgttaattggaggctggaagatgctttatgggtaaattaatctttggggaagtataattatttaattgattttattttattttaatttcttttttgacagatagaacgccagctgtaaattttgtggagaattaa

SEQ ID NO: 87238 - DNA, 693 bp, Citrus clementina
  Intron number 1 from transcript clementine0.9_022448m (loc us clementine0.9_022448m.g) derived from phytozome v7.0 (c hr-ID scaffold_9; pos 1948562 to 1949254)
acatcccctgcaacttttgcaacatagttctcgcggtatctcccatctcttctcatctcagacctcatcccattgattcttgctttaatgggctctctctctctctctctctctctctctccaagtattatgtataaacctcgcaggaaaaaagatcctgataaaagagctaagtgtttgattgtgtgatcagtttctcgtgctttgctgggatttcttgattttgttacagtcaagtctccatcgtttagactttctttttttttttacccttcttctttttcagcagtcaaagaaaagtcatacctgaaggtccagaactgctaacgactagagagagggggattatatattatctgagagtaattaattaatatataatttaattaatcataataatatgcatacaaacgtccaaattaaacaagctttggatgataagatgatgaagacaactcattcatcaccttttgatttttctcctgcgttccatccatacctttcaaagctcaaactaagtttcatgcacccatgtgtttctttttttaattattttctctttcttattaattaaagaaattggattttgattttatcagatcaggcgagtctctgaaattaactagtttgtaaatgatgatctgatgtgtgtgtgcaggtgagtgttccttgcagtagcttgcttgacatcgt

SEQ ID NO: 87239 - DNA, 615 bp, Citrus clementina
  Intron number 3 from transcript clementine0.9_018679m (loc us clementine0.9_018679m.g) derived from phytozome v7.0 (c hr-ID scaffold_9; pos 5260365 to 5260979 reverse strand)
gagaccatacattcatttttgtaattgttcagctggtaggagaactaatagtttctgtttattttgtcattttactctagatattgattcagttcacttgggtcgtctagatttcatttttttgacctgagtagtaaataattacgttataatgatttggttgattttagcttaacccagacaggaaataggatattaatacagtaccaacatttactttatttatgtctaagcagaaagttggcagaaaaatattgcctatgcaatctactgatttcttttcctcactatatttggttgaaatcgcattttgatcatttcttgcggagcttaaagtttctatattatttagctagattgctagctggttctgcttttggaaaagatcctgcattatttctttttggatactttggcaatactaaaggaatattacttacataaatgctgtactttaatgacagtcagcccaatttttcgtttctttataaattactattttttctcattcagtggttctgtcgtgtgaaaacaaaaatatctttgctatattgtgcaacttaatatgtgctttgaacagattgtggcattgttgggggtgctggtatacaaatt

SEQ ID NO: 87240 - DNA, 970 bp, Citrus clementina
  Intron number 3 from transcript clementine0.9_002631m (loc us clementine0.9_002631m.g) derived from phytozome v7.0 (c hr-ID scaffold_42; pos 9508 to 10477 reverse strand)
catacttgaaacgtgagtttattttcaacttatatattccgtaatactggctagcatttaaaaatctttgattttaaaaaatctctgaccgtgtagaatcagcttatctttttctggtagataagtttaaaaataatcattttggtatttaggattgtcttatatatggttttactctctggcaagattggtttgagctgcagtgctggatttgatttgttaaaaactttatgaaatgtttcattagtagttttgtctctcaatttcttttattgaaaagagtagctttgtaggttcttctagccataccttttttcaagctttagatgtcttagctttaatgtagtaaaggatggttttttttttctttttcggtctcttgtttattaatatagctggtagccagttgcccttgctattctctctctgccactcatctctgtctttctcttatgcgcgcccacacacgcatgcgggctgtaagggatatatatgtgagcatctgcattcgtgcttttgtctatgtagtgtatagagacactatttttttactttttctcagtttcagatagttcttagatgtcaaatgcttggaattaatcttcttttaagttggctcaaagtctacttttatgatttttttggagcaatctatgctaattatagaagtgatgattttctaatgaactgtccctgatagtctttttcaacataagattggttttggtaaactctgcagctgcctgtggatattgcaagaattaaatgatcatcagtattcctctcatgactattacgattttctttctgcatatgatcaaatcattgaccttattgattctttgtctattttgtcatttgttcttttgtcccatatcatcatttgagagttgctagtgtgagtgatttctgagtccattttttaatacttgtagcttatttcacggaagcttatcgaccagtgaggaag

SEQ ID NO: 87241 - DNA, 494 bp, Citrus clementina
  Intron number 2 from transcript clementine0.9_031928m (loc us clementine0.9_031928m.g) derived from phytozome v7.0 (c hr-ID scaffold_78; pos 578321 to 578814)
ggtgccaggtaattcaaatcagcctcctgtatctctttcttcttgtctttgctattcacacatatatctaagaatacacaaaaaagaagactaaaaaaactataagatagacacaacaaggacccatatgtaactgctgttgtgttagcttaattttaggttgctagtgttttggaatccttttggcatttcttctaaaattactctaattttaatcctctactgttgacataaaaataatttaatttctgcagaagcaaagtagcttctacttgacagctaccttttaccaaaaaagtttgaattgcaaatgtagttgtcaattgttgttgcattttctttccatgtggtttgttttataacctgaacattgaatggtgtgactagaatttatgttttgagtatcttttccaaattatctattatcttgtagatatcatgaagttttcattcttgcacttgttttcattgcagttctttatcacttgtgcaaa

SEQ ID NO: 87242 - DNA, 596 bp, Citrus clementina
  Intron number 3 from transcript clementine0.9_031928m (loc us clementine0.9_031928m.g) derived from phytozome v7.0 (c hr-ID scaffold_78; pos 578817 to 579412)
gtgattggcttgacaataagcacgttgtatttggggtaagtgctccaatgttttgttgtcctcatcatcagtgtacctattatgtcacatttaattgtttttggtgcgattatatattttccatgaaccagaattgcacaatattttctggtattaattaatgatttttttactcaccaagaattattaaatctaaattataaagatctaaacattaccgaatgtcactggaagaactgagtttctttaccaaatgcttatgtattcttctgttggttcggtttgacttttagttatcaagtaaatatagtcattggtgcatcaataaatttaggctctttcaatcttttatacggatgcgtggatgtttgtgctgttacttgactgtctatattagttctggttgttcagctctaactttaggagtgacgatctaattcatagtcctgtttataagaatatcattttgctgcctggggcaatccattttttcctttttagtttattgcaatggctttttgagtccttactgatgaaatagtccctctaaaatgtttttttttttaatataactttaatgtagagggtgcttggag

SEQ ID NO: 87243 - DNA, 790 bp, Citrus clementina
  Intron number 1 from transcript clementine0.9_013782m (loc us clementine0.9_013782m.g) derived from phytozome v7.0 (c hr-ID scaffold_6; pos 4789722 to 4790511 reverse strand)
gcttgaggagaaacaacttacagctgaactccaaggcaaaaccctttcttttttctgatttataatctatgtattggtatataattcatttgccatttggttatatcttgtttgtgagggtgattgaagatattaatgaaatgaaaatgataaaagttcaatgatctttagtgtgttaatttatgagctcattttgaatgtttggaaactgatatccttttcattctgtaagtttagatagaaatgggtcttcgtttatggagttagcgctggaatttcatgttacatgatatgattgacaatgtttttgcattaggaaacatggatgaaccaagagcgactgttgccgtaatgatggatgttgtgaaatattcaaaagacctttaatatcagtgcattctttgacgttttactgttgtactcactaaacatcaatgtataatgtggctctttgagaatcacactacgaaaaacctgagtatgctaaatactatgtttgcacttcattgaagatcttgttgtgaaatttgcaggctcaccttttctattttagctctttgtaagtattaattttcatttgtgatgctacgcatattaattttcatttgtgatgctatgcatattttatgaacagtttggaatttggattagttctattctgcataatttccaggcaattggcgtcaattttcttttgtcatctttacggcttatcactgaaggttgtattgttttcatgtttctgctgcttgcaggtcccagtcgtgcatttggtgaccttattgcggca

SEQ ID NO: 87244 - DNA, 745 bp, Citrus clementina
  Intron number 1 from transcript clementine0.9_033940m (loc us clementine0.9_033940m.g) derived from phytozome v7.0 (c hr-ID scaffold_19; pos 2225967 to 2226711 reverse strand)
gcaagtgggtttatcctccaattaagtatgtgcttctcgtttaaagttttgattttttttttctattttcctttttgggggtcaatttgaaatatttgttaattccttgcttttatgactcttctccattcatgtttgttttgcaattcggaattttagttgtgagtccacattgtgacttctggtggaaaatatattttctattacggaccttttttcttatcaaaaattctttcttgctctgctggatgaagaaactggaggttactttattttcaagaagattctatcttgtgaggggtagtttagttttctgcgttgggttctctctttcttgttatgttagtggcaattaagttcttcaggcaacttagttgggggttatacataggcgagcttgcattttgaatacagtagttggattcaaaggtcttataattactgctggcttaaagtcattaatttgagtggtttgtgtttgttcccatagagtttggggctcagttcctcaggtcatttatgttgaaaagccactactttctaccaaatatttgaaggttattcagtgatgatttttctaagtgggttctggaatatgaaaagaaatgtcattttgcaagctaactttggatgcatatgatggaatatggacggactcttatccaaatccatgtgcactctttgaaccctatgagcttgaaacttaaagctactttacccaccagaaagactaatccaatccaca

SEQ ID NO: 87245 - DNA, 660 bp, Citrus clementina
  Intron number 2 from transcript clementine0.9_005752m (loc us clementine0.9_003927m.g) derived from phytozome v7.0 (c hr-ID scaffold_36; pos 351211 to 351870 reverse strand)
gatccttcagcaattgacgtccttcttatcacgcagtatgtgctcttttccggtaatgtatacctttattaattgttgagcagtagatgcaatagagtaaaatgatgtttcgggcagtcattgtttacttagggattgaattagaacttctgaaatttgtttaagaagaatgatttgggtacttttgtcgcacatgaggtgtgtgcaacacaactggtactttgtggtatttttgctctttacacttttataaagcacttatttcacgttaatgtccttcttatcacgtaatatgtacttaatcccataatgtacacttttattaattgttcaatggtatatgcaatagagtaaaacttagggatcaaattagaacttctaaaatttttaattttggaagaaaatttggatatctttgtcaaacatgagatgttgtgccataactgatatttgctcttgttatcccagaaaaaagattcatattttatgctgtttttttctttacactttcataaagcacttgtctttggaatcctattgtacgatcgtttaatcaaaattgtcctagctgactctttttctctatcaaccctcccttatgttgtcatgtaatatatttctactacttcatgcttttctcatgcagctttcatttggatc

SEQ ID NO: 87246 - DNA, 943 bp, Citrus clementina
  Intron number 1 from transcript clementine0.9_008318m (loc us clementine0.9_008318m.g) derived from phytozome v7.0 (c hr-ID scaffold_26; pos 2190318 to 2191260 reverse strand)
cgggtcctgctcctacacgatcacggcctcaattggtaaagttttcgcactctgttcggtttattcgaatgaaatttgaaatggggtttttctttttagcttgttctatgattttattttattttattttactcgagttgatatcttagcggtgtgcttctgctttgcaagttgcaactaaagcgtacactgactttttttaactgttaattttttcaaatgtcgcagtggcttaaacttgactgttagtgatttcatttcacagtagtcatggattaaaagctgggacaattcaatcccaagtacccagtttctggtttctagtatatgctactgcacaattggtaatttgagggtattattgaccgaagtttgcatctgttcatttgagccgacttactagtagtgatattgacaccttaattatttaaaacggtttctgtttttgatggtggtttggttcctttcatccttattttaaaatagcataaccaattggttccctgcttgaaatgccttatcttacctcgcaaagcattgattaatgtcaataataaggagaagggagcgagaatgcaatgaactatgcggtgaccaaacagaaccattagctaaatgaagccgatagttgaattaggttgttgtctgttggtggttttaactttatcaagtctcaaatagcaaaattggagtttgttttcccctctctagatttgtttacatatcagttggtgcttaaagttctgtgcaaattagcattgtagtttggttcatgtgaggtgcttcatcttatggagatagtttctgaactttagggattctagcatttgctttcaattaaccctttttcataggtttttttttgctgtgacgagtctaaaattttgatttatggtggttttgattattttaacgtgaaatggatcttctaggtggattcctg

SEQ ID NO: 87247 - DNA, 901 bp, Citrus clementina; identical to SEQ ID NO: 82670
  Intron number 1 from transcript clementine0.9_029235m (loc us clementine0.9_029235m.g) derived from phytozome v7.0 (c hr-ID scaffold_50; pos 904023 to 904923)

SEQ ID NO: 87248 - DNA, 749 bp, Citrus clementina
  Intron number 1 from transcript clementine0.9_015901m (loc us clementine0.9_015901m.g) derived from phytozome v7.0 (c hr-ID scaffold_9; pos 2357318 to 2358066 reverse strand)
gctgatttggctattgccggtcatgtaagttcccatggtgtttgttcttatagcaatgctgtgttctttactgttgatttagtgtatatgtttcgtaagagtttggcttgtcgcaattgatgggtgaattttgtctgcgtaagagtttgattgttataactttggtttatcggaaagataatatccttgaaccaagttttctatcagtcaatcaaccagttgaggataagaatatgatttaagtaactatgagcttttgtttaaattatataatggatgctgttatggtgccattattggataaaaggggggcttacgtgttggggatgtttaggttaccatcggatatgttttaagcttgtgaggtagggtatatggaggaggagcaatagtttaacttgcgaggtgattcaattatgtttaataattgcatgtttttagggcattggcacatatcgagcttttcgttgactcaactagaatgacgttcttgttatctctgttaggctatgttaccaacagaccttgtaatcttctcttccctattacttcacaagttctcattcaagttgtttgaacgctcctataaaaaaaaaaaaaaaagtttatatgattgctgctgtgtgccttcgcctttcagaatacagctaatttgttattccattggatttgcaatttttaatttctgaggatatatttacattgggttgtggcatttaatcaggccagggcattactagagtggcata

SEQ ID NO: 87249 - DNA, 709 bp, Citrus clementina
  Intron number 1 from transcript clementine0.9_015801m (loc us clementine0.9_015801m.g) derived from phytozome v7.0 (c hr-ID scaffold_6; pos 6311593 to 6312301 reverse strand)
gcagctactttcatccctcgttgcggtaagtaagctatatttagcgcgcgtgttattatttttatagaagaatttctacatatgtgttaccacgcattgcattttttgttaaaagaattactcatatgatactaagactgcaaattagttcatatatgatcattctgcaatattcactgagagtgccttgtgttgatgattcttgagattgatgggttttttttttaggggggggaggaggaggaaaagttagggttccaatcaactttaattttatggtggagtctttgtcaagcgacataaagtttatttagtggggatatacctgattattgttcacgtacattattgcattataagtatgcaatgactaaactatcttcaaaagcaagattgcttttttttttttcactaaatttatgtggtctaaatgctttttatatccgaagcttcatgtctaagaaaaaaataaagttaataataattgagctatttaaaaaattaaaacaaacaatgcaaacttgacaagtgcatctggacaaattttttaatttgaatctatttttattaaaattcaaacaaactaaatgcgtattaatttataaagaaaaaattctttattgatatttcagttataataattagtaagattgagtgaggaaatgtgtgaatgattagttgacatttttttgttttgtgcgatgggcag

SEQ ID NO: 87250 - DNA, 330 bp, Citrus clementina
  Intron number 2 from transcript clementine0.9_029791m (loc us clementine0.9_029791m.g) derived from phytozome v7.0 (c hr-ID scaffold_36; pos 1119875 to 1120204 reverse strand)
gaatctggtgttttcgtatcccgaggctactattggtgcgtctgcacgtttgtgcgcatgcttgctttctttatcaggtttgaagtcagtgctgagatttttttttgttgttatgattatgattagtagtagatattcgatagaagattataaaataaactggatcaaaattcttctttatcgtatgatatgaattccactgagagtacccggactcaaagactctctctgtgtccgaagatgaaatatgtaattgtttggcgactaatatattttttcttgaatttaatggcaggagattggttttttacccaaaggggaacgagagca

SEQ ID NO: 87251 - DNA, 992 bp, Citrus clementina
  Intron number 1 from transcript clementine0.9_024639m (loc us clementine0.9_024639m.g) derived from phytozome v7.0 (c hr-ID scaffold_9; pos 3043695 to 3044686 reverse strand)
taggtttgggtttctaaaattcaattttttaaaaataattaattgctgttacattgatcaattttagagtaaagttttaatttttattatcggaataaatagaaatgtattagaaagtggtaggaggggcaagtttgtagtttgacgagggaactgaaagtcttgtcgagtgaccgtagaaggaaataagaagtggaaatggcaaatcccaaatcccaattcagtggttttaattcaagcgttattcgtacatgtactggaactcttaagtgattgtggtattgatgaacgagggagtatgataacattgcattgtgaatttgatgctgttcagagaacagtacaagccagagttgagcgtaataaatcaaactcttattagatcatagcttctaacagcttcatcttcatggttctactttatagttagtaatggggagagttgttaagatcctttttagaaaatatgaatgcgtgtttatgcctgaatttggcggctgaaattgatgttgagttgcaaaataacacttttagtattaaggccaagtaaattttatcgcaataatgttgggcctggaaactctagttcttttctgcagacaatagagttttatctgctgaatgcctcatgcggagactagagagcaaccgtttcttcttacaaattttaccacgaggtccaagacatgcatattaaaaatagacttcctatttgagcttgttagaaatgccattgtccattctgtaggatagtaagcatagtacacattaatactttttatacaccaatatgcttaatttaactcgtaattcacattctacaatgctttcatccgcatcatgcataattttacttggttatgcataattcacattctagtcggcttgttatggtgttgatgattggacgaaaaattctatcaaactcgcgtcacgaattttcatatttctttgcagggcttgccgttagctgcaggaaataatattatatt

SEQ ID NO: 87252 - DNA, 860 bp, Citrus clementina
  Intron number 1 from transcript clementine0.9_007962m (loc us clementine0.9_007962m.g) derived from phytozome v7.0 (c hr-ID scaffold_6; pos 5426522 to 5427381)
tgccgtcgctggttcgctgttgtcagccgcacaaggtaatgaccttaaggttatgtttgcgatttggtgatgaataggaaagaggagatattgttaattcaatatgttttctgggatcatatgcaatacatatgtattttttgtataatggcattggttgtttttattttggaactcagtcgggcatggaaaaccacatctagagactgtaaattgaaaaataaacaatcgggacttgttgaaatgttgagaatgtagttgatatttgttttattcttcattgatctagcctggatttgagattttggaattataattggctggttactggaaaatttttggaaaatggaactgttgtaacccaaatgaacccaaaccaaaattgagaaccgaattttcaaacggaactaatccaaaatgtgaacccaagccaaaccgaaccgaaataaattcggttcggtttgggtttgcattttcaacctgattggatcatattctccaacccttttgggctgcaacccaaaccgaaacccgaacaacctgaaccaaaatgtgatttacccacccccagacttctgagtttcacgaggtatttgacattatctaaacaaaattaaacgagtgatggggtcttttcatattttttttatttaaatttcttggtgtgaaaaatttagggataatctacagataagttacatggctgagcttgaattacgttttgttccttatttgtatttgtcagctctatatggttgttagctgtaccttttaggattctatccttcggaatattattgaattaattgttttgtttttacacaggctgataaaaaaataccttctgcacttgttttagt

SEQ ID NO: 87253 - DNA, 894 bp, Citrus clementina; identical to SEQ ID NO: 80891
  Intron number 3 from transcript clementine0.9_007962m (loc us clementine0.9_007962m.g) derived from phytozome v7.0 (c hr-ID scaffold_6; pos 5428362 to 5429255)

SEQ ID NO: 87254 - DNA, 504 bp, Citrus clementina
  Intron number 2 from transcript clementine0.9_014584m (loc us clementine0.9_014584m.g) derived from phytozome v7.0 (c hr-ID scaffold_9; pos 1408610 to 1409113)
agctcttgtcacttatcctgatttagctctaaactgtaagtatactggattttcttgggtgcattcagaaaactgcaatagcaaagtgtagatgacatttcactatatgctattgagccttttttcagtcaaaatgtttaaattcgtatgttttctggtaaaattgttttttcattattcatagacaagtcaaccaaactgttgacaaatgtgctgggacataaatgtttaaatatctagaagaaatttgcttggctatgatccctgcctgatgacaattttttttttctgtaattagaattgagatctatgttgatgttaaatttgaatttgggaccttttgcattattaattgtttaaattttgtgcaaatatattatgttctcggagtatatgagtagcttgtatctttaaatttgaaagatattattatttaacactttttcttccaatgcaacagtaccgagctctaacttatgtttttttatgtttgactgagcagat

SEQ ID NO: 87255 - DNA, 883 bp, Citrus clementina
  Intron number 1 from transcript clementine0.9_022339m (loc us clementine0.9_022339m.g) derived from phytozome v7.0 (c hr-ID scaffold_46; pos 160370 to 161252 reverse strand)
agcggccgctgctcgcaccctggcaccttttgctggtatcaagctcatatatatgtgtatatatatatcgaataattttggtatttttaatggtgattactgattttgtgtttattaaggaaaatgttattcaaagctactgaatttgatgtttaatagagattattatgctgaaaaatcgtaagacatattacgaaataatttctgattaattgctgttcagagtttagtatgtgggcagaatttttaaccttgaacttattgtctactgattttcatacaaaaaaataaataaataaataaaaattatgattctgaaaatgagattacacgaaaagggtaatgaaaacttgttcatttgtgactgattgattctgttattgttagttgattgtagttgacaattggagttccttgtactggagtaaacgtgaaacaaccaatttagataaaaatctctattagctagtggcattgccacttctttgctaaatctgctggtgttagtatctatacataccactgtaggttcatgtttggtttcaatatgggtctatgttttagttgttgattggtggtggggaaacatagtaaaaccaatgccagaatgtttggcatcattcaaaggagcctatgcttctaactcaatacaacattgcaaattttgaaggttttgtatttgaacacttgctaaaccatttagttttctgtatactgtattgtgagttattgtttgggactttgatgtggtggatggatatctttggtttctactgatggatgtattcaactttctccgcgggttgaaattttaaaaactagtgacttaggaggctcttgtttttgggtttttttttttttcagatttgtattcttctccttc

SEQ ID NO: 87256 - DNA, 896 bp, Citrus clementina
  Intron number 1 from transcript clementine0.9_008100m (loc us clementine0.9_008100m.g) derived from phytozome v7.0 (c hr-ID scaffold_34; pos 295936 to 296831)
gtggctcaaaaagcttgctttcatcgtctgttttggtgggtaattgttattttcttcagtattttgtttagtttaagagaaaacgaagggaaagacgagaaaataagatgctttgttaacgacttttttttttaaattaatttttagataaattatatctggagtttttttactgttcctttttttaaaaaaattataaataaattcgtagcactttgatctgaacgtgtttgcttggtgagaaaatagaaagaaaagaaaataaataagaacaacgtatttatgtaccgtgtgagtaacgctcaaaatggaaaagaaaagatgtctttcctaaacaatttaagcatatgattacagagatcaaatccgatctttttacgaatagttttgacacagaatcatagagaatcaagggattgttacttaattttgtaaaaattatcctcacctacagagattaaatcacatgattatagggacaactagcaggctcatgcattagagaaaaaaaagaaagcctaaaggaaaaatttgggaaacgagtaattttccaatgctgctattcaattatccaaattaggatttctggtaattgaggatgaaaaagaatagcctgaattaaacagacattctatttcctgttttggtaaggagtgctattatgttagcattaatttatcgtctttatttctctggttgtttagcaattgttattgtaataggccttcttctatctgttcttgcttctaccattcttatcacacaatacattcacttgtcaagaaatttcatttgctgttgaatttgaaagtcattatgcttctctttgaggccttcattaacaaaatttcatgtctgaaggttccttgctcgactaaacttgccaaggccaagaa

SEQ ID NO: 87257 - DNA, 515 bp, Citrus clementina
  Intron number 1 from transcript clementine0.9_026109m (loc us clementine0.9_026109m.g) derived from phytozome v7.0 (c hr-ID scaffold_73; pos 54938 to 55452 reverse strand)
aacctcttactgcatttccatcaagcagcacagtaagtaaacttgaagcccttatgccattagtcgatttgccttttattccctaacaaaatcatagatatagaaagataattgagtgagcaaattttttttttttttaatagatgtattaggtacatttatgaaaattgcttttagtgatttttctgatacccagttgatcaattttgagatagctactgtttaatatattaaatttctacatttttttttcagttgcatagcataactttgagctaatacaaataaaaaaaaacttgtttttcggaattgggaatttaagtttaattgcttgttttcgtgaatagtagccacattttgaaaaataggtaagattttacatctttgattttcaaaaaattgttttatgccttgcggtttcttgtctgcttatttctttaactatgatttattagtttaattatttttcttttgtggcaggcaccgaagaaggataaggccccacctccggcctc

SEQ ID NO: 87258 - DNA, 728 bp, Citrus clementina
  Intron number 1 from transcript clementine0.9_025650m (loc us clementine0.9_025650m.g) derived from phytozome v7.0 (c hr-ID scaffold_78; pos 439619 to 440346 reverse strand)
tctccctcgtcacacctacgtctgctgttttccaggtttctattttccgttttttgttttgcttttgcctttgatttgcttcgcttcgctgccctcatttttatcattttcatttttattgttataattatttttttattttgtgttttgcaatcgactaaattgttgcaaatgagttagttagatggatgcatatgatatgggaactatgtgtaaagtgatgctttaattgctaggattcctatttggaattggaattggaagttctggttctttagggagattggcactttcttttttcatggttttttttaagttttatcagtaacccattactgtttttataatggatccctattacacttttgttttttgctatatggtctttgaaatagctgatttgaaagttcccagattggttagccgtctcttttacaatattttctatgcagtgcattagttagatctatgatatgctatgatgtgatatgggaacactattttacattaatttcttcttgtatacatcagttcttaggtaataattagattggtaaatgggttgttgtggtttttattacatgtgatccgaggttgctggtggtttcctaatgatgtgtgtatttagctgatttaaatgcactcagattgatagtccatttctttttattgtaaatttgttatcttatacaggtgattattggtggtgctgttggtagtggtttcat

SEQ ID NO: 87259 - DNA, 946 bp, Citrus clementina
  Intron number 1 from transcript clementine0.9_001437m (loc us clementine0.9_000525m.g) derived from phytozome v7.0 (c hr-ID scaffold_125; pos 197807 to 198752)
tgcgtcgccgtttcgactactttggtcggttcacggtacggataagaacaaactcgccagaatctttcttttttttttataaaaaaaaaaaaaacgaattagtagtgttaatgattatcttcttgtgagctgccgagagttgttagtgtcgttgttattgttgttgtgttggttgaataagaagcttattgaagataagtaagttgagtgcttaattttagtttgaattagatggatggaacattgaaaacgataaatcaggtgaatactcctgctgcgtttggtgctacagaactttgaattcgaattttacgtaatttttgctgaattagaatttaacgagttttttaataatttggaatttgttttggattttgattattcttttttttttatttaatatacgctaactcggaattatacatccttcttcttcttcttcttcttcttcttcttctttttcttacgtcattactatcttcgactgagttgtatgtatattttattatcgcctggtcaactcggttacttgatcttgcaggcgtgtcatccatgattgtggaggatagttattttgataacgtctaaaagttttgaggcatatctgcctgcacaaatctcttctatactctatagtttaaatcttcagtttcatagaattatgtactctcgccggcttctacattttatggatcatggttaacacttaacattttggtagccttaggtgcttggtacattttgatcttgaagctaaaggaacttttaacttatttgatcaatgcaactatgttttttattcctctatacaatgttttgtttaccatgcattttgtgatgccattttcaccgttgtgctttagcattgtattgtcgttgtcatcttagaaccacttctttatactttccagattgtgttgcatctgaaatcgagaggaaagtgtac

SEQ ID NO: 87260 - DNA, 1024 bp, Citrus clementina
  Intron number 2 from transcript clementine0.9_001437m (loc us clementine0.9_000525m.g) derived from phytozome v7.0 (c hr-ID scaffold_125; pos 198833 to 199856)
gccggggtaatctatcttcgagaaggtattaactgttttgttgtatgtgctttttctggataatttgttaaatatgttatttacatgtctgcatcgtgtgggactcatttctattgggtgtatggtttttggcgcttgcgtgtgtgctgtcttgatgtagtagtattgacaatttttttgatgactgctaagctcagtgccatggcaatctaacagctaggtgtaggagtgtaaaattttctaaattcctttctggctcagcttgagattgccttttgaagtttgagtcttgcttgatggaagatttagaccattagtttttgactgagctgagatccatcatgttagtagttggcgcttctgaactcatttgcaccccctatgaatgatgctcaaaagaaaaccattaatgctacatctaactttccattttccaattcttaatgagcctcttatatttcttcatcaaattttaaattaaagggacaaaggactctaactttttctttcttccgggactggaatactttatgtcacatgaacaatttagtctgcctcgcgttagtttaatatcttgtcaaggtgctatttgaaaaaaaaaaaaaaaaaactttttaaggtagataaccttttctcccttgatatattctacttatatttaactgataattcaagtcacagtattgaaagttttcccccattaggatttatttcttctaagttttagctgtcacattaataagtttgtaattatgtgtgattattttactttccatgtgtttaatttagttataatttcgttacttctaatttgttttaaatttataaattttctctctgtaacattttggagtgctaattccttctatgtctaatgtattcctgtggcagaaattttcttaatttcaatcactctacttctttgtaaacaatttatttcatgatgactcctttcactagtgaacatgttttattttatggttctacaggaaaactatactgcttgccagtggtatcttagttg

SEQ ID NO: 87261 - DNA, 620 bp, Citrus clementina
  Intron number 2 from transcript clementine0.9_006393m (loc us clementine0.9_006393m.g) derived from phytozome v7.0 (c hr-ID scaffold_46; pos 1715088 to 1715707 reverse strand)
gctatagaatttccgctggtgtgtatttttctcacttattcctcgtgttaaatatcttgcaaaaatcctttcatcttcaattatgtcccagtcttaggagcataagaaataagagttgcagctctcgtacatatgttatgtcagtttcacttgccttcctgtaatttcgtaaagtaacagaagttatgtacggaaatcaattcataacgaataaaaattcttggaaaagtcatagaacatgattactgtatcttagttagagatacgaccaagctatcgactcatttgaactgccgcggggtgaagcttactacttctgactagcttttctacttttataatttatgtaaagagctgtcttttttttttttaaataaaaatatatttctgttacgatgggcacaagcagtttttgtccagctataaaaatcaagcatttgcttatcttgatttggacataatcagaaaccagagataactagaagaaaaacacggaaaagcaattcaaaaaattcgtattagttgtcgttgctataaaaggaatattagtataagatagtaaacatgaaattcaaaaacagaaatcatttgatgccctaatctttcaaatggggttgcag

SEQ ID NO: 87262 - DNA, 591 bp, Citrus clementina
  Intron number 1 from transcript clementine0.9_003885m (loc us clementine0.9_003884m.g) derived from phytozome v7.0 (c hr-ID scaffold_9; pos 996222 to 996812)
aaggaagcacagctcctcttcctgagaaggttaatttttcctttttcctttcttttgaaccattttcattttttttttcaaggaaaatgccaaaaaaaggggaaagaaaaagggaattaaaaaattgggtaaatgttcagtgttatttaatcttcaatttttttgtgagctgagagctgaacttaggaaaaggaaagaaaattttgaattttgaattaaaggttccttttgagggtttatttggtttggcattagagggaatgtaggagatgaatattgaagttttatcttttcagttttcctagagctgtctttgaaattgtcgctgtagttgtaatttgttttttgactgctagcattatacatctttttacactgtatcacttgtctaaaattgtgttatggattatttatggtatttcttttctctatctatcttcttaattgttgtcgtgaataatgtcttcagttggcaggttactgatttcacctgtaaagatgcgaaatgttgttactgaattctaaatacatttattcctttatttcatgataacaggtccaagttggtggttccccagtgtacagaataga

SEQ ID NO: 87263 - DNA, 631 bp, Citrus clementina
  Intron number 1 from transcript clementine0.9_023361m (loc us clementine0.9_023315m.g) derived from phytozome v7.0 (c hr-ID scaffold_55; pos 600734 to 601364)
ctgtttccagtatgtttaaattttacccccccccccccctttttattatcatacatacaatcttgttgcaaaaggattcataccaatgctttgtttcttctttcttgtctattcttgaacgagatgtgtacgcgagagcaatgatgaaggagacgcataaaaaataattttgagaaatttgagggttacaaatggaaagttaagtagtttaacataccattaatttcatctttaaaagtcaagaatagacagaggaaaacaactgagagatccgaaatcttgttttgtgtaggctcttattcatcactaaaatcttgagatgtgtgcactaaacttgattattttgtgttctttgttctgaatttgattagcttcttgttacaaatgaattgttataacaatgcctctaatggtcattaatcatccccatttgtaaatgttgcgtgtcatttaatacttaagaatagacagagagaagcgccccggccccggggggggaatgtatgggcgaatttgctactaaaatcttgacgtgtgtgcattgaatttataattgtacgttctactagttttaatgaaaaatgggggcatatggcttttatcctttcaggtgtgcagaatcaaattgttt

SEQ ID NO: 87264 - DNA, 711 bp, Citrus clementina
  Intron number 1 from transcript clementine0.9_004279m (loc us clementine0.9_004279m.g) derived from phytozome v7.0 (c hr-ID scaffold_17; pos 1972086 to 1972796)
cgtctttgtgagtcagaaaaagaaaaaaaagaaacgttaattctttcttttcagttcatgattttcacataatgattgttatttatgtcttcaattttgcgttttttcattgattgaactgtcttctgatctaggtatggcttagttttttgagatctgtgatcaatgttgaagatttgtttatcccttttgattggttattgccatttgtttttgttgcattgttgtgcataattggatctggatcttgtgtgatgattatagaattttgaactacttgttgagatcatagctttagaagttttttatgaaatgggatcgtttgaattattcatggtgattgtgatattcaagtaaagatctgattttttttttcctttcgtcttttgtattttactatctccagtgttggatctggtacttaggtttaagttcttagtatcattcattgaaggctatgatgtgattattttgatagtgcactgatcttaattttttgtttaattttctcattctgctgttattgtgtgatctgcatctttcttctttattatttttgtgattgtgatctaactttctattttatacatctctataagaagtttccagaaacttcttatatatttagtatgtgttcatttatttgtagtttgtgactggtggttttgattttaatttatgtactttttattatgtagaagttgatttgca

SEQ ID NO: 87265 - DNA, 657 bp, Citrus clementina; identical to SEQ ID NO: 79161
  Intron number 1 from transcript clementine0.9_015916m (loc us clementine0.9_015916m.g) derived from phytozome v7.0 (c hr-ID scaffold_9; pos 2165425 to 2166081 reverse strand)

SEQ ID NO: 87266 - DNA, 802 bp, Citrus clementina
  Intron number 2 from transcript clementine0.9_024454m (loc us clementine0.9_024454m.g) derived from phytozome v7.0 (c hr-ID scaffold_2; pos 6899418 to 6900219 reverse strand)
cgctccatctccgggatcatcggtgccacctccaggtaacaatttgattttgatctaactctctgccaagttaacggttgttagtttgacgtgtaatggtatatttacaaacttaattttttaataattataaatttattttatataaattaatacgccgttaaactcatatatttattttatatttttattaattttctgtaaatttttaaactttttcattctgctccaaataatataaaaaaatcaatatattgattgggtaggtgggtgaaagtatgaaaaatgtaaaatgatgttgccttctctctctctttattttattttttttaaataaacacaatcataaatgtcaatgtgaaacgggccttccgctttatgtgggacggcgcccgaagccaactgatgatattattggatatattaatttaattaatgaagcataagactagaatacggggtggttttgctgccagctaatttatataagctttcggtgccaccaacttggacccaaaatcacggatttttgtattagcgttcacatccgttagattgtcattaatcatcgcggttgagtagtatagatgatacaagtatgatttggttttattgttattattatgtttaagtcattggtgaagatgacttaattcaaacatttccctaaacatttttttttaatgtttttcatttttagaccacatattttcattctagtaggtaaaatacagaacaattgtgaatgcatctccgggatatagccttaatatttgcaaaaatcatgcaggaaccccgggga

SEQ ID NO: 87267 - DNA, 381 bp, Citrus clementina
  Intron number 1 from transcript clementine0.9_030555m (loc us clementine0.9_030555m.g) derived from phytozome v7.0 (c hr-ID scaffold_86; pos 536102 to 536482)
aggttgtgtgtgaaggcaaaagtgagttttaacagtgcatttggttatagaaaaacccttccgtgttttttactctttttcttatttactttagtaatggttttactgaactggtgaactgtagtgtttcccagtttttactttatatagttgattcagtgtagctgggtgtgccgctgcttgcatcaaagtttgctgtttctatttgcacagaattctaaactaaaagcattgcattcatcatcatttttgagtgttagaatcttttgatatataaaatgttttttaatcacagaagaagagtataaaaaggggtggtgactcccatcagaagaggagcagggaaaatgaaagggtgaggagagacaaggaagaagaaga

SEQ ID NO: 87268 - DNA, 791 bp, Citrus clementina
  Intron number 1 from transcript clementine0.9_031795m (loc us clementine0.9_031795m.g) derived from phytozome v7.0 (c hr-ID scaffold_32; pos 1930106 to 1930896)
tggcctcgtccagcttgtaaacaagaatttagaaggtacagtaatctctccgtacatgccataatttaactaactatttgatatatgtgtgcatacaaatgcatgatacgtaccactggcactggttagtatataatacatatatacagttaacttataactcgtatacattaatcttatggtcaagatataaaattaatggggttaatacggggaaatactacgcattattggccctgatggccgcgaatttgtcttaggagattgaatccttcatcactaacgtagtcaataaacactggaacgtaagtccaaaatcaaatttgaaagggaatattaaattatttatttttattttttcaaaatatatatcgtattaaatctcgtatatgtaccatctataaattaaaccaatttgtttttctctttaatattgcagatgaaattcttgaagttctaaaatttctggaatggtgattactaattaagaagaaaccttatcattcttaaatattgtacgtaaaataaacagttgaactagctagtcatgcttaaattaagtaacgacatcgtctccatcgaataagttttctctgaaagaatcaagaaaattcaccagataatataaaagattattatttttagcattttgatgtttgtttaccagctagtatgactaaatatcatttttatgtctccttaattaatttaatttgtttgacatatatttatggagatgttgtctacgcaagccttcttgtttcaagataaagaagctagttaaacctaat

SEQ ID NO: 87269 - DNA, 877 bp, Citrus clementina
  Intron number 1 from transcript clementine0.9_004899m (loc us clementine0.9_004899m.g) derived from phytozome v7.0 (c hr-ID scaffold_34; pos 1256331 to 1257207 reverse strand)
gacatacttgctcagtggagcaatcagggcataaggtatgtgtaattgttaatatgtttgttgggtattgttggtttttgcttatggagcatcatgaatgcaggaagttcgttttaaattgtagatataagtggcaatggaattcttgtgattgtgcttagttttggaaacgtggtagttcaaagtgattgccattttctcttggcagctgatatttccagttaccattcacctaccttcatatacttgatggcacgtggttctattccagatcagctctggattatctgcagttataggtgttttgcgaaagaattgttgttgattatgcaaacttgaggcagaatttgcaaatttgcttgacccagtttttatcattttttttcccttgtgtgctggtgagctaaatttagaggttattgttgtttctgatgctaaatgtgtcatgttagtaagttcagaatcataattctgttgcagagtggcacttaagattagttggtgtattttgattgccttgatgaactgtataattgacagtgtgctgaagcaagttgtgttttcgtagcatattgctttcttttccatttgtatcaggtataaattgtttttggctcatacgttcatttattaatcataagttattaatccattcttgggataacttaacattgtctttatgtttgtagtctggttttattgtttgcttgtgtgtattgatgtttctctttgaaattttattttctttagatgggtataagatgttatttttgatgtttttgaaaataatttttatgacagatttcatttgcatgcactttttagctgatattatgtaaaactttcctataggtttagctccgattcagaaacatcc

SEQ ID NO: 87270 - DNA, 559 bp, Citrus clementina
  Intron number 1 from transcript clementine0.9_007854m (loc us clementine0.9_007854m.g) derived from phytozome v7.0 (c hr-ID scaffold_32; pos 956225 to 956783 reverse strand)
aacttgaaagacatagcctcaaagctgtaacccaggtatttatttttcaaataatttatttatttatttatcatttcatatttcgtttacaagaactcttgtcgatacggacatggagactagagtcaaatgaatttgtttttctctctctctttttttttaatcatacttaatttctttaaaagtgacattattggttgccataacgtcttttgggtaatggtgaagtaaatcatgtgcttttgtggttcatatatgttacgacttaatttgcatataatttacatatcggtctctggttcatcaattcacgggccataatatgaactgtcttggttgtactcagcaaagaagtttactagtaacatacatatgacttatatatatgcctagttttaaagtttccacataactggttgttcaataatcaaacgatcgatttcaaagtcaagtttgcaagtgagagccagttagcgtacaagatttgtacaggattcctaatctttatctttcttgtattataggacctactagctggtgggactgagagctcagcagt

SEQ ID NO: 87271 - DNA, 473 bp, Citrus clementina
  Intron number 1 from transcript clementine0.9_020268m (loc us clementine0.9_020268m.g) derived from phytozome v7.0 (c hr-ID scaffold_6; pos 4270834 to 4271306)
tctctcagagcaggtatatttttgtgggttttttttttttttggcgtttccttttgtgggtcaacgctgattttggtgtttgcttttgcaagttaagtaaagtttagcttttgagatttttcagaagtaaaaaaatttatttttcttttgatgggagatcaagattaatttgcctcatctgttatcaacccaagaatttgattataattttattaatcttatagatatgtttcgaactgcttaattttgaccgtatagtggctaaagttaacgaattcgcacttttgcagtacttgtggattaaaagtccagtaccatgccttgtatcttgttccacacaattcgacacaagcgagttgcttttctcgaactgcatcatgtagctcaaataggtctttcaatgaagaagcccgtctggcttcaaacatttaaagtgtgatattcaatctaatgatctatcaactttttgcagg

SEQ ID NO: 87272 - DNA, 1002 bp, Citrus clementina
  Intron number 1 from transcript clementine0.9_011216m (loc us clementine0.9_010093m.g) derived from phytozome v7.0 (c hr-ID scaffold_26; pos 394983 to 395984)
aattccgaaaaaaaataaaaaaataataaattaaggtaaaattaaatccccctcaatttctatttgtattttgtaccgcatctgttttatttctttttatttttgtctttttctaattatattttttagtttcaaaaaatgctttttcttcgctaatattgttttattaaataaattataaccaaaaaattctaataatgtactgatcggattagcggaagattttctaataatgaagatgaaattattatgcagtttgaattctaacttgaatttgtgtgatttctgtaaaggtcttaaatttggctgaaatggttttgggggtttttttttttttctggggatttttttaattttatggctgctgaaggtttttgatgggggtttactaatgaatcgagataattggttagtttatttatctggtttgtttgatttttctgttaagatgtgaagttgcagtataaggttgaggcttgatggggtttggagaaaaagtagaacagttggattacttattactgtgttgggtgaaaaattggatctgaactgtagtatgttacatgacaaaagaagctgcgactggtctggtctagttcagtttggatggttgtgaaggacacttttgtttggtggttgttaattgagagctttgtactattagttgataagattcttagaaatggaatcgctagaagtacactttgtttttttttttccatggttgtaattttcttcaagctgtgactgttacatttttttttttcctgtttttgtgctgtttgttctaaaacttggaataatgggattgattcttaatggttgtagtatgaggtttatgtcatattgtttaatttttatggctatatgagttttgagtcttttgaaagttttttctgtaattggtattaatatgaggattatgtatgtgatttactaacctttcattaatttggttaacttttagatcttaggttaaagaaaggaagttaagggaagtgg

SEQ ID NO: 87273 - DNA, 552 bp, Citrus clementina; identical to SEQ ID NO: 81737
  Intron number 1 from transcript clementine0.9_017091m (loc us clementine0.9_017091m.g) derived from phytozome v7.0 (c hr-ID scaffold_6; pos 6446372 to 6446923)

SEQ ID NO: 87274 - DNA, 529 bp, Citrus clementina
  Intron number 3 from transcript clementine0.9_026672m (loc us clementine0.9_024161m.g) derived from phytozome v7.0 (c hr-ID scaffold_6; pos 5931874 to 5932402 reverse strand)
ttattcacctttggcaacttgttggctgttgggaggtatgttcactggtttacttaattgacagatgggctttactgattatatagtcttctcaatgttacttctactgagtctgatatcctaagttttggaccacaacaagtttattggtcctggtgatgacggcatcactcatgtttgaggaccatggtttttgtaatatgagaaactgtactcctctttttcattttcgtgcttatgctgaagaaaatcaagtaactggtgactgattctagctcgggatatcatgaaaaaagaataaaaataataaagaaaagagcattgtggtatttaatgatcaattttggactttgattagctattgaaatttgaaggatgattttgtaatgttcaaaaggacaatcatgtctcattttcagaattggttttctcctgcaatgatgttcttcccaacatttctcagattctaattctttttcgatcttttggcagcacagccttcgttatcgggcctgctcagcaaataaat

SEQ ID NO: 87275 - DNA, 394 bp, Citrus clementina
  Intron number 1 from transcript clementine0.9_008916m (loc us clementine0.9_008916m.g) derived from phytozome v7.0 (c hr-ID scaffold_6; pos 4938418 to 4938811)
gtctaaaatcaagaaataatattctccatccccatgtaaattttctcatattttctctctccctctctttacgttcttgtctaaatatcatcaaaacgaaaaattatggcagttttttaaatgggattttcttgcaaacttgtgtttttgaaaatgattattattgttaattttattcaaagcatggttctgttgtctaaattttattagttgtaggtgtgtggctaaattgtacataattgttagtaatgcaattttgaattacttgtatatggttgttggcaattggattcattaaagaaaatggggtttctattgtgtgcattaattatttctccgatatttaattgtttcttcaggttattaaaattctctcaacgttgttgacattggg

SEQ ID NO: 87276 - DNA, 887 bp, Citrus clementina
  Intron number 2 from transcript clementine0.9_022965m (loc us clementine0.9_022965m.g) derived from phytozome v7.0 (c hr-ID scaffold_34; pos 2333638 to 2334524)
gtctcttccaggtatcattattatagttacagtattcccttagcgtcactcaacttgctgttgcaaactcttcgcatgcctttggtatattgctatttaacttttttatgcggatttgccgagcaaactaatgtgcatttttctggtgttgagggtaagatgatttgggatgtgtttgtaactgttgcccttctgctgaactttgaaaacatagcaaattaagtgtattataagcacctgaaattttttacatataataagttaaacttgtctggccggaatcttgatctgtaattggtagcaaaggcagtgaccagaaggtagcagatctagttctggttctactggtgagaaattatggtttttactaaatttaggatgttatttgagtggcattagttagttacttgtgtggtactattgttgaggcctataatgaaagtttctgttgttgacatttagctttttgaaaagcatgactcccctaaaagtgactggtcagatatttgatttttagtttcccagtcagatctccgtatgaatcccccccccccccctctcctcttacttccatataattgttctcaatggctcatgtaagttactgtattgtttttgtgctaaattttattatttttgttaactcctacttcttctctataaataaatttcccttcaacggtagctgcctacttgtttattaagttgaggagagctggttaatatagcaagttgctattaggtgcatcacaatgtgtggcacgcactcttttctcattcatttttgatagatttcacatttaggcagcctgttgttaactataatttgatagttgcttctcctgttttcagagaattcaagaccttccttttctactgcggagatt

SEQ ID NO: 87277 - DNA, 639 bp, Citrus clementina
  Intron number 1 from transcript clementine0.9_021170m (loc us clementine0.9_015235m.g) derived from phytozome v7.0 (c hr-ID scaffold_6; pos 4142728 to 4143366 reverse strand)
agaaagaatcctcttctcggtccctcttctcacacgtaagtgctttttaaattttttttttcattacccatttcgtttcctggttttattttgatttgctgatgaaatttggtagaactttgtttgctcgttgtgttgatgatttcgtgtttattatttttggaatttgtatatagaggttaatttgaaatgaattatggtaacttgatgtgttaatttcattgatctttgattaatcaagtgttctgttgtcaaactaactctggttatggtatttaggtgcccgaatcggaaacttaactatgtgtctagaggttttgtttttggaaaatgaaacctggtagcctttggcattaatattagatacttgtttgctaattgaattccagtctaaaagtaagtcgttatttggttataatttgaggttatcaatgtcttgatattttatgctttcattgattcattgctttgtgggtgaaaagttggtggatctggtgagaaagatggagctttgagttatttggaggttcttctttttctatatgccattattttgctttccattcgtggccgagaaagaaagtaattgaatatattcttttccttgttttgaagattggagaaattgggtggtcttga

SEQ ID NO: 87278 - DNA, 878 bp, Citrus clementina
  Intron number 1 from transcript clementine0.9_005897m (loc us clementine0.9_005897m.g) derived from phytozome v7.0 (c hr-ID scaffold_80; pos 949218 to 950095 reverse strand)
aagtattttacaataaaacccaggtgaaaaaatattttcttttagctgtttttcattcaaattattgattttgttgtaatgtttaattttttatttttttttcggtaggtttgtgcttaacgttgtgttttctaattggaggttagatttatatttcaatgcctgatgagtactttgattggaaactatcgatcgcttaatacttatattacaatcattgaattgaatttttgatgggtcatgtctttaagccggaattacagagcttaggtcattagtttctaagaaacctttggtagaataaagaaatcaaaatttaaaattctagaatttgcggaattgagctatacactatggttttgaacctttggaaattgttttaattgagctatgctttcttattcaaatctcactagccgaaattgttttaaaatccagagggaatgaattcactttcgcggaaactactgtgtaggtgctctgtctaaaataggaagctttatgaaaatttatagaagaattgatctgtcaataaatattggtaattcaagaagggacatagaattccttcatccacccaaaactagtcttttcatgggtctcctcattctttgtgcatcttgtagtagtaaaggaatttgcgcttcttattgtcacatcaaaatttatttttcttttatataatgggtttctctttcatttcactgaatcaagtatccctcctttactataatctaatgtcattttttttatatagcactgattcttctccctgtttatatttggacgtgcatcagtcaattgttgatcttttaattataacttttgtgaatttcttttgtcatcaggttaacaacagggacatatcaattgctgtc

SEQ ID NO: 87279 - DNA, 711 bp, Citrus clementina
  Intron number 1 from transcript clementine0.9_001708m (loc us clementine0.9_001708m.g) derived from phytozome v7.0 (c hr-ID scaffold_17; pos 2011134 to 2011844 reverse strand)
gggtcttgtgctcttctcttgagtgcttcttggaggtgggtttcgtatatatgctttgttttttgagttatcatgtctttttctcttgcttgtggatcttgaaccatacaaataatgtttttcaagttgaactcactcactgaactttctgtagttttcttttcctgcaatgtgtgtgcctttttctctaattaaatgaatcttggactaacagataaagcagagacctctgtttttttatctcagaaacaactcggccatctatctgtctgcattttctctgatcttttttagatactagtgttactaatgcgtctccaaatccaagattgtgaatgtgggttggcagttttggcttatgcaaccaggattctatggtatactatgttttgttgcctcatgcaaatctgtggatctcattctcttcattatctttttagttgtgacctcttgtcatttttgtttgtattatgtttggcgcacatactttagataatttattcgttttcattttagagatgtcaagaattttcaattagagtagaaatgtgattactatttgtttcaaagcaaatggtgtgaaaatttgtgctggtaatgtctaatctgcagcatccggagttttttgttgctcactttaattgctgaagacttaatttatgttgaacatatgtaggacacagaattgttttgagaactcataaatttggt

SEQ ID NO: 87280 - DNA, 517 bp, Citrus clementina
  Intron number 3 from transcript clementine0.9_021064m (loc us clementine0.9_021064m.g) derived from phytozome v7.0 (c hr-ID scaffold_9; pos 4063958 to 4064474)
agctgtgatacgaggcgtattggcgctccctattggttagttgtgattttaattaatggagttgtatgaatatcttatttaatttaaatataaaattattattattattattattatttaagaatccgagagaaaattgtaatcttttaagctttctataatttctacggaaattgtttctggctatgacgttgttagggaacaaaaatatatgcttcattttaaattatcttcagtgatgtttattattattgtattatttctggatttgattatttgaatatgctttttaagcggttgtttagtatgcatgtatcatttcttcatttgaagataaatagggtggtgaaagacgttttccacttcttgttatgctttcagcttcaaatttcaatgaattaacctgttgttgaggtctttatgaggattcattttccctatattttagtccttttcttttaaccctgcatatattaagatatcttgtgtgtcttctactttataggggctcttgtaa

SEQ ID NO: 87281 - DNA, 273 bp, Citrus clementina; identical to SEQ ID NO: 77928
  Intron number 1 from transcript clementine0.9_024395m (loc us clementine0.9_024395m.g) derived from phytozome v7.0 (c hr-ID scaffold_2; pos 2369961 to 2370233)

SEQ ID NO: 87282 - DNA, 308 bp, Citrus clementina; identical to SEQ ID NO: 81768
  Intron number 1 from transcript clementine0.9_017535m (loc us clementine0.9_013995m.g) derived from phytozome v7.0 (c hr-ID scaffold_32; pos 293022 to 293329)

SEQ ID NO: 87283 - DNA, 463 bp, Citrus clementina
  Intron number 3 from transcript clementine0.9_028548m (loc us clementine0.9_028548m.g) derived from phytozome v7.0 (c hr-ID scaffold_73; pos 275007 to 275469)
aatcgacgtaatacaggttggtttatcgttgcttctatttcagttttgattatttgtacgtgaactagttttaatttcagtgatgaatcattttatcacagtactaggctactagctaataattgaggttttagaacgaagaatataatgtacctaaccgaaaatatttatatgccaataatatagaggctagagtatttgcaatgttgttgtctagcgttaaatattggctgttttatgacaatcaggagagggggttggtacaattatttagataccgcgtgtctatcttgtttacaactcatgttatatttcatttcttgttgtgcttttcagttgttgctaagttttagttatgtctcctaaccttcatgtctttttgcatatgtttttgcactgataagcttcaatatcttggatatgtgcagataatttagtggaaaatcctttgggagattttgag

SEQ ID NO: 87284 - DNA, 597 bp, Citrus clementina
  Intron number 1 from transcript clementine0.9_011623m (loc us clementine0.9_011623m.g) derived from phytozome v7.0 (c hr-ID scaffold_80; pos 634509 to 635105 reverse strand)
ttattagagctaaaggcaaatacaaagggtatgtcctcgttcttaatatttacattaactataaaattataaaaaggaaacatttacatgagagtctatgatacttttaatatacaaatttattttaatttgattcttataacgtgtatttatttttttataattagttgaaacatacacatgacaagaatccaattgaaaaaaagtgtatgcaccatataaattttctcaatatttgtgggatatttagtattattttataaatactattttttttaacatatctatatatatatatcaatagaagtgatagtactttttaattcttgtaaaaggaaaattaaatataccaaaactcggttgttactatttttacttgttctaacaccctcttttcaatatttcacatgcacattgtttctgttttcagctcacaggtttttgagttagaaaacaaacgttattctcattttcaaaaacaaaatttcaaaaacaaacacaccgcttgtttgctatcagtttttgagaaacgcttaaaggttgtttttccccttttctgaaggaaaacttgcaaaagttcaagggagacagaggtgg

SEQ ID NO: 87285 - DNA, 489 bp, Citrus clementina
  Intron number 1 from transcript clementine0.9_016997m (loc us clementine0.9_016751m.g) derived from phytozome v7.0 (c hr-ID scaffold_2; pos 3933486 to 3933974 reverse strand)
agagactctccgccaaagaatctcttcttctcgccgtgagtttttgtttttctattgccaattctctatttttgtttagttgaaatcaatctctgaagtaattatttttaaattttatttaatttcttttcactttggaaactacatttctgatgctgcatttaagagaatgcagcatattgtgagatttattaaacgataataaagaaattattttagcaattatcaaatagttagcgagaatgacttctaggaaaactgctttccgtaaaagcagtttctgcaaaatcacttatcaagtgctgcttgagaatgcatttgaactattttgctagaatgacgcaaaaatgctttcagtgatttctgcaaaatcactgcaagaatgacgcaaaaatgctaaatgcttttgatgatgccgaaggcaagcacattgatattgggttttgcaaatctttgagctaactctttgcttcttgttttagtttaagg

SEQ ID NO: 87286 - DNA, 651 bp, Citrus clementina
  Intron number 2 from transcript clementine0.9_035854m (loc us clementine0.9_035854m.g) derived from phytozome v7.0 (c hr-ID scaffold_26; pos 3338518 to 3339168 reverse strand)
acgaggttggtttagttggtatctaggttacttctgatttttcatgttatcacagctcgcattttcctaattgctttatagaaatgcgtgtcttgtgaaaaccaaaaaaaaaaaaaaaggttatcttgtgcaattccctgtgaagcacatccttcactccttaaacatgttgaaggcacattagaaaaaaaatgcatcatagcttcaatatgtagcacattgagatctttataaattatttcccatatttctttatataaagtaaatgtgacaaaaggattgatgacaactaggaactgcttatccctctctacattattttagacaattctttgttttacttaacaatttctccttcgtcgtcatcttgtaatgtgctatatttcggtattgtgtatgtctactggttcattgtgttgcctatggtctatggagcccttatgtttatgaaaagatgtttatcatctctctcttctcccttcctctctccctcctttatggtaaattacaattgttttattttcttttatatatgtttaatctaccttttttctgatttaattcattaaaattgtttaatcatactcaaaatatttctttgtccggttatttaaagtttctttctgtttggggccatatataggtcacttc

SEQ ID NO: 87287 - DNA, 574 bp, Citrus clementina
  Intron number 1 from transcript clementine0.9_004029m (loc us clementine0.9_001781m.g) derived from phytozome v7.0 (c hr-ID scaffold_2; pos 5287080 to 5287653 reverse strand)
gtggtaaaggccaagagctttcaagtatctttcacgtatgtagccatgtgtttgtagtgttgccaagcaagaaactcttttatttttatttttatatatatatataatttcaatgcgagtttcaatattcgtagccctaatatatttcgctatttcttcttctttattttgtgttgtatttaatagattatcattgattttgtgatttgatattcgttattttagtgattagatcccagttttatctttcttttaactgggctttgcttttttttttccccctctttgggggttcatatggtatcatcaatttgattgaagttctcagcttttgaaatggagcagctgatattgcttttgcatgattagggttttttgtgggggcgtaactttgctacggggttttgccagtttttgtttactagtgtcaaatagttgattttcattgagttttttgttttctttttgctctaaaaatttcaaggtttagtttactacagtgcatttgattgctttgaaatttgatttggatattttttcagttaaagaagcgagctttggataatttaaccag

SEQ ID NO: 87288 - DNA, 715 bp, Citrus clementina
  Intron number 1 from transcript clementine0.9_035513m (loc us clementine0.9_035513m.g) derived from phytozome v7.0 (c hr-ID scaffold_9; pos 1125651 to 1126365 reverse strand)
tcgtccccagcagagtaattctctacattatcttcctggttatgattttcagtattattataatttcttatttttgtccgttctgcttttgccctttttaattatgactccagtgaaattctgaattactggtattgcctcttttagtctcaatggtaactttggtaaattatgaatttttcatcaacttttatagccttactccaattattataatttcttttttcaatcgaagaataagttattattgatttaaaaaaatgagatactacggtcttgattaaacaattttttggtcaggcattatttttgaataatcatgcgagaaattgttgtttgaatttggaaaaaaaaatatttgacataaatgagacatacaaataatcatgatatgatattgttattttttttaaacaaaaaagaaattttttttccttttggatcagatgactagaactttacttttcacgtgtccacaatctttattgtttctacaatttcttttacccaagagaatatgatgcaaatttgattcagtttgatgttatgaagattgatgtaaatgaaagaatgttgtaaataaaatatatactttctcgagtaaaaatttgatattttggtaattcgttgtgccttatgctgataactgtgactcaattgattaatttgacttgtttcagattctataattcgctaccacctatcaccaaagctt

SEQ ID NO: 87289 - DNA, 869 bp, Citrus clementina
  Intron number 1 from transcript clementine0.9_004403m (loc us clementine0.9_004403m.g) derived from phytozome v7.0 (c hr-ID scaffold_94; pos 259617 to 260485)
tttggttatcggttttcactttattcctccttcgggtatgttcattttgctttgttttcaattttgcaatctttgaactctttgttttttttttttttttcaatggcttgctttttagtgtttttcgaatttcttgttcttcagttttggaatctgctttgatttgctaatcattttgtaatattcaaacggttgctttttcacttatttcgtcttacttttctgattatgttctccttatttgactaattgactttacttattagcagacaaaattttgcttttttggagtcattttcaaatctgaagttcctgtaccagaatcttaaattttgataatggacaatatatccagtaattgaagcctagcacttattatccatggagcaagttactccgactagcttactgagcctcatctttatttcatatttagaattgaaattcattgggcaattgcctaatgctgtgggcccaagtgtagccccacaggaagattcaagaggccaacaaagggactgatcagtcgataattgggagaaaattaactacaacttcatggaaaaatcagaaattcttttaagatgttattgaattattttgagttgttgaaatttttgctttacagaacttgataggtatagatattcagagacttgtttgggaaatacaagattttgtattggaaggttgcacccaacatatacagtgaacttggtgtaactttctggtgaattttggcagcttccagtccttctgagtttgaatttcctcttgaatataccgatctgcattttattgacgtttgttgcggaaactaaagaactggaaattctgattgcaaatataaacttgacctacaggagacc

SEQ ID NO: 87290 - DNA, 569 bp, Citrus clementina
  Intron number 2 from transcript clementine0.9_021948m (loc us clementine0.9_021933m.g) derived from phytozome v7.0 (c hr-ID scaffold_26; pos 801900 to 802468 reverse strand)
ttcttctggggcaaatctgcttcccttctcaacaggtaggtttagtttctttactgtagttgtaatttgctggaaacatttcaatgccttgcacttttagatgtaaattatcaacttggataaataatgttttagtgttggtggatcaaaaccagtctaatgcatcagctgatatataatcatttcgcatcagattgtatgtaattgtttgtttgaggagttagaatgtgttgtgttactttaaatactttgattggagtaatggcaattgtatcgcaacagcaagtgcaagtgtgcaggcttaattggtgggcctttatttggaagattgcttccaaccggatgaattaatgaaaggattgtagagaataaggaagtttttatgatactatattagaattagttatgtcgagaacaaatatgtaggtacttagattgttctgagacttgaatctgttggaaaatgaagttgagtttgagattgaattatgatgcggcttgttttaagtgatggaagggatttttttggtttaggcctctgcctccccttcctgatctggaaatttcag

SEQ ID NO: 87291 - DNA, 274 bp, Citrus clementina
  Intron number 1 from transcript clementine0.9_021948m (loc us clementine0.9_021933m.g) derived from phytozome v7.0 (c hr-ID scaffold_26; pos 802599 to 802872 reverse strand)
catatccgttcaccaagccctcggcggcggctcaggtcccctcctttctcttaaaattctcgcaaacattttttttaaatatatacatcgctatttatccgtacatacaataagcaaacatgattttgattcttaattgatttgattattctaatattcttttctatttttattttttttgcatctgaacactttggagttttttgtttttattttaaattattttgagttaatcataatattaattattcgatgtagttgctgacgtgttgtt

SEQ ID NO: 87292 - DNA, 775 bp, Citrus clementina
  Intron number 2 from transcript clementine0.9_013309m (loc us clementine0.9_013309m.g) derived from phytozome v7.0 (c hr-ID scaffold_6; pos 342023 to 342797)
catcaaagagattttgcctcttaagtataccaaaggtgagtttatttctttgcaattaaattctcctcatttgagctcgcctaagattttaaaaggtcatgcaacgtgtgtgcattattttttaaatgattagaacccttgttttatttgtcaaaatatatcatttcctccttcatgttttaaaatgcatcaaaatccataagcaatgcttaacattcaatcgttgtcgtctcttcactaatttaagctagaatattttattgatcaatattagattttttttttccttcaacatgacggataaataaaaataaataaaaagttaaaatttgtaataatgaaaattttggatctaatgttgagtttgagttgtgctaatttttaatattcttctatctcatgtgtatttataatagtgtatagttaagacttaactgtatattaattcttatccaataacaaacgatcacaatattataaataactcaacacaaagtatggctcagtattgaatctaaatatattcttgaagatggattttgatcattttttctcattattgatgatgtatgataaaaaggttgatatttatgaattatagagtttttcaaattaatctacatctaaaacacatgagaatattgtttaaatttttaaaaagataatgttgataacttttttttggtgatatattgatataatttagtatatacatcaaactcatgtacagtagaataattttgtccatattcatgtgcaggtaacctagtcaaaa

SEQ ID NO: 87293 - DNA, 286 bp, Citrus clementina; identical to SEQ ID NO: 79198
  Intron number 1 from transcript clementine0.9_009667m (loc us clementine0.9_009667m.g) derived from phytozome v7.0 (c hr-ID scaffold_6; pos 3916946 to 3917231)

SEQ ID NO: 87294 - DNA, 1061 bp, Citrus clementina
  Intron number 2 from transcript clementine0.9_019686m (loc us clementine0.9_019686m.g) derived from phytozome v7.0 (c hr-ID scaffold_26; pos 2333569 to 2334629)
aaactgtgaagttggccattcgtgctttgcttgaagtaagttgctaattttcgaatgtgcctgtgtctaaccttggcttcgtaagtctaatatgaaactagtcttatctaatggcacttttctgtgttagtaaatatgagattctcttttaagtagggttttcaaaacctaacttacttggcctttatatttcagtgtagttattggcttttgatataggatacggtatcagattattgttaagtaagttttcagcttgttagatgtttgataagctaagtatttgctgaacctttaagatattcatgacgcaccggcttaactggtaactgaattattgaggtctcttgtcatgattttcacttgtaactgaatgtttcattgttcataacttgtattttgtttgatgaactctttcgtcatcattccttgttttcacatacatcatctttacataatatgattaagtgtaaagaggtgggtattcacatcacacatgtaacttttctcctttctatattttggcttctatttaaatattttagggaaactgaatgattggagtaataggtggaagaggactctatgttaagagaaagattgaacatgaaaatcaattaataaatctaaccaaaaagaagaaacttaaggaggcatagcctgccacaaattccatcttagagacttccctgaccctaaagatcaagaaaaaagtcgacctagaaatatgcaggaatcagtaactaggcttgcagcttatgtggattggcaagtatgattgtcaactatattcagggattgaagaagccacttgggtctggaacgaataatattttggttggtggtgctggaagcgggtagatttgctttcggctgtttcatgcagttggattgtttggttgacagtgaagaattagtcataatgctatagaatttttgtgtgatttttttttttttcaaatgtacaaactgctataatctctttcacgtgtatagtatttaacattttgttgcttatactattaggttgttgagagtggaggcaagaacattgaagttgc

SEQ ID NO: 87295 - DNA, 556 bp, Citrus clementina
  Intron number 1 from transcript clementine0.9_003300m (loc us clementine0.9_003300m.g) derived from phytozome v7.0 (c hr-ID scaffold_19; pos 2573791 to 2574346)
tcaagctccatgtaagttttaactttttattattattatataactaactaactaccctatttctaacataaatcactacatgtgtgttatatattgtcaatttttaagttgcgcttctggagtgttttttagacagactaatgagtgttgtttggtttttgttacttttggtgtcagcttcagggcatttgaagtttgaatttttctttttccttcgagggcctttcattattgttgcaaattcccaaaaaaaaaacactatattttgttctctttaggtgtcttgatttcggtcttgttttcttggcaagataattggggggggaaatgatttttgaagtattgtgtttctgtgatgtaaatataaattagaagacaattggagctaattctgctatgaaaatgtctaaacttttaagttccattagtaagtgatggcaagtgctagttagtttcaatatttttcctctttctttttcctttaggaatttactcgtcatctgatgctttgttctcttgtttctgtatacttttttgcaggcagaggcggcaagtg

SEQ ID NO: 87296 - DNA, 975 bp, Citrus clementina
  Intron number 1 from transcript clementine0.9_020156m (loc us clementine0.9_020156m.g) derived from phytozome v7.0 (c hr-ID scaffold_32; pos 2124852 to 2125826 reverse strand)
tgctgcttcgattccttccaaatccatcccttttggtacttccttctcttccctccttattatcagatccacaaattaataatttatttttctgttttttatgatagtctcaaaaaaattgattatccaaatgcatgcagtttgatcaacttgctgttattaagttctgtctatctgatgtatcagcttacttggactcgtagctcttttagaaaaaaatgtccgatttgctgtcccgctttaactttgctgttacttcatggttatgttaggtgataagagatgtttgagcgaaatttttattttttgaattattagctttcgtgtttttgtctcttgtagcttttagcaagctaaagtatatgctacagcaggtttatagagagttctggatgtcaagatactgtgccctttccctaagtaacaacttatttcagcaactgtgttggccaaggaccttcacaaacatcacaagtgatcacagttctctgcattactagcaagttgctgctttttgcctctcctatttgtttgaactgaaacatattatgccaagagttggctactttatgattgtttagggattttgtgaaccctccaacaacaacccccccaaaaaaaaagaaaaaagaaaccagcttgcaataagtttcaaatacattaatagatctttaaactgcaacagctgttgagaatcataggcaatgggtgtgacccgctacttgtaatttttctggtagaaacttcaaactaggtataagtgatggcagcattgcgaatatgtagtttaacaattatcaaagcatggcccattttggccataattgcttctgaaacttttgcacaatttcatttgtgtttggttaggtttacttgcacttttctgtttaacttttgtgcttttgagagatagcttcatgttctgaacttgtttttccatggtgcaaatctttagattgcaggtcttctcttgtg

SEQ ID NO: 87297 - DNA, 731 bp, Citrus clementina; identical to SEQ ID NO: 78041
  Intron number 2 from transcript clementine0.9_007804m (loc us clementine0.9_007804m.g) derived from phytozome v7.0 (c hr-ID scaffold_22; pos 772570 to 773300)

SEQ ID NO: 87298 - DNA, 412 bp, Citrus clementina
  Intron number 2 from transcript clementine0.9_012055m (loc us clementine0.9_012055m.g) derived from phytozome v7.0 (c hr-ID scaffold_147; pos 125882 to 126293 reverse strand)
ggctctatcttttgttgtgggaaagtctcagatcggtatgttagttcaaattattttttcctattggttcatccgttcatgtctagttattatttattcatttatttattttttatatttgatgagcttgttttgatagtggaaatgtaaacttaagaggattttaaggtgtgggtttattttagattttagaaatgattacatgggaattgaaatttttttgctttataatgctagaggagaagaagaagctgaaattgtaattttttaagttgatggaatctaaataaaaaaaaaagacaatcaactgagaggttcaacataagtagttttgtttcattttggattggttgttgtatttactatagagcttgatgttgtataggaaagagaaaggaaagaagcagccaac

SEQ ID NO: 87299 - DNA, 534 bp, Citrus clementina
  Intron number 2 from transcript clementine0.9_016765m (loc us clementine0.9_016765m.g) derived from phytozome v7.0 (c hr-ID scaffold_19; pos 2773185 to 2773718)
tgcattgcactgcaaggatactcagaactgaaggggtatgcttttttgttaacttattttttttttcttttaatcaaaattgtgcatttctgatagattattatgtaacagttcacgttgttcgcttcctcggcacaaagtgaagttgttgggctttagaaattagaggcaaaccgaaatttcattttttagactgctaggcgaatacttgccctttttgtttttggcttcccaattatattgtttgcttggtgatgatggcctttttagagcattcttcttcgtcctttggtttgagatataaggctggccttcgtatttgatgtttgtacatgtgcataacaaataaactacttagacgcacaagtgtattaatcatcttgataaaattgacattgctttttaattatctgttgcttctcctctgcctgtcctgccctatctcgtagttctttgctatgatcttgcccggaggatgaccagccgttgactttgacaggttagaggactctatagaggagcaacgccatcatt

SEQ ID NO: 87300 - DNA, 645 bp, Citrus clementina
  Intron number 1 from transcript clementine0.9_019297m (loc us clementine0.9_019284m.g) derived from phytozome v7.0 (c hr-ID scaffold_34; pos 1864004 to 1864648 reverse strand)
tcactctcattctctgccatttcaaggtcattttgcgtatctgtaagttagtcaacgttttttttatagtatttcattttcagatttttgaatattaggttttaatttgattatttttaagtaacaaactacaatgttttttttccctttttttatcttcagtgcttgatttcttaattttagctcacacattgggttttaatttttgaattaatttaaactaagtgacgtttaggattttaaatatcttctgttgttgattttatttttttttagtcaatgcgtcgcttttttttttccgcttgagtttgtttttatttagaaatttgatgtatgatttggagttttataattaaaatattaggtttcacgtttaattattttaaactacattaggttttaaattttaggttttagttttaattagtttaaactaagtaacgcagtatgacatttgaaatttcaaatctatttcattgatttttttttgttagtcaatgcttcgcgattttaattctttcttttgaatttaatttatattgcatgacttcttactattaggtgttaatttgaattagtttaaatcaatctttttggtttttatcatcaggctgaggtgaacgcaaagcattcagcgttagctct

SEQ ID NO: 87301 - DNA, 770 bp, Citrus clementina
  Intron number 3 from transcript clementine0.9_025648m (loc us clementine0.9_025648m.g) derived from phytozome v7.0 (c hr-ID scaffold_34; pos 2199576 to 2200345 reverse strand)
gttcaaaccgtattgtcttccttcttggtccaaagcctcgtttctttttcttattccttatttcttatcatgcatctgagcttttgaacaccaatttcagcgagttgacatccttgtttgtagggaatcaatatcagggcagtgaattagtgaattttttaagttggtggtgtttggcttataaataaatgggaaaactgattacctcggaaaagtggaatttttctttgttctataaaaatgtgtaaggatcttttaactaaaattttgctgaaaattgcaatcacaaattcttagccattgattctatccagtccaaccataggtaaggttaatgagttagcaacaaaaatgctacgtttgactatgggttttaactatggattggatgaaaccaatgggtgtggatttgtttactaatttaagtgaaaaagatgaagttaaaaagatcctcaccaatttataataatctcctcaatcctgatatttggcccaaaagaaagaggaaaagggaggggggtggggggatgaagaagaacattgttctgcacgttccacacttgaggcatttcttgatgtaaattctgtgtcaattgcaaaattagttatgaggcctcttaggtttaaaatcttattaggagctatcattttaaaatatattggcaatttgttagatttctacaactgatatatgttgtatctttattgattccttgacaagtttttgtttaataggagcaatatattttttgccatcaagctatcgttga

SEQ ID NO: 87302 - DNA, 803 bp, Citrus clementina
  Intron number 3 from transcript clementine0.9_020444m (loc us clementine0.9_020460m.g) derived from phytozome v7.0 (c hr-ID scaffold_6; pos 2573248 to 2574050 reverse strand)
tggaatcttcggctgcactgaagatacagaaagttgtaagttcacaacagatcctagcacagaagattttgtgtgtgtgtctgttgcgtgtttatttagctgtgaaattgggattcgtctattgtgtttgttttgtttgcttatggttaacagcttagattaggcgagtttgtgtcattttagattccagaactggtgtctaatctgtttcttgctgagttgttgcgtgctgtgtgtaaatgtttctgtatagtattgttgtgtatttggaaatgggaaactgtggggttagatttgtgacagaatatttgcaattattaatatgtgggagcaacaaaggatttattataaaatgatgacggtggcttccccctattggcaaactaataaaaggattagaagaataagaaagaatatctctgtatttatcctaatgggagtgagaaccaacagtaaagagtttttaagttaagcatatgaacatctattgtttcaaaaatcttgctgataacgaaggtgcttgctattttgaattctggttaacatgcctccatgatggaagctaggttttgactttgaaagactatttgcttgcacatgtaagtgcttctggttctgagtgattaaagaactaatgagagttcttctttgttgctgaactagcaattcttctttactatttctctattctttagtaataaatgtgtgaatttgatatatattgaataattgataaagttacaattctcttacttgatatctctgcaggctggactggattcttctgcccgtgtgttctattt

SEQ ID NO: 87303 - DNA, 904 bp, Citrus clementina
  Intron number 1 from transcript clementine0.9_033538m (loc us clementine0.9_033538m.g) derived from phytozome v7.0 (c hr-ID scaffold_55; pos 846588 to 847491)
agaaggagcttctagttaaagtcaaacaaacccaggttggtgatttgtgaaattaattatgtgaaatgaatagaaagaatgttggattggatgattggacgtcgtttggatatgtttttatttgtttgtttatgaatgcttgcagttgtgaacttgtgattcgaatagatgtgtattaatttcattttgtttcttttgccttattgaatattagaatgtggattcaataataagggtatggatgcatttcatttcatttcatttactgatattcgaatgtataaggaattcaacgaagactttatggggatcaaatggctgttcatgtacccttatcttttagaggctcaagtggtggctcgtttacttatgttttctcatatgaatctcatgtatcctactattgcagatcccatttccgtaccaactcaggatatgcttattgagctctttgagaatttgatttagataatatgtctctatccgacacagttagtgtggattaacttgaattgcatttgatctagggaaaattgtcttgataatgtaaagcttgctaattattgccaggggagtgctaaagagagtggtcaatgcattgaaaaattgatggtgaaaatgcaattgaaaaaaaaaaattccaatgtgtaaagataagttggtgatattgtctctttatggggacgagactttttgaaatttattgttattagttctctgagtaatttctgaggatttgattaagaataaaggagaagactgaattgagaactgggcttaagcatttggtgtttgattgtacttcataaatccatttcctgtgaattgaattggtttggtgttgtgtgggatctgttcttatgttacagaaacctgaccttgtgggtttggctgaatttctcaa

SEQ ID NO: 87304 - DNA, 672 bp, Citrus clementina
  Intron number 1 from transcript clementine0.9_000692m (loc us clementine0.9_000692m.g) derived from phytozome v7.0 (c hr-ID scaffold_32; pos 499019 to 499690)
aaccagcctcctgattgcaggtaccatcttataaaaaactcctttttgttaatttttttaatattttttgtgggttgattttgttgtgttttgtctttttcaattggtgggtatttgtagttcgaggaatctggagttgcaatgattgaagagattttttctttcatttttttttcagctggcattgtgtcactatcttgtgtttttatttttatttctctggttttgtggagtgcattggatttttgaaggatatggaactgggtttgtgatttgagctgtaaattttgaattttgtcttgcattaaaagttttggttataattgaatgtgtcgaatttattttcatttttgggtaattctgttgtaattttctactttttttccccttttttaaacacagtacagaatatagaaatatgagcacgtggaattattcaagaaagatatcaatgtcttcccttaaaatgggatgttggtgcttcttaatgtatgaacttgatttttgtctttatgatgttggctttgcatgatataatgttttatcaatgcagctatttgacctttaatctgatttcgttaagtgtagcaatttattatacatattgatctttttcattatggtcctgtgtaattaggtcttaagggaagaaattgtactcgcggggcacca

SEQ ID NO: 87305 - DNA, 390 bp, Citrus clementina
  Intron number 1 from transcript clementine0.9_032975m (loc us clementine0.9_032975m.g) derived from phytozome v7.0 (c hr-ID scaffold_76; pos 1113616 to 1114005 reverse strand)
gctgcgcatgtaagtttttagtttatttctttggatgccgtgaaataaagatatttatttattgaaaattcttttgttgaatgcattgtaaatttttagtttcaaatgacaaaaagaaccaaaaaaaaaatggtatgttcatattctatatggttattggtcatcatcatgagcatctaactggttattatcatgtcagatgtcagaattttctttgggtgatgtccctataaacttaatctattattattattaattgttttaatgataaaatgataactactttttcttctactgtataatggaaaagcttaatattaacacttgtgtctgtcaaataactatttaatttgaattggtgtgcacttcttacagtcagtgccagagtga

SEQ ID NO: 87306 - DNA, 386 bp, Citrus clementina
  Intron number 1 from transcript clementine0.9_007206m (loc us clementine0.9_007206m.g) derived from phytozome v7.0 (c hr-ID scaffold_19; pos 143074 to 143459)
gccctcctcctcctcctcctcctcctccagtacttgtaagtctttctcattttctccttttgttttgaattctccaattccattcttgccgagatttttcttttccaatttgaaggaataattaaattagaatgtcatcaaagaaaagaaagagaagagaagaaaacaaagctaccccttgtagcctgttggcttattcatccctgttccggcttgttcgtgtcataaatcgatcatttctctctctttctctctcgctgtttgttgctagttgttattccacagtttttgaaaaccaagagtagtagtcgggtgtgaaaattctgatgctgtgtcagtgtaaatcgacagatctcgggttccccagcgaagaatttcagtttctc

SEQ ID NO: 87307 - DNA, 921 bp, Citrus clementina
  Intron number 2 from transcript clementine0.9_007206m (loc us clementine0.9_007206m.g) derived from phytozome v7.0 (c hr-ID scaffold_19; pos 143468 to 144388)
cagcaaccaccaccgccaacgccaaggtattcattcttccttcacacttcaatttccctctttcgcattccttccgttaattaaatgtaccaaattgctttgctttagatggcgtttgttgacagctcatctcttaccccctccccttctttactgtaaccttcactttcccggcaattactacaactaattcaattaaaaaacacaccaaaaaaaaaaaaaaatgtatataatgaaaaacaataattagtagaggatagagcatttgattcgcctttactttaggaatcctatggcgttcaaatttgatttgaccagacctcatgtttctttctgcatttgtgtctcctttccttcattatctatcattcccctcaaattttttttcccccaaaaaagatttcacataggacgaggtttgcccatttactttttttttttttttccatcaaaacctgtaaccaccatgttcatcaggaaaaaaagaaaagaaaaagtcccatattcaaaccatcacagcattcgtaattaatcatatttcaaatccacaatacatgacaatgtcaatgtggggcatgagcagtgctgcttccagtcttagcatgtgacactcctccataccattcgccctattgtttttcctccggtcccagatcttactattgctagcacccattttgctcacattatttctacggactcttctatttttttcaataatttggcttgcatttaaacttgttaccttgcgtccattcacccttagatacaattctttcaacagtgcccttttttgttttcatcactttgtaatcttttccctttggaggtgttgcagaatgtggagtagaccattacatgtgatgatatatatatgattcagtgctttttatttgctttctggcagaacttgtgcgcaat

SEQ ID NO: 87308 - DNA, 949 bp, Citrus clementina
  Intron number 1 from transcript clementine0.9_013887m (loc us clementine0.9_013887m.g) derived from phytozome v7.0 (c hr-ID scaffold_6; pos 2061115 to 2062063 reverse strand)
ttataagcgtgggaatctggctcagtgtattagaggtgagattctcagcttttgttactttcattatctgtttggctcctaagaaagtggattattatttttttttcccactcatttcctctgcaaccaaccagaaggctatgatttttatcatctgagtaatgccttggattggatagtttctgttgtttgtggcataaattagaataaaatgatcaaatcaggataatattgcttgatctttactaaaatttagattttttccttttttttggtagattgctcctgcaagatcttagcattttgggacattttatctctgggattttgctttgattttccaagcaagattgattgcatattttgctttatctgggttctttcctcccccccttatttttaatacaaaatctgtaacgtcaattagctagtggttgcttattggtgttcattctggcatcttttaactactgccaaatcatgaacttaactcagttgtttgcttcatttagatttctagttatgatgtatgtagcatttttgaagtctatttgtgtcttcttcgtagcatctttagcctgagttcataacttgattcagactgatttgtcttcattatttagatttcttcaatgcttatagtcaactatagatcgtctctttgttgcataatttgcagtgtcggtacctacatatgttcttttcccttccctttcacctttatttaaaagtgatggcacttgttcaaattattttcctccatcttttaaatttttgctgaaaatggtaaaggtttaaaattaaaatatctaaatgcctcttgagtttcaactttctcattcattgccaagtaagtgaaactacttttccactcaattttaagttgccatttgttacatattgaaaagaccttttttaattggataggtggaagtggtgaggctcacaa

SEQ ID NO: 87309 - DNA, 607 bp, Citrus clementina
  Intron number 2 from transcript clementine0.9_022310m (loc us clementine0.9_022310m.g) derived from phytozome v7.0 (c hr-ID scaffold_6; pos 4302185 to 4302791)
aggacgagtgttgaagcaattttactggtatgttttgttttggttacttgagttacatttttgacagctttatgtataattttgttgtgaaacctcttccatggattttggagctggcatatgtatttaagtagcagcagctgtttcttgattaatacctgtttgtaatggtaaattttgagcttcatcaattcaattttgctagattcaccttcaaatggttgagtcattcagttctggcttcactataccagacaaaccaattagactttagaaactataagaccaatgaggaatgaaaatgggccattctccaagctgtctctgtggtttggactttgcaaccctgaggttatgattcatggttgtcatccacatttgcctttacatatgacttatggactgtataaagaatatttgcagagaacactgtttggaagcaacaaaattcggaacatgttgattatatcaaaattcagaagcaacaaaattttcagattatcttgggcaaggacactattgctgatgtaataacttcaataatatttgctatatgttgttttatcttgcaggttcaggaacataatcatcctcacatactacttct

SEQ ID NO: 87310 - DNA, 548 bp, Citrus clementina
  Intron number 2 from transcript clementine0.9_004341m (loc us clementine0.9_004341m.g) derived from phytozome v7.0 (c hr-ID scaffold_54; pos 1451971 to 1452518)
aggttgatttcgagctcttcttgaaggtatgattgatattcatatgccatcctctgatttttctgtctactcgatcattcgttcaccgaccttctatttggacgatgtgtcgtttcaccatacttttggaggttgatttatgttctttccgcttatctgctattcctataatcaaaattttggatttcgtttcctgcttttgtgaatgaaagtatcatcttgtcggttgctcttcagagtcgatgaaggcaagtcatctttttgcacttcatctaatcctctgcaattgacgcagacaacaaatcagatagtgtatataaaaaattttcgcgagttctagagttattattattattttttaaaaaacgctgtcattggattttggaaacattatttataaaattatttctttgtgtttaaggtgaaattaaaaaaaaaattatctgtttgattgtttattaagtagaaattcttttactatctgcaacgttaaagatggaaacctgtgttggaaatcatggtacaggtttatttgaagctacaagcgc

SEQ ID NO: 87311 - DNA, 624 bp, Citrus clementina
  Intron number 1 from transcript clementine0.9_035342m (loc us clementine0.9_035342m.g) derived from phytozome v7.0 (c hr-ID scaffold_147; pos 292297 to 292920)
tgcagctgtggtatagtattacagttgcacgactcgtatgttactgtatccaagaaatccaaaaagttacaaggtcaaatcaaaagatacaggaatatgacactggaccaaaagcaattaaatcagtcaccccaccccatttggttgactttgccattttcaatcaactccccgtcaattgccttgtttatctccttgtctttcaagttggaattttcatcaatctcaatcagtttctgggggttgatccatttgcttcctctctctgcgctctgccgtttcaccaacagcgacagtgctggttttgccctctttctcgacctcattttcacttcacaattagcatagtggcagcttctttttcttcattgatattattagcttcttgagcatcatcttgggccttagtatcctgctttggatcatctgttctcggttacttcttcagctttttcttgtgattcataaaaattggacaaaaattcatatacaaatttactattacttttcactactgttaattcatttcaactagggaaagctcaccagagaatttcattcatttcttttaacactcgcactaaaccagaaagccaaatatactggagtgctcgcctaatctag

SEQ ID NO: 87312 - DNA, 336 bp, Citrus clementina
  Intron number 1 from transcript clementine0.9_001595m (loc us clementine0.9_001232m.g) derived from phytozome v7.0 (c hr-ID scaffold_78; pos 414310 to 414645)
gtcaaaagaaatttcgaaatctgaacttcaaaatcgtatgttttttgaaatttctttattaaattgatttcttgaaatagatttatttggggcagcttttagttttggaagcaatttttgttttgattctgaactttacgaagtattaacagtagttgattttttcttgcaaatttccgaatttgcttgtataaattatagttactttaggtgtttctgtttgaaatttgtttaaattctaactgactgttaagtttcttagcatttcattaactttgaggttcattctggcttttgattaaataagcaggttaagattagatcgctttgaaatat

SEQ ID NO: 87313 - DNA, 203 bp, Citrus clementina
  Intron number 2 from transcript clementine0.9_001595m (loc us clementine0.9_001232m.g) derived from phytozome v7.0 (c hr-ID scaffold_78; pos 414739 to 414941)
tgcaaggttttttatttttgaaactttttttttctgtaagtttgataaaaaaatccattttcttctcttattttcaatagcattttgcgctttttactttctgggatttccttgtcctagttttgatttcattattattcttttgtttttttaaatgttttaatttttaaatattttcaattaaaactgggtttgattgcaga

SEQ ID NO: 87314 - DNA, 955 bp, Citrus clementina
  Intron number 6 from transcript clementine0.9_001595m (loc us clementine0.9_001232m.g) derived from phytozome v7.0 (c hr-ID scaffold_78; pos 415571 to 416525)
caggccaattttgtgcacctcagtattttaagcaagtgagctttcgtacctctacatctcctgttctcagtgctgtcttaaataattagtgccttgttctgttaatcatctgatgaaatagttaaatgtcttagaagtaacattcttggcactcatgatatgcgctgaatgaaagtttaaaatgatgatgttggtcatagcttgcattttcaattggcatggttacacaaatctcccgtagttccttgggagtcaagatagttcttcacctgtttattttttatcttgccaactgaaagtgtactatatgatagtaaaggaagctgctgaaaattgatataaatgtaaatatttttaaaagattattttataggattatagctatttgtttattgaaggcaaaggaacctaggatgcaccctgtcccctaattttttttcccctttctgtatgctttttacatcctgtgcaattgcttcttgtaacattcttctactcggctgctggttgcaatattattttactctacacagaatcagcctgttctctttgcttgccatccaggattttcggtgacctagtgttttaaatctactagcatttatgccttgaatggctacaaacttaaagttctaatcttttgaggctaaatagttacattcaagatgcttagttcactaatatatcaggaggctaaatatagttaaaaattgttacttaaccacggtaagaaagtccttttgttttgttactctttgttctcttcgtcctttttaatagaaaatttgtcattggcattgggttggttgcagctgccttactttaccacgttcagtttttaaatgttacattctgtgggctatatttatccagtgcagtatgaagttcacacattatatattattatttaatgttactaggtcctataaacgcatatatcgtgaattcttcttac

SEQ ID NO: 87315 - DNA, 421 bp, Citrus clementina
  Intron number 1 from transcript clementine0.9_023011m (loc us clementine0.9_023006m.g) derived from phytozome v7.0 (c hr-ID scaffold_80; pos 368255 to 368675 reverse strand)
acgattctgattgcgctattatactacgaaaagaggtttgaattgacagaatattttgtgggtttgtttttatttatgattttacatgtgggatcctttgtttcagttataattgttatagtctctgtttggtttcttagaaagtggagtaaaagataagaaaataaaattgattagtagtgctctggttcacgaggaaaagaaattatatttattttgggttttatgggtttaatagcatgggcctgggggagttctacttctaaattctaatgtcgtagttttttttttttttttgttacttctaaatactctcaaaatattacttgcaaaagcacttgccttttgttttttgttcctttacttaatacttttatgatgtttgttgatacatagaagcttggagtggttgtgaagccga

SEQ ID NO: 87316 - DNA, 879 bp, Citrus clementina
  Intron number 1 from transcript clementine0.9_005204m (loc us clementine0.9_005204m.g) derived from phytozome v7.0 (c hr-ID scaffold_6; pos 5766908 to 5767786)
ttaattcttcacttggatttttcattgctgatcatgtaagttagttagttattattattattttttttttcaccacggtaactcttgtgcttacacttttcgcggagctagttctattttcttaatgttctaattttcaatgaatatatttggacaaagccacgaacttgtcttttagagggcttaacttgtattaatattgctgatatattccttataaatcaaaaagagcaaacaaagttcttataaaacgcaaggatagcagagagtggttttaatttttttttttaatgttatctcaattttaataatagatgattgattgattcgatcttcttcttgtccataattaaaataactactttctacttcctaaaggaatttcctgctcatgttttttaatcctactccaaaattctcatcttatttggtgaaaattttcttgatgttaacaaacttatgttaactgtcaactattgttaaattaagtcaatttgtttttcaactatcagaccggaaaagagtacctaataacatgtaacgttaggagagttttggtgaggtttaaagcatgaaaggaaatggctaattgcctaattccaataagaaggaagatttggtaattttctccttttccaatgtatgcaaatccacgacagccaccctacgcctcctccccttattttttaaggaagtatgtgattttttaaattgggctttgactgcaagcaactgtaatatgttggacttccgtaataggcttgtttctactgtacggatatttatgtattataaaaataaaataaaaaacattatgacaaaaccttgacttgcgtttcgatcatatcaggtctcaggatccagagaaaggttcaaaac

SEQ ID NO: 87317 - DNA, 827 bp, Citrus clementina
  Intron number 1 from transcript clementine0.9_005744m (loc us clementine0.9_005744m.g) derived from phytozome v7.0 (c hr-ID scaffold_130; pos 327668 to 328494)
tttttcaggctccgacgaggcataaacaaaaacaggtttacttatttattttatttgtttatttatttattgcttacagtacttgaaatctcagttttctgctttactgttactgttgttgttaaccttgaggatttgcgttggcgatcagagttgaatttagtttgatgcgatgatgattctgatgacagcaaataagtgttaattgttttggtatttataaagagcgtatgaatatttgttctttgggtatgtctgcgaatgagttgctgttaattcacaactcagtttgagtagaatgaaacgaaaatcactggctaataagtataattgggtgggtgggtagtaaaaaattttttgcttccgaaaattaaggagaagcacagcagttgcaaacattcataccctttgttggtttgagttgttgttagaagaaacataacaaaaatgaaatgacacttaatctcaaaagatatgtttggaaatgtacgctttcttgtttgaatgaggggaaaaaactagatttcttctgtggtttgaagtgaaccttcaaagaccattacattatactagtgaaaatgcgtgtggttcttctgtctggtttgcttaacgatagcttacaagccttgtaatcagatctttaacgtttggtgaaagatttgtaggacacataataagaattcttctctatcttcctttatcagaccctgtgtagttttgttgagctgctgccagtttgttttctgttcccttgtttgtcatatgataagagtaaattttgatagtaattatgctcttttaggtctttcacgaagtcattgatcttg

SEQ ID NO: 87318 - DNA, 748 bp, Citrus clementina
  Intron number 3 from transcript clementine0.9_012515m (loc us clementine0.9_012515m.g) derived from phytozome v7.0 (c hr-ID scaffold_9; pos 2497037 to 2497784)
gctcgtgaccgctggttgaagccaactggagttatgtaagtaatttgagatgccaaagggtgaagaaacactttatatatgcggtgcaactgatcatcttgtggatagtctcttatttgacatttcaacgtaaaaacacctagtacaaagtgataggacttttgttctctaactgttatccttgacttgattctgactagtgaaagacagcttatatgttaaattctgagagtaggttatacagggatataaatttgtacctgttggctgatgaatgatgtttgattttcctacggtaaatgttgattgtcaatggctagaattgactaccgacactagtaggggtgaatgctatgttaagattctggagcgatttcccatcatagaaaaataatttctcatgatgagggggaacaagtgcaattatgattcagattgagtgcaattaactgtaggaaggagtatagtgggaatttatcatttctcagcaagttagtggaattacctcaactagggagcgaataacgacaatgccaatcacatggtagaagggcagattagtgaaggtgttcaaattgacaattggatgttctactgagcttatcattctcttgtccttagtttcctttatattgcagacttaatgtttcttctgtcttttggtttgaaaagtttattgcttttataatcagtgactcatttgtgaatggttgaccaaacaagcatttttctctcaggtatcctagtc

SEQ ID NO: 87319 - DNA, 400 bp, Citrus clementina; identical to SEQ ID NO: 82961
  Intron number 3 from transcript clementine0.9_010921m (loc us clementine0.9_010815m.g) derived from phytozome v7.0 (c hr-ID scaffold_22; pos 640706 to 641105)

SEQ ID NO: 87320 - DNA, 919 bp, Citrus clementina
  Intron number 1 from transcript clementine0.9_017175m (loc us clementine0.9_017175m.g) derived from phytozome v7.0 (c hr-ID scaffold_86; pos 1041475 to 1042393)
tccaaaagtttgtctccaaaggccaactctcccaggcaagctctctctgttttgttcttgttactttcaattttgatgagttttatttaatgatgtttgcaaaaatattacaaaactcatgctttctaggagcttaccgatgttttgattgatcaatatagtgttatgatttttgtccaactcataatttcaatcactaacaaataagtgaggttagctgcttaggcttgagtcgtatatttggacttctcaggagtataattatcttatctaattgttccttatgattggttgtaactggaaagttcatttggaaatttattgtttcattgcttctgttgtcgaattaatgcgaaattacttcgtgcttttcatatacaagaacaagatgggcttgctatgttttttctttcttttgtgtttaattttgggggagaaaatccttggcccttgtaaatgttaaatgctacatagatacgaatgatacctacatagttagaaattcctttaatcttcttgtgattttaacaacgatggctttgcccataggacatgcttaatttgatgttttttttttaactttttgtcagggaccgcggaatttattgtttgttagtataatgtcattcggttggttgcggctgtcgccaaatttattagttgaaatcttgctttctgagagtctgatttgcattcctcaaatggtaaaaacagtttcagggattgcttggaaatttttgcaaggatttggttggaccatttgtttatatttttatgagtatgcttaaccgttatcatcctctgaatgttgggtaattaagaatttagctggtgctcctagcctgcaccactggcgaccttgttgatttattagattgaaaaagtttgtcatctttaattagccaggcagtgggtactg

SEQ ID NO: 87321 - DNA, 519 bp, Citrus clementina
  Intron number 4 from transcript clementine0.9_023722m (loc us clementine0.9_020749m.g) derived from phytozome v7.0 (c hr-ID scaffold_76; pos 1075967 to 1076485 reverse strand)
gaaagtagtcagaaagagtctttctcatctaaagagtactcactccttgacttgcaaatatttttgatcaattgtaaaggctactgaatcgtgatgatcatttgattatgatgatgctagtctgttactttcgttcattttgtttagtttatcaatttatgtgcaattgttattgtgttatttacttgcaataacatagcttgtatcttgaaagagaattatgcgtgagaaagttttctcctctgagcatgtttcctttggctttatttatttatttttttctcttctaaaagaaaatttctggctaaaaaatgtttgcatgagttgattctgttcttattcttttaatgtttcttgtttgttgtgctactggaaattctaataagtagaaacaacgtgaaggcagaattgggactgtatgctagaaagggttataattctatggttgttttaggcatgtttgcttataatagctgtcacctgtgcaacttgtcagggtgttgaagaaactgaggagat

SEQ ID NO: 87322 - DNA, 1028 bp, Citrus clementina; identical to SEQ ID NO: 78024
  Intron number 1 from transcript clementine0.9_031493m (loc us clementine0.9_031493m.g) derived from phytozome v7.0 (c hr-ID scaffold_55; pos 1157511 to 1158538)

SEQ ID NO: 87323 - DNA, 1011 bp, Citrus clementina; identical to SEQ ID NO: 82149
  Intron number 2 from transcript clementine0.9_022109m (loc us clementine0.9_022109m.g) derived from phytozome v7.0 (c hr-ID scaffold_76; pos 1066493 to 1067503)

SEQ ID NO: 87324 - DNA, 418 bp, Citrus clementina
  Intron number 3 from transcript clementine0.9_030476m (loc us clementine0.9_030476m.g) derived from phytozome v7.0 (c hr-ID scaffold_86; pos 852573 to 852990)
gttttggatgtgattagatttatgtggccttgattggatttttaatgataattttgatttgcttacctgtgtttgtaagggtttcaatctgcttaaatgaataattaagtatagattttttttttctgggttccaattgataaataacaacactatgaatttgcaattttgcgttgttttttttttcctgagctagagcaagtgatttatgatacattactcgttacccctatatatgaatgtgtgcacttttgcttctatacttgttcttgccttctctggatgagtgttgctttaaactttccttagcaagtctttccattatactacagtctagctgttgataaataatggaattctttcctcgtcttcacggtagtaattacatctcatctttgcagctacattggttgttctt

SEQ ID NO: 87325 - DNA, 803 bp, Citrus clementina
  Intron number 2 from transcript clementine0.9_013680m (loc us clementine0.9_013680m.g) derived from phytozome v7.0 (c hr-ID scaffold_6; pos 606055 to 606857 reverse strand)
agtgtggcttcacaagcaggtttccatttttgtgcacaagatctattcttaattgtgaatgtcttttgttgtctaagcataggatattcgcatctgtgcatgccaaacaagtgtaaaacttatttatatgcaaatagttttcggctttagtattcatcatgtcagcaatgtatactattatattacacactttatatgatgttaaggtaaaaattgcaagcttgagtttgctagctagtctggttaagtgtgtgaaatatatctaagactacctatccatttgattttggtgagttaaatggactgaattgaagtgtgtgtattgatttgtttggcatgttggatttgattgaaaccttgaaagaagtggctcaagggttgtgatcctagaatggaagtatatttgtggcagtaaaacgtgacatatgcaaaatagcgaggctgctatttgcgatttgtgttcgttgtcttaggtcttggcatccaattgctttgctttttgatttccctcccccttttgttgttccagaattatttttttttttctctgctttcatcttgactaactatgctgtaaaaggtttttcacctctatttcatctattatgtcaaatttcaaatgaaatataaaatatatcttgtttaaaggtttctacatgtatcgatcaacaatatataatcttttcttttatgagaaacactagcctcacattatgaacataataaaactagccctcacattatgaacgtaataaaactaaagagattctacaacgaaactaaagagattcttctgtggacag

SEQ ID NO: 87326 - DNA, 853 bp, Citrus clementina
  Intron number 3 from transcript clementine0.9_023750m (loc us clementine0.9_023750m.g) derived from phytozome v7.0 (c hr-ID scaffold_17; pos 4038053 to 4038905 reverse strand)
agaaagttgaattttgtggattgggaactctcaaggtatgttaaaaaataaaacataactaattacctaatcatagtgaaatttgaagattttacctaaatatagttttgcttctattggatgaatctataggaaaattattaaaatctccctgttgtctgttaaaattaatcattttctcttttcatgttctaaaatttatcataatgtctcttttgttagagcagtaaaagatacaaaaagcaaaaaattgaaagtcaacaaaatctttctaatagcaaggggttttaatgagttttgaaacatgagggagccagaaatgattagtatattgaaacaacaaagagctttgattatgttctcatgatataaatattaagcctttaaaaatttagtcgagttacttttagtagttttatttatcttgctatcaagaaatttgaattatgaaaagataggaactaaacacgaaatggggattcgtcctgatgacctggattggccaacctttttctctatacaataaatataagatttgatgacttgagctcttgaagctcgggctaggtgagctgcagatcatctgcaagagcttctttaatactatcttttctatgtgatccattcagattgattggcccaacttcaacttttgcccataacatgtgacattgaaagtcgaaccaagtgaataaatgtatctctttttcattcgtacttttactgtcaaattgttatattatgttttaaattgcaaatctgagtttcatcaagagcttagtataatgaaattcgagtttttagatcaattgaaactctgtgctgatgaatgaaaaacttgatatataggttg

SEQ ID NO: 87327 - DNA, 646 bp, Citrus clementina
  Intron number 1 from transcript clementine0.9_002746m (loc us clementine0.9_002746m.g) derived from phytozome v7.0 (c hr-ID scaffold_42; pos 217679 to 218324 reverse strand)
ggtttcgatttgctttttgttcgtgcaattccttggttcgctgtctttcagtttttttttttatttctaattttaacttttttgtttttgcagatttaattggtatcttaatttaattttaaattaatataaatgctcagctgatcggaattgtatgtttcgaatccctagctcccgtttagttgatgagaaaactggtcgaagaatgtaaaaaaaaaaaaaaagagagatttttttgggtgctttctttgttgatttgtcagaaaaatgaagaattgaattaaattcaaccgagttgacgtaattttattaggtaaagtcaggtttgaagtttgttttagagatcgctcgcttacagcattgtgaattacgaaaattaattcttttatttgaaatttattcgttataaacttcatgtggtgcctactttttttttcggttgacttgattgttcgtaataagggttttttagggacatttagattgggcctcatttatagtctcttcttacaggtttaagatcagctgtgatggaaataagttttaggatttgagatttatgatttgagcttacgcacataatgactagattgaatttttttcactagcaggttgtgggatttcagctttaaatccaagttgaagg

SEQ ID NO: 87328 - DNA, 998 bp, Citrus clementina
  Intron number 3 from transcript clementine0.9_032694m (loc us clementine0.9_032694m.g) derived from phytozome v7.0 (c hr-ID scaffold_32; pos 2342473 to 2343470)
cattgagttgttggtacgtaatgtctcttactgataatcttccctcactcaatttgttgatttcctataagctcctcaaattgtggctcttaattcttgatattgatccgttactgaaatgatagtccttgtttttattgaaaacaatattgtatcgacgagtgagttactttgtacgatgcttctaccgtcatatataaatataaataacgtacttgcatgcgctcatatcatatcacctaccgtttagataaatatatttgtttaataaaaatccacctaatgatttgtccccaatctgaccatctgagcatgatttatttagcaggtagctagtgagattggcaatggttaatgacgcctagccctaatttacaaaatatatatttgatgactatgggaacttagcacaagttatcgttcacttgactccaactttgcacaacagccattaatatttttttctgcaaaattatgtaccatcatagattataattgttaataaatcgtgatttcagctctatacaacgtaagaatttgttatatgttcttttttttttttttgccccacatactagtaagatcatttctttttctttttcttttttctaagagataactttttatagcctttatgaagaatgaagaagaataaaataaaaccaaacgagaccagtcatgatttcaggtcagcacaacaaaagaagttgttagatgtctcttttggttatgccggattattttcagaaaaataatatttttgtagctaattatattaagaagagtaatcctatcaccgggaaaaaaatgatccccatcataagcatcccaaatgatttgtctttcttgtggagagcaaaatggtgaattgaaaactattcaaaaatcaaaagcaccatctgcttaatcattgtctagaatatggtggatctaaccatgacagatcaataaacatatttgcagggacttgcaatcctggcaatacaagcacacgcaca

SEQ ID NO: 87329 - DNA, 725 bp, Citrus clementina
  Intron number 1 from transcript clementine0.9_008421m (loc us clementine0.9_008421m.g) derived from phytozome v7.0 (c hr-ID scaffold_80; pos 638592 to 639316 reverse strand)
tatcaaaattgattttttttccccatctttttaaggtaataattgatttctgataccattttttgttttgggaaagtttatttgtttgcatgcacttgttaatgggttgagattaacttgatttgctccattttcttagcttgggactaaactgttttcagttaatgatgttgctgttgtttgattccttagcttttggttgtttgtttgatcaatttagctgataatgagaggatcccatttggaatttgatatgaatatgacgaaaaatgttttcttttgtgtgctgttgttttctagcttgatgcaagtggattgcctatttcgtttcactttgctgaatatttatttaaagcttgtaatctgctggactgctgcttgctttggtgctttactgattccattggatttctttgttgcatatgatttctttgtcgaaccattgttttaatgaaataaaatcatatggccagatattctgagcttttgttatgattggggtctgcattttatgcatatattgttcttggtgcccatgtctctaacttggacttagttgactactaagactagttattgaaaaaattaggatgccccaaattttaatcgtattttgtagaatgtatgaaaaaacaatttacatggtctctggttgaaatttgtctttgctgtgatattcttatttatttttccattctcgttctgtaggggttaaatagtctatc

SEQ ID NO: 87330 - DNA, 610 bp, Citrus clementina
  Intron number 1 from transcript clementine0.9_023468m (loc us clementine0.9_018684m.g) derived from phytozome v7.0 (c hr-ID scaffold_9; pos 6266494 to 6267103)
ggcccccgcctgtaccacgagctgtttgccaccaggtatgctgataaaccccgacccacgtgctgttgtttatgagcagtgttttattttattttattatattttggataagaaaagtacccctttattcgagttctcttgataagactttttctgacgttaaagcaaattcattcgatgtatgttagggatcgaggtgttgtgttgttatggctttcgatccatagctgctgcatgtgaaatggtatcactaactgtcaagtaaaagtgggtgtttaccaaacacttaaattaagtagaagtatggaattataaacataccctccatttggttcgatggaaatcacttgttcttttgttttctgatattttctttttgggtgtttattttgggtgaattatgtagaggtgcagtgttgttttgttataaaaccatcaaaaaattataatcctatttcatgtatccaaaggtggatgggatcattttgctgtgtataaatcattgatatcgattattctggctctccaatgtttgtctcatgcttgctatttcatttttttcagttccctctcaccattttgaattactgcagcaacttgagaagcagta

SEQ ID NO: 87331 - DNA, 1029 bp, Citrus clementina
  Intron number 2 from transcript clementine0.9_003733m (loc us clementine0.9_003716m.g) derived from phytozome v7.0 (c hr-ID scaffold_130; pos 274890 to 275918 reverse strand)
cacggcgtgcggattcctttgagaagctggataaagtatgttccttcactgattattgtggtgcataaatattgtcatatagtgtttatttgcacatcgatattgtcctttttgaattttctgttgtgatgaattagtaattgcttgatagttttattatcagttttgtatctggataaagaatgataataagttatctagagagggaacatttaccaaacagctctaactttgtgtcataagctctcaaggtttccttaaaaaaaaattatttctggtcatatatctatggagttatttatggtacatgtgtataatacaaatctatccttagatgaaattatgattttaacttttggattttgttcaagaatgtgaagtatagcctgggaaacatccaagaagcatcaccatgaattcagattcttatagaactatccattctacttctgcagagttcaaataatgttcagagtaatagttagttcttatagaaaaccagttaatgttagggagaactgaactttggtgggtaatttgagtgtaactcactaggtatgaagaaacttgaagatattgcacactaatgcgcatgattttagatgattgaaatttgtggattatgatgcgtatcaacagttttaagcatacatgcatgtttgcttgtgtaatatttgactgcttactaggtcttggattatgcatgctacttctctttaaaattaagctgatactgcacttttggaattttagctaattttgtgcccatcactacttttctccttccccttttttgactactattttgctaatatttacattttttgtttttgtttttgtttttgtttttggggagtccctttctattttttccagatcattctatttagtgagtagttaccatgatttatcttcaattttttgtccttctccaatgcccactttggttgacttcacttggaggctggttttgatttatagtttgatgacaacatattgcaatgcagattggccagggaacttacagta

SEQ ID NO: 87332 - DNA, 855 bp, Citrus clementina
  Intron number 2 from transcript clementine0.9_000873m (loc us clementine0.9_000873m.g) derived from phytozome v7.0 (c hr-ID scaffold_73; pos 285705 to 286559 reverse strand)
atattaaaggtaagtaagcttcatcccttctcccgtgtcccatctttgtggatcttatttcatcgaccagctggaagtattgatacgagatctagctagactcttgctagtgcaagcttcaaggctttgagtgctacaaaaataggtctaagaaattatcaatacataacgttattctatgcttctcataatcagacacaattcaatctaattatttcgtatgtcctctcttcaaaagtaaagaattgtacactaaacggaaatcgacattgtagctttttattttttctaatgctctttctttgttaacgagtttatatcctgagagtgcattggattcaaaaaaaaaaaagttttgatgttcaaggtaagccataataacatgcatcttatttatctgtctatatctaaatttgtgcactgaatttagtattttagttagtgtgaagggatcagatattggcttccataaaccaacttgtatttacttaattaattaattaacaccatttagtatttaacaaattaaaatttcgtgtttaatttgtcttattttttattttttgaagcaagaataaggtatagcagtaggtaaagttgaaatacatatttattccttacaaatttaaattcgttttcagccaaatatacctacttaaaaccactcaatcatgccattggcaacagttttttaggtttttctagttaaccgtgtacttttttgcttattaataaaattcttttgtgctgagatttaaaataaagaaggagaaaataagttatttaattaaccttgttttaagtgttggcataaatgcaggactgaattccttgagtaacttggaggagctggac

SEQ ID NO: 87333 - DNA, 807 bp, Citrus clementina
  Intron number 2 from transcript clementine0.9_009306m (loc us clementine0.9_005908m.g) derived from phytozome v7.0 (c hr-ID scaffold_94; pos 835093 to 835899)
gagacttgaagtttgtacagtctcttctggatgtaatttccttcccttgcatgttatattattaccctgaactcatttgtttcgagctattagatactgtcaacgtctgtcatggacctacaaaaagtaaaattacttacaggtaatctggtaacttattgatggggttccctttgggtgggtacaactttcatagggaaggaggtggaggcattggttaaagtttttccaatgaaaataatgaaaaacaaaagcccattttgattgtttattatcaatctcggtgtttgtggtttattataggtgttcgtggtgatcactcttatgagagtcagagttcattggcctttctttcttttcttaaattttcattctggttgattgtaggtatggattatcagatgatgctgaatggcaggcatttatagagaagatttttgcatataaatttcttgtaggctgttttggacatcgtaattttctttttcaagagaaacaaaatgtgtgtatgatgaaactgaggaagcagtaatgaaacattcagtcctctgaatctagtcttatgtatctagtttcttttagcataatgtggttatttgttagcgaaattttttatttttgaccttgaattttgtgaaaacttagttttttggggaactttattttcgtattcagaaccattttgtttttatatttgtacatgctgcatcaacatggaagttctcatgcttgttgcttctgagtttgagagtttgagatcccatgtaaaattgggtttttagctttttactttttctgcatggccag

SEQ ID NO: 87334 - DNA, 270 bp, Citrus clementina
  Intron number 1 from transcript clementine0.9_031218m (loc us clementine0.9_031218m.g) derived from phytozome v7.0 (c hr-ID scaffold_32; pos 1741884 to 1742153 reverse strand)
ttcatttataacacatgtaatcttatattttaaccttatgatgcccgtgtctgctataattgaaatttatgacttatgctcttcattaacccttataatattctttggcaatatgcaagattccgtttatctttttttttttttttttttcccaagtgattgcgtggtttgactgtcttgctttgtttgttgaattcatgatatgtgagatcaaaaatattttcgtattggatagagaaacgggcgagtatttaacattataagccagct

SEQ ID NO: 87335 - DNA, 1009 bp, Citrus clementina
  Intron number 1 from transcript clementine0.9_026099m (loc us clementine0.9_024475m.g) derived from phytozome v7.0 (c hr-ID scaffold_2; pos 1183961 to 1184969)
aactacaactcaccagaggtaactgcttgatgaatgtaatggtcagttgttttctttattttttaatccctttgtttctctttctttcttctactgcttttacctgccaagcaatttcgctgatccccagtttcctttacccatatgtttaccaatgttagtagaatccatgtgagttgtatcttgaaatcaatgtttggtaaaaagaatttctgaagatagaatgtaccagcagggaagctcttttgttttgtcaatgttgaagtgttgcatcttaatcaatcattgttacacaaagatggattttacctgccaagcaatttcgctgatccccagtttcctttacccatatgtttaccaatgttagtagaatccatgtgagttgtatcttgaaatcaatgtttggtaaaaagaatttctgaagatagtatgtaccagcagggaagctcttttgttttgtcaatgttgaagtgttgcatcttaatcaatcattgttacacaaaggtggcaatgatattgttgtcttaaattccaccatcggcaattaagtttaaccatgtattcaaatcacacaacaaaacttcgaagccagttcttcgaatgatgggactaggtttacattgttgcagatgaaaagtagtactgtgttcaatctaaaactcagttcccctcgctagacctataaactttcaaagctgcaacaactttagtaatttattaaaaaacagcagtatactaagcatttctgttaagtccaaattcatctggaaacatatttccatagtaaatggaacatgaaacagaattgacctcagtattaacggtctggtttgtactgcgatatatataatggtaaaatatgagacctttgctagaaagaaatagttaataccgtttgtagttcttctgctgcaaaatcgatattgctcctgttgcaagtactaatattaacatctatgcattctccaatttttccttaactaactgaggctgattattgtccagtcag

SEQ ID NO: 87336 - DNA, 1067 bp, Citrus clementina
  Intron number 1 from transcript clementine0.9_010651m (loc us clementine0.9_010651m.g) derived from phytozome v7.0 (c hr-ID scaffold_32; pos 522386 to 523452)
tcattgcttcagttttctccgcattaaatcgcgaggtaatataagcatatcgcttaatcggtttgaaagcaaattgaataaaagaagataaaaatatgagttctgatcttatgtttgatgcttttttccccctgttttcaaacaacgaaaaatcaaaactttgtaagacccactaagtaaatacatcagtaaacacgattaagtggagttttggtgtttctttagctgttctgataattgtttgacagtgtagatcttggaaatgtatgtttgctgtttccgagtttttaggaattttttgttttttggaacgtgtttgtatgtttggatgctgggaaagtatgtaaaaggagaaggaaagtaaaaaggatttaactttttctgtctctagatatttgtggtttttgggtttgtgattttaatcggttctttcactgctgtatgcaattgtatgactcttgaggcaaatacgttttggtttttgcttgttcttgttgctgttcatggatatatgatacagtttcagtgattggacagtattgttggttggtaggttttaacaaaatgaaagtcttacatcatgatgtagtttaggctcaagcgatctattgctcgtggggcttaatttgatgtatattgtagatttgatgttgatttatagtacttgaatatgaacataatgtacctgtttcattggtttttgtttccaacatttttgtgagtcccttttattggtggactcaaatttatatccccttttgttgtcatgaatcttgatttcgttctgataattgaaattgctgccttttctatatcgtacttggttctttataaaaccaagtataatactactttctgtattttgatattgatgttgtattggctaatttagtctgcgccaaatactgttttttaaaactcaatggagttaggtatttgatatactgtaacataaaaaacttaaaacattattttctcttgcttattgcctttcaaagcatacgattgggtcgtaataagattgcggtatttcagtcttgcagactgacctctgagattttttcaaa

SEQ ID NO: 87337 - DNA, 564 bp, Citrus clementina
  Intron number 4 from transcript clementine0.9_005101m (loc us clementine0.9_004357m.g) derived from phytozome v7.0 (c hr-ID scaffold_26; pos 2015733 to 2016296)
gaggctatatacttcattcaaccaaccaaagagaagtaatttgcattcccttctcagcttagcataattacatatttttgtttttttttccagtctgtcactatttctttgttcttttatatttcttttttgcacttgtatgcctctctatttgcaatattttgctattgatggtggtgaaacacatattttatactttttcccaaagtaattgctgtaaaggagggatgcccaactgtagattattgaagttttcatgctagggaaattgcaaggaaactctttatagtttaaatatctgtttccgcgaaactgacattttttatttatttatttttgcatgtcctgtcttcatctgaattatgtcataacttatgcctatatttgtaatatttgatgaaagagttaacttagaaattgtagatatgcaattttcttgtattcgtgaagaacctgttaaactgattagatatatactgctatagcacaggcttggtttttatatatattttattttaaggtttgtttatttatctctttgttttgctttttggcagtgttatc

SEQ ID NO: 87338 - DNA, 457 bp, Citrus clementina
  Intron number 1 from transcript clementine0.9_003572m (loc us clementine0.9_003572m.g) derived from phytozome v7.0 (c hr-ID scaffold_34; pos 2109063 to 2109519 reverse strand)
atcaggataaaggcaagttcgtttaaagttttgagaagaaaatcgtaaatttcgaataatgtcagcactcgttttgtttgtgcattaattaattgtattatagagctcaaatgcagtatgccaagtagttgtattagagtcggttgaaaaatttagatttgattaaatgtttgttcaaagccaaaacaagttgcacattgtttgcaactagtgaaacttcaattttacttgatgatttcgggccttgcataagttgaggcttcaatgtaagatttgggcttcttgtacctcagtagcttcttgtgccactgccatgactgagagtctatatgtaactgctgtacttaattttggaagcgtagcaactaaagtctgattttcctttttgaaagctacggattattactaaataactgtttattgtttggtgcagaaataattagtcacagtgctgtgg

SEQ ID NO: 87339 - DNA, 860 bp, Citrus clementina
  Intron number 1 from transcript clementine0.9_026540m (loc us clementine0.9_024890m.g) derived from phytozome v7.0 (c hr-ID scaffold_26; pos 2564038 to 2564897)
aacaaaccatcaccaagacaccaactccacctcaagtaagctttatttttttttaattgtagaaattctaagaaattattgtagagttttgaaaatctgtcgaaaatgttgagttaccctattgtgggtttttctcgctgttttgtcttaaattgattagagttgtcttaatttttcaatttagttacggcatcatgaatttgttgttaaaatcattgtttataaagaacacaaatgaagacagtgagactaacaaggtcagcatgtcgtcttggattagaagcttgatcagcccatggatgaagaagctggcaggcttagaaataagtaaagagaaatatacaagctgggttatagtggtttgataagttggttctgtttgagttggtggtactctgtttctgaaaatgttgttcatggttttctagattttctagatttatgcttgataaatcagaatttaaaagaagctaaattgtgtgcccagaaggaagataacagtaagtgtgtatttgagaagaaagatggaagataacagttaagagaaagcagaatttaaatcctcagtgcagtgcagatagcgatttcgattaaaaaaaaatctttaaaacggcgttgtttttggaatctttggggtttgacctagggcaaacatcagtgctgatataaatttaattaataaattttttatttttcttcacacccactataattccaaatagacccgttattttttaattttattttatttttagaatataaatggaaaacagaaaaactaatacctacttccctaatcctaaatcctagttttcaaatttacagacgctgcgcacgagggagagagaggggcagagctg

SEQ ID NO: 87340 - DNA, 637 bp, Citrus clementina
  Intron number 3 from transcript clementine0.9_026540m (loc us clementine0.9_024890m.g) derived from phytozome v7.0 (c hr-ID scaffold_26; pos 2565890 to 2566526)
tcttcacattgattcgaaaaggtattatgaagctgcaaaactcagtttgttacttttgttcggattttgatctaatttttgttcaatggtttgttatttaaattattcttgcatgactgaaacgcaaataaatggaaaaatcttcaacatgttaccctattgccctattggtttgttggcaatttatttcaagcatattaaacttatttgtaaattagtattctttttaattggcattttatcacatttctgaatgtatactgaatgctgtgttccagcatccttcaataaatttaaagttgatgtcaatgtttccttctgccaactctggtttctctttcttctattccctcttgctgtgtgcgcacacatggtgtttcatatactctagaatattttgaaaccaacctaggttgaggcttatcttgctaattaaactcatacagttgcttatgcatcaatcaacatcataacaaggggcaggagcatcaaacttatgagccaatatctcaatagtagagtgctcttgcaaatttgcatgggagagcgttatttaactaccagtttggttttgtatttttttattccttgtgtacatgaagaggctgctcttaatcagaagatacagaaaagctga

SEQ ID NO: 87341 - DNA, 845 bp, Citrus clementina
  Intron number 1 from transcript clementine0.9_025576m (loc us clementine0.9_024890m.g) derived from phytozome v7.0 (c hr-ID scaffold_26; pos 2564038 to 2564882)
aacaaaccatcaccaagacaccaactccacctcaagtaagctttatttttttttaattgtagaaattctaagaaattattgtagagttttgaaaatctgtcgaaaatgttgagttaccctattgtgggtttttctcgctgttttgtcttaaattgattagagttgtcttaatttttcaatttagttacggcatcatgaatttgttgttaaaatcattgtttataaagaacacaaatgaagacagtgagactaacaaggtcagcatgtcgtcttggattagaagcttgatcagcccatggatgaagaagctggcaggcttagaaataagtaaagagaaatatacaagctgggttatagtggtttgataagttggttctgtttgagttggtggtactctgtttctgaaaatgttgttcatggttttctagattttctagatttatgcttgataaatcagaatttaaaagaagctaaattgtgtgcccagaaggaagataacagtaagtgtgtatttgagaagaaagatggaagataacagttaagagaaagcagaatttaaatcctcagtgcagtgcagatagcgatttcgattaaaaaaaaatctttaaaacggcgttgtttttggaatctttggggtttgacctagggcaaacatcagtgctgatataaatttaattaataaattttttatttttcttcacacccactataattccaaatagacccgttattttttaattttattttatttttagaatataaatggaaaacagaaaaactaatacctacttccctaatcctaaatcctagttttcaaatttacagacgctgcgcacgagggagag

SEQ ID NO: 87342 - DNA, 693 bp, Citrus clementina; identical to SEQ ID NO: 78527
  Intron number 1 from transcript clementine0.9_034302m (loc us clementine0.9_034302m.g) derived from phytozome v7.0 (c hr-ID scaffold_17; pos 1538983 to 1539675 reverse strand)

SEQ ID NO: 87343 - DNA, 719 bp, Citrus clementina
  Intron number 1 from transcript clementine0.9_023549m (loc us clementine0.9_023382m.g) derived from phytozome v7.0 (c hr-ID scaffold_9; pos 2072637 to 2073355 reverse strand)
gggtaagtaatcggattcctatttatttttttcttcaatcaattgtttattttcgcttgattttgatggagacggtgtgaatctgctgctttggtatttgaatagtttccggtattaattctactgaaaggttgcgttgactcgtgtgctgtgtatttacaattacaagtttgactttattttggtttcttaattgatcttactatttatagaaggatgattcaattttttaagcatttaatgaattgataatttttaacttactctttttattctttgttttgagcgagctacttattagaagttgagctaatcctttacttcattcggtttcgatactgatttttcttcatttttcagtttcttgatgtgtgggagtcgttttgaacacttgctcttgaactcttagcaagtagctggctgctaaattttctgttagttcgatgggtgctggttcttgttgtcatctagttcatccagtttcttgaacctagacaaggttgtggtcttgctgttgttgatgccttttcaaatgatttttaatgagtttgtatcatgcaatgttgtccaatatggtctcagaattttaagtttaataccatccgccacggttgaatagctttgctgctagtagagtacctactgtatctgggtatatggtttaatccgattgtaacagcgcagtggttgttttgggtgctgcactaagtccacaccaa

SEQ ID NO: 87344 - DNA, 840 bp, Citrus clementina
  Intron number 3 from transcript clementine0.9_026108m (loc us clementine0.9_026108m.g) derived from phytozome v7.0 (c hr-ID scaffold_55; pos 257556 to 258395)
ttatcactccttccattctctccgatcgtctaagggtattttactatgtgctattttttcccctatattacacgtgtattagaccgcatatttgattgtagttttgggtgattttttatttattttttaacttttgtgatatgggtatgtggatttttaagttacagtctcatatcatagaaagctattgctcggttagctattgtttggttattgaacttagaatgtaacatgtaggttatgtgttacctgatggctcagctattttaataataaatttgcataacatgtaattgtatatttctaagtaggctgtagtagggtgatcctttgagcttatttgagcaatttgacaatcattgtatatgagtattaggctccatttggtattgttgtctatttgttgtggctttcaagctacaaatctaagcgtttggcaaacatttgtattttccaccttgctttcttatgctattttcttatagtaaatgtataaatgactgcttatttgatggtagttttgagtgctctttttttttttttgttggggggaggggggggggggagcgcatatggatatgtggatgtcaaagttaccattatatgatagcatttggactacatgttaccttagcaaagtactttaagattggatttgcattacatataatggtagcctatgatattttgtttcttgggcttacttgagttatttggttatcattgtgtaattgtttaggctgtttaattttctttattctcctgttggttttatgcacaagtaatatgccctgcaccgctgaattgtcttatttggttttgtgatcttcttgcagatta

SEQ ID NO: 87345 - DNA, 967 bp, Citrus clementina
  Intron number 1 from transcript clementine0.9_021366m (loc us clementine0.9_021366m.g) derived from phytozome v7.0 (c hr-ID scaffold_6; pos 1261567 to 1262533 reverse strand)
acatgtaagtcctttacttcattatgtgtttcttgatttgacatattccgaattttaatgtgaatttctatggaattatatttcaaaattgtgtttctttgatgcattgatggggctaattaattagtaattagtgttaggtaatcaaattgtgacatttgaactgcaggttaagttttttcattagacaaatcaattaaaataattactgcaacagttaatggggaagctggacattttttcttcatagaacattaattgcattgtagtagaaatcaattaacacgccgttttgaaaggcaccggcgccgagaaaaagaagacatgcatgtgaaagcctgcgtgttttaccagacaagaacacataagatgtggtggttttgtcttgtctgtatctatctatatctatcaatgcatgcctgtaaatcccatgaaaagctcctgcaatatgataaaaaattaaaaattgacaatgctaagtcattattaaaaaagggtaatgacagctcaattaaggccatgatcccaattgcattaattctgtgcttaataattggcaccagtcacttttgccattgtgcacaatcatggtggttgtttgactgtcatattttgccaatgtcacccagcctcatgtgaaattgttaattaatttgataggcactggctaccttacaacatcaataactaacatcttgcatttttttttttttttggttgcagatgacttttttttttatttcctgatattaatttatatattacgtaatatttgagacatagggcgataaaattgttattaataagaaaaaaaaaactgtgcatatgggagatgtaacgtccatatgttgcaatcttgaggacccttacctgtcagaaagtataacttcaattgtttttctgattttctatttgtattttcaattatttaacacttttcttgtttaatttcgcagatactacaaca

SEQ ID NO: 87346 - DNA, 807 bp, Citrus clementina
  Intron number 1 from transcript clementine0.9_012068m (loc us clementine0.9_012038m.g) derived from phytozome v7.0 (c hr-ID scaffold_80; pos 354606 to 355412)
ctcacttcgagatcgaagtgaagcccgaagacaaggtaggaatcttgctgccatttattagcttaattgtcataaaaattcaaattttcgtgtcgtttctatctggataataggatactagattgttattggaacaattagggttttaatttggttgtgggcgtggtcttcttttggttctagtgatgtttctgagtgaattgattattttgttggtgttatgagagcaattggattgattgattagcatatgtatttggatttcgtgtgaatttgtgctttgaatgtgtaaatttggataatgttgggtctttgttttgttacaaagtgttatatgtattgagtttgattagtgtgatacagaatttatactgcttggcgtttacaaaatagattatactctcagagtgtaatgatcatttgaaactgtctatgaaaagtttgaattgaaacatgtgccagcagctgcttgctgtttatgcacactaataaatacggtgaatgtgaagcgtggcgtagatgtgatggtattaagccagtatgaagcagatggacaaccgtagatgtatttgatttgttcaaaatgttctataatgtttgtcggcgagaatttttaaaaagtaattcattaaattttgttttggttacttatgtccgctggacataagtgtgtttattgctactcttatttccggctttgacatctgtttggaaatggtttgtaaatcggaagtcctatcattttgatcgttcaatttctgtgcatttaatgtttgttaaactgacattttcctcctcaggtttctg

SEQ ID NO: 87347 - DNA, 578 bp, Citrus clementina
  Intron number 1 from transcript clementine0.9_024213m (loc us clementine0.9_022475m.g) derived from phytozome v7.0 (c hr-ID scaffold_9; pos 747488 to 748065)
cgccaaaatcttcatctgcgctcacaaaaacagaggtacccatctcaaatttggtagcttttttcttatttataacaaaaaaagttactttttttttttggtttggtttgacaatttggtgattttggtaggtggaatattgtttttagaatgtgaattaagtggctaattttgaattggctaattttgatttgataatagtgatagttgatatgaatgttttgcgctgtattgattgatctgggtttgtgattaacgaagtttgtctaattgctacgattgatctgggttctttctctttgcgatgaattccgttttgttttgctcatctgtgaaggtaaagtcgaaaacgacttcaagctcatcaaaaactattacaaaaacaaccacaaaagtgagagagaagaaagtgttcacattgcccggacagaaatttgatcctcccgaagaggttgtggttatggatgaataatagtttttgtctttcttctttttaaacatgaataaggtaatttagtttaccgttattcatttgctcataattttattttgacagagagagcccttgaggatattct

SEQ ID NO: 87348 - DNA, 692 bp, Citrus clementina
  Intron number 1 from transcript clementine0.9_013949m (loc us clementine0.9_013949m.g) derived from phytozome v7.0 (c hr-ID scaffold_30; pos 479749 to 480440)
cctggctggtatgttcgctcttcttttacttttctatttttttttgttttgttaaataatacattaaactccctcttggaatttaattttatcattttaattctcctttatcgtaaatttttgtaatatctcattttattttttatgttagaatatgagacagtaaaagaaagaaaaaaaacacggttaaagaataaatatgacttttatatatacaaacctattatttgagtcctctacataaattaaaattggttaatttatttattgattaaaatattacatgctaatggcatacttttttttttcacaattggaatatcatggatgaaatggggtactaaaaaatctatcataaaaaacacggttaaagaataaatatgacttttatatatacaaacctattatttgagtccactacataaattaaaattggttaatttatttattgattaaaatattacatgctaatggcatactttttttttttcacaattggaatatcatggatgaaatggggtactaaaaaatctatcataaattaaagtgatagaaataaattacaagagggattaagtacggtcactctcccttctagtttgatccgttttcattccatgaagcttctaaatgtgtgttcttatttggaaattttaggttccaattgaaagaccaaattcttgaaggagaac

SEQ ID NO: 87349 - DNA, 656 bp, Citrus clementina
  Intron number 1 from transcript clementine0.9_034110m (loc us clementine0.9_034110m.g) derived from phytozome v7.0 (c hr-ID scaffold_6; pos 1381908 to 1382563)
aaggggctagatattggagtttaaaagtaactcattatggttagtttttaactcaatatcatcaagatgagttagttcacttcattgctcactataaatgcaactcttccctcaacactcgtcttccctcattctcactgcttccttttgaaaactccccttgatccgtctcttcatttctcttcataaaaaatggatagtttctctcttcctccattttcatttatatatttccttccccaattttcataatctcccgtaattttctagcactttcttgtttgtttcagcttaaaaatatcaatctttggctctcaaaattttcttatttatttttctacataatttgtacataatccctcttctcatgtatcaattttgaaatttatcaggtccttttcaagattccaattcatgcataattatttacattaaaatctttcagtttttgaaaccgttgaaacttttgtaagtgggtgcaatttgtacatatctatccaaaaaaaaaaaaaagatagaaaagacaaaaatattcactttgaaaaaaaaaatgttgaaagacagcaacaattgtgtccacgatttcgctgagcatccttactgcgacataaatctaaaccctattgaggcaatcgacggggaaatctacggcgctg

SEQ ID NO: 87350 - DNA, 746 bp, Citrus clementina
  Intron number 3 from transcript clementine0.9_034109m (loc us clementine0.9_034109m.g) derived from phytozome v7.0 (c hr-ID scaffold_125; pos 421203 to 421948 reverse strand)
ccaagaataggagttctgaggactctttcaacactgtacgtatggattatattggagcaatcagtgtataatttgagttatagtatatagttcacttgcttcattcattttcctgaagtggttattttcagtttccaagttgtgaaaactcttattttgttatgatgctatgccatcattatggctttaaatgatctctgtttttgtttgctgcattttgtctatttcggaggtgactgcatatattccacaggagtcagaacatgttggtgtagccttggaattctttcagaattatgggaatatgtgatctttactgtgccatgaaactagactttagaaaatgtggcgtgtttgttcctctgatggacgctaacatgtgttataaaggtctctgatgctctcttatcattgcaacttcagcaataaaactgatgaatagttctaaattctagatttctttagcaacaacagaatatgattgaaatatagtaattagaaagaggtatgccttaattgctaagatcactgacgaacaaattagattgctaatggggaggaaaatataaactttatctgtttttattatttatgggagagaaaccttttgagactcagttatggctttgtatgagaaaagaatgaccagaggagatgtgtgtctgtgtgtatttgcaaccaagatgtttttgaatgtattcctaacatatataagaggcatttgtattgcagcacattaaaaggaa

SEQ ID NO: 87351 - DNA, 585 bp, Citrus clementina; identical to SEQ ID NO: 79572
  Intron number 1 from transcript clementine0.9_034109m (loc us clementine0.9_034109m.g) derived from phytozome v7.0 (c hr-ID scaffold_125; pos 422253 to 422837 reverse strand)

SEQ ID NO: 87352 - DNA, 539 bp, Citrus clementina
  Intron number 1 from transcript clementine0.9_021163m (loc us clementine0.9_021163m.g) derived from phytozome v7.0 (c hr-ID scaffold_19; pos 1079120 to 1079658 reverse strand)
tgatcgcttcagttttgaggtttgttcttttctttttctatttttttgggatttgagtaactgcgttgtttggttgatgagaaacggtgggaatgtaaatagttgattttcttggcattgatttgatgatgggttttttatcctaaaaacattaatttgcatgcatgcgcggtcggtgatcatgtgttaatttggatgaatgttcaaggttgatcattgttatctatacggaagagttttaagcttttgataccataattcatcaatttttattccagttgccgttctcaaagcatcattaagtgaagcatatttcttggtgctctagtttttggatttgttgtttgatttagtttgcatttgggtagggcaggattaatccaaaatttgaaattctctgctttatatagaatgacttgatttaatgcatttgatgtaagttatactactgataggtttcgtggcaattttgaaaattaatttatatcattatcgatcttgcagtctcaagccagacctggaaatattgatctttcctc

SEQ ID NO: 87353 - DNA, 755 bp, Citrus clementina; identical to SEQ ID NO: 77989
  Intron number 3 from transcript clementine0.9_000903m (loc us clementine0.9_000893m.g) derived from phytozome v7.0 (c hr-ID scaffold_22; pos 1509609 to 1510363 reverse strand)

SEQ ID NO: 87354 - DNA, 615 bp, Citrus clementina
  Intron number 4 from transcript clementine0.9_017642m (loc us clementine0.9_017642m.g) derived from phytozome v7.0 (c hr-ID scaffold_19; pos 2989687 to 2990301 reverse strand)
ggtgagtatctgaagctctaaaagctccagttgaatttcttagatgaagggtttctgaattatgtcctgactagcttttctttgtttgatagtgaaaggtgcttaatctttctcaagaaaaattgatgtaccttatgctcattcttttcaaaacatattctcttgtttatttcttaataaatatgaaactcagatgcctgcttgcatgtgcttattttgaactttttgccttgtattctgtttgcatagatttaacagagttcctatttatgttcatgatttttctggctttcctttcaatcagtttgtttgtacaatgcacgtctcatctcaaaaaagccttttccagaaatcttgcatgctcatctaaatgcaataatacattgttttacttacttctaacacaatactttttgctaaagtgtgctcacttgcttaagtataacttattctattttattttaggtttctttgttgctgctgcctgcctctttattattttcgttgctcatcattatgagagaaaaatgtgtaaatttcttttttactgtaattagttgcttatcaattcaagaaatcgagatctattcaatctaaccttacaatctacagagc

SEQ ID NO: 87355 - DNA, 516 bp, Citrus clementina
  Intron number 2 from transcript clementine0.9_021212m (loc us clementine0.9_021212m.g) derived from phytozome v7.0 (c hr-ID scaffold_26; pos 219422 to 219937 reverse strand)
tgaccaacacaagtaagtttgcctatatttacttacgtgtcaaaaccgcactgttctcattttgtcgcttttcacttttcctggttcagagtttgcattggcttttctcaggctgtgaaagagaggatttcaaaaactgaattttgacgatttttatattacactttttagttatttacttatccgttgtattatgttgaggttctaataggaaacagaacattttttttttaacttagtatgacattgctttgtagacgattggtttttatgtattttgacttctcagcatgaatttgcatatccaatcatttcttggattgttacttgatgattttacaagtaatccatcaaacagaattgcgtctcacttcttgacagtaaagagcatcaatttctgggcctgttttcttcttgttctcctcaatgtgcaacttatgttttaagagagttatgtgcattcatcatattcgatgaacaggggatacatctgctgcttttgagaagcacgtagct

SEQ ID NO: 87356 - DNA, 446 bp, Citrus clementina
  Intron number 1 from transcript clementine0.9_021212m (loc us clementine0.9_021212m.g) derived from phytozome v7.0 (c hr-ID scaffold_26; pos 220065 to 220510 reverse strand)
ttcagcttttgtcaccggaggtgcatctgggattggtaaaaaattgaaggcttttaattttctttttcttgcgtttaagtaccctattttgattcctatactgggttcgtgtttgtgtattgattgtgttttgtttggcacttgataggttgtgttgtgtctttggttgtttcttattgaaatttagattctttgtgtttttgggaccttctaatcattactaatccagtatacgcttatttttctcgtatacgatatatcctataagtagttagtagttactctcatcaatcggaggcttccgaagataggctaaaatgattttattcatattcaagggaagttactgaaatttgaattgttgtggtatataatttccggatgttgccaatgctggtgtatattttgcaggtagagctttgagcctagctcttgcagggaaggga

SEQ ID NO: 87357 - DNA, 271 bp, Citrus clementina; identical to SEQ ID NO: 78059
  Intron number 1 from transcript clementine0.9_001472m (loc us clementine0.9_001021m.g) derived from phytozome v7.0 (c hr-ID scaffold_34; pos 1269176 to 1269446)

SEQ ID NO: 87358 - DNA, 803 bp, Citrus clementina
  Intron number 1 from transcript clementine0.9_001802m (loc us clementine0.9_001802m.g) derived from phytozome v7.0 (c hr-ID scaffold_26; pos 528779 to 529581 reverse strand)
aatatattcttgctgctaggcatttgttattgcaggttttttttttttttttttaaattttgatgtttagcttatatacttctgtctgttgaaaataatttttggcataatgagcttcgtacggttacaatttgatattggcatgtatattgttatagtggcagcttgcaaattgtgttgaaaaaaacaatctagacttaaattgaagtggtggtggagtcataaaaatgttgtgttatggaatttgttggcgagttcatagctcagtcatgttaatatctcatttatatgctgatctttagttttaatgtagctagattttgatcaaattgtttgaaattttatgccaagtgcacacaaaatgttagccaaaatggtcataatagttggtctttgatgtgaaggatattgagggtttgtaaatgaaggatatgaaggatttgtaatagatcccactttgagtgaagaatagaatgcaaattatatgcatagaaagttatctgtagaaagctggtcttcctgatggtgcagccaagattatgtgaatagttatgaacttttgtgatagaattagaaatgtttggaacaaatattgcatggaataaaattttgcatacttttatcccatttgaagctagatatcatgggagtgttgcaaccatgatgatgaggggagacagcatgttgcaattctgaattagttttaatttatttttttactgttttagtcctttttattatttaattatttagcaatttgacattgctcacatattttcggttttccagctatcaaagagtcg

SEQ ID NO: 87359 - DNA, 473 bp, Citrus clementina
  Intron number 1 from transcript clementine0.9_035261m (loc us clementine0.9_035261m.g) derived from phytozome v7.0 (c hr-ID scaffold_17; pos 3989602 to 3990074)
tcaatagaaatcttgttcatgtctaagaaagggagggtgtaacgcctctacactatgttgctaagtgaagaaaatatgaaacgaagtgtttggcttaaaagaaaataacagagaaaataatcttctgattttccagaacttttattttcatataaagaatgattacatcacttctatttatactaactaaacaataactaattaagaatcaactccagctaatcattttttcagtacacactgtgagtaataacaaactttaactaattatgctgagctagcagtctagactattgcgttgcttaacagcttctgatagtttgacttgagttgaccgaagctttgttttctcatgctctgcataatgtgcttccttaacactgagaagggaaatgtcgatcttctatataaatttctagcagcttgcccatagtctatcctgcaggtgacaattcgaaaagaaactgttctgc

SEQ ID NO: 87360 - DNA, 913 bp, Citrus clementina
  Intron number 2 from transcript clementine0.9_018930m (loc us clementine0.9_018930m.g) derived from phytozome v7.0 (c hr-ID scaffold_6; pos 4687111 to 4688023)
ctttgttggtttttggtcccaaaggtcttgctgaggtgagtttcacacgcgcgcgcgcgcgcacacacacacatatacatatacataaatacacacatacaaaagcttacttatctctgcacgtggatcatttttgggctgaccagactgtttgttagatatgtttatgtttaccatgagttttaaggcatgaatattagaatattgatcttttgctacctatttggttaaacgcttgtgaaaagaggggagtttatattctgtagagagaaaaaggtccctatgtaattgcgatagacagtcagcaatggtctgacattggtgtgtgaatttaaagtgctctttaaagttaggagaagaaatccatacatttcatggttaaatgttcatcaggcagattgagaattttcttgaggatttctactttgaaatatatgaagtttcttggcttgtgagtaaatgtagtatctttcctaggggagttgtcagacaatataacacagctcaaatatttgatgaccaacctatccagtagtgataaggactactgccagagctaaatggtgcattagtgctggtatatgttgtttcatcttgatgtcatctactctgtattactcaagaaatctagaggtttaactatttttgtcagttgtgttgtcgttgaaatatgttaatttacgtgtgaatagcctctagtttgcgatatgccttctcatttttcattttagtgtaataagattgtcattattatggatcagttgactctgctgttgctcttttggtgcctttaggatcatcctttgattgctttcagagtttagcgttataatgtataattctatttttctaatcttaattcagttatctaaatgaaggttgctcggaatttggggaaaactctgcgagcatt

SEQ ID NO: 87361 - DNA, 704 bp, Citrus clementina
  Intron number 1 from transcript clementine0.9_003161m (loc us clementine0.9_003159m.g) derived from phytozome v7.0 (c hr-ID scaffold_32; pos 147545 to 148248)
aggcctctctaacagaggttgctgttgcacactgtgtaatatataaactcttccaaatttcacttcattttcgctctttcactctcatggtatcgtatcaaacacgttgaatcattttgatctgtgttagtctttggttgtttcagcgtgctttttattatgtattcgatgaaaatgaaagctaagtaaggaggctgtttcgtgtgtttggtgctagcgctatcggctgtaaagaaacagaaaaaaaaaagaaaaaataaaggtgtttttgttgttttcttaaaacagtgtttgcttattcagaaacagggttttgtgctcatcaatttctgggcttttgtttgattctgtgcttgaaattttaagcatttttttttttctatcgagtcgttcaactgttcgaagaaaagctcagctggtaaaaatagtaatattattatacgtatgtgcgtgtaggttcttttgttttatctgttcagaaaaatattagaatacagaaggacaatatgttgttgggtttttatcttttgctttcatattttgggttttagccggaaaaataaattgtaataatctggcattttctaggcaacgaaacagagtttgcattgctagtatttgcattcaactttgaaatactgatctagatttttttttttttttgggtacttttgcagactaaatctggctctgggtgcttagca

SEQ ID NO: 87362 - DNA, 585 bp, Citrus clementina
  Intron number 3 from transcript clementine0.9_012574m (loc us clementine0.9_012574m.g) derived from phytozome v7.0 (c hr-ID scaffold_19; pos 638805 to 639389)
tgtactggagactattgctagagttccttattttggtgagtgttgttctttctttacatttttacccttatttggtttcgacggcataattcatctggcataatccatcatttagcatttgttgtttgaaggtgattgagggcccgtttggtgtttggtatcgaggtgctgtttttttttttttagtttgggggggggggggggggggaaagggaacctttattttgaaataatagttgatagtgtgtgactgtgtgtgtgtgtatgactttcaaataataatattaacaacaataagaaaagattaatttttcatcttacaagtgtaggattaaatcaacctaactttcaaattacagaggtaggtatttacccaaatacgttagtattgttggcttttaaccaatagttgcccaacgataataccaaactggaccttaatttgatatagcatcttggtaagtggggggccctttaaatgttatttcagttttactcgcttattaaaggatttttcttctgtggtcatgccgctattagttgtgacttatggtttctactgcagcatttatttctgttctgcac

SEQ ID NO: 87363 - DNA, 553 bp, Citrus clementina
  Intron number 1 from transcript clementine0.9_019532m (loc us clementine0.9_017810m.g) derived from phytozome v7.0 (c hr-ID scaffold_32; pos 1572203 to 1572755)
ctccaactgcaaaactgaactttcactctcacttggtaaataagtattttattattattttttaatatagtaatgcactcttcttattattggtttgcattgcagcctttttatgttacattttctacttgctttgtgtttctgttgtttttcaagtctataaaatggcaaaagttatacataactatgtatcggcgtttttacttgtttcaattatagataagttgtggctgctagctgaaattatatatgttctaaggttcgaattctcctcacatcagggtggtaaacggattggtttatgaaatatgaaaataaaatgacttttttttttttatttaatggttggtgaatgtgtctatttattttcctttccctttttcttcttctaaaaaaatttgtatcttttgtttgattaagtccagaattcacagcaaaagggctatgaagttagtcatctttttccagggaaaaaatattttagttatttggtcatttttgttttttgtccatggtagaaagtggagcaaagtggacaggtacctggtggtgt

SEQ ID NO: 87364 - DNA, 948 bp, Citrus clementina
  Intron number 2 from transcript clementine0.9_005474m (loc us clementine0.9_005494m.g) derived from phytozome v7.0 (c hr-ID scaffold_54; pos 854004 to 854951)
ctttgctcagagagcttcaggtctttcctctttcctgttttctctttacttcttttctttgggtttcttcttcttctttcttttgaattttttctttttgatataatgatgtgttttttgagacagtttattattattattattattattatttttgcggcatgtatgtcaaaaaggcaaaagcattgattgttttacatttaccgtcatatcattatgggtctagcccaagtaagcctacctgtgaaatgaattaggatttcttttaggttgttaaattaaaggctctttcagaagtgatctgtagtattacgtttacccgagttttaaactttttgctcaaacttttttctttgtttctaatttttgtggttatttcttatttgtatagttgggttactataattttcttgaatttttttttataaaattctgttttactccaggcgtacctatgtggctttgttctttgttggtacacgtgttctgttatctgttttaggctttgttggtgatagtccttgctccttaggtggttgaattagcaaactgtttaattttttaaccatcattatgttgatgagttctgttgtttttaggtgggccttacagaagattagtgcataactggtagtttgattttgtgaatggtttctcccaaaatgtttaataaagtttcagttaccatttttcttataatagtcattctccactcgggtgaaaataattccacttcaatttaattagtgatttgtggtttaatggttccggaaaaatgagtgtggtctgttcagattttcatgtagtattctctactttttgtttattaaataaaatgtaattttgctgttatatcatttgattgtaagccattttattgcaaaagagcatttaatataactcatgttttaatgcctttatttatctattgtaatgagagcagcaaat

SEQ ID NO: 87365 - DNA, 454 bp, Citrus clementina
  Intron number 1 from transcript clementine0.9_013844m (loc us clementine0.9_013844m.g) derived from phytozome v7.0 (c hr-ID scaffold_6; pos 1134233 to 1134686)
tgctggacttttcgcgaagctgtctgctcaaagtattttcattcttcagttcaataattctgttactgtgctttatgagatttgtcttcttactttctttattctttttgtttcattttgaatgtttttgtttagattttatatttgaaattcttcttgttttgagaatagtttcaattttcaatattgaattggctatccctttataggtttcttggcatttttgtcttaagataatatagtattgatgaattgatagttatttgtatagattaagaagtgtatgtgtactactgagagtcaaaattcagtttcctttaggtgtcatatttttgtaaatttggtttgcttaatgctgccctatgaggcatatatctatagggaagatttcttctgagaagaataattttatcataactaggagtcagaaaaatgacctaatgaattgcaggct

SEQ ID NO: 87366 - DNA, 706 bp, Citrus clementina
  Intron number 1 from transcript clementine0.9_011739m (loc us clementine0.9_011739m.g) derived from phytozome v7.0 (c hr-ID scaffold_54; pos 1498234 to 1498939 reverse strand)
gtcgcggctcttgctcaaccttcaacttttacttggtcagttccacttcttcaattgttttgttcttatttttgaattttttaattctgcgtgtcttttatttaattacgttttactaatggcgggatttaattttcgtattttttttttgggtcctgggttttcattttaatattggtttttaagatatccgtttctgaatatattatatcatcagactgaaatttgagaaaaaaaaaatcagaaataaaagaaaattcttaacaaaaattttgtttctataaataaaagtaatggttttttttttaatgatgattatatttctgacatagtaattcaacaggctattcttttacataatttttttattttacttttatgttttatttgatttatgggaaagctgtagttactagttaacagggagcgtttaagaaactggacttcgaattgatgatgccaattacttaatttttgagataataatcaccattttgggattgcttatatgtgtttgatttaaggctcaaagatggtcttttttctcctttactgctgttttggcattttacttcctaggtgacatgacaagctaaatagttttttttttaaatgagtattaagcagcagaatttctgctaattggcaataactaatagcagaaaagattttggctaaaacttgtacagggtatcaaaggaattgt

SEQ ID NO: 87367 - DNA, 453 bp, Citrus clementina; identical to SEQ ID NO: 78159
  Intron number 1 from transcript clementine0.9_016799m (loc us clementine0.9_016799m.g) derived from phytozome v7.0 (c hr-ID scaffold_22; pos 258400 to 258852)

SEQ ID NO: 87368 - DNA, 400 bp, Citrus clementina
  Intron number 2 from transcript clementine0.9_005554m (loc us clementine0.9_005554m.g) derived from phytozome v7.0 (c hr-ID scaffold_19; pos 710863 to 711262 reverse strand)
gtcccacgtttactgttgctgtcaagggccagaaggttagtgcccatgtttttcttggcttcacaccctcattcttctcagttctcattattgaagacaatgtttttattctctgctagaagttattaatcagtgtatatcttagtatgcgaaaggtacctaatttttttgtgttccaatggattacgcactgtatggacattcttaaattctcagtgtggaaatcctatgaagctcattgcctttattggcatgctgccatctatttccttgatgtttctgtctattattgttgtgtctgcttcagtctgtggtgtaattggattatgatactgcaaatgtaactctaagtgaggtgttttgatctgaaggtcaccattaagtttcaagtacctcctgc

SEQ ID NO: 87369 - DNA, 934 bp, Citrus clementina
  Intron number 2 from transcript clementine0.9_035563m (loc us clementine0.9_035563m.g) derived from phytozome v7.0 (c hr-ID scaffold_9; pos 5712625 to 5713558 reverse strand)
tgaaaagttagatcttcagtataatagactccaaggtgcgtcttattagagtttatgttataccactcgtgtgatattttaccttaatcaatgatgctcaatattataagttagaatctcttgaataccaatgacaataatgcgtccaattttaatctaattccattacataaattcgtaaaagaattaagaattaattggcaatgtttcttttttgctcgtgtctatatcaaaagtttaaaagttagtgatacaacaagtagtagacaagaagaagtcagaaacaagcttgttatttgttagaaatctatgagattatgcagaattttgtaaattatgtcatagtagatagtctattaataaaaaatttcttaaacaggcaccattccttacgctggacatctatttcagctgcaatggcttgatctcagtgataaccaactctctggttctgtcccctctttcaaattcaagatgcctcttctacaatttcttgatttgagttccaatagactatctgctgaactccctacaaatgttttccacaatcttccttttctggaagaactttatttgtccaacaatatgtttatggcgaaataccctccgatctagcaaattgcagctatttgcgaatcttacttttgcggttcaataatttctctggaggcataccaaaggaaatcggtaacttgaccaagcttgaaaagttagatctttagtataacagaatccaaggtgcgtcttattatagtttatgttatacccacttgtgtgatattttaccttaatcaattatgctcaatatcataattcagaatatcttcaataccaatgacaataacgaatccaataattcaatatataaaagtgtacaattttctatttaaaataaaattgaattatttctttcaaaatacaggtgagataccac

SEQ ID NO: 87370 - DNA, 343 bp, Citrus clementina
  Intron number 3 from transcript clementine0.9_003880m (loc us clementine0.9_003593m.g) derived from phytozome v7.0 (c hr-ID scaffold_19; pos 760578 to 760920 reverse strand)
tacctgctttcagatcttctgtcattgagaaaattgtgagcttttctttttccttcccttcattggctgtatggaatgatattggttttgcttgctattgattaataacttaataagttgctaattttatttgagtattcactttttgtagtgatttgagtggcaacggcattcatgacacgatcccatatcaattaccaccaaatcttaccagcctgtaatgtttctaatggttactgatatatttttattttttgaatttgttttggacttgtttgatgccctgattcttctgcatcgttatgcagaaatcttgcaagcaacaactttagtgggaatcttc

SEQ ID NO: 87371 - DNA, 692 bp, Citrus clementina
  Intron number 1 from transcript clementine0.9_026290m (loc us clementine0.9_026290m.g) derived from phytozome v7.0 (c hr-ID scaffold_9; pos 2081373 to 2082064 reverse strand)
tgcttggaagtcttcccttcagcctttccaatcaggtaccaatgttttgtttttcctgctctttttgtcttccttgattgtacgcaaattattataaatcattgcacggttcattttgttagatcgaatttctatttggtaacagcggcgtgctgagttcttttgcatttcttctattctctttcgtggtagtgagaaaataaaattctacagttgtgtttggaaacttggatatcttttttgtctcgcagcttgggttttatatatatatatatatatatatatatatatatataatttgataatatttattaaatttgtaatttccacctgggttctgaacttctgatgatatctcaagtataaacgaattctcatgatttatgcattatgatgactatcagtgtgagtgtttttcaaatttttgttttagtaattgaacttgtttgtttattctataagaatttgtaactattcttttcacaagtgatgattttattggcatcttttgtaacttgttttatgctattacttgtagcgcattgtttaaatttctataggttataagaattttgtgtaaagggagtagcgatttatgttgactctgattgaaactattatgaccacttatgtgtttagatataataaatatacttttgatggctcttcttaactttcattttccagtagca

SEQ ID NO: 87372 - DNA, 565 bp, Citrus clementina; identical to SEQ ID NO: 78150
  Intron number 3 from transcript clementine0.9_018877m (loc us clementine0.9_018877m.g) derived from phytozome v7.0 (c hr-ID scaffold_48; pos 1433448 to 1434012)

SEQ ID NO: 87373 - DNA, 1003 bp, Citrus clementina; identical to SEQ ID NO: 78550
  Intron number 1 from transcript clementine0.9_019100m (loc us clementine0.9_014877m.g) derived from phytozome v7.0 (c hr-ID scaffold_6; pos 3993345 to 3994347)

SEQ ID NO: 87374 - DNA, 932 bp, Citrus clementina
  Intron number 1 from transcript clementine0.9_030370m (loc us clementine0.9_030370m.g) derived from phytozome v7.0 (c hr-ID scaffold_19; pos 2836255 to 2837186)
tcttatcatgtgtgtatttattttaaaaattatcatctaaatgatggttatattaaattcaactgcatatttcatactatcgttaattgattgtattatttttaatgtaatatgtttcaaaaaattcattaaatgagactcattttattcttgtaaatgtcactgttgttttgttttttgagttgagataattaatttatgtttcaattgatgctataattctatgaatgtactatatataacttaagaaaacataattaaaaaaagagaagaaatgaaaatatctaatggtggggtacaagggagaacttgctgttgcattcaccaagggccgatcagtcaaccacttcacattatatatatagtgtacgagaaaactttacttcacgaacttggaaaaattgtggggaagatattattttataaatttactgtagtttgctgtcgccaaatgatttctaaaatgaaaaagtcagggtctactccattaatttatttagatggataaatatgtacaaaatttgaatattttacagaagaaaagaaaaacgtcaatatgcactgtcaaataaaaaaaatatatgggcttgtttgggcaccaatttgtctttcaccagggcgggatccagtcatctgcgcaccactataatctagaacactaatattgggaaaaacagaaccaacaaaatggatttaaaaaaaaaatgaaagagaaaaacaaggagaaagaaacggactgcgactgcccttaattcacgttaaacctaaaaatttaagaaccacaaaaatcatccggaaagtagaggaagggcgagctgaatcattaagagtgatggatcgtatttcatgtttctacgtgtgttaaatgaaacaacatcatatttataatagtaaagatcgacaaggaagaaagaatgaatttaaaggtggtt

SEQ ID NO: 87375 - DNA, 965 bp, Citrus clementina
  Intron number 2 from transcript clementine0.9_003476m (loc us clementine0.9_003476m.g) derived from phytozome v7.0 (c hr-ID scaffold_59; pos 1148258 to 1149222 reverse strand)
acccgccttcgaaattcacttataaacaggttagtttggctatcatgtgtcttttatgtaaaattaattgttttttgcgacatcgttttcctttatcattgacttgggtaaaaatctctgtgggttgtctttttttgacttactgtgagaaatctctgtgggttgtctttttttgacttactgtgagacttgagaatcttcatttttaagtttctgaaaggtgagagaagattagatgggatcttttgtgtaaggggaaagaaactatgtttaggtgtctgtcttcttagctggcagggctgtttctcttttgcccatactgggggatgaggattgaggaagttgatggagtttaacaaggttttgctagtcaagtcgtgtggcttagcaatactgtcaagcagtatagttttcaatgaggtggcaaaatggattacggcaacatagagaatttatatgatgttaattttattgaagagtacatgggaggaaggcctctacttttctttgaagatgggaggaaagcctatctattttagcatgattcatggtgtgaagaatttatatttgctctatatactagcattctattactgttgttgagaaagtcaggtgaaactttagtttagtaggtggcaccgctggaacttaagatgacttttcaagcttggttgtagaataagtgaactatttatatggactcttacatgaattgcaagttaatggtcctacaaagatgtgatacatttgtgatctggataggagaaaaattttatatctttcgctgtgaaatcttctttaagttatgagggataaagtattaaatttgtatgttggactggattatttagattctgaatttgtgcaatttttgtgagaaaattctttcttttagctttccgttcaactacatgcctctctgtaatgcagttggagcaagaaattttggactttgctgaaggtct

SEQ ID NO: 87376 - DNA, 599 bp, Citrus clementina; identical to SEQ ID NO: 77838
  Intron number 2 from transcript clementine0.9_010097m (loc us clementine0.9_010097m.g) derived from phytozome v7.0 (c hr-ID scaffold_34; pos 2174475 to 2175073 reverse strand)

SEQ ID NO: 87377 - DNA, 458 bp, Citrus clementina
  Intron number 1 from transcript clementine0.9_026625m (loc us clementine0.9_026625m.g) derived from phytozome v7.0 (c hr-ID scaffold_26; pos 2104160 to 2104617)
aattaacagtaacgacttgctttcagccgcgttcggtatctctttctagaatcgaattatcatatcaaattatttgataagtaatattaaatgtctcgttattaaccattaatggtaaagaaaaaagaaaaaaggaaaaaggaaagtcttatgtttttttttttaatactgattaatcatcatattactgcattacacaaatagttacaactgctattatagcagatatattacactgatatttacaataatattaatcagcttacaaaaatatttttttgaatggaagtttctttatgcctccacaagctacaataatgttcttctctttgatctgacttcatattcacacacacacacacacactctctctctctctatatatatatatataatagaaatgccttggaacacaaaatccaggaccaggagttttattattctgtgatcaatcagtg

SEQ ID NO: 87378 - DNA, 572 bp, Citrus clementina
  Intron number 1 from transcript clementine0.9_010300m (loc us clementine0.9_010300m.g) derived from phytozome v7.0 (c hr-ID scaffold_9; pos 601248 to 601819)
ttaactgatctttttgaggaactaagacagatcaggtatgctgatttttacttgtcagtgatggttaactgtctttggattgattgactttaaccttcaatataatcattattgttattggtaggtgaaataattttagagctacaatatcttggttctatattaattagattctataatatgaatactcagctctagtggcaaatctatctgaactcgttcgacatgtttgtttgatttataagttatcagaaatgatatgagtctttccttttcatattcttctaattaatcatgtgttgtccacatgtttcaaagccatgggtcccttttttgttttgttttgtttttgtttatgtctttttctgtcttttttttttttatatatatatctttattttggcatggttcctagctaagcacactccgcttacggcacttgcttattggttttaggttctacagcaatgatatgacagatggattgttagtgtgctttcaacgcatacactagtaataaatatattttcctctgtacatcatttattttggacttgcaggcggtttggaac

SEQ ID NO: 87379 - DNA, 358 bp, Citrus clementina
  Intron number 2 from transcript clementine0.9_032960m (loc us clementine0.9_032960m.g) derived from phytozome v7.0 (c hr-ID scaffold_73; pos 326423 to 326780 reverse strand)
gaagtattgatattaaaggtaagcaagcttcatcccttctcccgtgtcccatcttttgtggatcttatttcattgagcagctggaggtactgatgttagatctagctagattcttgctagtgtaagcttcaaggctttgagtactataaaaataggtctaagaaattatcaatatatgcaattttcaatgcttctcataatcaaacacaattcaatctaattattgtgtttgttttgtcttcaaaagtaaagaattgtacaccgattggaaatcgacatcgttgctttttttttttctgtaatgctctttcttcggtaacaagtttatatcttaagagagattggattccgaaaaagt

SEQ ID NO: 87380 - DNA, 407 bp, Citrus clementina
  Intron number 1 from transcript clementine0.9_024006m (loc us clementine0.9_024006m.g) derived from phytozome v7.0 (c hr-ID scaffold_22; pos 1491656 to 1492062 reverse strand)
accagcttgctgctattcagctcggcacacaactggttatccatccactttcagcttttgttatacgtccttctttctggaatccaagcttttctgttctccgtcttcataattgaatttgaaagaactcaaccctttttctttctcccccccatttttcccgaaattgaagttagtgcttggcttctgcttttgatttagtactgtaacctagctagctatctctatttgttctgcttttccgggaacggaaagagccggggatcagattaatgttttttttttttttccaatcagtatgtatataagtggaaaattacgggtttttttttttttttcaattaaacacgttactgaaattataaaataattacacttgcaggttgaaaggaacattgacttggttt

SEQ ID NO: 87381 - DNA, 557 bp, Citrus clementina
  Intron number 1 from transcript clementine0.9_010292m (loc us clementine0.9_010292m.g) derived from phytozome v7.0 (c hr-ID scaffold_34; pos 2022099 to 2022655 reverse strand)
tactctttctttcgacgatatcgaagctaatttcggtttgtgcttttttcttttgacgttctgttgggtgctgtgaaagtgcgggaaaatgcggcaattttctttttcctttaattgatattttaatggaaagtagtggttgtattcagccgagctttcgaattgaaaaagagtttttttttccctgtttggcaatgaaataagtgttcatttttgtgaaaaaatgaaataatctctatttggttgctgggaaagtgcggaaagtatagttttctattgatattatccagggaagtagtagctttgtttacctgagctttagaattgggagaaagtgattatctttcaatgaaataaatgatctttcttgcaatgatattgaaataattatggttaactttttttttttttttaactttgttttgaatttgttgactttctgtttggtttctcagaaactgtgggaaaactgaagaaatttgaaaagtatctggtctaatggttaaatattgattatttcagctccagcgatcaggggttcgggagactgcggggta

SEQ ID NO: 87382 - DNA, 854 bp, Citrus clementina
  Intron number 2 from transcript clementine0.9_024836m (loc us clementine0.9_024816m.g) derived from phytozome v7.0 (c hr-ID scaffold_55; pos 1234716 to 1235569 reverse strand)
ctggtcaataggtatgtttcatgggagtggttttgtgctatattgtgtttgaaaatagatgttatgcttactacctcgttgaaggcgtttgccctgaagataacaatttaccaagagcacatgaatctgaaaatagcaagatactgtgaatgaaagtatttgttaatatatgttctcttgataaagctaggattaaagtgtagaaaactctcttcgatgagctcaagatgaaatctagttattcataatctatatggcagtgtaatgtctccttgccgtcaaatagaacatcgctttgagattgctgcacataattcgtaagtgctgcatgtctagcaggtttggcactctgttattatgatctagtttgatacgcgggaaagttcagtggtcatggttatagatggtctcttatatgttctctttgctttagttgaggtgctgcatatcatccattgattttgtttatctcaactaaccaagagttttgaagtccatgacccgcaaatattttgcattcaaacttttaacttggttgattttgttttcttcatcctctttttgttactgattctttctccttctccgcttatccagtggattatcagatgaataactgatccataataatttctgttgaatccttcattactttattcctttcaaatttccacattggcgggacatcctgttacgatgatacaacagagactcaacttccaattgaaaacacacacagtgtcacccaccattgtccgtatcctattaggtcaattggttctgtatccattgtggcggaagctgaagattggattttcatttccatttctgtttctgtattcaggattctggag

SEQ ID NO: 87383 - DNA, 499 bp, Citrus clementina; identical to SEQ ID NO: 86818
  Intron number 1 from transcript clementine0.9_024836m (loc us clementine0.9_024816m.g) derived from phytozome v7.0 (c hr-ID scaffold_55; pos 1235994 to 1236492 reverse strand)

SEQ ID NO: 87384 - DNA, 1030 bp, Citrus clementina
  Intron number 1 from transcript clementine0.9_024421m (loc us clementine0.9_024421m.g) derived from phytozome v7.0 (c hr-ID scaffold_6; pos 4857077 to 4858106)
ttaaggctaagattcaggtaatcttttatttgattcaagatgtcttttttgttgttaacaatggtttcttggtgtgaatatttatctgggtatgtttgttttgatggaaagacgaggtttgtttgggaaagttattgaccttttgatactaggttatgtgacaatccgttagggttaggggttgtgatagaaatagtgtttgtgatttgttttggtgattgagcatctcttattattgataacataaaaatctttgtcccatcttgaggttaaattggcactagcattttttttttaggttaattttgatgaatttcatttattgcgccctaaaaattatgttggggatgcttcaagatttgatatttcagggatatcttcatttagctattttatgagaaaggagttgattaatattttgcaattttcatgatattctccattcttgattagcatgattgttgtagaaaacaaattagttttcagttttgtggtactgacaataattggtttacaaaattgaattctagacaatttgttttaactaccatacaatagtaatcatagaagcaactccgtagtggtgatcgcatctttcggtgtagtccagggtagaagtatatatttagcctgttacggttagatttcatattcagtttatgatgtgccttatgttaggggagattataaattgggatttatgatgtgccttctatgattacaatagtaatcatagaagcaactccgtagtggtgatcgcatctttcggtgtagtccagggtagaagtatatatttagtctgttacggttagatttcatattcagtttatgatgtgccttatgttaggggagattataaattgggatttgactagaaagaataatgaaaaaaaactctggaaataagtccaaattctgatttcattatgcacgggctctgattttttgagttaatctattcatgtttaatcaacacttgaatatgtcttttacaggacaaggaaggcattcctccggatcagcagagatt

SEQ ID NO: 87385 - DNA, 696 bp, Citrus clementina; identical to SEQ ID NO: 82337
  Intron number 1 from transcript clementine0.9_025646m (loc us clementine0.9_025646m.g) derived from phytozome v7.0 (c hr-ID scaffold_26; pos 1224148 to 1224843)

SEQ ID NO: 87386 - DNA, 778 bp, Citrus clementina
  Intron number 5 from transcript clementine0.9_013303m (loc us clementine0.9_013303m.g) derived from phytozome v7.0 (c hr-ID scaffold_6; pos 2104685 to 2105462 reverse strand)
tctttcccctttgcagggagttgcaagcactggtaagtattgtaaacttttcttgctaactttttatttttatatttggggaatgttcttttcttttcatcccaccaccttttcaagtattttataaattagttttaggtttttctactttcacctttatatggtggataattaagtgaattgcatttgcttggctgcagataacagtctattattgggaattgatgttcctgcgtagaccaaatcagtttatagaatctgattttattctcttatctttttgcgatccttgtacttattagaagtattcaatgcagtgtaggtgcatttaattgtttcatagtatttttgctgagggataaatggttggagttctgtataatgaatgtcaatgcccagcacaaaccagccattactgtatctgaaagtagtttgtactggtcaggcaaagaagctagtagttcagcaaatctactgtgtagtttgatctacaagttgccactagttctcctaatcatttttaccaccactaattttatcattctgtatcatatatgtcatcactaattttcttgcagtatttagtcctaagtatttttatgttgatttctgcactttttgaatttcgctcattttctttctcattatgcctgggctaagttgtgataagaaagttacataatgtctaatatgcttttttattggttcatctctctaattctcttaattacttttatcctcagtatttggagtcccaattgaggttactgtacaacga

SEQ ID NO: 87387 - DNA, 511 bp, Citrus clementina
  Intron number 1 from transcript clementine0.9_013303m (loc us clementine0.9_013303m.g) derived from phytozome v7.0 (c hr-ID scaffold_6; pos 2106338 to 2106848 reverse strand)
cgatttctcttcagctaatacaacatacgacgaaggtaaatactaataattgaattttattcattttttccaatcactgactctgctgatttttaaataccgagtgttttttctttttctttttgaattaatttgttgttgttttatcttttattcttgttgatttttcagtttatttgatgctccaaattatttattgctgatcgtatgccattttttattttaatttattttacttatttattttttatttggttgtgcttaaattgagttagaaattgtgtttgattaaatttgatgacgtgttcattttgtgtgtttgattgcttaaaaaataaaatgatcaagtgctaccgaattaactgaagccttgtaacaattttatattatcagtagagttatcgagtttggaagcctacttatggtggcttttgaagaatattattctgtgtactttcattgactcgtttcttgtatttgaagcttggttttggtgtttgttgtcggatca

SEQ ID NO: 87388 - DNA, 1011 bp, Citrus clementina
  Intron number 1 from transcript clementine0.9_025409m (loc us clementine0.9_025409m.g) derived from phytozome v7.0 (c hr-ID scaffold_6; pos 6552651 to 6553661)
cggagctacgcaggaccgcccggcccgattccctcgtatgtctttcttatttatttctgttttgattccatccgatgcatgatacttgttcaatataatcaaataaaaaaagctaatgaaccctcaacgctcaaacaaagttcttttttttttttaagcaaaagatcgaatttttatgctcttatgagggagactgttgaataatgtttaacctttcagtttaacttgcgtcttaaaataataggtatcatttagttggattactcttgtttgctgattggataatttgtacttttttttttctattgcacatgccgccgaattccaagtaatttgtgggttagtaatttggacacaataaccattgagttatctctcatttcgctgcactctataattttcttttgaaaaaaaaataattcatagctagggtaaaatagatttacttgttggttttccgtctagagtactacaaagtacaaattgcatctattgttgatgttatttcactttgttaatggatcatcaagctttttacttgcaatcatttatgtatcccatttataatggtcggactcgtcagtttttttttttttttttccccctcaatcactgaatgtcttgctgaaataaaaccggaatataattgtaaggtagatctctcctccaaagttcttaacccctgtgtacccatgtggctaaaaaatgtacttaacaaactcaacctccgatgtgagctacttttgcttgagcatctgcatccacttttcatattggttttggaaaggaaatggataagtgccaccatcttgatcatatcactcaaaactatgttcaagtaaattgcctgatttagcactcttctaattctaaaagcacgcacattatgttcacatgtccttgtgcatgctgttggagtacaaaaggtctggaattctgaattcaatcttggctttcatgatcagttagcaactgtggcaacagaatttattttctgaacttgtgaatcag

SEQ ID NO: 87389 - DNA, 389 bp, Citrus clementina
  Intron number 1 from transcript clementine0.9_030037m (loc us clementine0.9_030037m.g) derived from phytozome v7.0 (c hr-ID scaffold_19; pos 2286640 to 2287028)
tggtaagtgaatcgcccaatttctctgcattttgaaaattttaataatttatatcatgttgctttttgtaattaagataaataaagaataaaaaaagttattcaacactcggtgcaaaaaaactgctaatgcaccgatgctgatattttatggttaagatttactttattttggtatttttatttatcaaccactaatcacatgattgtgtttactcaaataaaagatcaaataaaaaaaaaagtctcaaaatttgaaatttagaattgaagacgtcattgcattgtggaattcttattacatttattgattactatttactaaacatttgtctttttttatatatggatatagcttgttgctgggcattttcagctgtggcagccgta

SEQ ID NO: 87390 - DNA, 963 bp, Citrus clementina
  Intron number 4 from transcript clementine0.9_019063m (loc us clementine0.9_013476m.g) derived from phytozome v7.0 (c hr-ID scaffold_125; pos 302181 to 303143 reverse strand)
ctgcaggttggtgatctatacttatatctgcaaatcctcagttactgatatttcttgcattgtagttgtgttacattacttgtgactacttgtttctgtctgatttggattaggcacttttgtcaagttattcctctttaacttttagccattgtcctgctcttgtgcttccatttactggctatagggacacattaggtgatgagatgtagctagttttcttttcctccctttggtgatttgatagttcaaaacttttaatcaattagaatacttgtaatccttatcatttggaaatgacagattatcatttttctttttcctttggttattcgagagcacaaaactttcaatttattattagaacgctactattctgtcattggacaagaaagattattatatcacttattttagatgtttattaaacttgaatggtctgggtactgtatgtgctttaatgctgccacagttaattttttactgggtgccttgtatttaatctttgagtatgcaattaagtctcgcgaggagtctgttcaattaggctgttttagaacttaaagaacttaaattatcttattatatcttacggagttattttcgtagaacttgtgatgttggaggtaaagaatctttctcaggattctttgttgtacgatatatatacatcttctacaattgtttagtgatggttcaattttccattggtaacatgtattgagttccgtgcatttaagtgcagccatcacaagcttcctttgattttatttttgatcatgcctacaaattggcctcaatcagttacaaatataggccacatggaattacttaaaagagagaacttttgcaattggagattgggatgtttgatggcgtgttatgtggttaatccattcctgcatggtaactgatcattgatctttttcaccatcttgcagtttgcaagaagcgcagaagagg

SEQ ID NO: 87391 - DNA, 398 bp, Citrus clementina
  Intron number 2 from transcript clementine0.9_007034m (loc us clementine0.9_007034m.g) derived from phytozome v7.0 (c hr-ID scaffold_55; pos 1263147 to 1263544 reverse strand)
cttccactcgaggctttctcacctcatttcctgaggtttgtgcttcttcttcttgtttttggaaatagctttcttgtttcttaaaacagaaacaattttgaacggatgatacttttactttccaaagttttgaaatacaaccttcaaacactcgaatgagtaacggtataaatgcgtttctctctttttgtattttaagattttatcctctaaatccgtgacgtattaattaaacaaagtaatctctaatctcctcactagtgttaggacctatcttaaaaaccaagctaatatttgatacttaactaaaatataataaactataagggattaattgatattatcctcttttcaacgtttcaggttttcattaacggcgggatattacttggctacgt

SEQ ID NO: 87392 - DNA, 1058 bp, Citrus clementina
  Intron number 1 from transcript clementine0.9_014075m (loc us clementine0.9_014082m.g) derived from phytozome v7.0 (c hr-ID scaffold_6; pos 4616194 to 4617251 reverse strand)
aaaaaaattgtcttcgtttaagcttcggcggtaaggtaatcaaaattctgtaattctcttatgaccaaaaatatgttatttttattatggattatgaacttaattaatgaaaatgttaaatgtatttttttatcaaaatgatgtttggcttgttagttagcttagttcaactatataggaaaggaaattgcaaaattgtaaacttcttttatttttttagcatctatttgattacttgttcttaaaatttatctgcatcccagcttaattttattttttaacgaacttgatactatagtatagcattagcttattgctgcaccggaataatctataataacttaatgatgttatcaaattggaaaacaaatttctcttgatatagctgaatgaattttggcttgcattttatgggttttgaaaatggtagactgtcattgtttcattctagcgatgtctaaagtggaatttttggccgggaaaagagtggaatttatgctacggagaatgattcatggagaattttttggatacgaagtggcatatgatagtctcatttgaactctgcagcaacaagcactattttgaatggtatttgaaaaaaattgaagtctcaaaataagtctttggaagtttttctgacaggacaagcatcgagagcccctcctcttgtccaatttctctttgtttcttcggaaggtttggtcgcacctttaatgggaaaacggtttggatttcacatattaatgaaacaggggcccacaaaaatatagctcctaaaaagcaacattaattcttctattaagttttcgtgtatatatgttcattatcggtagaactcggatcattcctagatgctttctgtggagtagatgtcttggctttgtacaaataactcctgcatgctataataccaaattttcatttttagtctaaatagaatttggttttagttaaaacactagcattttcttttgaaatgtaatttcaattgtaacatttcatgttgtactgtttatagagtgacaactgaaaagactgaggaagttttcctgaca

SEQ ID NO: 87393 - DNA, 819 bp, Citrus clementina
  Intron number 1 from transcript clementine0.9_008269m (loc us clementine0.9_008269m.g) derived from phytozome v7.0 (c hr-ID scaffold_19; pos 3039985 to 3040803 reverse strand)
ttccgttcccccaaaacctcaccaaaacctctcttgtaagcttctcagattgtctctcaatatttcttatgatctcgttttttattgaatcacttctttgcgtgctgcatttttgagtctcgtatttgggtattatcttatccggaatgctgttataattgatggaacaagcaatcgattttcggtttgacggaatttgatttatttatttattagtatttctatttgaaattatgtacgtttcatttttttttctttttttttttgttatgtacgattgcgtctcattcgatatttatcatcctctaggtaactatgtgattgtagctggggattttaagtttagtgaatattcaagttaccgtcaaaatactagtgaaattgggagctttgttcataagcttgcgattttgaaaagttccccagttcaactgatgaaggttcctttttgggattcgtccttttctaggctgcaatttggatacgtacatgatggacaatcttttgtgggtttagcatatcttctctgattttgtcttttattccccaattgtacaattacacaccatgtatgttgggtgattgtagagaaaatttctgttagaaccaaggctttgtgagggaatttctgcgctataagttagtggcttctgttttattggaattaattgggtagattacgtgttacagtgattcaatttttgatccacactttgcttcaattttctcttttccacaatttttatgtcaaatctaaatccagaagcgtgtactaatttttttttttttttttgtagtaatctgtgaagtttatttgga

SEQ ID NO: 87394 - DNA, 342 bp, Citrus clementina
  Intron number 3 from transcript clementine0.9_003975m (loc us clementine0.9_003975m.g) derived from phytozome v7.0 (c hr-ID scaffold_9; pos 1083712 to 1084053 reverse strand)
ctgtgatttttacttttgggtcttatcgcttgggggtaagtttgattctttatttgctctttattattgttgaggatttttcttttcttttgtttttatcatcctctcttagtattaatgcactgtctacagctggatttttaaatttcaccattggtggcatatgaactttgctttatggatactaccagaaagtagaaactgatatttctatatgcttagcaatttagaagcatggtaatgaagagataatggcctaaatgtaatgcccatattgtagtaacattgtctttcttcagtgaattattatctagacatttactgacacactttgacaggcac

SEQ ID NO: 87395 - DNA, 727 bp, Citrus clementina
  Intron number 1 from transcript clementine0.9_000909m (loc us clementine0.9_000772m.g) derived from phytozome v7.0 (c hr-ID scaffold_6; pos 2547672 to 2548398 reverse strand)
acgaggaccatccagagattacagtcactcgacaggttggttgtgtatatggtgactccttgcaaaattatacttactaaagtttttattgtttcaaatatccatttgtgatatatccaaaaaaaagaaatccatttttgatgtttcataaattgtttctctggcatttctgttccataaattatagttttttattttttattttctgagaacagaagctatttgattaggtgacatgaaagtgtagtcatttcattaaagaagtttgaatcacaccaattactaccttcaaagtatatgagtgtttttgtcaaaatgtttgaatttgttgacataaatgtatgacgtggctttgctttattggtagattattagtttggagtttgagcatatgttgtggtgtttgcaaagagtagaataagattggacttcatatgttaccagtatttcatcattaacttaattttttttgttgctattccggggtagatattttagcccatgccattacactaactagttttgttgtgcttgggtgtcacatggaatcattgtgttatatcctgagaaaaaacgtgggagctgtatcatttttgcactgttataaagccatgaatgagaaattgcagttgccatggtgcttcagtgaagatttttctatttatgttgagatgtatcttcttactctgcagattgtggttggtggaaggaacaaatatctgatcaa

SEQ ID NO: 87396 - DNA, 504 bp, Citrus clementina
  Intron number 2 from transcript clementine0.9_013826m (loc us clementine0.9_010166m.g) derived from phytozome v7.0 (c hr-ID scaffold_2; pos 1277395 to 1277898 reverse strand)
ttgcaggcaaattgctttctacactggcccaacaggtaattacgcctgaatttttttagcccttaattttttattttttatttttggttaaaaaaattttcgagttaatattattaaacataaatgaaaatgacactcacaaaataagtcttcttcgtgaagacgacaaaacctagaaattacgacaaaacctagaaatttgttttctttactagttggcaataaagatgccgaaacgatgcccgtgagtctgaacctaatttacgaagataatgtaaaatttaaaaagaaaaatctagatatcatgattatcatctgacagtggcaacgtttctttcaccttcttcaatgagtttggtttaatatcgctatccgatagttgcctgattgacaagcaattttgtcttatatacttttactgttaatcaataattaaaatgaaattaaccgttactattttgatactttatttggtcttacagtggggggattattgaacgcgac

SEQ ID NO: 87397 - DNA, 600 bp, Citrus clementina
  Intron number 3 from transcript clementine0.9_030046m (loc us clementine0.9_030046m.g) derived from phytozome v7.0 (c hr-ID scaffold_17; pos 3075559 to 3076158 reverse strand)
aggggctcgaggtatgtaattgctgattcttatatcctgataaggactcttccaaacttttatacttttgtgcaatttgttggatcattttatatacggattgtccttgctatatagaagatgctttttatagagaaaaatatttttccagttgatatactgtaatgtgtttataattattctacatagtattactggtgagttcttttgagttcacattttatttcttttctttgactatgtgaaatcagatatttatgttttcataacgatggagattcatggtgttggccttgattgggtaagagtgaaggctatgagctattatgtatcctacatgctacaaatgattttagctattatgaaattttttgtttatatgtttggcttatttctctttctttctttcgttctttctttctttctctctctcactagtcacataactgtacaactctgtttgagttaaaaatttctccttaacaactagtagtttcttgtggaatataccatatatcgtcgattgtcagagctggtcatctaacaatggtcattactttggaaggtttgggattgtttgccacaacacctatttactga

SEQ ID NO: 87398 - DNA, 858 bp, Citrus clementina
  Intron number 2 from transcript clementine0.9_009564m (loc us clementine0.9_009564m.g) derived from phytozome v7.0 (c hr-ID scaffold_26; pos 1980182 to 1981039)
cgttgccgcgcctcaagaagagaaaattggtacctttttatttctttttttttttttttcatttctggatacaacttggaaattttgctgtgttttaaactccaaatttttagcagtttgaattccattttgatttctataggtaattggctttttgttgttaagtaataagtatgtatacgaggatcggtagtgcttcaattttatttttgggacctttacatttcagcataatattttatagaattattggttgtgtcttaacatgacattgaatcctgattgaccaagaggtcctatgttcatattgcttgacatgtctacaattttgtgtctgcttaagattatgtgcagtctaaaactggtttattggtacatatgatttgataaatatgaataaaagaatttgttcgaagatcaacagcaatggtgttgactagacttggcttcataacattgagatggaccgaatttcatttcattgatgcatgtacctaccaaatatttcattgaaacatgtgttaagagttacgataacctctgtgtatctttttaacttctcggtccattttcccaaagcatggttctttatttataattttcttctggaaaaaaaaataaataaaacactagttactggattaattttaccacatgatggtgttaaacggtcttaataggaaacataagaaaaataacccttgcaaagggatatgagaatgagttaggctaacacgttatttgctgatttatttttagtgtaagcacttgttgatggtttttcttctgttattacatttagatcactaagatatttcccggtttgttttgaagcatacaagacaaaggtctctcgta

SEQ ID NO: 87399 - DNA, 629 bp, Citrus clementina
  Intron number 1 from transcript clementine0.9_010789m (loc us clementine0.9_010123m.g) derived from phytozome v7.0 (c hr-ID scaffold_34; pos 1543113 to 1543741)
agctggttctttgccaaggctttatcgagggtttggtgatttcagagactcttcttcttcttcatcagctggtgcaataataactcgtaattttttttttaaatcaaattaacatcatttatcttcttcattttttaattaaaaattcaccattaaattcattcttctgactacaaatttattaaagtataatcaacaaacaacaaattttctcaaaaatttttaaaaattctggattgtctccatgcttgttattcttcgtcatctaattttcttgatgaactattcctcaaaatatctttttttaaaatatcttctttttttttcttggccctttcaaatacgactaaaaattaacatatgctatctaatattgcatgtatttcatttaagtcatcctcctcatattttcatttttctttttcgttaaaaactttgagttatttgtaatatttataggataattatgaatagtgaataattaattctttattactcttttttttttttaattattgttgcttggcttcaaagcaataataatttcatacaacttcatctaaagaactcttctcatcatgttaaatgtaacagaagagccaacgagcagtattgcagcgccggcaacg

SEQ ID NO: 87400 - DNA, 837 bp, Citrus clementina
  Intron number 2 from transcript clementine0.9_010862m (loc us clementine0.9_010894m.g) derived from phytozome v7.0 (c hr-ID scaffold_32; pos 2093315 to 2094151 reverse strand)
ctttgtgaaaacggacaaagactttcaagaaaaaggtgggggtagctcctttctataattttcactgtcactacatatgttgtgattgtgcaacctatactttaggagaactctggtgattggttaaagtagaatggccaacttgatgttggatagagggattattcaccagaaaacacatgcacgcatgcggacttatacatccaagtgcaaacactcttgcgcattcattccagtattcatatccttatgtgcttgtacagtcatacacattgccaaattctcatagatagcctatgtcatatgactcttggtcaagtacatatcttcacactcatgtatttgagtcaatataaaagcaatggtcactgcaataccttttagttgcttgcttcaacaactgtatttgtgccatatgttttgagccttacacatgaggcattcatgtcgaaccaaacttgatgcagatataatcaagttaggattagttcattaggtcaacatataaaccaatcctgattattaaggattatgattttgtgtgtactagtttttggtgatattatgttagacagacaaatttgaaaatactttctatcattggaaaatatgaggctggtgcttgtgcattttccacatgatctgtttgtgtagatattggtgtctggatatatgtactgggacattgcattgggcaatttattacattttgtttgtcatcaatggaaaataccttctttctgggttatgttttgctaggcacatgggtaatatttacattttcttttgattgccatttcagctcgtacatcaggaacaacagtcaccttggtgata

SEQ ID NO: 87401 - DNA, 594 bp, Citrus clementina
  Intron number 1 from transcript clementine0.9_011688m (loc us clementine0.9_009409m.g) derived from phytozome v7.0 (c hr-ID scaffold_19; pos 904955 to 905548 reverse strand)
cttgtttttgagacaaaaaagaaaaccccatctctgtaagtgttctctcggtcttataactcaatttaacatatctgtcaatgaattgagcgtctcagcctctcaatggcgtttcttgtgcttaatttttttttcgttgtcagttaataatgatcttagtcagtggctagcagaaacatctttttctcaatgagtttatggtgtttttcttaaattttctaaaaaaatagtgatttttaaggatcttccctttgatttatattgctgattttgtttataatgtcaccagttgtttttattcatatgaatctgggtttattcactctcattggaaattttccgcttgacatctacacaaagctgcaggctgcagcctcggtgtgttatgttgatatgctatttcctttgagttgattcattcttcttgttaatatttgaaagaggaatgtattgtacgcttaatgcaaattatgttttgttcttttgttaagcttttggatagttaaacaacattcagcaatcgtatctgaagtttatttgtcatcattcaaagattcatttagttcttttgatcagatatttatatcgaataaa

SEQ ID NO: 87402 - DNA, 356 bp, Citrus clementina
  Intron number 1 from transcript clementine0.9_004005m (loc us clementine0.9_004002m.g) derived from phytozome v7.0 (c hr-ID scaffold_2; pos 3257665 to 3258020 reverse strand)
tcgcccgattccatcgcgccggagagtcggagacagtgagttgttgtcttcattttctttattttttatttgtttgatagcataatataacgctttttcgtcttcactgtccgtagacaaattttgaagttttccaatttccaagttcaagttggtggctttcacaagttctgtttatgttgtaaaacttataataaagttttgaatttataattcattgagaattagagattttcaacaccattgtacttcactgtaattggtgcctttcaaagatttctttcttattttattggaaataattgatttttaaatttgaagataattccagcaactaattaagcaagatcgttggg

SEQ ID NO: 87403 - DNA, 711 bp, Citrus clementina
  Intron number 1 from transcript clementine0.9_035814m (loc us clementine0.9_035814m.g) derived from phytozome v7.0 (c hr-ID scaffold_36; pos 827760 to 828470 reverse strand)
aaaaagttttgaaagttctcagaataagttacgatggacttgatagaagagataaagagatattcttagatattgcatgattcttcaaggcgaaggacaaagatcgagtcaggaaaaaactagacagttgcggttttaactcagatattgggataagagaactcctagacaaatccttgataactattgtaaataacaaactgtggatgcatgatttgctacaagaaatgggttgggaaattgttcgagagcaccatagggaaaagcctggcaaatggagtagattatggctttataaggatgtgtatcatgttttatcaaaaaatatggtaagatatttgtcagggaacataattccatacattattgtcttactaaaagtgaaaactatagttcaagataacttctctctgttttgatcattgattttcaccttttaattttatttctgtttcctttatttattagggaacagatgcatttgaagctataattgttgatgtgcctgagatcacgcaattggaagctaaatcattttcaaccatgagcaatctaaggttacttgaaatcaacaatgtttatccttcgggcaatcttgaatacctctcaaataatttgcggtatctcaaatggcatggatatccgtttaattcttagcctgtgagtttccggccagagactttttaagttgaacctgtgtaatagtcgcat

SEQ ID NO: 87404 - DNA, 969 bp, Citrus clementina
  Intron number 1 from transcript clementine0.9_007637m (loc us clementine0.9_007637m.g) derived from phytozome v7.0 (c hr-ID scaffold_62; pos 249620 to 250588)
acgtctctaaagagctaaacgctagacacaggaaggtaaccgatcattttcccttacctcatttaccctcacgctttcataaaatttcaatttcgccctattagttttgtagattcatttcttgtcatatctgaataaggtttgctttgatcttcatcgatccgtgtcatgatttcgcgtttttcatctaatttcatagagagagctcaaaatgcttatgtttgattttcaaattgtagctgtaaattatccctatcgatttgtgtacataataaacatttccgttgagttagtttatatggtgtttggttaattttcttttttgctatccgtgattcgatctaattttgcaataaagatgtataatttgagctaatgagtaatagtctgcgctaaaacatgatcaagagctggattaattgatagttggataagtattttgaattaagtaagattcaatgcctttgaaattcttttagagcttaagaacttttaccttaaaagaggtttctattagcacgatttgattcatgatacatctctgatgtggacatttgcattttggtaaaatctggatcaacaactccctgtaaaggactttcatccatatgaaaatctgggggcaatgtttcttgtagatagttgtatatagtttgatggcttctgcattgattaatgttcataattgctgacttatatgcacttacttatttacaatgttggatgagagagtttcacataggtgttttcctgtgatcttgtcgagagtttagcataggtgtttgcctgtgatcttttcaatttctgtacatgctagattttaatggctttaagttttgagtttcataggcaaagattttgaattttgttaatcctcccctgctttatttttgttccatcagtctgctatatgaatttttatgtctttatgcagattctggaagggcttcttaagttgccagagaatag

SEQ ID NO: 87405 - DNA, 991 bp, Citrus clementina
  Intron number 1 from transcript clementine0.9_005424m (loc us clementine0.9_005424m.g) derived from phytozome v7.0 (c hr-ID scaffold_48; pos 439435 to 440425)
ttctgctttaccaactttttgtcgtctgattatcagtgagtcttcttattctttttcttcactttttgtgtttgatttgttgtgtatttttttggtgcacgaattgatagtgttagtgcaaatctactcaagcatgtattttgctttctgggtttgattcttcttggagcttgttgttctgggtagttgttaatttgcatttttttttatataaatttttttaccgtgcttcctgagttcttgttatctgtttatttactcgattggttcttttgatactctgtttcaataaatggaagccactttgtttaatcttgaatatcttggagatagattctcaatttaaccaaaaaaaaaaaaaaatcatttacagatatgtaactttacctttcagcatcaggtgggagtaagtttcagcttcttttaaaaaacaaaattattttttccccttccttcaacctcttttagagtgaagtataaaattttgcttatttttgtgttgtttgttaaagtttgtttgtatagtgttttcctattaagtgccagacgtaggttaagtttctctggagttagttgtttaacatgttatcaaagcatataggactcaaggtcttgcttactgaaaatctctcattgtttctgttaaattatgatctaataaaatgaacatccacgtgtgtctgtcttcatgtccagatccttctcatgacttttgtcaactaaaatttggccttgtatgtaaagcagaaagctagaatctttccaacagattttgacatataagtttgaggaagacacttatgttcacttctttatcatttctcgttttcttctgttttagcttttggcctttttgcaatcattcttgtgctttttgcttttgtctttcttgcattgctattgcattttctgaatccctttttttttcatttttaattgtgtaatatttcctaatttgtttttttggtctatctcttaggtagtctgctag

SEQ ID NO: 87406 - DNA, 575 bp, Citrus clementina
  Intron number 1 from transcript clementine0.9_014262m (loc us clementine0.9_014262m.g) derived from phytozome v7.0 (c hr-ID scaffold_6; pos 6465908 to 6466482 reverse strand)
tccggctcccaggcgaagctctaagcgacccaagtgtatattttctcttccagctgcttcttcttcttttttctgggttttatttttggcggtttttagagtagtttacgagtacccagttatgattttgagcttattgtttgttggggttgacttatttcctcttctcagatttgtgattttatgccttgacttattttatttggccttgttattgagttctttgcttgatccctttagttgaagtcggtaccttgcatctggtacttgatttggaaaaattttattgcttaaatcatgggtttattagatacacttgcttatgacataaatctgcaatcatgttaatctcagacttataagaagaatcaaggacaagccaaagggttgttctgtcccggggttttggagaatcaaggattttttgaacatctaattagaagtttttccgttgtttttcttgttttgtcctccgaatattttcctcatgataccagtcaactaaaattattactttatgattctttttttccctttcagattccaagtttactcaacaggagcttccggcttgc

SEQ ID NO: 87407 - DNA, 390 bp, Citrus clementina
  Intron number 1 from transcript clementine0.9_004542m (loc us clementine0.9_004542m.g) derived from phytozome v7.0 (c hr-ID scaffold_9; pos 739198 to 739587)
accaacaacaagaaggcccttcacgttatttcttggtaaattttcaatagcatttagagttggttgttggtttctgaattgcatgtctgtttgattttaattcattctgctggaaatttgattactgcagtgcttgtttcatgatcacatgagatcttgcttctataaatttgcatgctattgatggttgaagatcctgcttttggcttttttttctttttctttttttgttgtttatgtttcttgtttgtttgagtgttgttaatcaatgcagttgcatgtgaaactttgagcataaataatgagttatgcttttatttaaaattggattcataacaccaagtgactagaaggcatttttggctgaaattggattttggctgtgcagtg

SEQ ID NO: 87408 - DNA, 444 bp, Citrus clementina
  Intron number 1 from transcript clementine0.9_030929m (loc us clementine0.9_030929m.g) derived from phytozome v7.0 (c hr-ID scaffold_55; pos 1238503 to 1238946)
caccaccagtcgcaagccacaacagtacaaaaaatgtgcaacagaaacaacctgcaagaatttgaatagccgttttcaaatttaaagaactctaatccaaccccaattccttgtattttacccacactcacacacatattctttcattctgttttctctcaaatctctatcaccaaatcttgcatgcccccctaagctatcactctctccatcatcatctccttttctcccaacccaatatcaaaaaatataattaaaaaaaaacaaacaaacctaatttctttgtcaccatgaacaaccaacaagaagacttcaaccaagaaatcactagaaaaagaaaaagcaccaccaccgccaccaccaacaatagctcaaaaagaatcaataataataataataataacaatcaaaacatcaacctcgaccactacgatcaagaagaca

SEQ ID NO: 87409 - DNA, 557 bp, Citrus clementina
  Intron number 1 from transcript clementine0.9_009161m (loc us clementine0.9_009161m.g) derived from phytozome v7.0 (c hr-ID scaffold_19; pos 419213 to 419769)
ttctcccactttcccatctgggttctctctctttggtaatttttctcttcaaaatctttgcctttttgtgtttcttcatcaaaaacttgatctttgtcctttttttttaatattctttgataccagttttattaactttttccttttttttttttgctttgtttttaggaatcctgggttctgggttgattgatatttgatcggtgaacggttcgatgttattggattgaatccaggattgcccttttgttcttttatatcgatattaatatccaagttttgccttttttttgtttacaaggtactctctttgttttatccgcattatgagtttttgtattggatgatcgcttttttaccactgtattcagttttatgttgtttgaaatgcaaggcaagtctatactgaattgtattacttagatccagtgcatagcttgatttctagataataagacttgatttttctttttgtatgataagacgatcatgtggaggtttgcgacatgcctttctgattggtgggatgtttgtatttgtatatgtgattttgtaga

SEQ ID NO: 87410 - DNA, 1023 bp, Citrus clementina
  Intron number 2 from transcript clementine0.9_009161m (loc us clementine0.9_009161m.g) derived from phytozome v7.0 (c hr-ID scaffold_19; pos 419984 to 421006)
gtagaactgtaagtttaaacatttaaatactcttaacatcttttaattcagaccaatagtattgcatttcttctggttctgtgatagttttttttccccttctttttcttaaagaatgaatttgatgtaattctgtttagtgttatgagggtcttttactatatatagtaatgtttgattggtaacatgtcaattttgagtaagaacaacacaattaagatgcaaggtatttctgaaaagaaatatggcatgtgaatagtcctgaacattgacaatttcaaagtgcttttttttccaaattaatcactgataggagattcttctgtcaatcttggaatgactgtaattaaacaattagaacaacagatcctccttcatatagcatgggtctgtgcgtcggagtactctcattataaattttctgttggctatgtggagttttagttaatgacttatgcaatgatgaaaaaggaaaagtcatggacacgaatcaaaaggaaccataggtcagaaactattgtagtcaaggtagaatcttctgtgcacttaatgctttgatactttgattatgataggctggcaaaagattatcttgagcacgttgtcatttatcaaggttcaccgagcagtatgttgagctgctgatcagtcttttgagacttacatcaattagactaggcatgtgtaataaaaaattttaaaaagaaattctaaaagaacaatataattttttttttctttttgtttagaaaaaacatttctatccctccccaatagcctaatcatatcttattgcagctccagcatccaaagaaattagaatgacttaatttcaggaatgtaggagcagatgtctgtatgttttgtgttgagcattatttttgagcaccaatcttgtactgtacaaattaaaacatagaactttgagtgatggatatctggatatgaagttgtattctagttcattttttcattttctagcttgtggtcattaggttgaggcaaagaaagctgttcctaggg

SEQ ID NO: 87411 - DNA, 287 bp, Citrus clementina
  Intron number 1 from transcript clementine0.9_018241m (loc us clementine0.9_018241m.g) derived from phytozome v7.0 (c hr-ID scaffold_6; pos 6671936 to 6672222 reverse strand)
gatttgaggatattgctcaagttgttcataacaaggtaggtaaagattttgattcacctttcttctccaagttgggtttgaggatattgttctagtagtttcaatgtattcttttttttactcttcaatggacatgcaatttcttttttttcttttttctttttttttggttttttctcttctgggtatgtggagtatagccatgacattgtgtattatgtattattattcaatcaaaaaaaaaaatcgaaggtgttgatagcagcaggggtgtcagcggcaatagg

SEQ ID NO: 87412 - DNA, 360 bp, Citrus clementina
  Intron number 2 from transcript clementine0.9_015281m (loc us clementine0.9_015281m.g) derived from phytozome v7.0 (c hr-ID scaffold_54; pos 741411 to 741770)
ctgattatactgccggcgttgttgttgccttctatgtaagtcatctttccaacagttatttttttcctgaaaaaaaaggttttttttccctcgttgtaaggttagctttgaagtttaatccgattctattagtctgacccatatgaaccaggcttaaaaatctgattagaccattgatatttgaatggtccgtttcagaaatttttgtttttcattttttatcatattgggtaattaaaagctgaaaaaagaaaatattaaaacgacacccagatggattttttcttctatttttaaatttgcaatttcatgtgcttgtgtatcgatgaagagctgggaattttcacttttggtttgcag

SEQ ID NO: 87413 - DNA, 924 bp, Citrus clementina
  Intron number 1 from transcript clementine0.9_017931m (loc us clementine0.9_017931m.g) derived from phytozome v7.0 (c hr-ID scaffold_26; pos 1162641 to 1163564 reverse strand)
acgcgcgccatctccctcaccgtccctccccctcggtaaccagttgtttgtataaagcttcaatttttcagcccagatgcttatgaaatttttaactttgattttcttcgtcattatttatttttgtttattttattattattattatttattattattttttgcattgacggaaaattaaagttgttgttaatgttattcatttgatttagttacttacaaggaagccatcgggtttgcaattcagaaataatttcttatgaaaaaaaaaatcaggctgtaatttggatatataacatagcaaatacgaataaaaattattttttatattcattatgttggaaaatgtcttggaaatgggaatgggattttgattttagtgggaaattggaattgtaaaaatttgctgtgaaaaatgaagatttggaagaaatgctgcgctagctgctaagttatgcataatattaagcttatacatatcatttcaagtaggtttggcatattaaaagaagaatgtaaaagaaggaaaattaaaaggattaagatgtattttaccttcggggaaagttgtatttattgccttgattttctcacttctttgggtagtgctccaatccatgcagttgatgccgagtcatagatcaatctgttgtaatcatgcagtgtgctgggttaattgttccattgctctagcacttcctttcctttgtaggattctaatttacttgtgcgagtgtgatactaaaattgactgtttttctgtttatattcttcatgcacagaaatgaacaccaattgatttcatctgtatcagttttggatagtgattaactgctgaaagataagtcttattttgcccattctcatttttgtgtttcactttgtgcaggagcgtgcatcagtttggcttgatcaaggaaccag

SEQ ID NO: 87414 - DNA, 1066 bp, Citrus clementina
  Intron number 2 from transcript clementine0.9_009447m (loc us clementine0.9_006816m.g) derived from phytozome v7.0 (c hr-ID scaffold_46; pos 789450 to 790515 reverse strand)
cgaagaaattttagctcaatcaagctctgtaccaggttagaattctcattttgtttctttctccttctcagtgtctttcttttttttttaataaattagtggtaaatgctttcattttgtaaaagctgtactctttaattctttctttgtcgtcgagttgggctgcggaatgcgtaagcgctgatgcttaagcaatttttgctttactaaaagttgtgttacataaactttaaattatggggtttattagtgcaattcgaacggttgagatttttcacgttgttacaagtcaatggtgggcccttacacactccatcctatatctatgattcagtgctgacttaatttttttgttaataatttaaaagtatataactaatggttattggataagaatataaaaattaaagtttaatcatatatcggtatgcatacatatgtgataaaaaattatgaagagttaagcacatatcaacttagtactgaattcaaattctctatgattagaaatatgtctaacaactttaggtctaaatttttggattgtagtacccatgagcaatcagccgtctacagcaaaataaataaatcattgaagcgattcataacattggtttaggagaaactacgaaacttttacacttgtaaaaatttattttgatattaaaaatgaatattaaaattattgatagttgtcttggtacgcaggtgattcaagtgaaacacataataaagtaagaaatttgaatgtgggattagtttacctaaaaaaattttttaaaaaaggttaatttagtacaaatcatctcagtgattgacgttggcttttgttggcttaggtaatcggcacttgagcccatattgtgtattgtgtcaacccaaggcccagcaaatcccccttgacccaatcaacaagtttccattttgcttaatgtctattttactgattttttttttaatacataagcaactacgaggtaataatttcttaatcttaaagataattaattatacgctattttctttttcagatttctcaaggaggaatttgcttcaaacaaacaat

SEQ ID NO: 87415 - DNA, 606 bp, Citrus clementina
  Intron number 1 from transcript clementine0.9_009447m (loc us clementine0.9_006816m.g) derived from phytozome v7.0 (c hr-ID scaffold_46; pos 790587 to 791192 reverse strand)
gaagctgctttttcaagaacctggtcaagttccaagtaagttgattattttggtacatggacatggtttaacttttcagattctacaaaaaaattgtatccctaagtttccgattgtgttttctttgcggctaaatatattgttctttgcttgcaaaggagtgattctagacaaagcagccggtgtgttgctttttgaaaagggtttgcatcaatttgcactccagcttaaaccctttttggcttttgtccgttcacaatgaaacaaaatcacttttttttttttcctttctcgcacgctttaaatatgaagcctcgttaggtttaatctccttctcttcaattcacaaaaaccatgaggagtttctctctcgctccgacgtaacttgtaaagtttctgttcagcttcttgttttgttttgattcagttttcttgatgtgtacgttgagtttctctcagccatgatgaagtgtttttttttttttcagaaagggctgcctgcccgtgatggcttgttccagatgaataaatttggtgaaattttgacgaagctgacgaaagtctaatgaatgcgatattattttgtttgacaggtcaaaatcaaac

SEQ ID NO: 87416 - DNA, 1007 bp, Citrus clementina
  Intron number 1 from transcript clementine0.9_015236m (loc us clementine0.9_012259m.g) derived from phytozome v7.0 (c hr-ID scaffold_22; pos 1663535 to 1664541 reverse strand)
tagggttgtttcacccttgctggctccttcacctggtaagctttgattactttttcctctcatattattttatatatttataaattttatctgtttctgcttgctataatcgcgtacaacatttttattttttgttacatgaaattggtttagtaaatagctgaagtgatatgaagcgattcagaattgtttctcgtgtcagtttctgttgggtagtttttgtttgtgcaagcgaagcttgctttgacttgctataactgttttgatttctactgttctggttctgttgtaaagtaagtgtcgtgtaagattgtttggtaggtgaattttgagtttcccatcttaggtattagcaagaaacagtgtgtttcggtttttgattgaagcatagggtgtttgactagacgagaatttggatcttgctttggggattggagattacttagcaacttggaagttggtacaattattcaagttttttcaatcgtatttgtagaacttatggctcccaactgggttggataccagtcatttggatatttgttttgtgtgatgcatatgaggtagtagttttttatgtggaactggaacagcagttaccatgtttgagattcttatgctttaacttgacctattgacgacgtataattggttatgcagttgtggttgtgcttggtgattagccagtctgagaatgttgtatgtgttttttttcccgcttctgcatcttagggcttctatgaaatttctgtcctgtagttacttacagttgcttggctttgttgtccttatccatcttccatggaaggttatttcagcgacattcagtgtcatgcatcaagtttcatcataggctgccttgagtgtgacagggttgatcttgtctaagtctagaagttgttaaatcatatagtcattggattgttgggtttccttcacatgatgattatattgtcacatatcaatgtttcctgtgcagggattggcaggatttgtttgggcttctg

SEQ ID NO: 87417 - DNA, 496 bp, Citrus clementina
  Intron number 1 from transcript clementine0.9_006584m (loc us clementine0.9_006584m.g) derived from phytozome v7.0 (c hr-ID scaffold_22; pos 909886 to 910381)
cgatacggagaaaataccagattctgacttatccggttagtgttctgttcattgtcacgttgtttttctgttaattaacttgacgtcaacaagttcggtgaatatttaatttaacggcaatggcttatgcgttccgtgttttggtacattttagaaatttgttcttttgaaaatttggatctgttattcattgccgttatgacctcctgctctctctttggttgctgaatattattgtaatggctcagattttctggtattctggtattaaagttgagtctgttcgttaaaaaaaaaaaaaccaaaaagaaaaagaatcagtccgttcttcgcctccatttctgcacctgccaaacaggacactagatacagattttctgttctatttatcaattgatctcagagtgaaagtcctctaattttcctttttattcttttggcggtgttacttgactgtactttgatttgtattcgtatcgtttcagaaatcgaatta

SEQ ID NO: 87418 - DNA, 558 bp, Citrus clementina
  Intron number 2 from transcript clementine0.9_011485m (loc us clementine0.9_011485m.g) derived from phytozome v7.0 (c hr-ID scaffold_86; pos 476126 to 476683 reverse strand)
cccccactgctggtcttcctctaactagaaggtaattttgattactcttttaatttgttaatatcattattctgggtttcttggttttggcaacaaattagttgttatatgtttgtgttggatagtaaatacagaattagttctgttatgggtttgtttcattctaatctaatttctaatttctcacagatgcaatttgaattaagcaactttgaattaacaatctgggaatgtcaattttcaatcccgctccaatttcttatgagttatttattgtagtttgaagattttttagaagtaacatttgggtttatttaatctagttctaatacttatttgttttcttttggggaagttgcagagtatggaaatagttaaaaaaaaatgataatcttccctattggaatttcacttagggggatgttatggttcaatctaattatctgattactattagttaaatgtgtagtaatgcttgcaacttggggttacagaatcttgaatgtgttttccctttggacagagccattgctgaatacctctctcgtgatcttcctt

SEQ ID NO: 87419 - DNA, 734 bp, Citrus clementina
  Intron number 1 from transcript clementine0.9_013895m (loc us clementine0.9_013895m.g) derived from phytozome v7.0 (c hr-ID scaffold_46; pos 951474 to 952207 reverse strand)
atctgcaactctgattcaattttatcagcagccaggtatttttaaataagcattaggattaatttcgaatcatcttacaatggtaactgtttgacagcagcctactgagaaattagatattgagaactagttatttttcccaaaaggtttgacaaaaatactcttataaaggatttttgctctctgcttttctgttcccatttatatgagatggaagatgttttttttttttttaattttgacttttaagcagcggaaacaaaatttttatccattggataagttgttgatttagatttttcataaaaattaattggccgctgtcaaagaagttttcccacaccaaatttttgaatctgtttgtttgaccttgcttggatcagttgttgatttagattttcacaaaattttgctcatcaaataatactatacgttaaagagaaagaaatgaaaggtttagccattgaaataattcaattgaaagaaatttaagtttatcataaaaaaatatcaatttaagtcggaccatgttggtgactgcatgtcttggttaaaatctagctttgtctttgttcttacattttttttttttggttgataagatctttttcctacattattatctttggtattgactaatttttaattgatattattttaattccattttttctttaaataagttttcttttaattctctctcaatttttatgtaatttatttcagacgtatat

SEQ ID NO: 87420 - DNA, 350 bp, Citrus clementina
  Intron number 1 from transcript clementine0.9_007619m (loc us clementine0.9_006512m.g) derived from phytozome v7.0 (c hr-ID scaffold_32; pos 2372002 to 2372351)
atattttctcttctaatttaagtgcagagtgtctggtaatctttttttttttttttttccattctgtctcgcaatatttattttctctgatcatttgtttcttaattttagcaacaaattagggtttagtgcttaatgactagtatctagaggctaagcagaagaaaaaaattgctattataagacagaacagtccttgtagactttcactacattgttcatccactaactttggaagttcagatgaaagattttcttagctttaaacagaagttttttataacttaaatcaaattttgatgaaatgctgatgggttgtgtggttggatgttgacccagttgaaatctat

SEQ ID NO: 87421 - DNA, 734 bp, Citrus clementina
  Intron number 2 from transcript clementine0.9_016406m (loc us clementine0.9_016406m.g) derived from phytozome v7.0 (c hr-ID scaffold_32; pos 2141486 to 2142219 reverse strand)
ctcaagcagactggaaggtatcttccactaattcaaaatctattggttgattgatttatatttgatttgattgatttagttcttctacatgtatgcttgtttagctctattatgaatggcgggattatatataccttcaaaactgctgcatattgctgattcatttgaaaaagtactggaaaacattgttgaagaaagcagacaattatgttggaaagccagggtgtgtgtgaccctgcactagttgatgatagtctactcgaaaattgaacagtgtggaaaatctgttgtacttcattaaaacaaatttgtatcagaatgcaatgttattacttcttattactttgatggataaaaataattgctattgtgattgattgaattctgctatttggaaacttatattacacaattgattggatagagggagctggctgattaagttgagaagtatacggtaaaaactgatgtgttaggagacttaaggtttgcacacatattatgaactcatgtagctctcatggaaaaaaaaaaacaccaatgattggacactcaccttattttgttcctattgcgtcgttatggcatcctcaaacataatgatttgataactgacatatgtttcttatcattttgcaatataaagccataattgcgaacttggctcatgatcttgtgttgttctgtatctggtttggctaatctattcatataattggtgttgcagaccagaa

SEQ ID NO: 87422 - DNA, 408 bp, Citrus clementina
  Intron number 1 from transcript clementine0.9_016406m (loc us clementine0.9_016406m.g) derived from phytozome v7.0 (c hr-ID scaffold_32; pos 2142364 to 2142771 reverse strand)
ctcaaacacggtaagatttgaggaatccattcgtcttttgggtattaatttgtgttctttttcacttttagaccttctaattaagcctaaattagggtttcatgttgtggttcgattttaaagtttggttgtttccgctatctaacagatttgttaatttcaactaatgtatcgtgttgcttagctcaaattttggtttttcttctttgggttcagattatatgttttgaggttttactgagactttttagatatatgtgcattgtgaatcatatgtaggttttttttgcctaagtttaatggacattgacttatgtttcatgcagattaagaatttggagtgaggttgtgtaatgctttattatttattattattttgtgtgaattacaggtagagctggtgtgccc

SEQ ID NO: 87423 - DNA, 650 bp, Citrus clementina
  Intron number 1 from transcript clementine0.9_025419m (loc us clementine0.9_024637m.g) derived from phytozome v7.0 (c hr-ID scaffold_19; pos 276423 to 277072 reverse strand)
gcaaacaggtagcagaaaccattgcatttgcataggtgagttcccactctcctcgtaagccgccagttcccactttcctcattcctcagatgctttctaagttgccattgcttgtttttttgtttgtttcttctgatctgttttctttgtatttatttgatttccgggaatgaaattttaatatcgtattaccctataaatataaatataggcgctaaattgaataaataaaatgagtcctaaagattataactttgaatatgtatgtaatgctaatgtaatgcaaacgccataattctctgtacattgtcgtgtcatgtcatgtcatgtcaagctttccggtactactcgtgttgttcttttttaatccaagaattttcctggaagtttccttggttggtgttggtggaatatatataaatcaatattgctgtccatacatggcatgccattttgaaacttctctaggattttcaatacttgtcttacaattatgcattctctctactatggagggtttgaactcatctgtaaattcaacggttggtgtttttcctctgattgttgctttctattatcttgatatggtttgcacatgtgcctgtaatctaagtcttctgtggtttgatttgatttcagctactctgaat

SEQ ID NO: 87424 - DNA, 968 bp, Citrus clementina
  Intron number 2 from transcript clementine0.9_025568m (loc us clementine0.9_025472m.g) derived from phytozome v7.0 (c hr-ID scaffold_125; pos 479186 to 480153)
ttgtaatcactgaaaagttttcaccgaccacaactgtaagatttcgtatttaaatattagttgattgttttgtagttggagcttgactacgttataattttttctttttctttaatgtgaaacaagtaattgagcatgttacattgtggaagaatttgttggtttctcccatttgtggaatgcagttaatgttttacagtccttttacttataacagtgcatgtaatctctgtcaaatactaggcttggttgaactttttcatagctgaggcaagttaaagcttgattttcttgtagctttctttatcattacatgaaaagcaaagagaactagtatatgaatcccttaacccctccccccccccccacccccctcttcccaaagataaataaataaacaaagataaaggaaaaattttttttaaaaaaatctttttcctgtcttaaggatctccttaaaatcgaaccttggatagaatgcttcttgtgtgaatacaatatgattttacgttttctgtgataatagctaagaaacgctgaaatcaaaatttgtaatagcaccgtaaactgttgaaactagctttatgcagcatcacatatgcagcttgtatgttttttttcctgaaaggatagtttttattttgaaaatgtatggattatatggaatgctcctaagtactaatttggagtcactggtcgtctctgcattaatacatgcacataatttgattcttgtgaaatcaacttactagactccgaatcctctcattgacttaatgaattcttgatatgtttataatttaatggagtcttcttcttcttcttcttcctcctttttcactctttttttaatttggacactatgtcttgtcttgagccattaatggatgaagtcatgactctggtgtggaagctttttgcccagccccttacccttttttggatcaatttgtaggttacaattcctt

SEQ ID NO: 87425 - DNA, 1052 bp, Citrus clementina
  Intron number 1 from transcript clementine0.9_009102m (loc us clementine0.9_009118m.g) derived from phytozome v7.0 (c hr-ID scaffold_19; pos 1590997 to 1592048 reverse strand)
aagaaagagtcttcttagcttgtttacggaaccaggtgagtctaatgtttgtttgtttgtttttttatttcccatttgagctgctataattcacttttttttttttaattactttgaagctaaattttttaaaagtttctatcttgatttgagttgctcttttttttttttttcttttttcaaagttaattgaattttggtttttttaactgtatggtatggtatagttggtagttgaactgtataactgtcacttggttcttgggtttaatttgaatatgagaagctgtgctgaattgtttattgtggctttgtttgtgagtgtttgtgtatgtgtatagttttgcttttgagtgttgaaatttcatttttggatttatgacttgtttgactatcattttggtgttcgagttgacgtagttttgtgttctgtgaaatgggttttcagtttaagtgctttttgcgaagtgggtatgttctctctttctctttcgttctctttaatctctttatcattggatttgtgttgagggctaaacatgctgtaccgtgacaataaccataactattgtcttcttaagttttaattctcttatcgtaatttttttcttcttttgtctggtaaattatttggctggtgatctggcatgttctttgaactagtattttgtgattgggctggcttgtaaggttgcttttcgtagatcctgtcttatctagtgcttaatatttttattattgaactgtaaatttcatgctacatagtcagtctgttttttcagagaagtcagatattaacagcacttttaatttagctctaggaaatttttgatgattctgctttttgaagtagtcgtatgtgcattaaaaaagaaaaaagaaaaaaacatttgtatgctctcttcactgcttaatgagttatatatcttgaataattctatatagaaatttcatttttcttgggcttctatatcttccttgatatgtttgcttctgcatctgttatctgtgacacagcctctgttgctgcttctattatttagaggggtcac

SEQ ID NO: 87426 - DNA, 615 bp, Citrus clementina
  Intron number 1 from transcript clementine0.9_022603m (loc us clementine0.9_020087m.g) derived from phytozome v7.0 (c hr-ID scaffold_32; pos 1474553 to 1475167 reverse strand)
atatatttgtgttatttacctgcataaaagcataggtgggttttggtttctttgtttttgtgcttttggtttctgggtagtgtttagtttcataatttgtcgacaagaaaaggaaaaagtttgtgtttttggatcggtttggtctggtttatgataagaagaatcaagaatggctaatggagaagagaaaagcagtgacttttatgcagtgttgggattgaataaggaatgcactgcaacagagctcagaaatgcttataagaaacttgcactggttagagtcagcagccccctctttccctcccaccctttcaatcaactggatggtcctcttgtaatttggtctttgttttgaatttgtctatttgatctggtttcgatacgtgtatgtatgagcttctttatgaagttaaacaatgcaatgaagttctgggtcgttttttttttctttctccttaatgatgtttgatcaattgggttctcttataattgaaaaacatgtctacaattcactttcctggggttgtatctgtccttcattttttcccaggaaaattctttttgttggattagtagtgaaaaggggttttttttttttttttttggaatatagag

SEQ ID NO: 87427 - DNA, 541 bp, Citrus clementina
  Intron number 1 from transcript clementine0.9_014861m (loc us clementine0.9_012228m.g) derived from phytozome v7.0 (c hr-ID scaffold_17; pos 4196908 to 4197448)
ccgctgattccatccaaggattttcttcgcttcaggtgttcttccgttctttttttactttatgaccttaggtttggggtctagggttttatgtacataatgggatttttttttaaacaattcctcgtatttttatttatttatttatttgcataaaaatgtcacatttaagaatattatgtcacttgagcagttgagtgcatgaatttgaattgaggtatgttttagggtttttgtgtgtttgctgagaaacttggcgaaaattaaaaaatgtggtaacacatggaaaggaagtggagccaaagctttcctttaagtttaatttattaggtcttgttttttgcttgataaggtgttggatatagcaaaattctgaaataattacttgccttcttcttatttatttattttgggcgtgttttctttactctgttattctcatagaatatgcaatgtgcagcatcttttgaagaactgattactttttctggtttattaataatcagagtgctgatcaagaagctctgaagacattggttac

SEQ ID NO: 87428 - DNA, 576 bp, Citrus clementina
  Intron number 1 from transcript clementine0.9_007098m (loc us clementine0.9_007098m.g) derived from phytozome v7.0 (c hr-ID scaffold_2; pos 4394411 to 4394986)
acgtcaaattttcaaacaagaaaggtaatttttgaatcttcttcataaaaaatttctcagttcaatattattattgcatttttcttgtttgatcgaaacaaaattagagtcgcactctcattcgctggatcttcaatttaattttgaaaaaaattttatatgtcacccttgtaatttcgaagaataaatccaaggtgattctcacattctatttaattaattttctgttattttgatttcctttttgggtaaatttatgtctatgaattggaattttgagtaactgtgttgaaattgaggcaatttggtattttggttatgtttaattgaatgcaatgctgttgatttgaattgaaattttgatctaagaagttgacccatttgtgaagactaaaggatggttaaaataaatatatgaataatcatacaagaatctgatgactcaaataatttggtgcctctgaggattgggctgttcatgctgagggttggactgtttttgttttttttttggatcttctagcgtaaggtcacttatagtggagatgaaatttgttttacaggtaacagaaagca

SEQ ID NO: 87429 - DNA, 1060 bp, Citrus clementina
  Intron number 2 from transcript clementine0.9_007098m (loc us clementine0.9_007098m.g) derived from phytozome v7.0 (c hr-ID scaffold_2; pos 4395876 to 4396935)
aggttctcaagaatcgggtagaagagcttgaaaatgtaagtcaatgcacaattgcaacatttttatttgtttgagcaatgaacagtgtagccgttgtgattatgtgagagaaaatgcaagcactctatcaaaggcatttatggtttagaattctagaatcagttttctttcatatgctgcttctttcctccctctctctctctctctttaataattttgaatggtcatatgctggatcctatcctttgcttttataattcaaaatataaccaggcagagaacctacctattttccaaaatcaaacttataattatccactacaagctgcaatttcttgataaatgagaggagtcatgttattaaacaagcttttaaaagattgtcgaaacatattctgtcattttgcaacttataatagtggggtacaatcttaggagatgccaaacacagataataggtcttctcattttgttgagtatacatagatatcttgaatttatgatgaaatgctagtagcctatgataagaataaacactttacaacttgtcataaaatcaattcaaccgtcgatagtttattccagtggaagtcacaagtgacattaaaccttgacatattgcattttttatcttggtgtttctgatgtttggtaaaaagcttatgattagttaagctgactctgtgttatacattcaaattcttgatgctatgttttctagaaggataaaaacattaacattttagattctctgatgtgatataatttagtttctcagagttggccattttctgcaatctgtatctttgttgttcttgtgattatactcttagtcttacttcaagtagccaaacattttgaagcccaactgatttagttgtacactaactccttgaagttatttatgactaatgtcaccatgttccacactctgttttcttgattctatttttttgaaagtggtgatatatcagtcaatttataatttcttgttcagagcaaaagaatttgatctttcttgacagtcatatttcgacaagttggccgaagctccagacgt

SEQ ID NO: 87430 - DNA, 398 bp, Citrus clementina
  Intron number 2 from transcript clementine0.9_014716m (loc us clementine0.9_014716m.g) derived from phytozome v7.0 (c hr-ID scaffold_19; pos 1217622 to 1218019 reverse strand)
ccttgcaggtaaattaattttgcattacttcacttttcttctctctcttttctcccccttttttattattattttttttaaaattgagttaatggactttttgatctccttagttactgtcttttatgggcctctttttatgtttttcctctatatctctccaaaagctaaaaggtttattacttattagccacctagacgtttttagaaattataaaatattttgggtggtaaagttacttctctaatttctatgatggcaatatttttaatgaattttattattattattattattattattattattattattattattactactacttctactttgttttaaggattgtgatttattattactgatgtgggcatgggcttgattgatgcaggta

SEQ ID NO: 87431 - DNA, 625 bp, Citrus clementina
  Intron number 1 from transcript clementine0.9_006431m (loc us clementine0.9_006431m.g) derived from phytozome v7.0 (c hr-ID scaffold_19; pos 1786605 to 1787229 reverse strand)
aggtgactgtttctcagattttcaatcttctttttttttttttggtatcgtctgttggcttggtgagctaaaattgttgtctgggtatgcttaaatcttattgctttattgaaaattttctggttgctggcatgctggcttccttgcaatttgtttttttccaatgctttaatttgatgatttgttggggatgtgcgacatttattagcttagtaagaccagaattctgttttcctgatttctgctcttcagctgctttcacgtttagaaacatccatttatttattataggaatctgaataatttcatactagttggattaacaaactgcattttgtgaatattggtttctcccggctaagttttggcgatgtcttaaaattgaagctattaggctttttgggtaattgcaacgttattatagctcctgtcataagttcgattgaagtgaaagagttaatgttctagattgaatggaatgtccgtgttgtcaatagtttctgtacattagaaaatcacgtcggaatcaatgttttggcatgagtttcttgattgcgatgaacgaatcttgtttcttgttaaactgtgaacttttaatggaggcctttgatgcttgaaattccag

SEQ ID NO: 87432 - DNA, 663 bp, Citrus clementina
  Intron number 1 from transcript clementine0.9_016852m (loc us clementine0.9_016852m.g) derived from phytozome v7.0 (c hr-ID scaffold_59; pos 929752 to 930414)
ttcttcaccttcgttttctctatcacattgccaaggtcccatctatttcctcacttttgctcactctggttttcgctttgctttcttattagttggttttttgtttctttattttgaataatgttaatgtggggttaattgacagtaattgttactgtgcgtttcttttatggaattaagctttagacaatcttgcaattgcatttttttgtggtctattatgatcaccataattgttctttttttatatataatttttttttctggtttgtagtttgcattatggatttggtttaacaatgtgagattgatctaaatttatctaaggctctgtttggtgttgtggcttagaagttacagctatcataaaatggaagtatctaaataaagttgataataatgataaatatgacttataaagttaataattttgaaaaaaaatgataagaatcatgtagatttttcatcaaacaattgtgatgtaaaatcaccttatcaaatttacccaaccatttacggctatggtttaaaagcgatagctgccggaaaaagtcctaaatgtagcctaaatatattgttttgcattttattaccagttgaagctggaaaaaggtacggtgttataatgttgtgatatttattttattcaatctaggagctaac

SEQ ID NO: 87433 - DNA, 419 bp, Citrus clementina
  Intron number 1 from transcript clementine0.9_009777m (loc us clementine0.9_009777m.g) derived from phytozome v7.0 (c hr-ID scaffold_6; pos 1745791 to 1746209)
ctcattcgtttaaggtaagttttgcggagtcatgggggatttgaaatatgtttttttttaaaaaaaaaaactacgtttattaggcggtgttaatttgatctggatttatctcatttggattactgtttcaaattagatcacgtgatgatgacttgactggtatgaagctttcacattttgcaaattaatgaaaatgtgcctttagtgaattagttaccggtgtttttcgggtgctttcggtggaatgagctttgagtagaagcactttggggaaagaagttctcttcagaactgcttctccaaggatcacttctcaatctgtagaagcatttttgtttattccaataaaaataaaattctaaaatagaattgaagaggtcattcttatgttctatgatgcaggttgtgcagttgttttc

SEQ ID NO: 87434 - DNA, 590 bp, Citrus clementina
  Intron number 1 from transcript clementine0.9_021425m (loc us clementine0.9_020325m.g) derived from phytozome v7.0 (c hr-ID scaffold_80; pos 998752 to 999341)
gagagagaattatctagaagttgaaaaacagagtatgtgaaaattttattttatttttgttttattttttgtgattccctctaaatcgtgctatcaatcagtatgaatattttatggaaataataataattttaaaaaatattcaaataaaatcacctttatgtatccagtctaaaattcaattttttcttgtgtgaatatgggagattaaacctaaattattattattatgttacttgttaaggaaatatataaactgctcaattcaaaataataccaatataagtttataattagagtatgacaataatatgattgttttttgttaatttattttcaaaaatgattttcaaacaagttagttgatttttttaaactaaaattcttcttgttttcatttgcaagccgttttatgaaagactgtaattgacaatctaatgtaaattatttctcttctaaaaaaaattgtaaattatttctcaattataaattataaaacgttttcaatacaatttttcaaaaagtttgtttgggtaaatttgtctatgtgcgtaggtgggtagcagcatcttgctaactctcaactgtca

SEQ ID NO: 87435 - DNA, 481 bp, Citrus clementina; identical to SEQ ID NO: 82027
  Intron number 2 from transcript clementine0.9_021425m (loc us clementine0.9_020325m.g) derived from phytozome v7.0 (c hr-ID scaffold_80; pos 999411 to 999891)

SEQ ID NO: 87436 - DNA, 635 bp, Citrus clementina
  Intron number 1 from transcript clementine0.9_022700m (loc us clementine0.9_022700m.g) derived from phytozome v7.0 (c hr-ID scaffold_50; pos 956311 to 956945)
ctgtgtctcagctgctgaacattccagtgtaagtggcatttcatatgttatcagaaattaggatttagaacaatatttaaatgagcataagcatagactatgaatttggtagtaatgtgagttatgttatgccaatttggcaataattgcaattagactgatctgaatatatcaagccaacacagttatcagctaatattcaaggcattagattctgatcttcaattgtattaaattattttgcagctagccaccttttttttggttttgggttgggggggggggggtgttgaataaaaaacttgatgcatggaagcttcattaagtttttggtaggatggatctttttgaacttacaataatcgtgattgggagcttactatgttttgaaccatgtggaaaattttacatgggcatttgtctttctcactttgctgtctcattaattgtaggtgacattgcccacccagggaaaaatgacttaattttaaatctgatatattgttgtatagattttcttaaaccttttgtaagataaatgttaatatgaacgaacttgttttcttactgcttttacatatttggtaaaggagttaatataactgcacaggttcccatcactgttcactttgacc

SEQ ID NO: 87437 - DNA, 902 bp, Citrus clementina
  Intron number 1 from transcript clementine0.9_031324m (loc us clementine0.9_031324m.g) derived from phytozome v7.0 (c hr-ID scaffold_22; pos 752390 to 753291)
gggacattatgtatctggacccagaaggatacatgagtgaaaacttgtttattgatctccccgataccttttggttcaactaacactatcaaagctctatcaaagtgccatggcccccctgctagaatgttcctcttatctgtttctgttccgaacttgaacaagaaaatattgtcccccatttcttcaatctgcacttctcttagagttctccacctgttgcagggatgctttgagacccacgatgttgatttctctagccaacaacacctttcccaggagacagtggcggatccagcttaggaccagtggggacttaagtccccactgaaaaaaaaaatcctttactaactaatttaatttataaaaaatttctaataaatttttcctaagcccccactaatttatattcaaacccctaacacataaacataattacatactttaagtttttaaaacaaataaaaagagatgggctttgcaaactaaaattaagcccacaaatattaatattaatcaaatttttaaatagcccacaaacccattaataatattttattattcggtaccttctccaattccactgcctgcaccaatacgcaaatctaaaatccctaaatcatcttcttgtttcggcatctccaaaagcaaaacagcagtgacagactgacagtggaatttgcattaatcatcttcttgtttcgacatctccaaaagcaaagtggaaagtgatttcatttattcctccaaatttcaaacaacccctcgtttcttcattcaataaaattaaggtacaagttaacactttatttactttttattttattgtttataaatcatatataattatttgttgaattgatgtagttgttaaagcacttaatcttggagatctctcgagt

SEQ ID NO: 87438 - DNA, 810 bp, Citrus clementina
  Intron number 4 from transcript clementine0.9_018246m (loc us clementine0.9_018246m.g) derived from phytozome v7.0 (c hr-ID scaffold_80; pos 460537 to 461346)
cgccactccaatccttaaacaggtacgtctgatcctttcccccttttaagtccttcatgacaggactaatttaatcacaaaatggaatttgttagtgttatataatataatacaggcaatctctattgtatgtatcttcatgcttacaatgatttacattctatagcaattatatgatggtctggttgttttattttttataagaaattcaaatatgtattaatgaagaagatttaaaacacatggagtaccagctgtccactaaggaaaatctggaagaacttgaattattctagtggaatttcaagattttaatagaagaactagaatttgtgaaaaaaatgaagcatgaccatttgatttcttgccatgatttcaacatcacatatattcactcaggattcatgttcattgtgctgactgaggccctatttggtattaaggttggacagctgtagcttaaagttacagtactaaagtgtttgataaagactagttgccgcggtttggaagttaaattgatttaatccaccacttgtataataaaaaatctataatatctttattacttttgttaaaattattatttaaaagtcatatttattacacataattaacttttatttcatagttgtagttttttttttccataacagcttaaaagttagagcaccttaatatcaaacatggcttaaagctttcagaggctgtgtatcttgacatgtgagatgcatattttcctctcatgcatatcatcataataaatgtaatgtatgagttcacttttcaatagctttgattaggtcagga

SEQ ID NO: 87439 - DNA, 792 bp, Citrus clementina
  Intron number 1 from transcript clementine0.9_011994m (loc us clementine0.9_008579m.g) derived from phytozome v7.0 (c hr-ID scaffold_80; pos 651805 to 652596)
ctgttcaatctgccaagtctctgcctccggaatctgtaagtttttttctactctttaattccttcatcacatacgcattactttttaagatctttgtttttttaaactaaaatcttgagatcttttactaataccgcctcgttaatcatgttcctttaggaaaatagttatctgttttatctcctttcatcctttctttaatataaattagaaaataaattttagcggctgaacaaactgccacgctgaaaaaaagaaaccaaacaaggaaccaaaatgcaactagcttagtctagtggcatttttcttaaaagttttgcatgcttgctgacgcttgatggttggtcctacaacataacagctgggtttgaatttaatattaaaaaataataaattttctctttagaaagatagagaagcaatcacaatccaacttgaatattctcaaataggaaaaacaaaaattgttgtgaaaattcaaagaatcaaagattccccccacgcgattaggaaaatgggaaatttcttagcacatcaagtttgagtcatttacaccgagagagagagagagagagagagagagattgaacccgatacgtctttgtaactcctgtccgcccacctcataaataataaaaataaaagaaaaagtccaaaccttgcagttattgcaagctgtgaatttgttgtcatttggtgtcaattgcatgccacaaaacgacgttcctaattttttttatttttttgtaacaggctagttttgtgatagcgaagatctcagcaatttgtccc

SEQ ID NO: 87440 - DNA, 547 bp, Citrus clementina
  Intron number 1 from transcript clementine0.9_011150m (loc us clementine0.9_011150m.g) derived from phytozome v7.0 (c hr-ID scaffold_80; pos 16442 to 16988)
tcactggcttcactccactcgtaatttttttttcttaatttttaccattaaaatgcccttctatatagggcgttacttttgattctattttcttttctttactttagcttgactttcatgggtgatcagagcaatcaacttgataaaatagtaagggtataacaaaggtttttcatcaaacaaacagttttatatacgtatttagcttaaaagctatagctgctaggaagcaataccaaaaggagtctgaatatataattcgctataccattccactcaccagagcgaataatattttcatgttctgcttgagtttgaacaagaattatactctaactaaccattttggtgtgctactgtacttaactagatttgcgataattgcttatatgtttcttctttatttcaatctgttaagattagcctgcaacatgatatcttagtatttgtgtttctgaatcagtacaaacttgtcaaatacatgtataatgttgacgttaactttaaattttgaacagtttggttttgcctgtgcattagagactct

SEQ ID NO: 87441 - DNA, 838 bp, Citrus clementina
  Intron number 1 from transcript clementine0.9_028372m (loc us clementine0.9_028372m.g) derived from phytozome v7.0 (c hr-ID scaffold_80; pos 29860 to 30697 reverse strand)
aaatcaagggaagaagtgaaggtttgctggttaattaattaatgaattaattttattttttttaattcatcttcttaagatttatttaatttatttttacagcaatattttgattttagaaacagggtaacttatcaagatgaactcagttcaacgatttgcaacttgaatgtccatttatgatgtatctatgaagatcgtgtagccacgcactcaattgtttctttaataactatcaagcaccatcttgaaatttaacttcgatactcaattttcaatttcgctattttaataacattgatgagttagaataataaggcgttgtttctggtacccgctttaatattttttttttaattttctaaaaataaaaatatgtaaaacatgtttggtactccttttttttatttaaaaaaaaaagaaagttaatatgagtagaaaacgtgtcattttttttttttgtaatttagaagtggaaaatggcactttccaattttttgggataaattatcaaaaaaagattcattcatttcatttttagataatctttttgaaataaagtaccaaatttgtacttcatgaaatccaaaacctgtgataccaaactagtgcagtgcggttctacaaaaataatgctcagcaatgaaactaacacaacaaaagaataaaaaatgcacgatgataaatagataggggattttctcaagaataaatggaatattggaacatttaagttctgctgcatgcatgtactttctaaattttagttcatttagagctcgtgcgttgtatgtgctttgatccaatatataactcacttgtatatttattaatgtag

SEQ ID NO: 87442 - DNA, 495 bp, Citrus clementina
  Intron number 2 from transcript clementine0.9_016228m (loc us clementine0.9_016228m.g) derived from phytozome v7.0 (c hr-ID scaffold_54; pos 1368062 to 1368556 reverse strand)
gctttcatccgctccactctttgtcgacatttcaggttcattttcatttgcctcttatttatttacttgttaaaatcaaaatctacgattttttcccccatattgttctggctactgttagctttaactgttgatacttttagtattcaaaataaatatggatcaccgcccagagtgtccatattttagcttcttttaatggagttaatcacttaattgccttgctattagaaaaattccttagattgttcagaagtagctttctatggcaaaattacgttttggcagaggcaagtttggtgcacggttacttgtttctttctgaagggcctctgttgatttggatatgccttctttctttgcatttattatatttttcttgagttatcttttattataagaagtgaaatttctctctcgtccttattcttttgattctgattggttttccttgtttcaggaaagatccttactctgctaggccatttgaaggac

SEQ ID NO: 87443 - DNA, 538 bp, Citrus clementina; identical to SEQ ID NO: 81888
  Intron number 3 from transcript clementine0.9_020635m (loc us clementine0.9_020635m.g) derived from phytozome v7.0 (c hr-ID scaffold_32; pos 373820 to 374357)

SEQ ID NO: 87444 - DNA, 1035 bp, Citrus clementina
  Intron number 1 from transcript clementine0.9_012481m (loc us clementine0.9_012481m.g) derived from phytozome v7.0 (c hr-ID scaffold_34; pos 22710 to 23744 reverse strand)
gacgtctcatcatcgatttcatcggtaccactttgctttaccttcattttcagctgatttatcacaatgccttgaaaatttcgtccactgaatttttgcttgacggataattggtaggagtaagaattaaaaattaatgattgtgggcccggggattttaagtttttgcaacatgtttttcccaaactagcctcgaaaaagctactttatgcacgtggggggaattgtaccaaaaaattctgacatcaattaaaagttttgagcgtcgttgataccgacacattgctaatatatacggggagctttaagttataataattgtaatcggatattgtttatgtaaaccacgtaaaattatataattcataatttatgtagtttacgtgaaaaatatatgttacaattattataatttagtatttattatatatatatatatatatatatattaatataaattttattattataaattttatttaataaactgtaccaaatagagtctaaaataccttaccttaagcttattttattggccatcaattccaaaaatttaagataatcagtatgttatgtgtgcgtaataagttgcatgcatggcatatgtccgtagttttcaacatgtgaactggagcaatactatccgtggatttgtttttccatgttgctgcaaagtcatcgctacatcggattatcagtactgctcggcttacgtaacatgtgaatttcgacaataaaaaaacagtactataaactaaaattactagtaaaatcatgtcacgtgtttgtaactttctacacgattgtaaattcaaaatagatgcacatagctgaagattttgttggattaaaatatgcaccaacggatgtgctcttgattttttttttcctaattctttccctagtttaatttttttttcttttacttgcgaattgagcctttgctcaagagaatttgatatttcaccaatttaactgaaaaaaaaaatggaaatttcagctcagagctttgatctgccatatatcagcgcatac

SEQ ID NO: 87445 - DNA, 563 bp, Citrus clementina
  Intron number 3 from transcript clementine0.9_022636m (loc us clementine0.9_022636m.g) derived from phytozome v7.0 (c hr-ID scaffold_19; pos 2374689 to 2375251 reverse strand)
gaaagaaaaaattcaactttgacaaactgtaagtactgaattttagtgtttagtgcattcaactcttgcattagattttcattttattttcatcaatttccatttacatttttgtgttcttgattcgagacatattaattcagctgatatatgataacccatgcccaagtctccagtttctaggttattctaatgaactctcttattccagtgacatggattttaatctcgatggtgattttgacaagttatcatcatttaaagtggacatgccagagcttgatttctcatgttcgtcaaaaaagactgcaaaatcaaaagaaagagctgaagagaactcttccagtggaaattgtgaaggaaaaaaagacctctttagcttctcttttgatttcaatgagtaactggactaaattcttttctttttcttttcttttttttttgaagaactggattaaatacttttcacttcatctgtatagctgcagtgtaatgaatcatatatcaagtatgtgatcacgaccaacactttatcatgaatgttgacagtgaggacttcacaa

SEQ ID NO: 87446 - DNA, 770 bp, Citrus clementina
  Intron number 1 from transcript clementine0.9_022636m (loc us clementine0.9_022636m.g) derived from phytozome v7.0 (c hr-ID scaffold_19; pos 2375914 to 2376683 reverse strand)
acagcggcttttccctcgtcactcacagcaaacaggtaactcctctctttttctccatctctcacacagacgagactaaagaatttgagccgttgattcgacaatttagggtttagaatcatctaagatcatacagtggacaaattcggagttctggcatgtaatattttttgctcttattctggtcatccattatttcgtgattaaaatttaatgtttgagtcgccaagaatctgattcgcctctcaatatcattatgctttgttctatttatttgaaattttaggtcacaaatcttttacggttatattgatgtgaaaattgtatagttcgagcctttttttgtcaattaattgctaatattcaccaaatctcatgctttggatgtgcaaggcgtttaaatagcatccaggttatcaaattcggtgtaggtttttttattcgacaaatttgatagaaattgagctttacattgtttgttttacatttaattaaggttcaaatagttctattctgtgattctttcatattaattatgtggccatttctatatatttagtagatacttccttgttatgctttccatagcctctagaaactgttttgttcctttatttattattttgacaccattgattgaattatctaactgtaacgatataatgtgcacaaagattttgaatgaagtagaagggccacctgttctaggttccaattattcttacaatattttatccatatgcagtgctgaaggataagatttactggaa

SEQ ID NO: 87447 - DNA, 639 bp, Citrus clementina
  Intron number 4 from transcript clementine0.9_021292m (loc us clementine0.9_017469m.g) derived from phytozome v7.0 (c hr-ID scaffold_19; pos 963056 to 963694)
ctggttttggccattttgcaattgcaactgaagatgtaggtgtcgtaaaatatttactgattttgagcactggtttttatctaagcactgaaattgacctagcataccatggaattttaaggtttacaaactggttgaaaacattcgtgccaagggtggcaatgtcactagagagcctggtccagttaaaggtggaacaactcacattgcctttgtgaaggatcccgatggttatatttttgaactcatccagagaggtccaactcctgaaccactctgtcaagtaatgcttcgcgctggcgatcttggtcgctccatcaagttctatgaaaaggtagtatgacaaaaggtctatcttctgcttggatgctgtatgagtaactggatctcttactcccatttcttgctaaacctgttgcaatgggtgtgtttaactgtgaatccagtggttcatttccatcgctaaagctgttgtggatcatcttgcattatgccagcacttttttcgttattgtccaacagtggatcaattgtagtagttatcaaatctgcttatagtttgcttttagtttgctttttaatccaaaggatctgccattaaatgatgttgtgtttgttgggtctctgcaggctttgggg

SEQ ID NO: 87448 - DNA, 603 bp, Citrus clementina
  Intron number 3 from transcript clementine0.9_005811m (loc us clementine0.9_005811m.g) derived from phytozome v7.0 (c hr-ID scaffold_32; pos 351346 to 351948)
cgactgtggaacccttttctcaaggtaactaataatcaatcccaaaaataatgtttattacatagattccatttgaacatttcagtcctgtttatggaagggagtcggaaatcttcattgattgagacttgcgcgaaagagagaatgtctctttagtctgtccaaaaatcccatgtataatctttgattattcacactaatgagttttttacaacacataattcatctatgtttcagctacaagtactactcctatttaatttgataccctagactctagactctagagagagagagagagagagaatgcttagaatggataaatgaaattcaagagtagcttatgtggacaatttgtccttagctaattcagcgaaaaaataataataataatggatgcaaaaagagagagagtggggaaaaagatgatgaagagtgaaagaaagtcaaatatttctggcattgtcatgttgagcactttatgacggctttgcttttgtttgcttgtgtttgagattgttttcttttgctgggttttgattttttttttttttttttttgggtccaggagagatagtttcatcacgcacagagctttctgtg

SEQ ID NO: 87449 - DNA, 798 bp, Citrus clementina
  Intron number 2 from transcript clementine0.9_026006m (loc us clementine0.9_026006m.g) derived from phytozome v7.0 (c hr-ID scaffold_6; pos 4218973 to 4219770 reverse strand)
gctcaaatcggccctacacttcatcagaagatcaggtttgatacacaaatatcataaatttaatttgccgtaaaatacacaattactatggaatgcattcttgggtgaggatcaaaggccgcattaaggcaaatgtggtcaccctttacaaatacttgtagcttgatttttaccctctgatcttgatttcaagtttttgttcaatcaatgttttaagtgtactaaaaatatatgcatctaaactctcgatagaattcaaatatatatgtatattgttaaaaaatatatatatatatccgcaggaatttatcttctctctctactcactcattctctctctatcattttcttcactatgtctctcaactttctctctctctctatccttttcttcactacttctcccgattttctctcagctttctctctatttagcattaaaaaaaagtacaattatttccccggcacgatctatcatacgaggggtccaaatgatactgtcacaaaatttttttttattaaattttacaagtttcttgttataaactcaattactttctcatcattttttttttaatttttgggttatatataatgtatgtgataattgaaacagtcattaaaaaattttgaaagggggtggcgtaacattaaattcgttgcatggtaaagatgacttttttaaaaaaatttaattttatcattttctacttttgttgactctggatatatttatgaaaacactgaagacttatatatacaggtggtcccgcagattgaaaagtagaagaggttata

SEQ ID NO: 87450 - DNA, 761 bp, Citrus clementina; identical to SEQ ID NO: 82860
  Intron number 1 from transcript clementine0.9_028093m (loc us clementine0.9_028093m.g) derived from phytozome v7.0 (c hr-ID scaffold_6; pos 5977620 to 5978380 reverse strand)

SEQ ID NO: 87451 - DNA, 1001 bp, Citrus clementina
  Intron number 1 from transcript clementine0.9_003675m (loc us clementine0.9_003675m.g) derived from phytozome v7.0 (c hr-ID scaffold_110; pos 319142 to 320142 reverse strand)
agggctcatcaacgtttgggttctttgcttgtaaggtgagagtctgaggaaagttggtttggttaggggttttgtgcttgtttttgtgataatgttggcttgatttttgaggtgtttgtgtaatcttgatgatcttttgatctacatttggtcatttttattgatgttttgagctacattggcgagaatggttgatgtttgaaataaatctgtgcttttggataatttgttgattgtattgatattgataatgcctggtttttatctgtgggaatgtgtggttttcattgacttaagctgaaatggttagtcatatcacgaatcttattccgttagatgttgagtattatgaaaataatttgctgggtcaatgtgagtaaagcgatggttatttgttcctttctatgttgttgtgtatggctgaatggagttagttttggcttttgcttttgagtttattgctaagatgctggatttgcagaaactttggcattgttggtgggttaatagaagttctgttgatagttgatgtgctttggctaaaagttttagtggttatttgttggattttaaggtctggttcatgtgtcggtgttagctaatgacacttttttgtcttttgctcttgtaatactcacatctgcgatcttaatctaatctactgtttttcttttcaatccttttttcttttgttcgtagcttgactgcacaaggttacctggatttcttatttaaaaggcttcgttcttttggtgactctggttctcattatgacttcatgatctctcatcttttatggcaatttgatctccattgtctcagtctttggatagactatctgatttgggttcattgatctcagtcttgttcttgttatcgtagtttagcctagttggatctcggtttcttcatcaagccctaagctgcacaaaatcaaattcacataaaagttttggctgcatctttaactgcattttgtcacaggttagggcaagttgaaa

SEQ ID NO: 87452 - DNA, 551 bp, Citrus clementina
  Intron number 1 from transcript clementine0.9_026602m (loc us clementine0.9_026602m.g) derived from phytozome v7.0 (c hr-ID scaffold_9; pos 276568 to 277118)
agaagttgaatctcaactctcttcactcgtctacggttcgttctcttacactcgctttacattttcccgctgttttcctcagttccaaaattcaaatcacacaggctttgttcactcttcgtacgcgattcatcttacagtgaatcaaattgtatatgtaatacagttcaaattaactggaaatcagatgtagttacaacaaattcaattctctccgttgattataaatcctgcgataatctgttgaaattttattaggtctacttgcgtcatctggtaattattgtaaaattgtgaccattattttgatccttcatctgtagcttatgttctcttgattcgtgcattggcctgagttttttttttaaaaataattatgaatggaaaattttttgagaacacgaaactggataaagtgtacctaatggtcttctgttggctgcttcttttatctcgttcttgtgcttcaatttttattaagtgccttcagtctgttggttattattctgtttgtgcatgtaagcatgacctatcttttaattcatgcagat

SEQ ID NO: 87453 - DNA, 418 bp, Citrus clementina
  Intron number 1 from transcript clementine0.9_030834m (loc us clementine0.9_030834m.g) derived from phytozome v7.0 (c hr-ID scaffold_6; pos 4605930 to 4606347)
gtggatccagttactccaagctttagatcagcaaggtaataacaaacttttagcagtttgcaattagcaacttcataggaggaagaaatattaattagagcattgccatagtatcccatgcattgatgtttattgatttaggttttttttaaaaaaattttcccgttttaaaatgtgactatccttgtaaaggatctcaacctttaaaatctcaaaatatatgaggctgttcctgctatagcctaggccattactaaggtcaattgtgggcctgaaaatttatgtctcatgaaattgtatgggtttgtattgtgaaagaaataggtcctacttgatgttgaagccatttatgttgattctatttcttttatttctttgggcagaacttcctggttggcctttgcttactcctttgaaa

SEQ ID NO: 87454 - DNA, 649 bp, Citrus clementina
  Intron number 1 from transcript clementine0.9_020912m (loc us clementine0.9_020834m.g) derived from phytozome v7.0 (c hr-ID scaffold_6; pos 3455702 to 3456350 reverse strand)
attcggtatgctaatttcttttccttctctttcttccatttgttaatgaattgagattgctgaggacgggtagtttcaaacttcaacgtattaactgatgaaatttgtatgtgattgatacattgatgctgtgatcaataaaaacaatgtatgtacagaacttaaacctccagtttagatatatttatgtttttttttttttggatttaatccacagctgttgctaatttgaattgcatcaactaactctcagctataaaagtaggtgtttgccaaagctttcagtgttgagaaatgattcagttacaaaaatactcttcaagtgaagactaattatttagtagaattctgaaaattcgtttagcacaactaagttgctgatcgtgtgaaatcaatttggtgtgtggtgtgttgctttcttcaatctttttataatttgtgaaatatgattatatttttgtttgttgtactgattgtgtttttgttttgcatcgttgggcttcggttttaccttatcggatttgattataaatgatcagggagtaagtcagactttgtttcttttgaaaagaataattctattttcatttttttctttataaactttctgagcatgttaattttcaattgtaatttcagcccatatttc

SEQ ID NO: 87455 - DNA, 717 bp, Citrus clementina
  Intron number 2 from transcript clementine0.9_006606m (loc us clementine0.9_006606m.g) derived from phytozome v7.0 (c hr-ID scaffold_9; pos 3503414 to 3504130 reverse strand)
ctgaccaaattgttgtgcccgatgtgagtttgcttatttcttgtatattcaaacttaataaagatcatctttattggacttgagttatttgatgtcaattttggaagatttcatagcaaacaatgattaaaatttagaggtataaagacccaattagtgtgttaagccaaaccttcctttactcttctctatttattcctttggcggcggcggcgggggccgctgtggagtggttagacagtgagtatgaaagaagtttataaaagagaaaacttgtatggggtgctttcaattaattggttgcttgtcgggttgtattacttggggaggctgtaacgcgacaatgaataactccatgttatgactaaatttcaatgtgctctttttctaataattaagccttggttaccatcagcaatattgactttaaacctaatactacagataaggtgatatctgcatgagacctttctgaatattcaaatatgcatccaagaattgtatccgcatataactgttttgctgataaatatatggatataccattgacttttacaggaactgtgagttttttattgtagaggatatgatatagctagatgcctactaagccttccaaatttgataggcttgtggatgttatgaaactctcaaactatttgtggtcccttgatcattacagattgtccaggaaaaagagagagagagaaaaaaggt

SEQ ID NO: 87456 - DNA, 433 bp, Citrus clementina
  Intron number 1 from transcript clementine0.9_006606m (loc us clementine0.9_006606m.g) derived from phytozome v7.0 (c hr-ID scaffold_9; pos 3504225 to 3504657 reverse strand)
ccccttactattttctgtttgtttctcgagaaaatgtacgtgggttattccaattccattgttttagtctttttgtatcatatctctgcaggaaatgtaatcttttgtcgcactttcaaatgggttactccctttctgtttgcttgttgagaaaaaaagcggaaaatttttgaaatttaattcttatatcttagtgcattttttgtttgtttgtttttggttttgttatttttgaattgggttttgtcgttttcttgaattgtaaaattttctttcattttccttcagtctcccggcagccacaacatgagtttatattatattaatctcttgatttgtctttaatttctttatgtgccattgtcattcttttttcaaatgcttagctggtaactgaaaccttgtcttctatcatcagaattgaagggtggct

SEQ ID NO: 87457 - DNA, 609 bp, Citrus clementina
  Intron number 2 from transcript clementine0.9_001996m (loc us clementine0.9_001544m.g) derived from phytozome v7.0 (c hr-ID scaffold_6; pos 226175 to 226783 reverse strand)
ccctgttggtctcgagggccttgcccattttctcggtatatttaatgtatcttgtggcaaatttgaattcttgatttggggaattttagtcttgtatgaatgtaaattgtaaaagttacttaaaaaaaaaatggggatgggtttgtgtgagatgactctaaacgtgttttcggatgatcacagattaaaatacaatgtgttgctcatattgaaattagagtagacagagttaaacagaattagaagtttcacttgtactttctttttggttcaagtatttcttcattgtgtgttcaggcttgtttatttcctgttaaagttatagcattgtttcattctcggttctttcatctcttcctaatttgcctactttcttttcccttttcactgtttgctattgtcattgatatttttttttttttgaattctgttgtgtggtgattcattggatgattcttttactctcctattctacattattattgcttttagctgtagttagataattatatggctgtaggggacaaattctgtggcctgtttaatgagttcgagtatttataacttgctttagttactgttttcctgtttctttaatgtgcagagcat

SEQ ID NO: 87458 - DNA, 774 bp, Citrus clementina
  Intron number 1 from transcript clementine0.9_008726m (loc us clementine0.9_008726m.g) derived from phytozome v7.0 (c hr-ID scaffold_34; pos 105790 to 106563)
cacttccgattcaggttttttttttaaaaaaaaataattagttttatgtttagttcccgaagaacatattagtttattcatgcatgtgtcatatacatatatgtatgagcttgcatcatgcatgcatgtaattggatatactggtgggtggaaattgatttgggaacgcctcaaatttggaaatgtgaatatttttaatttttgagaaattgttgaaataatttctcttctccttcttctctttttttttttttttcccaaaaccttaattcacgtcatgttattttcattattattattttgtatctgcttcctgttattttagttccatttattgtgaatttgtattttcaactacttccccgaattaacaaaaataaaaataaaaacttttcatttatttataaataaaattattcataatattttttgatccttttttgttactgaaacaacaacctcttattttcataaaacttgtcgttttactaattgtttgtattcatttacgttatcttatggatatccataatttatccgtcagagtagatcagatctcaaaatgtacttatacttgtacttaaaaatcatgtgaatcaagacagaggggcaaaaaaaagcacctgaagtcagaattgtctcagcagaatattccttgattttaagcttcttatgaacaaatatacaaatattagttggcatgccactgattgtgttgaatgtgggaatgatgtaacaggaagccgtcgagtgggaatacaaaagcaaagtggc

SEQ ID NO: 87459 - DNA, 509 bp, Citrus clementina
  Intron number 1 from transcript clementine0.9_010203m (loc us clementine0.9_010203m.g) derived from phytozome v7.0 (c hr-ID scaffold_6; pos 4423371 to 4423879)
tcgcaaggaagctgagaactgtgactgcttgcaaggtactttttagtggaagtactttttgtataacgtgttttttggtcaaggcttgtttggaattttaaaacttgattttgcttaaaaaacgaactaaaaatagtggatctacgtgtattgattattttgaagaaaattggagttctgttacctgaattatgtcacagatgcattcagttaaggccttgtttggacggagttttatttcattgttgaatgcttttatttctcccttgaaatgaaaaaccaaacaggaattttagaattaattgttcaattgtcccctattgtgcgattataattatctcgagcaagtttatttttatttttgtattattacaataattttgagcaagtttttgaataaatataaactggttgctacttatgtatgttgtttgttagtttgtagaattctaagcattttgttgctgttttcaggatttcaagtgtgtcactccctgggaggtggtacg

SEQ ID NO: 87460 - DNA, 480 bp, Citrus clementina
  Intron number 2 from transcript clementine0.9_024783m (loc us clementine0.9_023286m.g) derived from phytozome v7.0 (c hr-ID scaffold_9; pos 2230622 to 2231101)
gaacctggattccaacgggtgagtttttattacttatttgtctgaacaacaattgttgaaagagcatcaatgggtgactctttcgaaaattgttttagcgactcaatggatctcagttcagaacaaactggtagcaattattggcagttcatttgatgccattctctctatctctctcttttgtgtctgggtagcaattatagaccagagtgtgctaaaaataactgttttcaaatagtcatgtttgcatctgatgtgttggtcgctgtattattactcttcattgtcttcatgtaattttgaacttagagatttgcatagatgttcctgaagtttaatccttagtcaccagtattctgctttgtcatttttttcgcttttggaaaccaagtctaaagcagctttctgcctggaatagtttcgagaagctgagccttttgaatttcatttttcatacagggtgacattttgtttctgcaa

SEQ ID NO: 87461 - DNA, 472 bp, Citrus clementina
  Intron number 3 from transcript clementine0.9_024783m (loc us clementine0.9_023286m.g) derived from phytozome v7.0 (c hr-ID scaffold_9; pos 2231118 to 2231589)
ttcgtacgggagaaattgtcgtatttaatatacaggtatgttgtttatccccagcaattatagcatgaatattgtggaaaacttattaatggagattcaattttgatcttgcttggaccatctgactttagcattatttatggaacattaactgtctcttgtaaggattaatcttcatccttttgattaacaaaatacttaagcttcattagcactactttttcattttttattcgttatatctttaaaggaaaaaaagatttgagagcatttatacaacatttaacattagctacttcaatttacttagtaggttgctactgtaattcacattgctgtatgtttcttttgcttctttctatccagtctgttcttgctacttgttttaattgtattgaacatttgtccttcaactatatgttttccatgtttttcagggacgtgatattccgattgtccatcgagtaattga

SEQ ID NO: 87462 - DNA, 858 bp, Citrus clementina
  Intron number 1 from transcript clementine0.9_021851m (loc us clementine0.9_021851m.g) derived from phytozome v7.0 (c hr-ID scaffold_46; pos 375491 to 376348 reverse strand)
gcaacaaggttccttaattctgattcttcaatccagtaagtcacagttctttggacaactttaacgcgtacccattaaattttgtttctttttcatttaaccccttgtcgttgaaattgcttttgctgaatatgctttgtttggtgtattgttttatatggaaactaagagactagagtaaagagagcttgaattgaaatggattcaatttatattgagttgtttggctttgttttgagataaaagagtgtacttttagctgcatatgaaatgctttgctgcttcgcaattagagtgattgaataagtttttcaaaactaattatttatttgggtttctattttatctattttaactgttattcgatattatggtgtacttctcacttatgttgttttgttattattattattattattattatttttgaatgcatgatgctgtttgtgactctaattattcataaaattgtttagaagggagtttattttttatttttttggcctttgataattgtcatatctgtacatctctgctcgccgtctaattgctgaaaaaccatttctgcttctttggtgcaattttatgtttgaaatagatttttatcaaggttttcaacatttggaactttttgtacttttccccctatttttagctcctagctttgattgataacgcttttcagttgtccggtaaatgacttcagtggtttttacttccttaaaaataaaaagaagagaagaagagaacctgctctcctaattgggacacacacacacaaaaactcatggatataagtttagttttggaatctgaataaaagttacagctgatgttattgtgtggcagtggattcag

SEQ ID NO: 87463 - DNA, 825 bp, Citrus clementina
  Intron number 1 from transcript clementine0.9_021279m (loc us clementine0.9_017634m.g) derived from phytozome v7.0 (c hr-ID scaffold_80; pos 640179 to 641003)
ttgctccattcacaaacctccactgctagactcttgtgagtgcttctgttaactacatttgttaggttgtgtgaattagccaagttttcgtgactcgtttgttgttatgatgagattatgtgttcttatgttgtgtctctgatggtcttgtcatctgggtttttatttatttccaatttttgttggatttaactgttatttgttggagaaaatgttcccttagcatgtttattttctttgatatgggttttttctcatctttaatgagatcctggactattatgctacaaaaggctctctcttttggaattttcagtatctgcaatgtgtatctttgccctaatatgtcattgtttctcgtattgctgagacagtccaattcctgtgtccagtaatgggagatcattatcaactggttcaaatagggtagatgatcccttaaagtctgagggcactgagactccaaatgtcaagcctccttcaaatgagaaggtagttttgttgtactcatgaagggcttccttgaattcagtttctccatagagtcagattcttctccttctgaccttatatgcattttggtttaggtacttgttttaggtggaaacgggtttgtcggttcacatatctgtaaagaagctctagagcgtggtctgactgtttctagctttagcaggtatcatattgtatttacttgtgatcaaataaacatcacatggaaaattcagtaccttttcgttttcttagttatcatataattatgcttagacactgaactatttctttctaggtctgggagatcatctcttaaggattcttgggccg

SEQ ID NO: 87464 - DNA, 970 bp, Citrus clementina
  Intron number 1 from transcript clementine0.9_035189m (loc us clementine0.9_035189m.g) derived from phytozome v7.0 (c hr-ID scaffold_9; pos 3646841 to 3647810 reverse strand)
cagtatatcggtggccagaaggagaaatttgtgaggtatggtttgtggatatattatcgcatcttttatttgttattgtatttgtttgaaagatatttcatgtcattgatcacaaatcctcgaggtcttgttcaaacgtgttaatacaactatcaatttatttccatgcatgatctatacacggctcctaatcctatctgctaaagcttgattatacaaattgatgaactcagataactatttaacaatggatcttattttttaaaacagttttaagcggaaaagattaatggaatgcatgtcctgcatgcaaaaactgttgtgtttatatgtattttgatgcgctataggagaaaagatttgtggaattcttttatgagcgagaaaactgtgttattgaaaaaatgtgcaggattcaaggatgagttatttgtgaattcatttcactgataagctctgtgaccccacagtctaagatgttcttgcaactcttcagtatactattagttatgatttgcataaaattgaaatgacttcagtttttcttctttattcttttgaaaataaatttccggcagattaatggaacagttaaatttcattttgattttgaaaagatagcaaccttgtgtatggcttactagctctatgcctctttctgatgaatcactttgttaaaagtagtctgcacaataagccaatataattgtacatcaggcgagaggcaaaaatgatttgcaattcagaaatcgataaattttatttgaagatgatatttgtgattgtctctcttccagttaaaggaatctgagcaatgatcaatgcaatgcttttatgttgtacattttgcttttatttcctattttttattttcctctttcatttttttcttatcaatattgtacacatacttgtgtagggggtgaagtcagcatctgatttccccttgtgttggtaacccgtaggttgg

SEQ ID NO: 87465 - DNA, 386 bp, Citrus clementina; identical to SEQ ID NO: 79132
  Intron number 3 from transcript clementine0.9_018776m (loc us clementine0.9_018618m.g) derived from phytozome v7.0 (c hr-ID scaffold_26; pos 1914398 to 1914783 reverse strand)

SEQ ID NO: 87466 - DNA, 649 bp, Citrus clementina
  Intron number 1 from transcript clementine0.9_008759m (loc us clementine0.9_008787m.g) derived from phytozome v7.0 (c hr-ID scaffold_19; pos 2542965 to 2543613 reverse strand)
gagtcttttctctcatccactcttcaagaaacaaagtgggtatgttatgtacaaattcattatacaaagcatctctttgtttggttcttcgaatatttttactttatatatgcctttctttctctcacaatttcttaagaatttcgtctctaaaactattaagagaaaatttctctaactttgtgatcgcagctcttaattatttggatgtttgtatgtcttgtgcgtgtgatctgatattttgatcgtgcttaatcggtttcgtcttgtaaggtcatttggacagtttttttttttccttgttcttttttggttttttgaatttctaatatatcactaattgcagctccaagtggatgatgctttagtttgattttattcggttatattgtgaagtcttgggggctctgattgtttattatcgtgattcaactattattagtattttcgattgctttgattttttatctggggcggatatggttttcacttctttacacttgtatgggtttccttttattttattgtgtaatactgctatttgaactttttttttttaaattatataaatctgggttgatctcgagttggctccttttggttctgaattgtaggtgtatcgcttaagactggcaaaaagggagcgtgt

SEQ ID NO: 87467 - DNA, 901 bp, Citrus clementina; identical to SEQ ID NO: 79130
  Intron number 3 from transcript clementine0.9_025684m (loc us clementine0.9_024481m.g) derived from phytozome v7.0 (c hr-ID scaffold_9; pos 1155810 to 1156710)

SEQ ID NO: 87468 - DNA, 602 bp, Citrus clementina; identical to SEQ ID NO: 78021
  Intron number 2 from transcript clementine0.9_026897m (loc us clementine0.9_026897m.g) derived from phytozome v7.0 (c hr-ID scaffold_22; pos 1033769 to 1034370)

SEQ ID NO: 87469 - DNA, 587 bp, Citrus clementina
  Intron number 3 from transcript clementine0.9_004730m (loc us clementine0.9_002795m.g) derived from phytozome v7.0 (c hr-ID scaffold_32; pos 1511403 to 1511989 reverse strand)
gattctttaagcaggtatggtatgtttgaagggtatcgtttctcaattaatctcataaatgctagaagcaaataagaaattaatatcatgatattcttctgaaggttattgtttattcatatttctgtgttgtggtttacctatggagtcagaatctcatggcatttatttctttgcaaacttatttggttattcattatagttgctgttaagtgtttttttggggtgtcagatgttgctttttgtcatacccttatacttactgtttatttacaatatgttactctttatagagctgctgaagttaggttttgtcatatgctctttgtcaatggacttccttggtcaagtgtttgtaggagtcgggatattgacaggatgcttttttgtttgttgatccgctttgcttggaagatcaattgaacatttcaataatttatgcttggctttctcttcctttcagaatttcttttcgataatgtttttcatttaattaaccagagagatctaaagtttgatatgatagtcgtgttttcatgcttcattatccaggagaacctttctgtagctgggagggacttcaagtt

SEQ ID NO: 87470 - DNA, 379 bp, Citrus clementina
  Intron number 1 from transcript clementine0.9_004730m (loc us clementine0.9_002795m.g) derived from phytozome v7.0 (c hr-ID scaffold_32; pos 1513289 to 1513667 reverse strand)
aaacgcgctcggtaatttttttttttctttttggaacttcttttacttcctttggcttgatttatattatattgtaatatgttttgctctttgtaacaaattttgatcttcttatgattcttttctattaccactattgttgttattcatgctgttaatgagaaaatatgatgttgttttttgttgttatgttgatgtgttgatgattttgcattggctgcaattaacatgatagaagatacagattttgacttatattgttcatagagttttaaggagttatgacttagttttgttgttgtgtttaattgttgcgtagtgttgatgggatttttttttctttttttgggtttatttattggaagcagaatttttatat

SEQ ID NO: 87471 - DNA, 431 bp, Citrus clementina
  Intron number 2 from transcript clementine0.9_028553m (loc us clementine0.9_028553m.g) derived from phytozome v7.0 (c hr-ID scaffold_42; pos 263728 to 264158 reverse strand)
cttaaaaaatagagaattttttattttgaacgtctgtaaactcgatatcttattatttttcattactatcatgattatatttactgttaaaattgattttttatttattgtaataatatattgtatttatcctattggttgtaatggtttttgggccttttttagggttttgagttttagattgtatgtctataaaatcttttgattattgctaattttctattacattaaaatttttaaaatttactataaataagtttttttttaatattgattctacattcttgtgattaaagatgtaattcttctttatgattgttgtttaccattctttcgtacataactatttagccatggggttttgggctagtaaaatttgatttgtatccatgaaaatgagttttgaggcttttgctaatcttgcaagtttc

SEQ ID NO: 87472 - DNA, 499 bp, Citrus clementina
  Intron number 1 from transcript clementine0.9_001603m (loc us clementine0.9_001603m.g) derived from phytozome v7.0 (c hr-ID scaffold_32; pos 2170220 to 2170718)
ggtttattttttcctgtcaaccaaagtccaagaaggtcagttcgttgctttgttaaaatttcagaatcattatactatattttgattcaaattgtatccttggctaatagaaatttattttatagtttatacatctatgttatttgcattttaaagttaaccagcgctagaaaaatagcatactgtgattaatgtgcttgtctttgattgggattgtattcatttttaattttggtgttaatactcaaatacagtcctatgaaaatcaatattgagtgcttgaaagtgctttgtatatgagacatctgagtgcttgtttcagctagagcgaaaacatcacttaattattgtgtcattcattttgctctgcattgtttattattgacatcgtgcgcttggttagtgaatgtttaaagtctgatcttgttgattcttctgagttgtgttttaccattgatatatagcttttctgtgggagcagcattcaagacgtagttca

SEQ ID NO: 87473 - DNA, 702 bp, Citrus clementina
  Intron number 1 from transcript clementine0.9_002358m (loc us clementine0.9_002358m.g) derived from phytozome v7.0 (c hr-ID scaffold_9; pos 2743191 to 2743892)
tcgcaaaacaactgggaagctgataaaatgtaagtgttttcaaacaactgaaagattttgttttattttgctgttttttgtcattaaacttttctgggttttttgtttaggtttgttatcttttagtgggtttaatattttcttgttctatggtttgggtaggtttcttttttcttttctttcttttttttgtatttttgtgtgggtttgtgctttgtattcatttcttaacattcgactctgtttttcttgtttgctattgataaagtttcgaacttgtagcaaatggatgcttgttttgggccctggtgttgtttattagttttgtagatactggtttgtgtaaaaaattgggtttttaagctcagtttttggctttgatttgttatggatgttattacttatgttttttttttcggatgtctttgctttgtatcccgttgtggtttatattctttgcttatttcatctttgattttgttgtgcttgttgtttttttgacaatgatggaattgccatatgatgatgctagggcattttgtttgttcttttttggggtgacattgaattgtatcttgtttcactgcctcttcgatgatgctctcacaaagtctttttcgcttttgctccatttagtatttgcttatcctcaaattaactggtgatttttttttaatttcatttctttggtcattaggttgg

SEQ ID NO: 87474 - DNA, 980 bp, Citrus clementina
  Intron number 1 from transcript clementine0.9_005766m (loc us clementine0.9_005766m.g) derived from phytozome v7.0 (c hr-ID scaffold_32; pos 805653 to 806632)
gcttcggtatcttttttcctttttttttgttcttttgttgattttgtaatttgtgtttatgatgccgaatttagggcatatttggaattggactgctttagaatgcgatcagttgctgtagtatgctaaaataggtgctttggctgttgtgctttcaaaattaagcaaaaagaaaataatggttgcagaatacccttaattacctgttgttgaatttggtatagtcgtgtcactttgtctgtattggttaagagatgatcatttgttgtgccctttgatatgttgattgttgtgttaatgtttgaaagaaagcagaatttgagttggttcaatgttttgaattggagtagttttagcttaatgatgaactacatgaaaaagaaagaggagctaatttgttctatatttggagggataataatgaatgtaatgtgggtgcaccggggtggtctgcattttcgtagtagttatagttctttggaaactgagattgggtttttacttctttagaagtgatggagtactgtagaatgtggtttattttgctcagtggtgcactttctgaacagttctatttcaatgattaagtgaagttatttgtcgaagcttgaatttttcgcattctagaaatattcaatcatttgttgtagtcatgctgcttacaatgtaatattttgaattcatttacactaattgttggatctttgctacgaatttaattaggaaaagaaaaaatggtgaattgcacaagtgcttctgtactttgtgtaaccatgaagtgcatgcactcttttaaaagtaacattgtatttgttttactgagtataatctgcaagaatactgaaaaacttgctaataatagctcttcatagatgattttctgcttaattatggaccaccctgatgacaatttcctttctgaaacaattgatgttttcattacagccacggcagaaacctggggttgtcccaggatccca

SEQ ID NO: 87475 - DNA, 665 bp, Citrus clementina
  Intron number 2 from transcript clementine0.9_028515m (loc us clementine0.9_028515m.g) derived from phytozome v7.0 (c hr-ID scaffold_26; pos 3038442 to 3039106 reverse strand)
ccaccagcggaggactgaatcaacaaagaacaggggtaatatatatatatatttatatatattttattaaaaatttttaaaagagaattgcggttgaggaacagggaataaaatcattgattgaaatgaggtttatgttattcttaatttttctttttccccctgcaaccaatgaaacttagtatactaacttctgttgttttctttcattatatgcttttgtgaagaaaatttaaagtattcttatgagttttagtgttttttttttacataactcataacactagatgtgtgagagtgcattaattcctaaatggccttttcaattgaatgctctgtacatacatacatatatatatatatatatatatatattgaatgtagtttttatggctgaagtttattgcttgtgtcatgtaatctactgcaatatccaagtcatcattattggtgtgatatatgccaacttatttgttgtgatattagttgttggtctacgcatatattctttgattttgttataggtctgatgctgactggaatttgtcaggatgttgaataattgcatagatctagaaaacccatgatcatattattatgtgtggagggtggaaatgttggttataatgcaaaatgtgttgcacatttttggctgcagattactg

SEQ ID NO: 87476 - DNA, 634 bp, Citrus clementina; identical to SEQ ID NO: 79264
  Intron number 1 from transcript clementine0.9_007106m (loc us clementine0.9_007106m.g) derived from phytozome v7.0 (c hr-ID scaffold_26; pos 2054016 to 2054649 reverse strand)

SEQ ID NO: 87477 - DNA, 890 bp, Citrus clementina
  Intron number 1 from transcript clementine0.9_012613m (loc us clementine0.9_012613m.g) derived from phytozome v7.0 (c hr-ID scaffold_76; pos 1090183 to 1091072 reverse strand)
tgctctactcttggcgccgaaactaagtgagtttatttatttattttgaattattatttttatcatttttgtacatagaccaagttgctttctgccaacattgaaatgtatttttcataaaatacactctgtgaagtgatcagttaataattttttattttaaggacatgcataatgatgttgcatgctgtgtgatttaattggcacaaaactgagatactatgcatgccagtttctgattttctaatttggtcgtgttgatgtgcgtggagctcttacagcatgcaccaacaattgattcacacgaaactaaaacactctcaagcagctgcgtagtgttgtgtgtgctcacttgtcacatatattgactacatgattgaaggaccaacgaaagcctaaaaatccaaaatctagattttgctgtcaagattgcgcatgataaaacaattcatattagttgcgttgaatgaaaattaaacaaactaaaagagaaaaaaaaattgatggccctgagactgcaagcagtttactttatgtcccgcaagctaccttctcaatgccactgcatcgcttctcctagatgcttgatgctttcttctcttcacaccaaaactatgtaagccttcttaattttttagttaaattttgtatcatatatggtagcaaattaattaatcaagggtcatattggagtattttcaggcaagatctcagtttgcttagatgggtctttgtctttttgtgttcgcttacactttgtcttcttttgtatcggaaattgtgttgagtcatagaaatagaataattttcacttaggaaattaaagttctgcactcaaaatgattcttcaatttggtgatcatcatcacagggacgtcgtgacgcattcc

SEQ ID NO: 87478 - DNA, 374 bp, Citrus clementina
  Intron number 3 from transcript clementine0.9_034735m (loc us clementine0.9_034735m.g) derived from phytozome v7.0 (c hr-ID scaffold_17; pos 2782793 to 2783166)
atcgttagcgaggtaatttctctcccttaacccgttttgattttctggttggttggcatagctttccaattttgtgtctgattaacttgtgctcattttagccttgaaacatgttttgttcgtcccttgattaatatcctgctgttcaatttcaatttggattttgtatgcatattagtgtgtgtgcttcttatggctttactgtatgcttttagtttgtctcttgcgttagaaaaatgtcttttactgcttacaactattataatatgatggtactctttccggcaatgctgattgcttttgccgttcattatttttatttttacttttttctcttcctcaacaataggacagaaacattctggaaacatttg

SEQ ID NO: 87479 - DNA, 410 bp, Citrus clementina
  Intron number 3 from transcript clementine0.9_001605m (loc us clementine0.9_001605m.g) derived from phytozome v7.0 (c hr-ID scaffold_22; pos 3067994 to 3068403 reverse strand)
ttgcatataggtaaacttcatgtccatttgacatcattttgataggaaacagagaaacttttatgcaaaattaaaagggaataaacattacaaaagtgagcaagaggtcgataaactaaaatcttccccatagtgtagaacaccaaaatctgtacaaaactttgaaaaaagaaaccttgaaactggagacataggaataagattgcaaaccaacaaaatagacccaaaactgcatcccaatcaagctgaatgtaaaagaatggtaatatcgaaaattcttgtagttgacgtccaatggaagagaagaatcaaatcctgttccataacccattaatatctccatttgacatcatagtttttctagtcatgcattctctcatttgcttttttatcttattgttaatagggca

SEQ ID NO: 87480 - DNA, 499 bp, Citrus clementina
  Intron number 4 from transcript clementine0.9_008720m (loc us clementine0.9_008720m.g) derived from phytozome v7.0 (c hr-ID scaffold_73; pos 374967 to 375465)
aaggaattgaactctcttggtacagattcttatttcttcatgttcacacttcattgtgtttgataaaatctgttccttggctgatgtttgttagtagattgacattacatgctctagcctatgtttgttcaagtggtgttgtctatatagaactttggcgagaatgggagaggaataagagctgtaattcttagagaagtaacaattacatttttcttagagtcaataatttttaactctataaattttacttgttctaggatttggtttaaaggagtggttggttaaggcatggtcgaaagacttttgagtagagagcaaacctgtttgattttgaggagatagcaaacttgtgtgcaattcttttttattttgcatgttcgtgattgatgatactgtgttcagatcaaagcattattggaatttaagttgattcttgggataaatgtttgtttctcatgcagttctttctcgaaatccaattcgcaaaattggcgat

SEQ ID NO: 87481 - DNA, 784 bp, Citrus clementina
  Intron number 2 from transcript clementine0.9_002284m (loc us clementine0.9_002284m.g) derived from phytozome v7.0 (c hr-ID scaffold_34; pos 2154860 to 2155643 reverse strand)
gacttggaagaagttgaaaatcaaggtcttgaagaaagaaacgaaatgcgattacaacaggtgagaattaatggctttgtcagtgaaaatgaagaatgcccatctggtgtttatttattgatttgtctttgatgttttgcttcttttttaactgttttgatcccgtttcattgttttagtatgagaatagcatgtcaattcattggtagtagaagaaataaaataaacatgttaggtggattatggatgtaagcacatgcttagttgaggtgtttgttaaaatgtattggtttaatttttctcttttctttctgttggagttgttaaagggtgagaatgaaaatgccgaagtgaatgatttgctggcagtggaaaaactgaaagagttaaagttctggagatactcttgattcttttttcttcttttcctgtggacttttaggatgatgattctttgttgattttttttttttttttttggggagaaggattctttgttgattgaaaccgaacaaattgaacggcaaggctcagtggtggagggagaaaaaataagaaattgtcaggtgagaatttacagtcgaaactgtagaaagatatttcaggatgtttcatctgacgtttgttgagttactatatttctcatgctgtgcaggatgagatttctgctgcaattcaagataaatcaattcattctctggattttattttggacggaatttgttcactgttttctgatgaaacttcagagttaataccaaagagagaaatcccatcttctggg

SEQ ID NO: 87482 - DNA, 391 bp, Citrus clementina
  Intron number 2 from transcript clementine0.9_003601m (loc us clementine0.9_003603m.g) derived from phytozome v7.0 (c hr-ID scaffold_42; pos 1485928 to 1486318 reverse strand)
cagttcaaccgagaaactgaattttatcaaccgtgggttgctttccttaaaaattacagattacccctagaaaacttgtctttactttgaatgaacatctgcatttcctgtcatgagcattaatctttgtagtttctaattggtagcagtcatataggcatgtcagaagttggtatgctcagagtagtcttagacttgctagaagtatttatattagtatcctaattcaatatttgtaccatggccaatttcggctcttgaaatgaaaataaaaaattcatcttctaagatctatttatcttattgcttctgttgacatcagtgctttgattgtaatcttctatggaaataatgtaggggatttttttatatgcagctgagatagcttggc

SEQ ID NO: 87483 - DNA, 406 bp, Citrus clementina
  Intron number 1 from transcript clementine0.9_003601m (loc us clementine0.9_003603m.g) derived from phytozome v7.0 (c hr-ID scaffold_42; pos 1486468 to 1486873 reverse strand)
cctcatttagccacaaggttcagaggaagcaaagggtatgttaatgttctcatgctcttctggttcattttatgccgaatgatttgattttttgatatggcttctttttcttgaataagatttggtcattttgttcttcatatttgtttctagccatctgaagtatgatcggttgctttagtaggtcttaactccatgtaattagctgggtggttgttgaaaattcaacccaaaagcttatgctaacatgtgggatgtaactgtaatacctgaaatgaagttctttgagtagaatctggaacaggcactgaggcacacatggtagtagattttttatacagaagttaaaaaacaggtgatttttgtttcaggccatcgtctgagtgcagaataaatagtgaaatat

SEQ ID NO: 87484 - DNA, 484 bp, Citrus clementina
  Intron number 1 from transcript clementine0.9_005780m (loc us clementine0.9_005716m.g) derived from phytozome v7.0 (c hr-ID scaffold_6; pos 2641327 to 2641810)
gccgtcgacgccaactctttcttagatcgaatcaggttcgttaatttgtgttattatcttcgtttccattttcaatttctctcttttttttatggttcagttattcttttaatccattttaaataaattttcaacaaccaatcatagcttcaattctaatcctagggtttcaatttttgaattcattgtgttggtagtctcattctgttagattcaattttttttttattcaattcatctattaattttctttttggttaaatttctaattttgaatcttgttgaattatttcaatttagaaaaattaagccaattgtacaattgattacaattcctctgcaaccaaacaaagcattgagggttttttttttataaaaaaaaaactgttaattattggttgattttgtcaggtgatttgttattggcatagactaattgtgttcatttggtgcaggttttttggtttcgatcttggagagttac

SEQ ID NO: 87485 - DNA, 419 bp, Citrus clementina
  Intron number 2 from transcript clementine0.9_023486m (loc us clementine0.9_020013m.g) derived from phytozome v7.0 (c hr-ID scaffold_2; pos 1368934 to 1369352 reverse strand)
gaattacacctgctcttcctcacataaagcgtgagtctccttttcacctccataatcatcagtttctttgagtgtcaagcagtgaagagaatgtgatcaacccaataattccattagacttctttgatcatgttagtcataaagctgctgcctatttcttttatgaatgactgaaaatttgagatacatttaaggaataagacaagttcttgtcattttcttttctggacaatctaatgagggtaatttagggatggcttcttacttcatgcacattgtgtgggaatggcacattccatttccacgcttgtttcttgctattataacaaaaaatatgtattttttttcgatttcttattgtttattgaattttgtgggttcggtatattgaagtagagcatgcttgtattatcagattc

SEQ ID NO: 87486 - DNA, 662 bp, Citrus clementina
  Intron number 1 from transcript clementine0.9_005609m (loc us clementine0.9_004084m.g) derived from phytozome v7.0 (c hr-ID scaffold_46; pos 41377 to 42038)
ccagcttctggtatgtctgtgctttcagagtttatttatgtttttgggaaaggtgaaaaggctagagtgcttgtggaaatgttcggatgaccactttttgggtgatttggattgaaagaaatagaagcatttttgatgatttagaggaagatatcatatttttgtgggaaagagcaatttttagcttctctttgggcctcgattactaaggaatttcaagattcttctttcttccccattcatgtaaacggggaaggagtgttggcttaattctgtgtttttgttgtaaagctttcataatcttttagatcctatgcttatattgtcatttgattagcattcaactgtgtagatcttctagcgatctgttgggggtttctttctttgtggactccttgttcacattttgtaattattgttcttattgatactagtttctttgtttcctatcaataaataaataaatcaatcaagttttgctagtgcccactgcattagtgtttaatttaaacacaatacatgccaataaaaataataataataatgatttccagaaaaatagtttcgcttatttgtcagtcattccaatggtaggttattatgatttactctttttaacatttttcatttttctttttggtatatttatctcatttaggtac

SEQ ID NO: 87487 - DNA, 621 bp, Citrus clementina
  Intron number 1 from transcript clementine0.9_007717m (loc us clementine0.9_007717m.g) derived from phytozome v7.0 (c hr-ID scaffold_19; pos 864899 to 865519)
tgcgttacgagtcgactttgatctttcaagtttcggtgagtaatgtcttattcaacttttaaattctgatgttttgtttctatataaattattgctctatttttttaatgttatttgatcgaatttattatattacattgtgaaaatttctcggtgacttctggcgggtaaacgtgaatttaacggtggattccggcaagcttctctccataaacggccaatcaagttgtttattgcattttacgtttcattttttttttccggttttctctgctttgaaacgagcaggtttaaaaaaaaaaaaaaaaaatcaatttttgattgttttgtatgtgtaggtaatttatgaactgcttagctaaaacttgtactgttcaattttttttctgatggaatcagtatattttcttttattgctttatcttaaaaaaaaaaaaatcaaatttttatcatttttgttctgagagtattgagtaatgaatgctgaataaagaatggttgtgaattaggattattctgcattgtgagaagcattttcatctaatttgattgtaaatgttagtcgtttatattgtcttcactgaagttgtattttcaatgatgtgcactttttaggcgatc

SEQ ID NO: 87488 - DNA, 929 bp, Citrus clementina
  Intron number 1 from transcript clementine0.9_015523m (loc us clementine0.9_015523m.g) derived from phytozome v7.0 (c hr-ID scaffold_46; pos 465340 to 466268)
gacccgacgagcttaatcttgagctgatcagatctgtacgttaatttttttttttcaattttgtttttacttttgtgatccttttgcatgaatttcacgcgcggtctgcgggatcttgccacttaccgggacagcgggtcccacttactttcttttcactcccaatttctctcgctagattttctcattcgagtccgagctgaacaaaaaaaaaaaaaaaaaaaatattgacttttggatttttgcaacggcggcgctaaatcaccgtccagcccgttggttgatggagtcacaggggatgacttaaatctttagacacatcttaagtaattttctgttgatccagcttatatcatcgcaggcgggttccacttgaggcgtgaatcatgacatcaagcggccctcgttgaatttctaaatagaaaagctgactctgatcattattcttttttgggatgaggagtatagcggcttaggtgttaacgtcacgtgctctcacgcgcggcagagcaaagaattaaaaactcgacacgtcagacttattagatgtgggacgccgcatgcgttcggcactcagatctaatcgtgtagtttttacccaccacctggattccattattataccgtggacccttcctacggattctttttaattgttgtctctttcccacgcgccttccatttacatttccgaaattaattattaatgtcccaaaaaatattagttaattcgatacggttaaaacactcatgaaatatttgtgttcagagccattattgtctttaatagtagctactttttgactaaaatcctcacgcgccttgcattcacatttcacacgttttttaattttatttttcaattttacttgtgttttttgtttatcttaattttagtttggtctgcgtgcaggccaaagttttccact

SEQ ID NO: 87489 - DNA, 593 bp, Citrus clementina
  Intron number 2 from transcript clementine0.9_034390m (loc us clementine0.9_034390m.g) derived from phytozome v7.0 (c hr-ID scaffold_9; pos 4853291 to 4853883)
ctccaggtaattataacattaaattcataaactttatttgctgtaattttctttctaaatctttgtttgcttacaagtataagatatgattctgtttcccattctataatcttctttgtaataaattatacgagggttttgcagaatttggataactttattttgttcactaaacctaggactgtgtcaaaataattaatatgatcataacaaaattaaaattttcttattttttccttcaacatcttagaaaatcatatttatatatatacgtagaaatattcaaatctaggtttttggactttatttaaattcggaaaaattattaagtcatatggtttatcaacaaagtctagaatcctaagctaaatttgcatatatgtgtgtgtgtgtgtacgtataaaattttccaagtgccatttatatttatagattaacctttaggcaaccataattgttattttaaataagttaaatttgatttatgttaagtttacggttgataattaattgattttctctcaatatgagttaatttggtttctttaactaatttgacaaataaacagaatattccacagcatttaagagag

SEQ ID NO: 87490 - DNA, 745 bp, Citrus clementina
  Intron number 1 from transcript clementine0.9_009593m (loc us clementine0.9_009593m.g) derived from phytozome v7.0 (c hr-ID scaffold_34; pos 2321068 to 2321812 reverse strand)
cggaggcaaccagggtaactatttttattagtaattattgtaattattccttatactattaattgaattgtgtttacttgttgggataatgaactaaggagtattgaaatgaattagggtgaataaacagttcaaagaaatgctccagggatgtttgggatttagatttcatggaatggaatcactagctatggagtataacattaggattccaaatttatactgccaagtataagcacaacagttgcatgcatatactcttaattagtaggagcctatgtttggttgaaactaagtgctaattgttgaatggcaatgttaagggaatctatcaactggcattctttattctatactgcaattatttggaattaaatagaacagaaaccacggcacgaatgaatgttttataatttttaggatcaccggtgaatgttgttttcatcttcatgcatcatttgattcttatgaagtataaaaggattagcttcagatggcttgagatcctgaatggatgaaagctttatatttgagatagacttccagttgttaggacttaatttatcaaaatatacttggttcatgcttgagtccaaaatgttacataattaggagaatgtataacttatatataagctcatagctattgaataattctgttacttatgatatattgccgtctacctgcacccttttccttatccatattcctttcgcaggtgggaagcgaacagttgtggatacc

SEQ ID NO: 87491 - DNA, 705 bp, Citrus clementina
  Intron number 1 from transcript clementine0.9_000044m (loc us clementine0.9_000044m.g) derived from phytozome v7.0 (c hr-ID scaffold_147; pos 112489 to 113193)
cctccggagcacgtgaggaagattattcggtgagtaacctcttttttttattttttgttactttttatttattttttgctttggggtttagctggagcttaggatttagaggactacttggtgaaatttcgttttgagcttaatttggtgaaattagtatctgtttctacttgcttctggttattgggttttgtttgttatgaaatggattctttttctttttcttttttgtggcggtgttttattgttgttgcctttttggtctgggtaatgtcaataaaatacaataatattatttaggtgttttttccctttatatatggctctaaattatttttggtgttgggtgttgattggtatccagagttttaaaccggtattggtgtctgttaagaagatggtaattaatattagaagttaaaaataacttgataaatcagttggattgcccatgaatttgtgcgcgcgtttgagaaacttctgaccacacgactttttgaatgatcaagctaatatgggtaccagactttgattatgcaggaacattaatcccatgacctattttcttataatggaatttatcccgcaaaaaagttagtattagaagcgtggttactctttatatgcattgaccttttagaaaattgtttttgctattggaaaatgtattcagtttgtcttgttttgttttctttaacagagacc

SEQ ID NO: 87492 - DNA, 893 bp, Citrus clementina
  Intron number 1 from transcript clementine0.9_025210m (loc us clementine0.9_025210m.g) derived from phytozome v7.0 (c hr-ID scaffold_19; pos 2982675 to 2983567)
cattcctccgccgttaccggtgccttcaccttccggtcagttaccatacccattatgtagttctgtttatgtccgtatttatgtgaactggtgagatttatatatatcatttgtattttatttttaaataccccgaagaaaaatgtttttattgaatcatcagtcggaagccgttaacatttaggtatagtgttgtttagtttcatttgagattctggcgtgtttaaaggtttttggcttttgtttctgagtaattatcaaattaattatttcatatattattatcaaattgtcaactgaagaaaaggaaaaaatgaacttatggttaaatattgcaaaacatattctcatggaaatgttaatcaactaatttatgcaatgatacataggttgtcaatacaggtgtgaataagatatgtgttttaagtcgaactttgatttgcttttctattgcaagaattcaaggtatttggtgcatattttcatgtttgccctgtgtggtacaacttgagggttcaattggcatgccaacattcctttgtctgtgacttcaattatatctcctatcacattgactatgatcaccagtgaaagttttaatccttacatgcattttaagtgccgatttgtgtcacattggtgtagtagttgccaaatgatgacaacatggattggtgtagctagagtgaattctctgtctcaagagtcattttggctgaccttaacctgttaccatcaaggttttactggatctataggatttgttattgatttatcttccattcagttatgatttttcctattatttgtcgtgcttgcaagcataatctcacagcattaattggtttgctaaacttccgacaactttgcatgttccgtaattttggacagaa

SEQ ID NO: 87493 - DNA, 955 bp, Citrus clementina
  Intron number 2 from transcript clementine0.9_018786m (loc us clementine0.9_016194m.g) derived from phytozome v7.0 (c hr-ID scaffold_9; pos 4749192 to 4750146)
atttcgaaggtatttttctttctctataatttttaaaaaatttgaagttctgatcaggcacgttcttgttgaaagaggaaacaactaattaatcaaactattattagtatgggacaataatagtgctcattttcgaattattttagatgattttataaggaagtgtggggtccttggtctctaacagtacaatgtatgctcgctcccttacagtttacatgcactaaatttcataggttttttcgagattttgctgctttctgattcagtaatttcatatattcttgaagtttatgccagcttcagattcagtttgtttctcttgctatagcctctaatgattgactggtaaatggtacagttgaatcaccaacattggaatagggtttgattgttgattgttactaggatggcattttgtaccatttatatagatatcgggttataaaggtattaatatcatctgatatggagtaggcaaatatatcacggcttacagttagaaatcccacatgggttcatttatttttgaagttttgctgctcttaatggtacatgatgctgcctacattttgtagaattaatttatcaattttttcacttggggaaatttgcattggaactgtaacaatttcttaaaatgagttggatcgctgatgcttgataaactgccaaactattgcaactaaatttaaggttacacaccatatggttatcttgtatacggtttaagcaatcttgatctctgataacatcctaaagaattttcagctgtttcattgtgttatatatagatgagacaagagttgaacatttgacttcagtaattaaaagaattttgattacagtgtcagattgaccattttcctgttccactcttaggaattgtccttctgctgtatgactcattagtttgaatttggaaattccatttcttttccagcgacttcattca

SEQ ID NO: 87494 - DNA, 704 bp, Citrus clementina
  Intron number 1 from transcript clementine0.9_031502m (loc us clementine0.9_031502m.g) derived from phytozome v7.0 (c hr-ID scaffold_9; pos 2902979 to 2903682 reverse strand)
tctagttacttctatactggtggtgtcaatatcaagttgagtaacagagtttcttgacttttgctttatattggtttctgttctattcattttcgagctcaaaatcgtttcttcggttatttgtttgtttcaaactcaaacttttcgtcctcattctgcgtttgccttaaaatgtgttaaaatttgtgtttctggctttctgtgttaaaaagcattttaagggtttgcaaattttctgtgttaaaattaagcggctcaattttctttcaagggtttgcaaattttgggagtgtttcctttttgtcattcttatttccatttctttttcctttttaagtccttttcttgcatcttttcctcttttgagtcttggtaaattgatactttgattagatccttacgcctttgaatggattgttaaattagtggtccggtccttcaatttatcagatgtgaaaagtttacctaatcatgtgatgaaaaggctatttcaatctgctacctttttggcctcaggcttttatttgtggaatctgcagatatcttggaaaccccatgtttatttagggaccatgtctcattcgtttcttaatagattgttttaaagaaactaatcaagtaaaagcacttgaggtagcaaaaggttggtcgttttccatatacactggctttgtaactcgtcttcacaaatgatttttgcaggt

SEQ ID NO: 87495 - DNA, 218 bp, Citrus clementina
  Intron number 2 from transcript clementine0.9_007828m (loc us clementine0.9_007816m.g) derived from phytozome v7.0 (c hr-ID scaffold_6; pos 5108758 to 5108975 reverse strand)
cgaagctttgcgactttctgtgaggaacttttttagtgagatcttcaatggaactcatatccttttgactgcaagtttgatgctttatttctatccccctccttaagttgcagatgcaaccacaatttcttttatcagaggatttacattttctcttgggcacatttattgaatgagaaacttacttgctctttaacattaaaattgtcctagatatt

SEQ ID NO: 87496 - DNA, 370 bp, Citrus clementina
  Intron number 3 from transcript clementine0.9_014120m (loc us clementine0.9_012881m.g) derived from phytozome v7.0 (c hr-ID scaffold_26; pos 825073 to 825442 reverse strand)
gtcgttgatcaaaagtaattatcacgacatcccttctgtcaatatgttaaaattatatcttaaaagagtcaaacactattttctttatagtcaaggtaactgttttcttttctttctttttttcttttttaaaatctttttgttgcttaagctttttatagacagaaatgatgatggctataatatgcataaagttctttttgcttgtgctacaagaaattttgttaatcaaaaatgattttcttgcgttagaagaaaaaaaaaacatttcaactaaaatgaatattttcagttgatgggctgctcaaaatgaatactcatatgaaggaaattttcatttttgtctctaggtttgtggtgaaaataccag

SEQ ID NO: 87497 - DNA, 474 bp, Citrus clementina
  Intron number 1 from transcript clementine0.9_004868m (loc us clementine0.9_004863m.g) derived from phytozome v7.0 (c hr-ID scaffold_26; pos 209845 to 210318 reverse strand)
atcagctttggtcaccggcggtgcatctgggattggtaaaaacttcgagacttttaattttctttttcttgcatttaagtacccaattctgattcctatactgggttcgtgtttgtgaattgattgtgttttgtttagcacttgataggtggtgttgtgtctttggttgtttcttattgaaatttagatcctttggatattctagaattgggtttgtgtttttgggattttctaatcattaataatccactatatgcttatttttcttgtatacgatatgtcctatgagtagttagtagttactctcatcaatcggaggcttctgaagatagcctaaaatgattttattcatatttaagggaagttattgaaatttgaattgttgtgacggatggtatataatttgctgattttgtcaatgctggtgtatattttgtaggtagagctctgagtttagctcttgcagggaaggga

SEQ ID NO: 87498 - DNA, 450 bp, Citrus clementina
  Intron number 2 from transcript clementine0.9_017791m (loc us clementine0.9_017791m.g) derived from phytozome v7.0 (c hr-ID scaffold_32; pos 156129 to 156578 reverse strand)
agttgaatgtgagaacttaattattcagtaaaaatattttgtttgtacttctgcttttgctgtcatcaaattcgatatggtcgtccgaatatgtgtatgcttagctcaatatttttatatctggagaattggagattactttgaacttgggaattttgtttacaataagtagatcgctacctttaaaaatcctttcgttccttgtgataagaaaataaaagaacggtgaacatgctgctgagtgtttcccatctatatactttattgtattttagcagtgaactcaaacaggaatgagagctcagcttccagttgtttttctaatcaatacatcttccgtggaggttgcaatgctattataaggtattggaagtgggtgttgcttctgacttgtttctttgatgattatttttagggtgtgaaatttgatccacaatctggatcagtcct

SEQ ID NO: 87499 - DNA, 690 bp, Citrus clementina
  Intron number 2 from transcript clementine0.9_003133m (loc us clementine0.9_003133m.g) derived from phytozome v7.0 (c hr-ID scaffold_9; pos 4572649 to 4573338 reverse strand)
cggccttcattcggtcagtattaattcaattatttattcatttatcagctctttgtattgattttactattaattgatgatttatctattattcgaagttagaaatttgagcattttagtcatttagagtcagcttttgtgtgaatgatgatatttttcctaattatcaagctaatatgacattttcttcgtaccgtatgcttgaccaaggttgttgggtttggcattagtccttaatttagaattcggtgaatatagaaaggtcgagggtttctttttggtataaaagaaatttggtaatgcaatgaggttaattgaagaaatatatcaaaactccaatggtttggagttctctgaaaccttatttgaaattgtgaacattgatataaatatgccttacaattaatcaactaagcctctttcgaaatttcatgagattagtcaacagtcacccatgttattcctattttcaaacttcagggaatgtcaatggagttatttcacaactttcatgtatatggcatgtttttatgttttggcaagctgtgcggggtagtttcatggatatacatggtttggttgcttttgtttggggaaggatatgctattgattaattttttatttatgattttaagacatgtgtttatgttacagcacatcaaaagagatatcggatttagagggggaac

SEQ ID NO: 87500 - DNA, 1003 bp, Citrus clementina
  Intron number 1 from transcript clementine0.9_026808m (loc us clementine0.9_026808m.g) derived from phytozome v7.0 (c hr-ID scaffold_9; pos 3831838 to 3832840)
aatcgaggtttgtcattatggccataagaaaaaaaaattatttcttctttcgtatttttcgtcgtaaatatttcttttctggtaaattggatcatcccattacaaatttcatttgaagagagacattaattttttttttttatatttgtggcttagttatgtagttgatggagattgtttaaatttgaaaacccatttaggtttagcatgttatcttttcttctgtgaacttataagggatgggatcgttaatctatttgctgcaaatgcttctcttgcacggtgctactatgatcaattcatttgattttggttcacgggaatttgttttagtagtttcggaacattcttaggattgagaagctgtgacatttgcgattaactagctgttcaagtcattttacttatcttagtattatcattgttcttttcttttttgattcctattcttcttaacttattagaatacaatatgaatgtcattttgtgtttgtatttgtgtttgtatgaacagaaatatttgtacatacttcacaaatcacaatcatgctattctacctccatttttaggattcaacgagtatgatactaccttgtgcataagcatctggtagcgcttgttcatttgtgccggatggtgctttggaacagattgttaattttcgtgggagtcatcataatcagttccacattaaaattagcaagttgtgactagttgtggctgattcatgaatgagaaacggaattactgttcttctgtatttttgtttgcaatttgatcaatgttcaaatctttttcttgtagagataactgattttggcctaactcttgaatttgagtcttgattcttgagatacatgggatctactaactttgttttcaatccatggttgcctgttgtctttgttaacatacattactgagaagctggaagttttaactaaatctaactcatgtcttctcgtaggatcaaagcatcagtcacaccaagattacttggaa

SEQ ID NO: 87501 - DNA, 967 bp, Citrus clementina
  Intron number 2 from transcript clementine0.9_011133m (loc us clementine0.9_011133m.g) derived from phytozome v7.0 (c hr-ID scaffold_34; pos 2115858 to 2116824 reverse strand)
aattgaaaccttatcagcctattttgccttttgaggtattttggcacggcccatttgagctttctcaacgttcttgattggtgcaatagagcgcgtggccgtgtttgaaaccattttaaaattagataggtgcaatagaccgtgtgattgtgtttgaaaccattttaatatgaggtatttagaattaaccccttttaatgttttgcttatttttgcagaaacaattcattttactgacaatgctgatacataatggttaagtgggataatttcagtaaaatttgttattttgttattcagaagtgacagtgctaagctgagtggttttgcttgtatagattttctgattggagtgaagttgatttgttacgtctggttttcttgattcaaaataggctgaatgcataagccattttgttaatttcatttcttcacttggttgtctgctatatgtttcatgatggacaactagattagtgcacttctagcctcgtgagtgtgtctcatgtaaattgataattcagttagtaaaaagatggcagggacttgaggctagatgctttttcctttcttcttgattttgttggctgattatgattttttttttattggttcttttgctattgcctattgggaaaattttgctaattttatagcttcgggatgcataagttgtttgctaataactgcattataccagttaacagtattagtgttaccttttatttagtagctatgttacttaattacttggttatgatttaaataataactgttatattgctaaggtaggttctaagagtgctcttgcaaatcatatcaatgattttatgcatttcaagccaatgatttggataatattgatgcgcagttcattacttcctcccagatgaattaattttctcttagatgaatggggttcctttttataggttttgtcaatccaacttggaagaaaacctgagga

SEQ ID NO: 87502 - DNA, 844 bp, Citrus clementina
  Intron number 2 from transcript clementine0.9_025771m (loc us clementine0.9_025746m.g) derived from phytozome v7.0 (c hr-ID scaffold_73; pos 58533 to 59376)
tctacataaaagtaatgtttctacaacttttgatgtgtacatgcgtgctttttgtttcaggctgttttttatccttttgctgtgatttcagtcagtttcatttttatatgaatgctgttactctgatgcaaactaaggttttaacatgtgcaatattgtgaaaattttgattgtgtagtttgatctttattcctatcttaggtccttttcaccattatgtttttctgttatctttctagtgtttcattttcttgataggattttttgtctaagattctcatgttcctcaatctgtcaaataaaggtggggtttatcaatctcatgaaccattattgttttatattattgtcttgtgaagtaggcaatctggctaaaagaaatagagcttattatagtcttctgatctaacggccctataagggggcaagtacttgatcctgacgtaaatctaactcagaattgtccttaacatatggtcctgcaataagtctatataggtttgttattctgataaagaattaactgttgatgggtaatccgaatagtcgctcactcaagttagtgaatattccttcatagtagatcagagttttgttataaggtacccgccaaatactgtccagcaatactttgtgaaattatttttgcatcttcttcaagttcacttttgtgagcatggagacttatcgatgggattgaaaattttctaatgtttctcacttttttatgagtgccattatttactgtagcttgggatatctgcctgcttatatttttgtgatatcaatgttttactaagtactactaatcttgcagaaagttgagcaagagaaattggagaag

SEQ ID NO: 87503 - DNA, 954 bp, Citrus clementina
  Intron number 2 from transcript clementine0.9_010914m (loc us clementine0.9_010914m.g) derived from phytozome v7.0 (c hr-ID scaffold_9; pos 3577308 to 3578261)
catatagtttggctcttcattttcaacaattatttgtttcgtacagttactgcatgcattgattcaagagataaacgtggcaataactgaagttaattattctatttataattagatcataatgtgcatgatattttcaccttgcatggcaataaatgataatatgagagagaacaaaagagcttgagagaaatgaatagttcctgtttttttcaaagctttaaattttgtacttcctttttttctctattcaaagtcatgcatttacaatttcaagtaaatgtttggcattttttcttttggaattctaatcgtaaattgccaccacttaaataaaaagaatgattagattccacacaaaagagaacaaattgttcctcgtatcatggaaagaaattaagcaccagccagcctagccaccagccaccctagccaccagccactagcctctagcctctcccttgacacttgtttgtttccactaattcttaattcccaaaaacaaaaggaaaaaaaaaagatatagtctcattcttacatcaagatttttttcttaatttaatcatatactgagtaaataatttaattattaattaatagttaataaattaaaaaaattatactctacctatacattgtcacgaaaaaaaatataacaattttttttaaaaaattcagtaaaattaaaattaaaaaagaatctcattctcttattctcatcttatgttaagatttactttataatcttctaaaatgttccatacttttttgtaactgttagatcactattaaaagtgatccacaataattattatgtcactatccacaactgatggatattttccttgtgccactcattagattccctagaccaaaaaaaccacttgtactaaatttttatcgtttgcaaattatacaggaggctaggtattggcacaaaacttgtgcaaaaat

SEQ ID NO: 87504 - DNA, 684 bp, Citrus clementina
  Intron number 2 from transcript clementine0.9_026328m (loc us clementine0.9_026328m.g) derived from phytozome v7.0 (c hr-ID scaffold_9; pos 544172 to 544855 reverse strand)
cactgattctcagagctggggtttggtacctcaaggtctctctctcacactcgatcatctctcatacgcaaaaacacgcatgtgcatttgtttgatctgtgtaggcattttgtttatttgggtaaaggttttattagtaaattttttttaaatagagcttttattagaaaatgtctagttgtttggttgttgacgaatgcttttattaaaaatttataaaatattttaataggtaatttttttagagttatattataaaaaaataaaataagattgttaaataaatagaagatattttaatattttaaaaaaattaatttctactcctaaaaatttaaattttgagcatttattaatagaagcaaaataatttatttaagtttcaaaagttctaataaaaaataaataaattatgataagaacttatgaaattaaataagtatttatgactattatataaggtataccaaataggcacttagtctggtgacttgtaagaaaattgtctgatatctaatacatacacaacatgacaacagaaccaattgacacttccatctttccttttattgagatggttgatatggtgcggtgataatctgatattttgaaattttttaattatcgtcatcaccagcattcttatttgtatttttcatcttggcttatgttgcaggaatctcg

SEQ ID NO: 87505 - DNA, 947 bp, Citrus clementina
  Intron number 3 from transcript clementine0.9_022366m (loc us clementine0.9_022366m.g) derived from phytozome v7.0 (c hr-ID scaffold_34; pos 596772 to 597718 reverse strand)
ggcagaggtatgtcgaccttaaactcattgaatttgattgttatctgtgcagttcttatatcaaatttaatatctatgttgtcttaaaataataaataaataaagaaagaaagaacaaggtttccttaaaaataaacctgaaccttcttattgaagtttttcattggcaatttgctttttgttttttatttctctaaggactttattttctatcatgattttgcaaaattgaactgatagtgcagtgtaaataattttcatttttaagatttcctacaaagacttatgaagttaatggaaaatgctaactgtcatactattttaagaaccaattgttatacttgtaattagtgttttttttttggattactcctcaatctccttgtcaattggaattgctttttatggtctattttcccgtatattcttggcatctaagaaaagatgttcgaaaccttgtgttagttcgcaatattagagttgcattacaatgtagatctttataaattccaactttcaaacttacttaattttagcctttttggatggtatgttgggccttaatttgcaactagttcctccagttttcatggtaagttgtaacaccccattgaaacaaagcttttggaggcatatgattgtctacctacttaaagtttatgtttttgtttaactgggaggaattgattgaattataagactgccaaagctgtcaatgaactttatgctcgccatactttagctattggactgtgaatatgaactacatccaaagtcctaggtactgttgtgttggatgatcattcagctatatgctttatcctttcctttttaatgtgaactgcatcaaacttttcctgggatctgtattgaatttcaagatgttgtttactttgttcagttccacctatctactctgtttcttataatagttcttttgttcaggc

SEQ ID NO: 87506 - DNA, 843 bp, Citrus clementina
  Intron number 1 from transcript clementine0.9_004794m (loc us clementine0.9_004794m.g) derived from phytozome v7.0 (c hr-ID scaffold_80; pos 1082942 to 1083784)
gcccgccttccggttcctgatctcattattctccagtgagttctcttatttcgcgccttttcagtgatcctgttaactttacgtttgtttcccgatggaattcgcaacatttatcgcatttcatagtttcagtatttgcaaaaccgctataacggttttgatcctatctgataatatcatttggagcgtaaatttgtaaaaatcgtacttttaggtgtgtttgctgacacaacatgatttatttgaaggtgaaaatcatgttgaatgccgttttggtctgcattttcgatggtactatggatatatttataaaaaaactgttatttttttttgtttgattaattgtttgaactggataatcggtttgtaattatctttttaatattttttaagagccgggataattcttttttaatgcctgtcagttgcaattaattaataaattgttttagtaaaaaataggtcgcttattacggaagttgttttatttaggagaaaaagggaacttggttctctaatacgggaatctagccgttcacaaaagacggctttcaagttgtcaagataaagattgccatatgctgctgatatgagtatttatttacttgtttgtccacttgtttatttaacttccaacgttccatgtgaatccttgtattttctctcaccaaaagagcagcagatttttggagggtaagtgttgtttgatcaacagaagcttttcttgtcgcccatttcaagttaatgggggcacaaaatgttttttttgcccttcctttttaattgggtgtctggcgattcttttacccatcaattagccggcattttcaggttgctcctccg

SEQ ID NO: 87507 - DNA, 278 bp, Citrus clementina
  Intron number 2 from transcript clementine0.9_032766m (loc us clementine0.9_032766m.g) derived from phytozome v7.0 (c hr-ID scaffold_17; pos 1573589 to 1573866 reverse strand)
tgtacgctatcatttttctctctttattatgcatacatggcaattaatgctatttacatccctaaaccaggaggttgatctatttttatttttttaatttttggatggagacgagaaacttatctgctattgttattggaaaatgaaaagcacaagccaaattgatgacaaatcaaagagcataggctcttttactttttttttttcaattttttgtttcttcttttttgggttgaaatgcatctaacatatatatggttcttgtttcagctcccttt

SEQ ID NO: 87508 - DNA, 336 bp, Citrus clementina; identical to SEQ ID NO: 87312
  Intron number 1 from transcript clementine0.9_001831m (loc us clementine0.9_001232m.g) derived from phytozome v7.0 (c hr-ID scaffold_78; pos 414310 to 414645)

SEQ ID NO: 87509 - DNA, 229 bp, Citrus clementina; identical to SEQ ID NO: 80459
  Intron number 2 from transcript clementine0.9_001831m (loc us clementine0.9_001232m.g) derived from phytozome v7.0 (c hr-ID scaffold_78; pos 414713 to 414941)

SEQ ID NO: 87510 - DNA, 899 bp, Citrus clementina
  Intron number 1 from transcript clementine0.9_031097m (loc us clementine0.9_031097m.g) derived from phytozome v7.0 (c hr-ID scaffold_17; pos 1911807 to 1912705 reverse strand)
tcgactttgcttgcaaagaattggggtttttccaggtaaatttctttttcaaagttagtacttgtctttgatgttcataattgcttcttctatctaccacacagttcaaatcatactgcatgcattaggattagaaagtcacactcactaaggtcaagtaactcacaagcatgaacaagagtcccttcttcagagaaacattttgatcaccgtggcgtgttccggacaatgaggaaaagatgtcatgcctacacattggtttcaagaaaatatatcaatatgtaaaataacaattatactctacactgtctgttctgcactttttttaataactaacttgagactattttgctgttgtatggttttgctaataaacttaacaggaaactcttattcattcttatgttcgtgtttctggcatatttaaccagttgcaaggaacaagttctttcattgcatgatagcaatacgaatattgcaacaaattttgagtttatggattctgcgtcatgcttgggtgaagcattactttataagaattgagtgaagctgtactggctggtttttgatcttgtaaagtttaaaaaagcaggaccaaatttgacgcctccttattttcaaaaattaatttgactaaccccaaaaagaatcctcaattgaatgcgaaacatgagttttacaattatttaaaatcactatgtagtttactgttacagtgatcttagtgtactagaaattaatctatgcttatatacattgctgtaattgaatttggtccctaaatgagtcaaatttactgttactcctttttttttatcatatcagctggtaaatcatggagtgagcccatcattctagagaaatgaaagaaagagatcaaagaattcttctatctcagc

SEQ ID NO: 87511 - DNA, 975 bp, Citrus clementina
  Intron number 1 from transcript clementine0.9_020064m (loc us clementine0.9_019838m.g) derived from phytozome v7.0 (c hr-ID scaffold_55; pos 1318533 to 1319507)
tgtctcatctttcacaaggcaagttttggtgtttttgcttctcatttctctactgcagatttgctttttttgatatttttggtttctgggtctatttgattctcatttatttgcaatgggtttgttttgttacttcaatgagtgtatgattgcttcttttctttgatgggcttgacattttttctaaaatttttggtttcttggtgtttttttttttccacggttatttacttttccatgttacttctcattgctttaggtaagttctatagttgataattttgcttaatttgattcactcattaaatgattcattgcactgcgtatgtttcccatttttttctgttgaattttactgtttatttgggcctaattagcaactgttcatgtccactcgcaaaattttgacttgcgctcttgcttctaataaatgcaaatcctaacctctgcatatacgaaaatgaaattttgctaatagatctaacgaaagatagtgccgcagttcatgtttgactcttgggtcaaactacatatgggattaagagtcaacaatgtaattttgtgttttttttttggggggggatcctaaaataatgaaatgattaccaaatttcttctgtatcagaaattagatttcatggtcaatatatttgtctgaataaaactgcctagttttattgaaaatttagatgcagcctcgcaatgtaataagtcaatgtccaatgtactaaatgccatgtatcattgaaatataatgacagatatccataatttggcaagttcatatttttttcattgagatgtcttagactgttaagagataagactcccgattactattagttggatgcatccatactcctaaatcctaaagccaaatgataggaaaatgatgtgagattgatatgttctctaatatatcactgcttggccacatgtaggaagtggtgaattgttgatagaaatagctccatc

SEQ ID NO: 87512 - DNA, 791 bp, Citrus clementina
  Intron number 7 from transcript clementine0.9_018200m (loc us clementine0.9_018200m.g) derived from phytozome v7.0 (c hr-ID scaffold_62; pos 265908 to 266698 reverse strand)
caggtgcatttgggtctggcaaaagcagagcacaagtaattgcttttacatttttgttaattcctacatctccttgctatgtttctaaggatcaggatcctctcctgatctgagcactcctgatcctttacagatcttgtgccacttgtgttttaatgttagtggatgattaggatttaactactttttctttttaatttattaaagaccaatcatattaatagaattttctcatatgaagatcagatcaggagaggatcctgatcctgtttctagaccagctactgttggaagaatcttttgttattcctttatttgttagcctggaaatattataagttatttcaaactgttgggccttttagccacagaataaaaaaatgcaatgaaaataaaggctttttgagtaggaaaatacttatgtcacttaacatatactacctaaatgccaaatgttaggggtcattgtttagctgttattggcttcttttcacccagctttttcaatcttttgacgaaaaaataatagaagaggttaaggtattttagtaggagctgtctaggcataaacagagttaaacatctgatgttttgatacttatttgtcttaatattgcatgaatcccccttttattttaaattttctgttacaaattattgtaaattgttcaaggaagctataaatgtgacatcgtttccctctctgtctctgtctcttgtaattcccaaatgacattaatgttatttgttgatcagatcattggggattccattgcattttcattaggatt

SEQ ID NO: 87513 - DNA, 741 bp, Citrus clementina
  Intron number 3 from transcript clementine0.9_018200m (loc us clementine0.9_018200m.g) derived from phytozome v7.0 (c hr-ID scaffold_62; pos 267463 to 268203 reverse strand)
cttttccacgaacacgtttcttagtaccctgacaggtaactttcttcgttcttaagttttatttgtaatcaccgatagtatgcttaattttgaaaacaacccatttatacttgatagctgctgactccgtcccacaacggctttgtattaaagtcaccacaacatctcaattccaaacatagactacagttgttattgcgagcaatttagatctgtttgaaggataatgactgttgtataatatggatgggaattacatgaagtttgaatcgcataaaaagagttccattagttggagaatgaatgaatatgggaagtcaactaattagctatctcatgaaatcccatctctggtttgattttctatttcgtttacctttgttttgaaaggcttgcaagcttataatagttgtatcagcttgcttgccatttatattgtccaaattttgtttgctttatatgcctttttgagattttggtctttgtttaggaagctttaattttgaatagcatttctgtatggtaaaaaaaaatgtaaaatttgtcatgtatgatctgttagtttagatgtagataggatgaataagttctaattatcttttctgcccttcaaattctagtttcttcacattgatttgtggatatttggtgtacattttagttgatttaaacaacttttttattgttcttgcatctacatctatatgttatgtttcagtggcaatttggcagcaattggca

SEQ ID NO: 87514 - DNA, 664 bp, Citrus clementina
  Intron number 2 from transcript clementine0.9_029166m (loc us clementine0.9_029166m.g) derived from phytozome v7.0 (c hr-ID scaffold_26; pos 2853807 to 2854470)
ttgccaaagccgcctttggttagtacatagaaagagacagacatttctacaatattttaaaatgcaaatacaactgaatgttaatcaagattagacggcattgtctagttatatataatgccctgtcaaacctcaaatctccaaaacccaattcaaagtttttcatgcacaaaaactttcttttttttttaattaaagcagaatgacgctgagatcctttatatacatttctcacttttaccacacaggtccccactttttttaattaccctgtacaacctagtttcaaaaaatctacttttcagtttttagttatttttttttttctattatactcctattatcagtgttttgtaatgtgtgtttaatatgagagagcctttggagctcctggagcaaaccctcatccatccaaagcttgttacgtgtgtatgttagaggtaccaagaattttgcacatggaaaattcaagtaaaatttaaacattgaaattacgaagccggagatgtgcataatgagtaattaaggaaaaagtatgaaccagagtgttgttctctcccgtttttattcctttttcttcttgtatcacgtgttgaacggagacttgtagctataagtaaaagagacttattatgtgtacagggccgaagctggcgaaatctct

SEQ ID NO: 87515 - DNA, 978 bp, Citrus clementina
  Intron number 2 from transcript clementine0.9_012183m (loc us clementine0.9_012183m.g) derived from phytozome v7.0 (c hr-ID scaffold_6; pos 4540985 to 4541962 reverse strand)
gagctggagcacgcaactggctgttacagtttgaggtaatcttttattaatttgtttagaataataattaaaagcaaaaaaataaaaaattgttaaaaatggaaagcggacaaaaaatgattttgtccaatggttggtggccaattcagcaattctcggtaccggctattttggccaaagaggagaagatgcgacgactgtggtcgttttattggtgtaatggtgaatgattggatgtgtttgttaaaatcaatacgacatcgttacaacttttattttgcagtgcctagtgtctcgtgcatgttgtctttttgcaacttgtagttcactttattctgagtggtgctgccgattcggtggcatgtattataagcgaaacacaaaataaagtcttctttacaattgtagcggaggcctaagggtggctaaaaattttggaatcagtcaaaagtaccgaatatatagtgctcatatgatttagaatcttaaaatttattaaaatttgtaataaattcaggattttagattaaaacatttcgatctctttttctctctatatatatattaaattatttaaggggttgttcaattatgatatcatggatatatttcatttgtagctagataccttttaaatctttaatatatgtagtttgtaagtatttgagtaaacccatgttactttgctggtcctattttggacttgcaaaagaagtatacggaggattacgcaaaggacagcttcatgtcccagaaaaacaaaaagtcatgtacatgtacatagaagagtaactgctctatactaaactttgaacctacggaagaataaatagcaatgataacatattaaatctcctttaaagaaaaaaaaaagatgacatattaaatgaactaataatgtcagttagattggtgggtcgttgacattaggattctcattttgaccattttattattattagggtggtgggtggtgta

SEQ ID NO: 87516 - DNA, 447 bp, Citrus clementina
  Intron number 1 from transcript clementine0.9_001750m (loc us clementine0.9_001750m.g) derived from phytozome v7.0 (c hr-ID scaffold_9; pos 3334713 to 3335159 reverse strand)
catttgaagaagctacagcaagccggtttattcaggtaattaagctatattttcttttagattatattgcaccactgatttattttatctgatatgctgttagttcttaatttggtcatgtcaaattgagaaacatattttcattcattaactgatctatgtaagttgaaatttttagtcaaaaaatattattaatttttaccaaattcttattggattacctggggatccgtaactcaaaatatatgttcagatcatgtctttcacggatttagctcagcatattttgtaaatcttccaaattagttcaaagaaattatattattatttttattcctttaggtttaacattttatcccaaaatttgatgcaattttgataaatgaaattgctccagaagaaatcatatacgctaatgttatagtgatatacttgtaggacctgcct

SEQ ID NO: 87517 - DNA, 324 bp, Citrus clementina
  Intron number 1 from transcript clementine0.9_033725m (loc us clementine0.9_033725m.g) derived from phytozome v7.0 (c hr-ID scaffold_32; pos 488091 to 488414)
gtgttggtattggtagtcatccacctggtaattaacttatatatgctgaaactccaccccctatttttttgggcaatgattatatctattagtttttctctttagaccaaaaaatagccttttgcatatcaaaacttaattacttttacatgatttcttttttaagcttccatttgacttaaaagtatcacaaccatgccctatttttccttatgaaaaaaatcttcttcggctttagcttgtgaagaaacacagtactaaccaaacttcattgccttctgagttacaggccagagcccgcaggctttaccagtcaccatagac

SEQ ID NO: 87518 - DNA, 827 bp, Citrus clementina
  Intron number 1 from transcript clementine0.9_000870m (loc us clementine0.9_000875m.g) derived from phytozome v7.0 (c hr-ID scaffold_6; pos 4863834 to 4864660)
aactcggcggcgatttgagttgaaagaagcggcaggtatataataataataaaaaaatcgtaagcttttttttattattttgtttgtggttgtttttcttcaaaacagcggagaagcttctctcctgaaaagatctaaatcggctttgattttgtaattcatcggctgccgaagattaaagttagggtttctctctgaagaggataatgttcacatgccgaagcgacgatttttatgtataggggttcttgtatcggcgaatccgaggaatcttttacattaatctcgtgtcttcatcgatgacctcggcttgaataaaatctggatgctaatggcgcagatgaattttttatctaaaatttctttataggagatttgaactcctaatcttttgtttacatgattggatctattggttgcggatgatatatgcatctccgaaatctcaaagcttttgatggatctgaggactttgcgaggagaatttcgaaacaacagattcatagatgttgattttagaacttagaagcctgtgattagaaagcatcatctgaatatttaatcttttttatgtctgttattatatcctcgtgctctggttcctagtgttggaacctgcttattgaattgaggaaatcatgatctgccttgcttatggaggcatataccgccagtcttataatttcttatcagcgtttgggcttgataatatgttatctattagctggactagctgttaatgttatatatcgtcttctactttaagctgatctgaactttatattattacaggttgtagtagtttgcagatctgagaattcttgagt

SEQ ID NO: 87519 - DNA, 572 bp, Citrus clementina
  Intron number 3 from transcript clementine0.9_012582m (loc us clementine0.9_012582m.g) derived from phytozome v7.0 (c hr-ID scaffold_34; pos 1489679 to 1490250)
tcgagaaacctggatctagtaagcttttgtgaagctttgattgagttattcataattcctagtgactacaatttggatgactattttgtgtttttagcattaatttggagaaaagaggttttgaaaatttgacattcctgtactattaagatataatatcactaaatgtgatgtgcaatgtcattcttctggcttagcaaacagaatagtagcatattatttgcaaatttaatgatttgtgtctgtttgattgttgttttttactattaattcatggttctatcctggataacaaactcttcagtatttctttgcaaatattttggtttcaaaaaattaattcgttgatgtaattttttttttccttttcggtagtcttatatttggattgtgcaatgttttgtatcaaattcgactgcaattttggagttcttataggactttattatccatgatcttgtaatattaggtgaagaatgtattttttttttgttgaaaattcttatcttaacaatatttgcttcttttcacctttagagcttcacaagaaggagacctgtgaggctgttacc

SEQ ID NO: 87520 - DNA, 776 bp, Citrus clementina
  Intron number 1 from transcript clementine0.9_006744m (loc us clementine0.9_006739m.g) derived from phytozome v7.0 (c hr-ID scaffold_32; pos 551551 to 552326)
caacactcaaaagtctctgcagtttcaactggtaagtgttctgaaatttattttgttaactttttatttatttgtttcattgtctgcttcttcttcttcttctttctttttggccgggggggggggggggattaaagatcagatttttaggatactgagatggtaaaaattgaatcttttgatctgtgtggacaattattcttgttgttgattatctggggtttggttttttatcggtagaaagagtaaaaaggtgaaaaggactcgtctttcaagaaaggctcatctgagttgccgtagatccaggaaaactcgagtttaacatgtgagaaaaaaataaataaataaaggttcaactttttagggtttttcttgtgattatatgtaggtgtggttttactttttcctaggttcttctcattgcttcttttgctttcccttgttgtgttttttaatctaaaagaggcttgattttgatggtgtatttaagggttgttaatcgcgataacatttgggtagtcttggtttattctttctaggaaagtttggaagaatttgattagtgaagtcttagttggctttatctttggaaactcaaggctggtagtgaattagatctttagatgaattagatccattttctgacaccagatctgatgaagctttgcatcttgttcatgttaacttattccatctttaatttgatcttggtagtgtaatttttggttagtgtatgtggaggttttaagcagattggtggatcattgagggttatt

SEQ ID NO: 87521 - DNA, 721 bp, Citrus clementina
  Intron number 1 from transcript clementine0.9_029867m (loc us clementine0.9_029867m.g) derived from phytozome v7.0 (c hr-ID scaffold_34; pos 247493 to 248213)
ccggctccattcattatcctcgtagcaccccccaggtattaattctatcgctgcatgccgtttcgttatgaatgcaaaataagctttgatacatggaaatgagagtgatggccatctaagttgaaaaagctgaaaatgaacataatactagccagatgatacataatcatccaaatcccgttgttttgggtaggtgaaatatcatattgttgttgagagaatgatgattttgatgctgttcaaatatctcatttctggtatatgaatttatttttctatttacagcagccaaattcattctaaatgagctgatgctgctcatcttctgcgcattgaaacgcaatacaaatatgttatgtagtttaattgtttcttcaaatatttatctagactctctagcaagcagttggtattcttagaattttgagtcctgtttatgatatattttaaaaagtaatgtttcatttacatgataaagaactcaacatccattgtagaagcacccattaccccccccccccccccccaccccaaaaaaaaagacacaaaataatatcatactcacatgtgacatctcaacaaactcaagctgccatgaagatgaagtagttcacaagttgtacacaaatcagcaaaatttgtttacgctgttgaacatttaaaacacaccaccctaacaaacctaatccgtttgttataattttgttttttgttttttcag

SEQ ID NO: 87522 - DNA, 815 bp, Citrus clementina
  Intron number 1 from transcript clementine0.9_028081m (loc us clementine0.9_028081m.g) derived from phytozome v7.0 (c hr-ID scaffold_9; pos 1055256 to 1056070)
gaagatctagaagaactggtattgattctgtttattctctcagtactctattaatataatattagtttgctcggaaccctgctcacgcatgcaacactttgctttgttttgatcatgtttcatttgcttattcatgtaggaataccaactctgcatgtaagtttagtggttgatataattgaatcaatttgcttctttttgggttctgctaggaaagtatgccgtgcccaatttatttattttcttcccccaagtataattttatatataacttctgagtttaaaccgctaatatgggcggggaggaaattgaattaccatagtcgattttttgcaaggagttttattcaaaacattttaacaaaaggttaggagagatcatcagaagtaagctctaaccataaaactcgataaaatgagtgaggggattggattattatgtttgatgtaccaaatgtcttaaacaactgattaggatcaagttctaaacatgaaatttgctccaatcatatagttgaagaggagattgactgattgggttaccttgttcagtgttttttactaagtgttttaacaaaatgataggatagctgaaatctttagcggatgcttataatatatttcttttattacttgtagatttacatattattgcattaaagatcattaaatgtgatgggtagatttgttttctgtttttgcctttgttcatttatggagaatgaattcatgtcaaattcttttgattttccaatctacataaccttatgtttgatatagggactgtgtggactgcaagtgcacatataattaca

SEQ ID NO: 87523 - DNA, 464 bp, Citrus clementina
  Intron number 1 from transcript clementine0.9_018565m (loc us clementine0.9_018565m.g) derived from phytozome v7.0 (c hr-ID scaffold_54; pos 1281749 to 1282212)
atatcatctcttccaccacccaccttcttcccgtaactttttaatttatttaactactcaatcttttggctattttatatcatattctgcctcagtgtttatgccaaaaaaacattaattttgaaactgaatgaatatacagtgaagagtttatctgatggtatatttaatttaacattagggtcctttttaggcttttagtgtgattgactatggcattatgcattgatggataaagagaaaacctttgtaaaatcaatccaaatagtctatgtaattaattttaataaagccatcgtgtggtagtgattcctctgttggctaaattgttactgcttttccctttttaaagcatttgagttgtgatttgtggttgtacatgtcacatgagcatattttagcatgattcatttgtctacttggtttcagaactgcagcagcagtctaaattctgtgatccggag

SEQ ID NO: 87524 - DNA, 811 bp, Citrus clementina
  Intron number 2 from transcript clementine0.9_011534m (loc us clementine0.9_011534m.g) derived from phytozome v7.0 (c hr-ID scaffold_9; pos 4241984 to 4242794)
gagaagctcccttgtaagcaaatttagctgtctttgtatgttttgttatatttccttttgagtaattttaattaggttcctttgtcatgtgtattgttgttaatctacatggctgttatcaaattttcaatgatgtggcttttgattcatagctattatatcgtgaaagctggtagtttactaaacactttaacacaggtgctttctaaagtaagcagaactatagccgttaaaaatgactttattattcgtgttgattgcaacataagattttttttttttaaaaaaaaatcaaattaaaacatacactttttggatctgcactctaatttggaaaatagaaggaggtttcttgaaaatgaaagcgagttgtaggtcgaataagccctgatgcaatgttgaaacaatgttaaacccaatagcctatttttataggtagggcctaagattgttgtcttctaagctcttatcaattcttcatctttagtataatttacagtgtcttattattaaaaaaaaaaatgtttggtgaattttctctgtgtagcacatgcaaataatggtacgacgaaatgtctatcgatgggtgaggagtttcgttctttctaccaatgtggtttggttcaaggattattggatgcctaacttctttttattcctaatgaagtcagagttacactgcattcattaaagtcaaatgagttttcggatgacataaaactggcggtggctaatctagtcatgaaaattgaatcttatacttgttattgatgcagggattaatcattttcataagacacctagcagggag

SEQ ID NO: 87525 - DNA, 648 bp, Citrus clementina
  Intron number 1 from transcript clementine0.9_007785m (loc us clementine0.9_006661m.g) derived from phytozome v7.0 (c hr-ID scaffold_9; pos 2615810 to 2616457 reverse strand)
ttcaagcgatccgccggtgggttttgacaatcaaggtcagtcatcttttccccaactgttgttgcatcaaaagggtttgtttgtttgtgtttttatttgggtatgtgtagaattatgcagaatgtagttctgttacgtgaatgctgatgtgggtttattgaacttttatctaaattttaatttctaatcattttggaagtttaaagcttttgaaattggagaaaaaaaaaattggaatttggtaacattttccgaaaaggatacctttttctttctcacggtttcaatgtatgaactatgaagcttatcttgaaggatatgcagagattatggagcctgggtggccataaagttaatttcttgcttatttttagtatctacggtattgtgtagttgcaaattaggccagaagagaaagacaatctcgatgtaggtgaaaaagaatttctcagtaaaggtcaatttggatctaattcaaccataaaaggcagcaaaaagttacctttttttagaactttatttcaccttcttatttgttacctgatgatactcaatcttgtgtgctttaaattgaatgttattgatattattgttgttgttgttttggcaaatgtgctgacctttataattgaaactgtggcagggaaa

SEQ ID NO: 87526 - DNA, 929 bp, Citrus clementina
  Intron number 2 from transcript clementine0.9_007432m (loc us clementine0.9_007432m.g) derived from phytozome v7.0 (c hr-ID scaffold_19; pos 3616228 to 3617156)
ttttgctcggtttcggtatcggtttcgctaaccaggtaaattttcatttgattctgattattccttttgtttggatcgagagattagtatgttttttagattttttggatggctctgtttttgttattattattcacaagttctgtgaacaggacaagaaaatgtgctgtccgaaccaaataagaatctctataattccctccgtgaattatttcacttgttgtctcatgtgtttgtccataaaacatgtccttttgtgttattattattatttttattgttttggggttgtattgtgctcttcagatctgttttccaatggtttccttcccttaagagatcacacagtttcttgcctgcaaaacgacaacaatgtgtttttaacagaaacttgtctttgcttttacccacttctgatcattaattttctatatattcagttccgagtttctttcaaaatcagtgttattgatctgtttggttgatgagaaaacgtaggaaaataaatggagacttggtttttgttaaatattactttttcaaagtcgtccatggcttatttttcttcgcaaatgacatgttgtgtggaatctttttccgtgagtgtttacttctttgctgcaacgtcgttgagtacaaaatcgaaagttaatagcttgctcttattattatattaattatgcaagctgtattcttcttgttttatcggggcttaatttgcgtgttcaacagttaagctctgtctttattgttgaaaacagggcatgttgacataacttgtggggtctcctaggaagacctttttgttatttatttataatttaattattttatgattaattgattaagacacagtaatttagagttttaactaattaattatgtggttctgattgtaattacagtccgtgccactctacctctctgag

SEQ ID NO: 87527 - DNA, 440 bp, Citrus clementina
  Intron number 2 from transcript clementine0.9_022407m (loc us clementine0.9_022407m.g) derived from phytozome v7.0 (c hr-ID scaffold_36; pos 908677 to 909116 reverse strand)
acagaggcttcaccgaaacggaaaggcttggccaggtcaatttctatttaatattctctttcctcgttcttttatttgattaaagcattttttttcaattaattaactttaaatgtatacatacatatatatatacagaaattctcagatgctactttttaataatgacgacaaattacaaactcttatgtatctctatttaattatcagtaatgctactttgacggaaaagaagtgactcaaaattctgaaacttctaattttaatcattaacaattatcaaatcctgagggagttatgagctaaaaatctgaattagctgtttatgattcgaaacttgcatagagactataattaaccaaaatctgtcttggtctttctatttttgctttccttttttttaacctgcttttctcattttcttttttggtttctaggtg

SEQ ID NO: 87528 - DNA, 711 bp, Citrus clementina
  Intron number 1 from transcript clementine0.9_021147m (loc us clementine0.9_021147m.g) derived from phytozome v7.0 (c hr-ID scaffold_26; pos 2286291 to 2287001)
tctttctcattgccgctttcagtagtcgcagaaaggtttgatttttctttcacccatttgatgaaatgcgtgaatgagttagtgtgcggatctaagttttgtatttttgatgtgaaatttgatatggggttttgaatttaggaaatggggttgctgggtttctaggaaattttggctcttgtattggaaatgtcaatgcggggtttcttttgagtcaaattagtgtttgagcttagggatcatgttagaaagtgtacttttttccttgctttgggcaattaagcctattgcttgatcttctaattataattgcttattggcaaacaactctgcactgcctattacttgatgaaatttcatccgtttgctagttatttgggattaatattagctacgtgtgagatcaggggttttctcacattgtttgcttgtttcagttggaaagagcttttaagttcttgcgatctttttatcttgcaaagtgctttgactggtgttgatgctccagagaatgaggttgatctggaaatacaatcataatcattctagaagatggatgattatttaatatactgcatattggttgagtttttgtttttttttttttggtattaatattgtcattctcaactatttattctttttgttatatctatcaagcactgatctgttgctctacgatgatgctctaggaagaagagaaggaggaag

SEQ ID NO: 87529 - DNA, 827 bp, Citrus clementina
  Intron number 2 from transcript clementine0.9_006673m (loc us clementine0.9_006673m.g) derived from phytozome v7.0 (c hr-ID scaffold_172; pos 41588 to 42414)
gcaccgcttatttcattaccatagtcgccttgcaggtaacacatttatttatttattatgttaaaccctcgtaaaacctctggtgtttaattgactaaactgagctaactgggtatagttcatgttatatttaagtttctgttaaaattagagaaattatgttcctttatgaaaaatgttgaagcctgttcgttttcccttttactttattctctgatcttctttgtaaatttaatttatctggacattaaagaaattcgtggtaatttgttggtttcttttgactaccaaaaacatgtgttgaaaaaaaaacttgttccatcgtcattctctgtttggttatctggaaactcaaacgaaatcaaattcaatagggtttatttgttttgctttttcatctcttgagatcaaattcattcaaaatactagttttgcatgctattgtcacacacacatgtattgaaatcatattcataatattccttatgtaatagtcctttttggtgtaattggttcctgcctattatgtgtgtaatatttgtaagtaattgggagcacgttctaacagtgaacgtgctcccaacaaaaactcatcatctgttacaacccaaaatcttaattttatacacgtgcactggctctctccttccaaactcaagcgcttacacgcaacttcagtcagcagagtcaatggatttatattgcttatttattcggtattcttgaggttggatattttctcttctttaatacgcttcatagttgattcttaatggcaatttttaacgactctatagctcaaatgtaggagtgtagcgaggttccag

SEQ ID NO: 87530 - DNA, 324 bp, Citrus clementina
  Intron number 1 from transcript clementine0.9_003648m (loc us clementine0.9_003648m.g) derived from phytozome v7.0 (c hr-ID scaffold_19; pos 2260898 to 2261221)
gctcggcatcgacgagtctcccattcccatcaccggtactttttcttcatcgataattatcactattgactgcgttatttgatcatgatccgttttactatataagaaattaatgaattttctttttttggttttttgtcttattctcaattcagtccaactcatgatagtaatatattctttcggtccttgtttgacaacttctgccataactgaatgtgaatcttgcgagccttttgtttccagatttagtgaaaaattattgtaatgcaaggttttgaagtgttttaactaaagttataactgataatgttgcagggttct

SEQ ID NO: 87531 - DNA, 861 bp, Citrus clementina
  Intron number 1 from transcript clementine0.9_001863m (loc us clementine0.9_001863m.g) derived from phytozome v7.0 (c hr-ID scaffold_19; pos 2947720 to 2948580)
tttctggaaccagggatttgcagaggctacaagtacagttctttcttctgctgtttgttaccttttgatatgtgtgtgtgtgtgtgtagtaatgtaattagtggagccggtgaatatttatctaattattgtgttagctttctttcattttttgttttgttttgttttgataatcttttaggactgtttattgtggcctgcaatcattggagtaactctttgttaacttttggtgggttttgagttttgttaggaagcataagtttggtgtttaagcttttgaggttgttgaaattctttgaaattgaagttgtatgtgaaagttccaacagaaatagataaagaatgtactttgaatctttgttgtactgtataattctggtctctcacaatgttttaatcagaaatttcaattacggacaaaaatttaacacgcttccaatttggttgctcatagttatgatgcctttcaacttgaatttaatatgtttgctagaatgaactttaagaaaattcaagttttatttagttatcctctggaggctacttatataatagtaatgatttgtcaaattcctaatagaaaattcataattttttcttttgtgaagattgaatttatgtttggtgccttttttcatctgcaggaaaatctacaaaataagttttagatgtgaaagtaattgcttgttttaataagaacatgactttcagaagagaggctgctgttccttttttcaaattaaaattctcatatttttcactttctaaatctgttgatattgaaaagtctctgaacaatattaagatgttatttttggtgcaggttgagatattgcacaggtcaaaggagctcaattg

SEQ ID NO: 87532 - DNA, 1042 bp, Citrus clementina
  Intron number 1 from transcript clementine0.9_008942m (loc us clementine0.9_008942m.g) derived from phytozome v7.0 (c hr-ID scaffold_6; pos 1070312 to 1071353 reverse strand)
tggaacgttaggttgcgagagcccgcttactggtggtgcgtattctatttttcttcttcttcttcttcttcattttttttcaattttgtttttcttaaaaaaaaaaaaaagttgaagcttcacgttacgctattacagtttaccaatggggtaaattgtcagtaatgttagatagtgcggtctgaatgtgtacaaaataaaaagtagaagtagaagggttttactgtaaatatacattaaaataggataaagattgaagtaggcgctgaaagccttatgggcccacctcaagggagcccacttgtttttctgtggcaaattccaccgtcgagacgtccaacttgctgaaaagaatgggcgaatcgtatgaatgtctttgtagcttgttctgagttgtcgctttagttataaaattcactctaatattttaatgcatgactattttaatcttaacataattattattattattttttttaggggtttgatcttgtattctccattccaatatatatatatatgtatgtatgtatgtatgtatgattccaatatggtggagatgatttttattttcaataattttaaattttacaaacggtaattgatggttttattattatttcaccaaaattatatataaaaatttattctaaaatagctaaatagaaaatggactggggatgagtaatgtagtccccatatagggattctccatcccatcccattgaatttattagggaatgagttagagaatggtgtccaaattataaaagagggtggggagtggaggaggcttccccgcttccgcccattgtcattcttgatttctttagttaccatatgagactatgagagggcaaaaattatgttgagccggaaaaaaacatctagatattataagggcgctaattgaaacttcactcatgttatataaattttgtgttttgagccccttctaattttctctatttatgctattgtttgacaaattgattactttattgcagcttgcacatagtgcgttgtgataacacattcattc

SEQ ID NO: 87533 - DNA, 1011 bp, Citrus clementina
  Intron number 1 from transcript clementine0.9_017779m (loc us clementine0.9_017779m.g) derived from phytozome v7.0 (c hr-ID scaffold_22; pos 2320258 to 2321268 reverse strand)
aagcattaccacggtgtttctatctccttccccaggtacagtactcgtaaacctcctcctcatgaattattattttgatcttatcttcgatatcatttgttctgatcttttattttttattttttattattatgtatcttctttttcgtcgatggtgacttggtataatgattttgatttccttttattaataataaggttgttggggatcgagggagagaactatttgttgattgcatgtcttaatccggttgcttttgctttttgttctgtagtaaaactgagagaaattgcacagtacgtggccgttgtgaaatattaaaggcattttgattagtctaaattattagtcagcgtagccaaatacatatatatatattggaacactcaaaatactgattatgcaaccacaaggagcaaattaattcagattgtagctggttgagtgtacagttgtaatcatgcggctgaatctgttaatttcttgtttgatgggctatttttttcaaaaaatgaagattaaagagttgttatggggggtggttgaatcatgttgcttctgtggatctaacaatcatgttgccttttctggatctaacacacgaatttcatgattcttctttttaaattggcttcttttatttttcctaactgaactctttggagattgaccacatggtttcgcctaagactccttccctttagcggttgttgttgaaagacaatcatgttaaagatctggcttctgtatttaactaagccataatcaacccaggagatccactcaagcatatggtcctgtattctggtagttgcaacctgtatccatgctataatatttgaaattggttggttgctgtacctgtgtttttcctcatcttgacctacatgattgtttattctcaaaactagccatcttgctgttgaatcagttgagaataaattattcacatgttctttgtaattaatgttataggttgactcgattgctaaattgtgggatcagttgcc

SEQ ID NO: 87534 - DNA, 1064 bp, Citrus clementina
  Intron number 2 from transcript clementine0.9_034092m (loc us clementine0.9_034092m.g) derived from phytozome v7.0 (c hr-ID scaffold_9; pos 338288 to 339351)
ggagggcctcctctgtattctcagaggaaaggttagttgatttcgatttctaattttattcaattaaattaataatctttataatacttgttaattaatttcgctaagccttatttttattagattatgagatcatttgagtgtgtttttcacaagttattggtcatgcacaaatcagattcaggggaaaatgttgatttgtagtagccaaatttactcatcttgattaggcttgaataattgtggggcatctcagagttttcagcggtattccgcagcttatgcttcaattaaatcactgcattctttgagtttctagtttggcttttactcaaatctgatgatgtttagtagaattagtggcagtatttaagctgattattattgctcagcaaacaatatacatccaaagctttcgattagaatgcatacagatgtattttggtcttttgttcagctactttcttggatttttaggcagtctgtattttcaataatattctagcatgtttagtttttatcctgtgattacatgcctggaagtataaattttgagttggaattagtgattggagatgtaatcctaattatttttgcattctattgaacagcatcatgatgctaaattttggttcgccaatgatggggaatgacaaaatgagtttgagtccctacaagggactcatcctcccatgtacattttcataactgtgtaatagattttgcctgtatttggttcatatttttgacctatgcctggtagacgtttgtaatgtcagtagataataatcaggggaaagaaaaaagaatacaaacttataatttattgaatagcatcatgatacctttgcaagtataaatatacaagacaaaacttttacactcctgtaatttcttcctttctttcttttattttttcccctttttggatgcaagttggtagtttccattcattttgaaaatatatgaatgcagagtttagaagatgtaatataaatatactttttttttttggcttttgtctggaaggccatcctgcattaattggacgtcatcgaccattc

SEQ ID NO: 87535 - DNA, 428 bp, Citrus clementina
  Intron number 1 from transcript clementine0.9_005184m (loc us clementine0.9_005184m.g) derived from phytozome v7.0 (c hr-ID scaffold_9; pos 1015091 to 1015518)
ctttcagtcaaaagacacccttttcttctggtacctaccattaaactgatctaatctatctattcccactttgttattttttcatttcatatttgttgaatattatcctattaatatttgtattatttcttttttttcttcgaaaaaatattgtaatcaaatgaaccccattgattctttgaaaaccaatttgtacacgtgggcaatgtatcttattcattccatttgacaacgaacattggaaaaggccaactcaccatattaaaaaaaaaagagacttttcttacttttcgttgcttataaatggtgtgtttggtttcattttagcaaaacattaaccgtcgcagagttatttgctttctggtttgttttgcttccgctttgtgttattagtctttgcagaaactattgttgggtaggggggaaag

SEQ ID NO: 87536 - DNA, 639 bp, Citrus clementina
  Intron number 2 from transcript clementine0.9_005184m (loc us clementine0.9_005184m.g) derived from phytozome v7.0 (c hr-ID scaffold_9; pos 1015646 to 1016284)
cagcttatcactccttggactgtctctgttgctaggtgatcacacattgcgcaacttcatgttttgcttgattgtttcttctgttcctatgttcttgttctttaaagttttgatctttacttagctgtttgtttcaattgtgtttgtgttttggttgaatggttctacttgtacagcttagtagaagtgttacttagatctagagatgcataatttgaaaagtcaaagcttgttgattactgattatttcgtgatcactcaaacaaaagaaagaaaactatggttctttctcaagagtcatacaacttctatatgtaattgtttttcacagaacctagatctgaatatgatcccagaaaaaaaaaaaggcataagaagaagcttgttgaatgaggagaggctgttactaatttgaatctcgagaccaattcagtatatattgtgcacttggccttaattttcctagcatcttgtatgattctttcgatatgaaatacattgtttgagcctatagtctttgatgactgaaagggaataatttatttatttaccattgtttgaattgttaactaacaaatttatttgatcatcatattcgttgcagtgggtatactttgttgcgggaccctcgtcacaaca

SEQ ID NO: 87537 - DNA, 716 bp, Citrus clementina
  Intron number 1 from transcript clementine0.9_017733m (loc us clementine0.9_013648m.g) derived from phytozome v7.0 (c hr-ID scaffold_174; pos 11622 to 12337)
tgactctgttgagactttcatttttgactgtggtgagttggtgatcctctttactgcttacttctttttagtttcttgattttcattttgtagtgattctgcttatgtggggtttaacttagaatcctgacaatgattaatggtaattatttttggtataatgaggctttcacggattttgctgtaatgggtgttgagagtttttgagttctgattttgacaaaaatttattggagactgtttttggggtgattggttttctatgatttggttgatttatggaatagacattgacagaatttctgggttctgttgtttttattgaatgaatgaatgggcttgccttctaagatcttctttttgagaaaatagatgaaatccgaaacctcatgcaaatatgaatatcttaagctactttgtaagtcgaagaagatccacttagtgactgacatgtgcggaatgatattatattatgcacgaaaaaattttttgggaattgttttagttgcttcttgtattgagttagaagcattcaaatgatttagtttggtttcgcctttttttttcccttttaaatttgtcttgctttcgaaaattggctggttgcaggtgagttggagcctgagggattgataaggtttcgtttcttacctatgattttaaactcatgaactaataatttgcaggagttatttggaaaggagataaattaatag

SEQ ID NO: 87538 - DNA, 1053 bp, Citrus clementina
  Intron number 1 from transcript clementine0.9_017338m (loc us clementine0.9_017338m.g) derived from phytozome v7.0 (c hr-ID scaffold_9; pos 529112 to 530164 reverse strand)
cattttcttggcctctattgtctacctcgtggcaggtaatagattcttgacaactttaattgaaatgcattctctacttatttatgtaaatttcgctgtgggcatgcgggcttttgtttcaggccaattttgtagctaaatttgattgctattggtaggttagtgttattctaggtagcatggagaaagaaataaaaattacttagagacttgtgtaactctggcaacaggtttcaaactcctttcagataatttcaagatttgctttggtgcagttgtcgttcttggaatatctttgtatgaaatcaaaagaaatggacaaaagatacattgttaattagaatgccctatctttcttcgattaaagtggatctaattagagcattttcaaatggaagatttttcttttgaacaaaagcggtcatagttatgcattagtttagtgaaaaacttaaatttggcaaccagttaggcaaaagacaatcgttggggggggggaggggggtcactgtacttgatgaagcaatatttaatagtgaaagtgaggttccctgaccaagggaaaacgggaagctggcttgataggcagttcctttaggtgattttaagcttttgaaacgagcattgcactcattttatggtccagacccatatatggagttcatgtagggtcttgaaattgttgaattcccctccccccccccccccaacaaaaaaaaacaaaaaagagttttgcttgcatcttggtcctgcttcggtcgtgaaattctcaccaaagataatcattatcctgaggtcgtcctttgaatctgtgactcaattttcattttaagttgcttgtctttgattttagatgaacgttaacaagtttattcgtttgatacgcatttttataatgtagtaatttgtgatttgatttcttaccgagaatttttgtaatcttaaagatggtcctcagtttgatttcttgtttttaatatacttcctgctcaattcacatggtttgtccatgatgcagggattactgttgcgtatactgctccacgaaggcat

SEQ ID NO: 87539 - DNA, 897 bp, Citrus clementina; identical to SEQ ID NO: 78594
  Intron number 3 from transcript clementine0.9_022096m (loc us clementine0.9_022096m.g) derived from phytozome v7.0 (c hr-ID scaffold_48; pos 351913 to 352809)

SEQ ID NO: 87540 - DNA, 481 bp, Citrus clementina; identical to SEQ ID NO: 82027
  Intron number 2 from transcript clementine0.9_020325m (loc us clementine0.9_020325m.g) derived from phytozome v7.0 (c hr-ID scaffold_80; pos 999411 to 999891)

SEQ ID NO: 87541 - DNA, 204 bp, Citrus clementina
  Intron number 4 from transcript clementine0.9_004093m (loc us clementine0.9_004093m.g) derived from phytozome v7.0 (c hr-ID scaffold_6; pos 3000380 to 3000583 reverse strand)
ctttctgggtttacttgcactacaggtaaccaacatcattttgctgtttattggctcttacatttcactttaccagcgccaaaaaaattgaagaaaagaaaaaaatctgttgtgctatttgatttttctaactgactaaaattgggatttgttcctcattcttgattttaattcgtataaattagttattgtgcttgtaggctg

SEQ ID NO: 87542 - DNA, 624 bp, Citrus clementina
  Intron number 1 from transcript clementine0.9_011916m (loc us clementine0.9_011916m.g) derived from phytozome v7.0 (c hr-ID scaffold_2; pos 5520787 to 5521410)
gatttttggaggtattaatttgtaatgtcagtttttacattactattttgagcaaaactgctttttgcagaagtgctttttgatgaagcatctatctattgcttcttagaaaagggcttcaagtggttttcctttttttttcccctttttctctcttaagaagaacttttatataactgaactaaacactagaaaataagcacttttggtaatttgaaattgctttgtagtggtgctaaaagtagtgctagacacaatataaacctttagtgtaaattcactagatagttgcttcaaatgaaaaaagattagagatattataactgttacttaacttgaattagggaatgtgtgtaaaagatttgagtgtaaaatagttcagaaatgaaaaagaatacagaagcatcttggttgaaatgatagccatattttaatttcttgtatgttgaattgaaatgatttattaattactgaattattttgtttcatgtgtgaggaagtcttttgctgtgatagcttttgaaacagaacttgtttagttgcttgttagatttggctttaagtgctttgatgttcttgattcatgaatgcaattgttttcaagatggttttaacaggtctcgg

SEQ ID NO: 87543 - DNA, 795 bp, Citrus clementina
  Intron number 1 from transcript clementine0.9_010471m (loc us clementine0.9_010471m.g) derived from phytozome v7.0 (c hr-ID scaffold_26; pos 3296289 to 3297083 reverse strand)
gttcttctcctgattccttttctcgttaaggtattaactttttgctcatcttgggttttgtttttctttttcttaattattatgtatagtgtgtcatctgatctaggtaatttgggaaatttttattttacgagttgcaattgacttcttttgaatatttttcccattttttgttttgttagatttctttgcttgcagttgctacgattcatttattatgttagatgtttgataatgtgcaaaatcacaatgtgaatctatataatacgaatgacggcagaggaagaaaatgaatgatcttacatgtactatgtaggttgaggtatggatttcggcagcaacaatagaatacacggctagttgatcttgcagttgcttatggtttcagagtgtcttgtagttgtttatatgtgtcctttaaaatttttggttcagagtatctagtatttgatgtggggagctaacactggtctctttgtttagcgatacctggttgctgtccttacggcggcagattcatttgtaaaatgtttgatcttcataattgtcgcaatctcttttaaagtttagtttcatcattgcaagtttatacgtcttctttcttgttttcagtgttcctttctttttcttttttataactttataggttctgttaataggttttgaagagtaacaaagttggctgtcatcattctttaatggattgctagtggtgtccgtgagctgttatgattgtcatttcaagacactggaatatctgattctcctttggagaagtcaaggcaaactattggc

SEQ ID NO: 87544 - DNA, 857 bp, Citrus clementina
  Intron number 2 from transcript clementine0.9_025600m (loc us clementine0.9_025310m.g) derived from phytozome v7.0 (c hr-ID scaffold_19; pos 2753721 to 2754577)
actggtaagtacgtgcgtgtgtcctcactcactcactcgctcgctcgctcgctcttcacttgcatagatgctgcatgcatgttctaacttattattctttctttagacttttatcagttgaacgcaaaggcaacttgtactatatctatatatgtttaatcatgttcggttgctgataaatatatatatattttttaatttgttctctgtttctctcccttttttttttttaataactgaattagttccccgatcggaaaaaaaaccgcagcttattatattcatgtgtgcgtgtgtgtgtgtgtgtgtgtgtgtgttttaaaaagaaaaatgatgaaaccaaatcaatggagcaacaactcaaacatctctgtttttgttttgtcgttcttactggcttctctcagcaaccaaataaaggctaagaggaaggaggaaaacgtggcactctgtctcatgggcgcgttgaaatagatcttgtcttattcagtaatgatcactcaattcacactcttttgtgaatccctgcaagttcttccttagttaaagccaaatgatgatgtaatagataatatattttgtattatgtagtgatcatggataaagattagatcgtactctagctagggctgttggatctgtttactttgcggtagatgattaaagtggtaatttaactatactgattgattatccttttttttttaattattattattattattattattattagatggatctgatccgccgtgatcggggcgtcgtgtttttggatcgggagttgttgatgttgctttgaattggtttttgtgattgcaggctttacagtggggagactaggagcaagcatcatc

SEQ ID NO: 87545 - DNA, 609 bp, Citrus clementina
  Intron number 1 from transcript clementine0.9_004023m (loc us clementine0.9_003599m.g) derived from phytozome v7.0 (c hr-ID scaffold_55; pos 273973 to 274581 reverse strand)
tctcattgtttcaaggagataaggtgagaaaggttctgtgacctgtttaactagatgtcgtatgtttgttttgtgtttgagagtcttgattcatgatcttaattgcagattgaatttatgattgtttgtatgaatatagagtccactttgtgtttttcattttccattcactcatttgttggtcattagcataaacgttagcgcataatttgttggtatttagtatgtggaagtagagaagtgatgagggaagctaggaatttggcttgctcttttgtcagtgtggtcttccttctacacttggtcatttgtctactttgagcatccttgaaatagctagacatggcattggttggattaatgctaatcgttaagaaagtgaatcaactaagctaattttagaaatgatctctatcaaatcctgtatatgtgagcttagaaatctcttttctttgtttcattactcattacttgaaacaatcactgagcccttatttctattcttttcgtattagtttgatctatttttccccaaaattatataaactttatatgttagccaagtgtggactctgatgatgtttacttgacggcatgatcaggtgggct

SEQ ID NO: 87546 - DNA, 559 bp, Citrus clementina
  Intron number 1 from transcript clementine0.9_021944m (loc us clementine0.9_021944m.g) derived from phytozome v7.0 (c hr-ID scaffold_32; pos 2278475 to 2279033)
acagtgctggaacagtaagccgtatatcttctctcttttaagctgtaattcgttacattgaccgattcgaattgtagcagctacgtaaaggttcgttcttaaatttctttttattttattaattttggaggaaacttaatatttttatacgggtttgcgggattttatggggtttttgcttttacgaactccacgagtcttgtcttcaagccgaactgctagagctgccaggtccgacctctgccttggagttgagtgtgagcagttgctgcctggccaggagaggtgcgaaacctacgtggcatatcatacatataaccatttttttttacaatttctttttttgggggggaaaaagttcaattcatgtattacttccagtaaaactaggttcattgcgtaaagagggccgttttgtagaaatgttataaccttgtaaaaatattagcaattcaatgttcatattcttgttttgtttgattctccatatccatatgcctgttgttgacatattgtctttgttgtttatctttttgagcagtactttccatctgagaag

SEQ ID NO: 87547 - DNA, 914 bp, Citrus clementina
  Intron number 1 from transcript clementine0.9_019512m (loc us clementine0.9_019512m.g) derived from phytozome v7.0 (c hr-ID scaffold_86; pos 412565 to 413478 reverse strand)
caactctctataacgacaataatactgtcatcggtgtatgccttcttctgttctccttcaatttcagaatcagttttctttttgtaaacttaaaaagaaaaaagaaaatttgaaaatcttttttattttttcaaaaattaaaatagtaataaattctgtttaagagtgtgaaattaatcggtagataatgattactcctctaattcaaagactaaggctgtgttcgggaagcaacatatctgaagtgatagaaaactattggtggttagtctcattgtgttgttctgttttcttgtatcttattgaagtgcattttaaattttaagagttattaggtctatttaaaagtgcttttgtgaaaagtgcttttatgtattaagtgttttctaccaattgaaaagcacttacaaagcatattgaagagtgcttttaatgttgccaatgggcattccaaatgctgtgttcgggaagcaacatatctgaagtgatagaaaactattggtggttagtctaattgtgttgttctgttttcttgtatcttattgaagtgcattttaaattttaagagttattaggtctatttaaaagtgcttttatgtattaagtgttttctaccaattgaaaagcacttacaaagcatattgaagagtgcttttaatgttgccaatgggcattccaaatgcatcattcgtgtaagtgttactgtatttttgctaaatcaaaaacatatttaaaacttaatattaacgtttacatgttactatttaaaccaaatcaatcatgatatgttgcttcaatgaagcaagaagaaagtgataactaaatagtttctagtgaatctcaaccctaatattggctgttctttcatttggaatttttactttttgttgtaggaaatccgaagggctttgggt

SEQ ID NO: 87548 - DNA, 732 bp, Citrus clementina
  Intron number 1 from transcript clementine0.9_002845m (loc us clementine0.9_001747m.g) derived from phytozome v7.0 (c hr-ID scaffold_22; pos 459454 to 460185 reverse strand)
tcggtgaaggtgagttgttcaaaccatatggcgcctttagagcttctctattctttatctttatttccttcttttggttgctgcttcattatatttgttgagagtggagctttttaattcattatagctgtttattaattgtttgaaggctgatgatctttcctcttttttgagcttgaaagtgactgagttcgagcgaaactaggcttagcttcatgaatatggctttcccatagtttaaatttgtatttattactttggaaaaaaaaaaagaaaagaaaaagaaattgagctgtagtctgtggagggaatctgattcttattctactgcctgtcattttatgttaacgagttacatttttacgtattcttccgactttatttgtttgataagtaaagtgaagaaaaacgagttggcacaaaagctctgaagcaactgggtcaattactttcatgtttcctggtgaaagctgaatattgtaataggttagattgggttgatgtccttgtttctaattccggaatgtagtgattaatcaattttgatgaattttctttccctgtccttcccagtgtgcttcatcaatcatttatttagtttgaatttgctcaattgcttaattttaggattgatatttttctacttttgcatctgtacattagatttgcttacttatatgtcatttatgttttctcatgaatttctttttctttttcttatctgtagagtca

SEQ ID NO: 87549 - DNA, 251 bp, Citrus clementina
  Intron number 1 from transcript clementine0.9_019047m (loc us clementine0.9_019047m.g) derived from phytozome v7.0 (c hr-ID scaffold_19; pos 295771 to 296021 reverse strand)
ggtgaggtaagtaagtataatattattaatcctcataaatagattctttgtttttaagttatgtcctcatagtcgaagatctcaaattgttgttcatttttctttcacttgttgttgtaccttttattgttcttgttgttttaattaggtgatagctagctcaaaatattttatagatatttgtactatttttgtttgtgtggtgtgaaatcaaaggagaacaaagagaagcaaaagaaagaagaaaccaa

SEQ ID NO: 87550 - DNA, 644 bp, Citrus clementina
  Intron number 1 from transcript clementine0.9_023981m (loc us clementine0.9_022013m.g) derived from phytozome v7.0 (c hr-ID scaffold_46; pos 369476 to 370119 reverse strand)
acaatccgcagtgtctcgctctatttataataaaggtaagcaaaaaaaatttctttttttttcggttaaaaaaattgaattgtcatgaaatacttgttattttggataccgcatgatctttgttgtccatctgcagtttctgctatttttatttttttatcattgaaaaaaaaaaaaaaaagctctcatttcattctatgcacaggggttaccattaaaccctaggctctatattggaaatgggcggcaagaagaatcaaaattttatcttaaaaacctgtaaaatgacttgaattggttaactcttttagtaattagggtttaggtttttaattatctgcagtttcccattattgattaatatatattttttttaattcaggttttagacattagtgtgacaaaacatctttctagagccagtgattttcatttatatgaagttaactagttttagctgttatttacatatctatttgagctaagtttctttcattaatttgagagatgcagatggttgcctaattcattaatgttgacatattagcatgctacccatttgagaattgaatcaggtttttgaagttcattattgttgttcattggattcagaagtggctgagtaacgggcgttcctctggtct

SEQ ID NO: 87551 - DNA, 621 bp, Citrus clementina
  Intron number 1 from transcript clementine0.9_003110m (loc us clementine0.9_003110m.g) derived from phytozome v7.0 (c hr-ID scaffold_55; pos 1397967 to 1398587)
aattgagctccgagcttcgtggccacgaagacgacgtaagatctctctctctctctcagtcgctcttttcttttctttttttattctttttatttttcattaaaattcgttttttttttttaaaacgaaacacagcagtttcatacgtcaactaatattgttcattatctgaatacttaaaaatttcaaccgaattatcgcaatcacgtagttgtatattaattgggttgactttataatttgtgtaaattgatgcaattagaagttacaatgtgattatttaatcttaaggttgatcagctgattctttgtagctattcttgtgaaccaattttgatgtgtgctttgatattatgatgtgggaatgtgattatagttagggaaaacagttataattgaagttgatcatcatatacatggagtttggtactagaaattgatttatttgaaatgaggtattttatggcgataaatgtgggtatgttgaatcaattaattgaatttctggttgatcagtatatatttagatgcacaaacactcgtatattgctagagatatgctttgcgtatgcgtaaattttttgaattttggatgtacatattatattaggttcgtgggat

SEQ ID NO: 87552 - DNA, 1035 bp, Citrus clementina
  Intron number 2 from transcript clementine0.9_003110m (loc us clementine0.9_003110m.g) derived from phytozome v7.0 (c hr-ID scaffold_55; pos 1398881 to 1399915)
aggatatcgtgtcatcatctgttgataggtaagctgactttttggaagaatcctatttgttgtacagtccttttccgctgtttctccttgtttctgttgaaaggtttactccaaatattatttgagctggattcttccatgtcaaacaaataaagattcatgtgcatttgtggcaattgctttgaaactttagtttttatccataaccatttggattaattcttcatattttatcttctttactgctgtcttatggggcttaacaagcaacttatgtgtcctataaacttcattaacatgcatatgttgttagttaccgactctgccatttctatgttgttggcagcactcttgctatgatgtccacctcatagttggaaaatctgttgaccctagaacctaataattaagcggttgaacttgaaagagatgccaaaatcccatggaagctattgaagtatctataatggtgttgggttacgctctccaccactttactgattgcaagcattgcatgacagtttcataacatgtatcattcttaaaaatagctttgttatttgagtattgctcaattttccgtgtcatgaccccttgttacaagtgattggaagattatgcatgtcttagttcatattatcattgaacctttttacttaaaactaagccctacatacatataatgagatattctaggagttgaaaatgctttcatctggcaaagaacgcccaacaggaaattttacttgtaaattaaatcagcatccacaaaatttaatcagtcatagccaacatagaaaccaattaaggcatattttgagcttaaataatttattttattgtttctcaaacagaaaatgccattattttcagttttcccgaaacttaatgagacaattgacttagtgtgtatcactaagacattatcattgtcactagttaaaccattgttgaaacatgattaacaatttgaattttttgttgggcttcttttttgcagtactttaaaacggtggaggaaaggaaaacttgttg

SEQ ID NO: 87553 - DNA, 1008 bp, Citrus clementina
  Intron number 1 from transcript clementine0.9_020430m (loc us clementine0.9_015531m.g) derived from phytozome v7.0 (c hr-ID scaffold_46; pos 703238 to 704245 reverse strand)
gcctccttcacttgttcaagggtatccgctctttaccattttctttttcttttcttttttgtttttgcgtttgttggtttcatctttcatgtatgttttaaaaccttttctagcgtcactttaaaaaaaaaaattggaatgttagtgggaaaataatataatggcaacattttcaatttgatgcgaccgtgtgggcaaaatccaaatttcgagttgaaaacgataaagaaaactttttttatatgttgttttaaatgttattttcatttgtttaattgttatatactttattttatttagagttgtttctttgtttatgtttttgttttgcttgtacttaactgaatttgttggtgcaaactgagctactggtattattttttaaaattaaaatataaaattgagttaaatgctgttttataattcatttttatgttggaaatgttattatggattgtagttttgtagaattttatgtagtttaggttaggaatttgatgtgaagttggaaatttcacatccaaatgaatgatgatattgtgagacattagaaattatgttattgattatacaaaatgattatattcttggaatgaatttcgtatgattccacacagatgtagtcattcatctattattttggtacaagaatgttcttgggtgcaaaagtaatttgtgatttgtataatccacataagtttattttatatttctaattggcaaatgaaaaaaatcgcagtctttcgttttgttcaatttatgttttgtattcatattgcaacatgaattgtattctactagtccatttatacctttgataaaacaataacatgtattgttctgtacgctcatgtctatgtaaatggtgatacttgtagtttatttgctacttacattttctctgacttttttctgaagtgggtatttcatgattttgtggtaattaagtttggaaatgtttcccatgttttaggggcagagtggcctttgtgttgtgccaggaccaag

SEQ ID NO: 87554 - DNA, 919 bp, Citrus clementina
  Intron number 2 from transcript clementine0.9_006543m (loc us clementine0.9_006292m.g) derived from phytozome v7.0 (c hr-ID scaffold_30; pos 203964 to 204882)
ttctaagccgttgaaagttgtaattgctggtgcaggtgacttcattttcttctcctctaattgtttttaagttttgcatatgtgctctgaagcttaagggcccgtttgatgaaataaaacttgataattatttggtaaatatgaattttaaataataattttgataaaatttataatatgggtttttggttaaatacctatgtgataaaatcaccttaactttcaaattttacttgcaattatttactaaacaccataaaactttaagctacagctactagatagcgatatgaaatggagcctatgggtgtgtatggcattgtggatggacagttatagctttttgagctacagctctaagctatttgataaacacttgttgctaatctctgactcaaaagaaagaagcagcagctttcgctggtttgaaagctaagttaatttattcctgtacttttatgaagaaaacatgtattatctttgttatttttatcaaaattattatttaaaagtcatacactattaactttatatcacagctattacattttgttcttaacagccacaatatccaatatcaaacaccttaagtatatcaaatggataaagggaggaaaaatttggaaaaatgaaaagaaaaaggaaatagattcatgaagtgtcttgaaaaaaattgttctaagcaacgcaatagaatgaatcctagcattctttcacttctagcattgttgcttgtctccgacaaatgcaatttgatgtttttaggtgtcttgttgcaggtttggctggtttatctaccatctggtgttatatcccttaatcatgctgctaaatatttatacccttcttatgtaatattgaggtttttaggtgtcttgttgcaggtttggctggtttatcaactgcaaaatatttggca

SEQ ID NO: 87555 - DNA, 641 bp, Citrus clementina
  Intron number 2 from transcript clementine0.9_007517m (loc us clementine0.9_007516m.g) derived from phytozome v7.0 (c hr-ID scaffold_130; pos 231559 to 232199 reverse strand)
gacgaactaagagcaaagagggtgagtggagttatgtattatcaaatgcaccatcattgcatcatatcaacatatcattgtttttaggattttgtaataagtaatcagtatttaaatgattcaagaacccataatattaatgagtgtcatacatcagcttgaaagttgtagctaccaaattaatatttaatgagagtcatgcatcagcttgaaagttatagctaccaaaatgcatgtgtataagaaatgtgatctttgaatctgattgcttattaatctaaagataaatgaatatgccactctattttttcgttaaggtaatttttagatcgtttatatttggtttttattacaagagataagatttggttttctttttgtgtgaaaatatgaattgtagtgaagagtttcctcaaattgcgaagctgatggacaacttcttccaattattatgttgaataatttttctgcttaattacatttcattgctccagtgttattagcaaaaactccaaaactctgcccaatatagaaaaaataatctctgtttgtggacctgttaaagattaattttgttattgagtttttctttcttctctcatgcagggagttagaggggatttagctgctcagctgaggtc

SEQ ID NO: 87556 - DNA, 701 bp, Citrus clementina; identical to SEQ ID NO: 79734
  Intron number 1 from transcript clementine0.9_007517m (loc us clementine0.9_007516m.g) derived from phytozome v7.0 (c hr-ID scaffold_130; pos 232539 to 233239 reverse strand)

SEQ ID NO: 87557 - DNA, 284 bp, Citrus clementina
  Intron number 3 from transcript clementine0.9_014569m (loc us clementine0.9_014569m.g) derived from phytozome v7.0 (c hr-ID scaffold_9; pos 4161005 to 4161288)
ttggattgattcaaattgaagcacagtatatttaggtgagttttgatttctctttaatatttttcttttataacctttcgttttcctgtcatttagagaagacaatagtgccatcacacaaagcattttgtttcacgttacacttttttctctctttctttcttgcacttttgaaaaatttggtaaccagaaaaacgtcattaatttaaatcattttcgaaattacttgatttaaattaattgcttaattaatttcgatattgggttggtttccttaggtgctt

SEQ ID NO: 87558 - DNA, 657 bp, Citrus clementina
  Intron number 2 from transcript clementine0.9_012011m (loc us clementine0.9_012011m.g) derived from phytozome v7.0 (c hr-ID scaffold_54; pos 1445663 to 1446319)
ataaggtataatttttgctcatgtatagtgcttgaaactgcgattttcaacattcttaatgtaattttaatggaaggctaacgacccaaatcatatggtttgagtacttttttcgtattcagggtaaactggaatgcaaattatacgtcttcttctaacaatatttgctattcctactttatggctgattggtattttattatgtgtccttatttgccttctgtagctgcttaaaaatgattggaagatgtttccaatttggtacttttttgaaagtttttgagaacgaaagtttcataccatggaagttgtatgagtatgagttgttattaactttacgggtggacttccttattgatggacatatacaattagggctatgttttcaaggaactggtccatagccattttactgatattagaatatggttgacaaacaacatcctgttctatgcatgatttaagtcgtattttccatgtcacctttcctgcttgcatggtttttagtcattgcaatgattctctgtgttttgttgctgacacatatcatatactttgtttagttttatgattacttggaacttagaaatggtttttgactgtttatttgttgcctctgaagcgcaaggctctgttggaggtggtcaaggagactgt

SEQ ID NO: 87559 - DNA, 852 bp, Citrus clementina
  Intron number 2 from transcript clementine0.9_014896m (loc us clementine0.9_014896m.g) derived from phytozome v7.0 (c hr-ID scaffold_55; pos 179105 to 179956)
atcgcattgacactcaaactcccattgaagtcactgtaatttcctctccttattgctctcttttgttaagcttaaatgccgcattttgtattgtggggttgtagctttggttgcgaaacaaatgttattactgttcactaatatagattttttcatctatcaactgtgagtataaagttttacttgtttagtttgttattgtattgtatagttagtgatttttgtttcgtcaaaacattgtctcaattgttgaatgcgtgtgaacatatccatgtgtaatgcatatcgcagacccttttggaatgtatttttgttgaagaaaaggggttggcaggaagaatgcatgttagatgtgtgggggtaaggagagggaaggtttttatttttcatgttaactaacactacagacactgtgaagacatggtctgttatatgtggaccgtgactcatcgaaggaagacgagatattatcatatttaattattcttaacacgaaagtgcaatttgtcttgttgtatacttgactgagagactttctgcatccatgttttgaattaccatgctgaaatctgtgtgaaaactcaaaaaacaacgttggatcaatgttaatgacctacacatattgttgtatttgtcaggtaatgagcatttatcctttttttttaagccgcatctttctttgaaacttaacgatctgatagggttatgaagtttgatttctcacaatgtttccttctcccatcaagtttcttagttggactttgaaactggctttatattgaacatgaagtaattctttttttcgctcttttgaaagattggagaactcaagaaactagttgaagagggcaa

SEQ ID NO: 87560 - DNA, 798 bp, Citrus clementina
  Intron number 1 from transcript clementine0.9_025766m (loc us clementine0.9_025766m.g) derived from phytozome v7.0 (c hr-ID scaffold_26; pos 1383769 to 1384566)
ggaagcttttctcaactggcttcgaaggtgagctctctgtttggatgctgagaaaatgaatgattttttttttctttttcaaaagctaaggtggaatgttatagttgatttaattttgagatttcgaatcgttagattgtaaaaatttaaccttataaaatattattagatttatttcccttaatatgactgtttggttttgttgaatttcaaattgaagattgagaaaatgaagttattttgtatgctttttagatcatttatatgtgacgtgtcttttaaaatgtgtttatttttagtgttctagctctgttttaaggatgatagaattctggcagcgatcagctagttaaatgcaattgttttggcctgtgtaaatgaaactgtgcaccgcttttgtaaattaaaatgccaattttaatgccaactttgcaaatctagcatctatagaatgatgtctttgagtaacatcttctgtgcaaacacgtaccttattgtttcttggtggcagcttctatcttttgtatggattttgaagcgtctatggagaacattaaataatttattaaatttactgttgtttgctttggtcttgcataatattctgttgatatgctcatgccttccagacaattagctactttaatcatattgtatctctctgcttcacttgctttaaaattcttgcattgattctcacagttgtggatatttttgctactctgagtcggctggcttatgctttttcattgctatttattctacttttgtcattgtagtctcttctttaaacaagaa

SEQ ID NO: 87561 - DNA, 455 bp, Citrus clementina
  Intron number 1 from transcript clementine0.9_030003m (loc us clementine0.9_030003m.g) derived from phytozome v7.0 (c hr-ID scaffold_22; pos 2247097 to 2247551 reverse strand)
aagaacaaaggtacgtactattactatatatatggatatatattttgattatctttttgaatgtgttaactaaaacagttagtctctgcaagcgcgcaggctgaagactcttaggctcagtgaagcatgaaccagaatccgtggaataaagatccaaatatgtgtaaactttaagaaacaaaagaagctaataatgtatatttgtatttgcttctttttccaatatccctcataattgtattgtcacctatttatttcctttcttcagctttacatgtactactgaggttgcatataaacgagtcattgtatgtatatggtgactccaagttcatcgtatcctcgttttatattaacgaaatttatgcctatcttaattattactatatgtttcagctttatttttcttgaatgatgtagtctatttggtgtgttaccaaacaaggacgacatac

SEQ ID NO: 87562 - DNA, 676 bp, Citrus clementina
  Intron number 1 from transcript clementine0.9_009426m (loc us clementine0.9_009426m.g) derived from phytozome v7.0 (c hr-ID scaffold_80; pos 451597 to 452272 reverse strand)
ctcaaatctcaccttaggattcggtttgtataaaggtacgtacgcacgcagctgtcccactttttcgcagctgtagattcttttaactctattttgggtctgcaattctaagcacttctgcgtttgtgaagtttgtttgcttaagaaaactgatgacagtaaccttaacaaacacaaatatttatgcataaatacgcttacgtaagcagataatcatccattggttgttgtagagcttcctggatttctgaagttgatcatttagtcgaaatgttgtttgtggagcaccgtcatgcaaactttttttcattctgattcactactttatgtatatatttgagctaattgttttacccatagataaaagttactgtctagcttaattaaacttattttagtggatctgaagtatttgtttaaacctcaaacatacaatgcgattgcactgctctaaactctggtttttacatgtgttaggacagtaaaatattgactgcagcagtttcaattatgttgaagggatatagctggcctttctgccttttccttttcttctataaactgatcaattttgaagtctgtttaattctttaacatcgtagagcagtttgtttacatctttctttaaatcgataattattcatacagtactgcttgattctttgtccagctttgc

SEQ ID NO: 87563 - DNA, 375 bp, Citrus clementina
  Intron number 1 from transcript clementine0.9_014744m (loc us clementine0.9_011292m.g) derived from phytozome v7.0 (c hr-ID scaffold_26; pos 876438 to 876812)
ttgtcggcacttctggttctttcgtcatcaagcaggtgtgcttatttttatagttcattttaaaagcactaaggcatcagtgcttttgtaggaagtggaagcacttcagagctcattttaattgattggatgtgatttgattttgatgttttatatgttagttactgctaacagcaattattgacattgatttcgggttatggtcctctaggcttgacccccttcttcttctttttttttttctttaaaattatcatacagaaacaagaagatgagaaaattgaatttaagactctgattattagaatgttcatatagatatggagtacaaaagcttattttgtaacaggcttttctgttcgcaggctcttccgt

SEQ ID NO: 87564 - DNA, 187 bp, Citrus clementina
  Intron number 3 from transcript clementine0.9_014744m (loc us clementine0.9_011292m.g) derived from phytozome v7.0 (c hr-ID scaffold_26; pos 877633 to 877819)
acattaaagctggaagttgctgggttgaaatccatgtaataatattttttcttcctcagtactgttttgtttcctagtgcatagaaactctttctttttaaaattttcctttataatatatcaaagcttcctttaccataggttctgtcttaccataggttctgtgaaagagcacaagccctgatac

SEQ ID NO: 87565 - DNA, 634 bp, Citrus clementina
  Intron number 1 from transcript clementine0.9_001713m (loc us clementine0.9_001713m.g) derived from phytozome v7.0 (c hr-ID scaffold_6; pos 2337483 to 2338116)
aagagcagacaaaggtaatatacttcaggtgagagaaacaaacagagaatttttctttttttttttttaatttcttttttcaaaaaagaaatactagtgccagtctttaggaatagaagctagtatacaaataataacaagaacaaagaaattgaaaatcaaaaacaatcatcatgatgaaacaccatctgcaaccagcactccggaaaagcaagatcactctccatcaaaaccttccttcccataaatttacatctcttaacaccacaaaattctcaaccaaattccccacttctcaaaattgagccatgaaacttcctcttttcttcctcacattctttctgcacttactggttgttttctcagccaacacacttcctctcccgctcgtctctcttctctccatcaaggcttctctgaaagatcccttcaataattctttccatgattgggatgcgactccagctttctccaaccctagttctatttaagttgctgatttatattaattttattgttcaaacatgagagcttagtacgtgaaacatgagagcttagtacgttagctccctgtctggtcccattccgccggaaatcaggtacttaacgagcttaacccacttgaatttgagtg

SEQ ID NO: 87566 - DNA, 782 bp, Citrus clementina
  Intron number 1 from transcript clementine0.9_003479m (loc us clementine0.9_003479m.g) derived from phytozome v7.0 (c hr-ID scaffold_26; pos 264540 to 265321)
cacctgatgtaatgcttcaatctttggctgatttaggttttgtcttttttatttatttattagtcttttttttcgtgtctatccttctcaactaggttgctggttttaccttctttgattatttggttagagattcttttttaatttttattgtttttgtttattgaattaaagcgtcatgcccttattcatgttttctttgcctctaacctattgaatggagtaaaaccaaaaaatggtcctgaaaacgacatcgttgcctgaagaaagcggctcatgtatcctaacaaaaattggtccttaaaacaacgtcgttttttcaagttcggagtttgacccggggctgacaccagcatcctcttattttttattttttgctttttgccctttttcttttccaacgtggcacgtgagcaaatcaagcgaggcctaacatgtcttaaagtcataggtgaacacattttattaccacacacatgcacacacaacaacaagccaccaacatggcgtaactccagacgctccctcccttgtgttttcctctcaacagtatttccttaatctcaattttctctcgaaaaaaaaaagaaaaaagaaaaaaaggcccaccgtctctaatgaccgttataccatcgccgtttgtctaaccggtctcatcctccatccgccggaaataagatgatatcatgaacgttcctcttgtaattttcttttgtgaagtttctttttggtataatataagtacagtattattcttttgttgcagaatataattacgcagc

SEQ ID NO: 87567 - DNA, 1023 bp, Citrus clementina
  Intron number 3 from transcript clementine0.9_009969m (loc us clementine0.9_009969m.g) derived from phytozome v7.0 (c hr-ID scaffold_6; pos 5598735 to 5599757 reverse strand)
ttgtattgtttccagtggggaatcaggagtctcaggtaattttcttatcactctttccggcatatctagctagttctaatatcaacatactcttgatttgtggcgtctgcggggacatttatattccctcttaatattgcattctgaaagaaacaaaatattaattaagaatattatataggtcatgcatttagacctgcattagtttgcatgtaactatgcatgtttgttttgctttgtattaattcttcaactgaaagaaactgaaagaagttaaaatttattatataattatagattgttggaacatttgtttttctccgaatatgttgggacttagataaacactttttgaattaccaagaatgtatttaacttgtgcaaatatagtttataaactaatggacatataggtacatggggtttgcatgcatgtatgcatgtgtggattgatggatggatgcgagcacatagaaatacatgtatgtttatgtatatgtatgtatatgcgcgtgtatgtgtgtgtcgatatatatggtaatgtgcggataaaacattttacaatattgtaaaagtgttcatatatatgtatatgcatcaaaatttatgatattatctatgtgatattatttgaacataactgattattcttgaaatcataatcaatggtgcattattttatcattgtttttaggtttatcacacccccccaagctttacttgacctcataattaaataagtaccttttcaagaaagtgtgagtgggatcgatcctttgacctttttcttaactgcaagacaccaaactagctaaatgggttatcctccattggagacgcagagtcgtgaggtttgaaaatttcccgcttggtgtgcccctttttcaaaaacaattttggaatattatgtcaaattctttcatattataattaactaattaatactaaataagaatgtaataatactgaattgaaacttttgctgtagttttgctcaaaactttcaaacaagtaccgacgcct

SEQ ID NO: 87568 - DNA, 309 bp, Citrus clementina
  Intron number 1 from transcript clementine0.9_016589m (loc us clementine0.9_008405m.g) derived from phytozome v7.0 (c hr-ID scaffold_9; pos 1299992 to 1300300 reverse strand)
ttccaaaggtctctttccctcaagagtaattctaggtttacataatcctctacaaactctactcatataacatgttgtggcaatttttcaaagaaataaaagcaaataaatagtggggaacatatgatagtgatataataatgtcacatccgttcgtatgggtagagttgtataggagcttgtattcctattctcactattgcatcaaagatcaaccatctgaatatgtgataaagttctttattactactactactattatttttttcatggtttcttctttcatgtggcaggattacacgggggaag

SEQ ID NO: 87569 - DNA, 680 bp, Citrus clementina
  Intron number 1 from transcript clementine0.9_013395m (loc us clementine0.9_012420m.g) derived from phytozome v7.0 (c hr-ID scaffold_19; pos 1104656 to 1105335)
catttctgcttcttttgttgcttaaggaagccaaggttcgttctttttctctctttgcatccgtattacggtattttaatttttatttatttatttttatatcaggatcagcttttgttcttcttcgacttgttcattgcgtgatgtgtattagcatctgggtttaaactcgctttgtagttttagttttggtttcattgttatctgccttttgggtatgtaaatgcttgtgttctgttctccatcgactggaattttattagcgtgtatctgcaatttgcgtacgggttaattatgacgcatctttgagctccagaatatagtttcaagctaatattaaaagtctagttttgttggttttatcttaaaaaccgttggttttagtaaagtcataatcatgtttcctctgtttaattgctatggtggatacttaatgtaatctgttaggcgtgcctcacatccctttgggatcaaatgcatgtgaagttatacttttcattttgtttaatgtttagtcatttgattcaagaatcttatgttcgaactatatacataaaaatgctacgggagattagtgttagcccggtatactttggtggttctttaattctcccaacatgagatcaattgttacaattaactatttgggtaattcattcaaattgtttagcgagagcatt

SEQ ID NO: 87570 - DNA, 574 bp, Citrus clementina
  Intron number 3 from transcript clementine0.9_028482m (loc us clementine0.9_028482m.g) derived from phytozome v7.0 (c hr-ID scaffold_48; pos 385600 to 386173)
ctcctaaagaagaggtcatatgcagctttgatgattcttttcttctattaaaataattttacgattaccctctggaacttacttctgtttcttctatttatatatgtgtgttagatgtgtatactcagtttcttgtgttcttttttccctgcttgtctgccttctagtgttgtctggatataactgtaaacatatatgtggccatctggttaacacgagcctggaattttttttctttacattgattaataattttgatgtttaatggctcattaatggcttttctttcatcttaaaggttgtcatctgcatatctaatcgttgtatgcagatagaaattgctgcttaaaaatatttatatttgttattgattcaataatatatatatgttatgtccttggacagtttgtgaaatccctacatagattgtgggaaacagcacgtacaaacacacttttcatacatgtttcagtgtagagaaaatatccattaaaatgtgtaaagtcatgctctggggtttaaacctttaatcgatgtcataattgtgaatttctcttggtgcaattgtccaggt

SEQ ID NO: 87571 - DNA, 847 bp, Citrus clementina
  Intron number 2 from transcript clementine0.9_001367m (loc us clementine0.9_001366m.g) derived from phytozome v7.0 (c hr-ID scaffold_17; pos 2174760 to 2175606 reverse strand)
ttttccgtatgtacgtacatttatatgtccctatctctatctcataaagctttttgcgtggatttagattcagtaatacacaattaatagttagacaagaatataaaactaattacattttaatcatatattctgtacgtatgaagagttgagtacagatcggctcaatattaaacataaatttttttgtaaacagtaattaataatagaaaaaacgacatatacaccctattaaaccacaacgttttaaaatagtagagtgagcttttttacatttttttttttttttttttaaggggaagggccaaaccaaagaaaaaattttgtcgacccatgaaaaaattttggttttgttcccccccgttttacctcccctcttttgtccccttcttattttttttggaaactcccctttttatgttttcggggggggggggggggggcggcaaattgtttgatcgtacacaattgtttgttttcagatgtgtggccgaatctcgaaagaagaattatgcgatatctatgcaaacaaatattttatcatttttctcttttcctttgatgatggtgaaaaatgagttgtactcattttcagtctgataaaaaaacaggctgagaaatggtgccactaaacacgtttcttatttttcatttctggaaaacagaaaacggtaaaccaaaaacggtaccaaatcaaagtaaccaaacgcccctgcattatttgtttgtttatctatattattcacttgccttttttttttttttccttttttaagtaataaatcaagtctcatacttttcatctcaaacagagttctgaaggagcagaatctcacaggagttctcc

SEQ ID NO: 87572 - DNA, 985 bp, Citrus clementina
  Intron number 1 from transcript clementine0.9_032026m (loc us clementine0.9_032026m.g) derived from phytozome v7.0 (c hr-ID scaffold_48; pos 647864 to 648848 reverse strand)
ggatttgaataaaattgttcagggacataaagaaggtttggtggactatgtcaagtgtttcataaatttagttttggcttactataagtctaaatttgagaaagaatcagcacatattttcatttgcaacatggtgaacaaccaacgagtatttttgaagaattacgatatcccaactttagtctgtcactaaaaaaaggctagaaaaactactttatccatgagaggaaacacccacttttatcaaaagatgggaggcttcttaagctaacttagttgaaacatgtttccagctatataagaaaagaatgccaagaaaggaagccccaacatcttttagttgccttgcacaaaaaaaagaatctgatgttatttatggattactctagccatttaaaccaacaagactattgagtgatataaaatagaaaaactcaaagctttgttgcctacattaacgccttattcatcccacaaggcattgtcgccatatcatcaaaatgatgaaagaaaagatagcagatggattgttacaacttcaaggaaaggaacaagatgcttattttcacttgctgccttaccacgatgatcaagtaactatgataactattgctcattttactacaaatgataatggttcacctacaaatgttgtgatgaaagataatactaaggaggagtaaaagacactaaaagataacgactttatggtatgtgctctccgttgtaagcataatttcgaatctttatttgagtagttgagacacggtttgaagctatatacagcaactactaaagcactgctaagagtttctgtccagtatggactaaagtgttatacatctaaagcataaatcaatcaggcttatctcaaatctactaatgtagttatcttttttatgaggatattgaggcaatacatcctaattaatagcttctactatttctagaagctgagatcaacagagtactggtcagaaaagct

SEQ ID NO: 87573 - DNA, 472 bp, Citrus clementina
  Intron number 1 from transcript clementine0.9_004817m (loc us clementine0.9_004835m.g) derived from phytozome v7.0 (c hr-ID scaffold_9; pos 453705 to 454176)
ttcaaactccatccccccctcactgtagccaagaggtacaacactgttagtagtttttgttaatcctcttcaaatgatccttcacttggtgcccaaaaaggtttattacttgggtttttttttttttcatttttttccttgtgctttactgtctttaaggttaactattttgaacttgagagaagattatttagctgttgtagtgtttaagagattttgtttgatttataatgtcttgaactatttgctataatagttgttgaaattttgccatatcaaatacccaaatgggcttttcatttactgagcttatttgtatgaaacaaaaaattccttatgatgtgagtgagtggctctttagatttgggcttggccaacatactaatctgatttatgaactaatctgatttatgaactaatctgatttatgaacttgctgatatatccgttgttgtttctctaggattttttt

SEQ ID NO: 87574 - DNA, 940 bp, Citrus clementina
  Intron number 1 from transcript clementine0.9_034593m (loc us clementine0.9_034593m.g) derived from phytozome v7.0 (c hr-ID scaffold_22; pos 1226308 to 1227247)
ctgacagagaaataagttacgcggttactgccgaagtatgccttcaactaaattactgatacttactttcacttgactggttttgtctttttaaaatggtttcttaatgtattgtaggaactataaaagattatgaccttgtataccacagttctgctaaaattaaagtagtctttcatttaatgagagatagtagttttacaaactttctgtggctctggcattcaattgttggtttggttgtgatcgttcttttaaattggatgttcatgtgcaaatggattgaaatagtttagaagtcaggtttgtggatgaattacaatgttaagagaattataaaatgggaaaatagtaaggctactggaaaagcaattgtttcaaatggaatgggactatgcgctaccttaggttctttgggatgcatctagtttttatctaattcatattgctttgagcaaaattatgtttgtggtggcatcacttaatttagcccatgtgcatgtgctttctatttttctcttaaaaatcagaatttatgttggttaggctccatgattgtaaaaatattagtctgctatacttactataagacatgttatctgtcgattatttgggctggtgatattggagttggccgtcagtccattagggaaattccattccatctgtgggttttcttctgcttggatcaatttatggtatctgctttatatgtaatgtagtagtttcctaaacggtaaccttaattaaactgattttgttgcatgtttgatgtcagtgttggcaatgtatgtggaaattagtttatcttatgttttgccttcaaactgtgtatcttctccctcatcttttgtgccattcccactatgatccaatttctgatgtgtgcccttgttgtattgtaggaaataaaaagagagttgggcatatctttatttga

SEQ ID NO: 87575 - DNA, 442 bp, Citrus clementina
  Intron number 2 from transcript clementine0.9_000815m (loc us clementine0.9_000815m.g) derived from phytozome v7.0 (c hr-ID scaffold_36; pos 2094324 to 2094765)
aaatactcgaggtaactcatattacttgagtatagaattaggcaatggggtaatgcaaagtacaaaccgatggagtcagtttgactttatcagaagccattctgattggaatggttaagtatctggatgtagtcaaccagaaatagttttttactttgtgaatgcgttctggttgattgtactggaaaattgtattactatgtttcaacttgtatatactgttttcttattgcacttcatttaatcagtttggagcctttcttgttcattccggctttaaatttgataaaattgagcaatccttctggataaattatggaggtgctatgttttgatccagtccaaagtcaaatttatgttgtagttttcttcaaatggatgttgatttttctgcatgcatctatcatatgcattaatttcgtgtttttgtttcagactatcg

SEQ ID NO: 87576 - DNA, 874 bp, Citrus clementina
  Intron number 1 from transcript clementine0.9_016155m (loc us clementine0.9_016155m.g) derived from phytozome v7.0 (c hr-ID scaffold_22; pos 1332386 to 1333259 reverse strand)
tacaccataaccttctgtccttcccccaacaccaggtaaaccctttttttttggcgcaacttttacctatacccattttttccgttagaaagggtagcttcgtccgttaaaaaagttattaaaaagctgtaaatacgaacgttggatgcacttactatttcctattgatggctcggcgtttaaagttgcggccagacaaagaataatatctgagatttttttttgggggttgtgacatttacgaggctccattaaataaaaaattcgtgcaaattaagtcacttgaggtccccgcctctaagcgtatgccgacagggatacatttccgggacgccactccttaatcatgtgttccatccccttttggttaaattcgcaacaaaatttatagtcaaaaacctattcttttcatttttcaatacacggtcgcattttttgttttgttgttttttaataaaagcatagtcacggtgaatctagttattaaaaaaaaaaaaaaagggtatttcagtctttttgagctagcgggtaccttttattaagagagtctgctgtctgtagccacctaaacattaatgcaccccttagttacaggatatgctttccagatcggggaactgaatctgaaccaaaaatacgatgaccgactatattaatattcacaaatacctataattgtgcctagagatgcgactctgacatacacctatctctgacaaggtaacggccagtacgggaatctatatgaaaacccaattaatagaagacacgtcaacggttactttttattctttaatcattattctgagacctaacggttacttctttggattttgcagccagaaatcctcacaaggtggaaacagtggaagca

SEQ ID NO: 87577 - DNA, 749 bp, Citrus clementina
  Intron number 1 from transcript clementine0.9_001006m (loc us clementine0.9_001006m.g) derived from phytozome v7.0 (c hr-ID scaffold_34; pos 1445366 to 1446114)
aggttgcaagagtaagtgccctcaaatttctcttctttttatttggatattaaccgacatttgtgcattgtcaaaagattggaggagcaagcaagcaccttcaagatttgatttgatttgatttgattttttttaatgatgctttcagtttttctaagtgatttttaaaaatcatttaaattttgtgttgagtgggttcttgatctataattagctcatattggcattttctttctatttttttttggattttttttagatttttctattaaagttatcttttaaaatgcttttctgatatcagttattatgttttagctgcaatatctgaatttagttttttttttcttcttcagtgtaattgaatgattttcagctaaatatttttgcttgtctgaggagtattcttcagcgtggtagagttttacaaaatgaaaatttgtaaaatttcattttaacatttttccttctcttgtgcactgttactatggtgcctggttttaagtaaaaggtttcttgtgcttctgtttttgtttatagatttcagtgccagttaatgattttactgcataaaattttgcaacttcagtgttgcatggggatcttaccataatttttccgctgaaatcagtgataattaaatttgttgtaagaaaaattttccaatttctttaatttggagatgaatcttactctagctaatatgaattgcaggtaacatctgttaaagaattgagtggtcagatttg

SEQ ID NO: 87578 - DNA, 849 bp, Citrus clementina
  Intron number 1 from transcript clementine0.9_018421m (loc us clementine0.9_018421m.g) derived from phytozome v7.0 (c hr-ID scaffold_9; pos 2996818 to 2997666 reverse strand)
tttaaaaggctcatactcattggaacttctcctaggtacatactcatacctttctctctagagagccatcaaaaaataaataaataaaaccaaaaaaaaaacatttatttttttccctatacttgcgcatatgctaagacttctattttcagggcgattcttttacttttctttttttatatatatttttttaaatttggatgaaaataagaaacttcatccactaaatagtaatctttataactttttgttaacatttgaatccgaattcaggtgactggatgcacaaagcttcttttgtgaactattgactcatggctaaataaaactaaaacaaacatgttttgtaaattctgtggtaactttgctgcggctttaatggaaagaagaagaatattttcagattgtttttcattttagtttatttttcccccatgtttttgatattttacctaacataactgctttgactacggaaagttgtcgtttggtgttatccatttgccttcgatctcgagacaaacatgtggtcgcaagagatctagttaaagatattgccggcttctctatcttctgcttcaattgtgtggacaatggaagttctaaacgcatggttcaagtattagtgtcctcaatcattagcaagcttaatattagcaaacaagttccttaatttttggactggttcttttgcttcttagcttaagcttatttgtgattgtgaaaaataataatctatctcttaattattatataactatttggtccatttttttttcatgtttatttgctgcaaacgagatcttataaatttatcttgcaaatttatgtgtaggtacatcaacacag

SEQ ID NO: 87579 - DNA, 928 bp, Citrus clementina
  Intron number 1 from transcript clementine0.9_004186m (loc us clementine0.9_004186m.g) derived from phytozome v7.0 (c hr-ID scaffold_32; pos 675179 to 676106 reverse strand)
ttgtggggtggcacttttggtgaagtttataagaggttattggtttttgctttgttgattcattgttttgtttagtgtatgtgcttattgtttgcgcattgaggtgatgaggttgagtaaagtaagtgttcactgaacacttgtaactgatgtgattttgaaaacacactataagatgctgatttttgagtaatttggtagtaaaagatgtgaatggaattgggttttattacaaagaacttgccttcgtgataaaacttctattttgttcgttggatgtaagatttatggttgaattacttctctgatttgtgaccttttttactctctagagttcagacataaaaatcaaaatcgagaaatcaaaacttcaattttttttttcacatctgatatgctcatgcatctggtctaaacatgaaagtaatgaattatttgattgaatatttcaattgtgggcgcttaaagcttctttaatctctgtccttcgctcaaaatgataacaggtcaaacttgtctgtctaatatgaagttaatattatctgccatttgttcaaaataaatggcattgctttagttttcttatgacggcctctctgataccgttaaatggaaataagatgtgagctggaaaggtatttgtgttcttttctctgtttataaatttatctttcgtgctgaaacccaagagcaattattttgcaagtgccaattgatacggcggggtctggaaaaagtctatgatcctgaaacagcatatgaatgatatggatcaaaaacctgtaaatattgttggatgtttttttctagtcagttttatttgtgttagttgggcttgtgaacttcctttagtattttggaaaattaatgcccatatttctttgttctggttgcgcaattttgcagacctctgtgctgggtggagcac

SEQ ID NO: 87580 - DNA, 380 bp, Citrus clementina
  Intron number 5 from transcript clementine0.9_021625m (loc us clementine0.9_021625m.g) derived from phytozome v7.0 (c hr-ID scaffold_48; pos 455781 to 456160 reverse strand)
tttgcaggaaacaaaagcctggactatacgtgcaggttagcttggttctgctggatgttgatacataatccaatcaccattctccttttctctttttcttagcaatgatgtagatgtctcttatggcttcttgagttgcttcaagcttgaaacaacatcattgtcagactcatagtttagttgcaggatatgaattgaacaactagttaactaagaatttgtttgttgaagaacaaaagagacaaacattattcttagtttgacttctttcttccttctcttgggagacttggtctggttccactatggagaagaactgtattagtgctgcttaatttagttaattgtggtctgaaattttactttgcgctaattcaggt

SEQ ID NO: 87581 - DNA, 524 bp, Citrus clementina
  Intron number 1 from transcript clementine0.9_009856m (loc us clementine0.9_009856m.g) derived from phytozome v7.0 (c hr-ID scaffold_22; pos 267935 to 268458)
cgcttgtttcgcctctactactcaccgtcgctcaggcaagctattttttcttttcccccttccttttttttttaagaaagaaaaagaatttttcttgtttttggtttttgacgcactgaggtctgaaacaactttttttggttttttttttttgtttgtcgtgcgtctcatttataatatatatcgttcaagtgttagaaaaaatagaaaaacaggaaaaaaaaaaaagtaagtttaagctctttgctttatccgaacaaaagcgagggaagtaaaggagtttttttttttttttggttagaaaaagtttaattattttcttcatcctttattaaatcaaacttaaaattagggtttggttttcaattttgaggctcatgtgtaaattactgtggtaggatgagaatttaggaacatttaatgtcgttttgtatgaattatctgcttattttggtagaattcatcgatacaacgtgtattttactctgtgtgtgtgtttagagactagaatcaatataagggaa

SEQ ID NO: 87582 - DNA, 888 bp, Citrus clementina
  Intron number 1 from transcript clementine0.9_024258m (loc us clementine0.9_024258m.g) derived from phytozome v7.0 (c hr-ID scaffold_26; pos 2452143 to 2453030)
aggttgatcagaataccctctttgacctaatcttggtatatcctccctctctctctctctatttacgccttgcccattctatttgtttggatttttagttctatttgatgatattgctaggaagttctgatttttatttttgttagggttttggtatttttatgaaattggaattttatttacgaaatagaggattttgatttcgcttctcgtaaatgtcttatatttgataacggttctttgttattaaagaaagtcactcttttttttcctccccggttatggaattggggtttttattttttagaaaaagagaattttgatttggttttagtcttgctttgttgctttggttttgagtatttgttaatggttttttggttgttagttgttagctattgaaaccccgtgtttggaggatttttggaggaggatttgtatgataatgtgttttctagaatttttttggtgtttggtctcagatttatgatggtaatgactctggttggttgatgagaaacagtggggaactaaagtgaacaaaagcatgtttttgggtctataaattaatctaatagtttaatacgttttgggttatgcttttgtgcttgttctgcatttgctttgtctcagtgtcgtgctgttggattgtggataatgattgtgctcaccggataaaatgagaacttaatttacttgctgcattatctgtaacttcaatggttatctttgtacatatgtttttgtgtggtgcatttgtgtgctttgaactagcctgcatcttctcttgctaattgtgtaataattataatgctgtagttgctgatgttctgttttcattgcgtaatttcaggccgccaattacctgaacattaagggtttgctgga

SEQ ID NO: 87583 - DNA, 778 bp, Citrus clementina
  Intron number 1 from transcript clementine0.9_021364m (loc us clementine0.9_021364m.g) derived from phytozome v7.0 (c hr-ID scaffold_17; pos 301509 to 302286)
aagctaggttctgggtagatttcattgacaagaaggtaactttgttgttgattttctgaagtatgtttatgggtattttttcaattttagatttaattgtaattttattaaaatagaagccgaaattttgttattaaaatatttcattgtcgagtagatgtcatggatttgttgtttgactacaaataaacagggattgcattgaacggagggggaaaagatgtcccctacagagttgaagattttggttgttgcaggactatgatgcagatattataaactttagtaggttgcagcaaaaaatcagtaaatctgagaggccaacgatgaggatcatagtgagaatactataaactagagtaggctgaatatttgcagttaaaagtctagtttcagtagtaagggtagtaagtagtggccttcttaatgtttagctcttggtttgagctttagtgggtgtgattttacaaatatatatatatatatatatatatatatttttaaggaatagctggatgtctgtgggatctatatttttgagatggtaaaatctagtcttgaaaatcttaagatatgcttagaagttagtaaaatttcaattcagtcctttatttttctggatgtttcttggcctctacatagttttgcagctaagtgtaagactgtaacctacctgttgctgattttgttgtcttgaaatggatactgaacctgaatgtgttaaattttatccattttcggacagattttctgatacaatattgaaagtaaattgcag

SEQ ID NO: 87584 - DNA, 859 bp, Citrus clementina
  Intron number 1 from transcript clementine0.9_017539m (loc us clementine0.9_017539m.g) derived from phytozome v7.0 (c hr-ID scaffold_9; pos 1136999 to 1137857 reverse strand)
gcgattgctgcagagcaagagaaggtaatgtaattgtttagaagaaaatttttaattttgattgtgtttgggttcttgaatcatcttatcttgaaatctagggttattatttttgcgtggcgtcgtttcttaaaccaattttggcattcttttatgagaaatttctgttttattttttcaaaatctaatagggtttcttttcttttcttttatttttccttgaattgagacagtgtttgcctttttcatgttatgtacattgggttcataggcaagattctctgcagaattgactgaattatgattttagggtcatgttttttggattacgactgctgattcatgatctgtatgctttgattttatacaaagacttggattttgatagggttttaacatttaatttacgttggttttcatttattttgatttctgttttattttttgaaaatctaatggggtttcttttcttttcttttatttttccttgaattgagacagtgtttgcctttttcatgttatgtacattgggttcataggcaagattctctgcagaattgactgaattatgattttagggtcatgttttttggattacgactgctgattcatggtctgtatgctttgattttatacaaagacttggattttgatagggttttaacatttaatttacgttggttttcatttattttgattttgataatttggcgatctgagttaatgcattagcttgcattcaaaataaaaatagaaaataaaaaaggtaaaatcatttttagattatgctaaggattgtagatttgtggcctatttttttacaggcttgttcagaggtttcagcaaaggagaaaaaaag

SEQ ID NO: 87585 - DNA, 967 bp, Citrus clementina
  Intron number 2 from transcript clementine0.9_025614m (loc us clementine0.9_024897m.g) derived from phytozome v7.0 (c hr-ID scaffold_26; pos 767861 to 768827 reverse strand)
gtgttgaaatatcaactggcaagggacttctggaggtatgacatgctctttgtgtgttttctaattctgatccaataaactattgcctttcagatgcaaacataagttttaagtatcattcttgatgttttggccagttaacgtgatatagctcagaattgtttgattgttaacaaagaattagaaacctatccggttcagataatatactagacacttatataaggccagaaataacggagttgagtaaatgatatagttttttttttttttgggtaaaaaaacaaagacaaatcaaaaacaaagaatgctaagggtagatcgacttgattagtaatgaacccagaatattcttggcttatgtattgtttgattgcctaattgggaggaaacctttagcctgatgtgaattactcctttcgctttaatgcatttgggcttcaatatcaggcacacaagagagcaaatagaaagcacttcctctttctgtgctttagacaaagtaggctttaacaagttttgtccccttgaaagatatgcttctcaaagaagctactcttgtcgaagagcttagaatgtagagtggatggaagcttcgcaatacattgtacaggcacagaatacctccgcccacctccccccctcctgagaaaaagaaaaatataaattcacacacataattgacatattttttacccactgtctgaaaatgccaaactcagggtggcgaagacaataatgagttgatgggtctaatcctgggcaaatgatttcaatttaatgatttctttgctgttctccattttgttggtttcaaatccatgcctgaaattctctgagtccctaatttcagcacttaaagcctactcaaaatataaaagcacttatgagcaattatataactacatccatgtctattttttgttttgcagaattttgggcttacatcacccttgccaacagcagc

SEQ ID NO: 87586 - DNA, 691 bp, Citrus clementina
  Intron number 2 from transcript clementine0.9_017897m (loc us clementine0.9_017897m.g) derived from phytozome v7.0 (c hr-ID scaffold_26; pos 2604002 to 2604692 reverse strand)
attctttccactgttggtcgctgttaacacaaaaggtgagcacgaatttccagcaaatcaatttctgattttaagtgaattaatacgtataagcataaatgcataaatgtagtttctgatttgtagtgttttttatttgtggattttaatggttgtgtacttgaattttgcgggttttatgatgatgttgtattttattcatgttaaattggtaattgttgattataattgaattttatttgaatttattagttaaattgttgaatttttaaattattttttaaattatttaacttaatttagtggatccggacagctattaaaacctcattggaattgggatttgttcaggatttctattgggaatattttgcttgttggttcagtagtattctcttttcctttaatttttctcacgggtgtgccacgaactcgccaagcagccaccgtattgcaggttttttgttttcccccaaagtgcttgataaatttgaagtctggattgcttgtttggatattaagttacttgcaagtgggttcttcagttgattgcttatcatcagagttgtgaattgaattataatttcttccttgtgagtttggttcaaatcaactacccaagaaagcttatactaggttcttttttttttttttttgggtggcagtgtatcattgaactttattagcagat

SEQ ID NO: 87587 - DNA, 871 bp, Citrus clementina
  Intron number 2 from transcript clementine0.9_021101m (loc us clementine0.9_021101m.g) derived from phytozome v7.0 (c hr-ID scaffold_19; pos 1575027 to 1575897 reverse strand)
cgtaatctccagtggatctcgaccgtttcttctacgtattcatcgctttctctcttattcttcaagaattcttatagcacttgctaacgttataaaattttgtagctttcacatgggaattttcatatcaaagagatctttgtttaatcatcctatgtcttatttggtatttggtatggaggtgctgatgctataattgttgcagaaaaaaattataattataaaataaaaattaatagtatacaggaagtataatttttaaatacaggaagtataatttttaaataataattttgatgaaattagtaaaaatataataatttttttattatataagtgtaaaattaaatcaatttaatttttaagttacaggagttagtgtttattaaatactttagtgttgtagtttttaagttacagcaactcaacctgaatctcaaacaaaaccttaactttgttcttttgatttgtcgtttttaattccttatattagaggagattagtttattaaaaataaatgatgattcatagcaatatatgaataataagtaaataaaaaatattaattataatctatagaatatgcacattgatatatgaagtgtacataattttgattaaaatctataataaaactgttagatatttataatatgtaattttaacaaacgtttgatgtaaatctactttcaagacctattttataactgtatccatatcctaacatatcttacggtcagacccgtatctcatgcttcattgtgttactgaatataacattattttattgctttggtttgtcgttttaagaatttgtttagttcgggaagtattcactgatggctatgaattaaaactgtccagggttttg

SEQ ID NO: 87588 - DNA, 857 bp, Citrus clementina
  Intron number 1 from transcript clementine0.9_029348m (loc us clementine0.9_029348m.g) derived from phytozome v7.0 (c hr-ID scaffold_17; pos 774836 to 775692)
caaatctgtcagatattggtatatttcacttctttttttgctgtaaaatatgctattatcagtaatttatataatccttaaattcttgtctaagtttttatcttattgagctagatcaagactgtattatctcaatcaaactgcctacatttggaagagttgccaaatcttcaaatagttctcaccataatccgtactctactttgcaaatgggtggaatttcccaccttgcattcttggttgaataacttatatcatggattagaagagttgactatatcccattaaatttcttgataattcaacaagtgtgtgtatccacacctgcgcgcacgcgcacacacacacgcatatgtacatgtgtatgtacacacacacgcgtgcgcacacatatacacacgcatgcacgacaaacctgttttttattatcttgcagaccagagttcttgcttgatgtctttttcggttccgaaatctattcagcttctttgtttttagtcatgtaactattggcattagtggtgtgagtctcagtttttagctttttgagggaaattaattataagttagcatctctgtggcacatattccaccaccactcctggcttatcatttttattttattgtttgctaatcggattttgatacttgtaatttcttttagtgatattgccattcatgaatttgttattatttttgtgcacataaaaaggaaagaaaaatgcatttgaaatgtatttatcaccaacaggtatacaatataacattgttattaaacatctcttagcatttctcagtttcagactgataacctgtgtgcagttctggaaagtgccagataattcactggaggcaag

SEQ ID NO: 87589 - DNA, 533 bp, Citrus clementina
  Intron number 1 from transcript clementine0.9_005163m (loc us clementine0.9_004871m.g) derived from phytozome v7.0 (c hr-ID scaffold_19; pos 788518 to 789050)
cgctttgaagatagatacacaatttcgcatagaaggtatgaacttttctttttcttggagcagcggctggttttatttttggtttgtcctcctttattattgttatttttttctatttattattgttcgtatgattgaagcttagtaagcaaaagactagttttgagaatattaagtggtattttaggaaacaaaaaaaatttggaaattgctttagttatagtgtaacacaagtctctggtagaggatttgtgctgtttttattcaaaactttctactttcactaatatttcggccgatttaagtttaagttttgcgccctaaagataaatctgtcttgttcttaatttgattaagattgtattggttaatatagttgaagtttttatttttagtaattttttttttcagtttgattttgaatactacttgtaattttcatttggttaagattttccttctttctcttaaaggatatttttcttcttgatcaattttttagggagaaagcaattgttgtcggagatttataa

SEQ ID NO: 87590 - DNA, 475 bp, Citrus clementina
  Intron number 1 from transcript clementine0.9_003155m (loc us clementine0.9_003159m.g) derived from phytozome v7.0 (c hr-ID scaffold_32; pos 147774 to 148248)
taaagaaacagaaaaaaaaaagaaaaaataaaggtgtttttgttgttttcttaaaacagtgtttgcttattcagaaacagggttttgtgctcatcaatttctgggcttttgtttgattctgtgcttgaaattttaagcatttttttttttctatcgagtcgttcaactgttcgaagaaaagctcagctggtaaaaatagtaatattattatacgtatgtgcgtgtaggttcttttgttttatctgttcagaaaaatattagaatacagaaggacaatatgttgttgggtttttatcttttgctttcatattttgggttttagccggaaaaataaattgtaataatctggcattttctaggcaacgaaacagagtttgcattgctagtatttgcattcaactttgaaatactgatctagatttttttttttttttgggtacttttgcagactaaatctggctctgggtgcttagca

SEQ ID NO: 87591 - DNA, 736 bp, Citrus clementina
  Intron number 2 from transcript clementine0.9_018819m (loc us clementine0.9_018819m.g) derived from phytozome v7.0 (c hr-ID scaffold_80; pos 268503 to 269238 reverse strand)
tcgtcatcaaaaaggcttccacattcacgcttcatgtaatcttgtttactatttgtttcattattattgatcgcttcctattttattcattattttttttttccatcagagtttcaagaagataggatatcttaatattactgacttttccagtttttcctctgttcgagggaaatgatgtttgttcactagtttatgcatcaagtctttaaaattgtgaaatggctgcaatactgttaacaactggagaaagtattttgtagttcaaaatattgatttcggctaaaaatttcacaacttggtgctgctcagagatcaatgcctttcttagttgcttgttttggtttcatcaaagattacagtatactaacatccactcccaaaggccgctaggcaataacaacttacttggttgacattatggaatcaagtgtaagtttgattgttattctgagtatatgctcaaatggtcacttctttcctcttgatgctttaaacaaatttttatagaacttttgttagtgcgtgtgctctctgtcctagctgcactatgcattgcagaactttggagcattagcacactattaatatagactactccgttcaccattaaactgcattaaatgcttttgccctgcagatatgcctgtgttattagggattaactgcctattataatattttccgtacaactttttcagggttgtcaggccctcagcttgttagtactgtgttc

SEQ ID NO: 87592 - DNA, 740 bp, Citrus clementina
  Intron number 1 from transcript clementine0.9_008000m (loc us clementine0.9_008000m.g) derived from phytozome v7.0 (c hr-ID scaffold_54; pos 311013 to 311752)
ggatattacaagcttccccactctcacgacgctaagtatttttcaaaaaccctaaaatttattattttattgatttattaattaaatatttagattaagactaatgtttgtaatttaaaacgaagaagtgcgttatttgtttctattgcgaatcaaaatcctttttttttttaaatgttgcagatttagaaataagttgtttttggacagtaggttgctgattattaattgcctgttggtacatagtcaatctgaccaaaaaaaaaaaaaaaacaaattgagttgtttgtatgcttttaggatttattgaggttaatgtgatgctacagcttgttttgattttctcagaaagaaaaataatttgagaaacttattaggtttgtaagtttactcgccttcttaggtataattttgctgtgagatatgaaaaataaaaaaatgagttatgtatggaatgcgtataacgattatctagtcttttgttggcagtcttatttctgcttagtaaatttgaatccatatatatgcactgattatctaggatgtagtgttcagtgacaaaccatggatgcattgaacgattatattaagtgggtaaattatcttttttaagttgtcagtgcaattaattcttttgtcctgtgatctctatacttttttgcatcttgtgtatgagtttgtctttgtgaatcttatttattttcaattttcactgagcaatcatgcttcttgtttgtagg

SEQ ID NO: 87593 - DNA, 976 bp, Citrus clementina
  Intron number 3 from transcript clementine0.9_025426m (loc us clementine0.9_025426m.g) derived from phytozome v7.0 (c hr-ID scaffold_9; pos 2224917 to 2225892 reverse strand)
ttcttcttcatcttccactgcttgcagaggacaaggtactttgactgcttgctttttaatttatttggattttatgttttgtgttcagaagttattgtgaaagtgttaaaagaaggttttgaacttcttctttttttgtgtgtggtgaaaattactctatacagcgtctttattgctttttacatttatgatttgtatatgatcagctagatatttcttgtttgcatgactaggatctttctagggagatcccaatctctgtaaagtaaattgtgcaagttgaaggttataatagtcatgtcttagttggtgtgcttgaacacttctttgagtgcagcctgtctcttaaatcaatgcttaatttcagtaagtggcatcactaaaagcacaagttatgttgggcttaagggtcatcccccctccacccccccaccccccaacaaaaaaaagcagacatttgaattttagatcagtaaactgaagttttgccttcgaaaacatctatggattattttgaaaagttggaaatggttactttgtttcaaaagggctattatatctactgtttataatccaatggagaaagaattaccatatacagtaaggcaagttatattttgttcatgcgaaaaggtttgacaatatttctgtctattgcttgctggattattatattatcagctacacaaatacacaatacctattccgttctgtggaaattagtgtacaaactaatacgataaagtaattgtaggagttatattggtatttgttcaatataatgttttcttgttggaaaagattttcaggggatgattcttttgaaataaacaagaattagctaaattccatgattcttttggaacactttctagattagaaagagtcttataattgactttcacatttgcttttcatgtgtttggatttaccatgagcataaaactaaatgaacttctcatttgaattttgcaga

SEQ ID NO: 87594 - DNA, 907 bp, Citrus clementina
  Intron number 3 from transcript clementine0.9_003352m (loc us clementine0.9_003352m.g) derived from phytozome v7.0 (c hr-ID scaffold_22; pos 400315 to 401221)
cctccagagattacgtggcagggaagacgtttcaggtttgcttttgttcatggtgtttttttctttcctttcccaaaatatgattatgtacttctgatggagcctagaaaattgtctccttgctgattgaattgatccattgagcttgagccttgcctccagtgtttggtggtgtgcatgatcttcttaaatcaatttctgatgaaaacattatgtacactgcacagttgactgaatttttcagtaagatttactatctgctagactaagcacatggaatatggactaccctagtttactcggttcttaagcattgacgatttggttggttcaattaatatttttaatatgtggctcaaagcttattattctacttcaactgaagtttttcattgcagtcttttgctattgctagtttaatgagagtcaccatcttgatccagagttctgaaaggacgtctttaaaaatcagatttatcatttccaaagagctctgtatcgacttcagatacatttatgagtgcagaattttggcactaagattttatttaaaaaaaagaaaaatattgaagcttctggatcttcattgtttgatcagattcatataaatgcatcaaatcagtgataatcatgtactacacagcatgcaacttaaagcagttgaaattctcatatcgcttctcagttgattttatacattcaccgaatgacaaggactgaattgagaaaggaaaaagtccacagatattttgtcacaaccattctaattgacctcaattattgtggcttagtaatgcatgggcagttggaaatttctacacccctcctatctttttccatttaattcttgatttgcgacaatttgatcatgtttgtcttgctaaattttctttaatccataggtgag

SEQ ID NO: 87595 - DNA, 546 bp, Citrus clementina
  Intron number 1 from transcript clementine0.9_021650m (loc us clementine0.9_021650m.g) derived from phytozome v7.0 (c hr-ID scaffold_17; pos 3010684 to 3011229)
ctggtttaagtttgagagaattggaagagatcgaggtgagtaatagggataaaaatacctatatttctttatttaagtttctgtttaatttttatattttaaaaaatacctcaaaaatttataatgtaatatgttatattcttattccatttttttcttttcttttaatgaaataagttaatttgacatattataatttttttttattgatatcctaaaaatattgctgtaaggatattattgtaaaaagaaaggatggaattgtgacctatttaacaataaaagtatcttgagatttttttttaaatatagagattaaatgaatgtttaactcaaaatagaagcagtaaataaacatttaccctaagtaataatgataactgaacacaaagtttgaagagacaaataatgagaaaatacgacaaataccatctcacttatcttgtattgatgtttttttttttaactgactttacaaaattgtatattaatgtatcattgctctttccagctacgtacaagattgttcactgtccttccgtttgc

SEQ ID NO: 87596 - DNA, 1045 bp, Citrus clementina
  Intron number 1 from transcript clementine0.9_022270m (loc us clementine0.9_022270m.g) derived from phytozome v7.0 (c hr-ID scaffold_17; pos 377745 to 378789 reverse strand)
ctctgcttcttcccagaaacccgacaacattcaaggtctctctttctttttctattctagttgtttacattttttttttccttcatcatatgtctcttgtttttgcctttcattctattatgaatagtgccattttggattgtcaggaactagaattctggtatttgtgttcttggtttagtattaatcagttggctaggtggaattgtaattgccgattttaattaggctatgtttgggattgttgtttcccaactacgcatacttgatagtcaatgattccgttccatgctgcactaaaagccaggccacattaatcctcgacttaccctttaatattatttagtattgtttgatggactaattgggattgataacagtcaaaagcaaattgcaaaaaatgatgcctcatttccatagagctaagaattttattcaaagaatattttctgtgataccctcctgatagtatcacttgcattcggttaggatgtcctgggaatcaatgatcatcatgaaataattcattgggggagtcaacatttatgtccatggataagtataggcattcctctaaatcgtattgtgaagcagagacggtcaaaagatggaaatttgtaaacaactttgatatgttaaacagtaaacttatttattcattgttgcagcgtatgctcaggaacttgtgagaattttctcttctatctcttttatgagataaccgctagtactataccttattttgctgacttcaggattcaattgcaatggagcagttaattctagggggatattaatggagagaaagtacttctggattttgttgataacgagtctagttggttttttgtccataaataagagaaaaagaaaaaaagaaaaaaagaaactcatttcccttagcttattctccataaataagagatgagattggttggaatatgtgtcttgaaagaccttataatctgtagcagttgcattttttatctttcttatttgacaggaattcatctgttgtcttctgcagaggccaacagggttgatt

SEQ ID NO: 87597 - DNA, 743 bp, Citrus clementina
  Intron number 2 from transcript clementine0.9_019662m (loc us clementine0.9_019662m.g) derived from phytozome v7.0 (c hr-ID scaffold_46; pos 354995 to 355737 reverse strand)
ctggggagcttccaattgtcaatatactcagtgaggtaagtctggggttacttcttgataaaatggtaatatggatcaatttgcattgtttgtttataaatatctaggtgttacacctcttatcttttagtactatcttatttttttcaatttttttttttttgaaaagctaacttttattatttaatggaactgttaaggtgtctgagtgcaaaatttgaattgaacatcattattaatcataaacttattagaagatcctctggagaagtttagaccattgctaacagagcttattctgtctttggctcttgggacgacctagctttagatttatatggattgcatacaaagtttgattgatttttaaccaataccctttcttattggctggaaagtggttaatggtcatatgggttccacattcctaagcagtctgaacaaagtaagtgtgcttactcaatttgtggtaagatatccctactacaaagcatgtacctctaccttttcaatgcatgcttctgccattaacatagcacttctaacataggtcttatgacaaaatttacataccacatggcaattggctgagaaagagattcgtgcatatcttgaaagtctttattgtaggaattgttaatgaaagttctatgtactcagttttattatcatttgaatttaaaaatgtttgttttcgtgaaaatacaggaagaaaaggacaagaaaatacgggatctctacaa

SEQ ID NO: 87598 - DNA, 953 bp, Citrus clementina
  Intron number 1 from transcript clementine0.9_028900m (loc us clementine0.9_028900m.g) derived from phytozome v7.0 (c hr-ID scaffold_19; pos 1521031 to 1521983 reverse strand)
ggaccaaaaagtgcgagaccaaaaagtttgtgcagcagtacagtcaaacgtacagttggaacgaagatggtgacgtgggaaaaggcttcagcagttgcagacggcaggacaagccaaagaggcccatgggccacgatgactgtgagaactaagaaagccgcttaaacttttaaaggtctcccacgtgccagatcatgttgtcggctacggtcaaaagccggtgccaatttagacacgtgtaagcctgataatgataatagtgaactttgaaactttgaccaatttttcctatcgtcgtcatcatctcatcgaaaaggaagagccatacattacacatatcgtgactgactgactgactctcgccggttactgctagtctccgctgacttcttatctcgtattgccatgtccatctcatagctccccttaaaccctcatcactgttcattcaattcaacaccttcttcacttctccctcatcggactggtctataacatacattagtgattctaatatatggttgtatcttcttcttattattattttacatttcattttgaattgtaggatctgggaagctaggcacggacatgtttccacatgagaggccattttattttatggtcatgttatcggaaaggagttgtgtcaactttttctctttataaaagtggcgtaacaaaagtctcattcaacgctcaagatagactttctctcattctaattttttatatatacatgtgtgtgttgtgttgtgtaagaaacgcaaaaaacgacacgaatatttatatgtgaaatcacaagtccaaaacaaaattaaactaagagaccacaccaaataagctagctagctctctctctttacttcttccttcttcttcttcttcttctgcttctgcttccatgtctaatgaatctagggacatttactatcgtgctctatttcaaccta

SEQ ID NO: 87599 - DNA, 872 bp, Citrus clementina
  Intron number 1 from transcript clementine0.9_030528m (loc us clementine0.9_030528m.g) derived from phytozome v7.0 (c hr-ID scaffold_73; pos 1068383 to 1069254 reverse strand)
gctgtgttttggaagattggttgccagaatactaagtgagtttttgttctttttctttataagaagggattttttttttaacttttttttttgttttaagtgtttatctttctgtgtttggttgctgagaaaatggagggaaagtaaagaaaaaaatgatttctaaccaaacttcaagttggattatgaaattatgattgtttggttatttggttttcttagtgattaaacagaatagatctagtagtgacgttttttagttttaatttcatttttttggggtttatttttggtggatttgtgacggtagcttggttcttggatactattgacttattacaggctgattggatactgttagagtgtgtattggattattgacatgtatcctttctctttttggaattttgcgttttggtttattctgttttgtctttaagaatcttagtagaaaagttgatttgtagtagattgacaaaccctctttgtattcgactggttttctgtgtatcaaaatctattgattcagtatctaccttcttttgtttgattctattcgtttgtatttgcctgttttcaagcaaagtaaagttgacattttttgctcttcagctactgaatcaatgtgctgattagttgctttttgtcatgctccttttggtttcttagattacatatagttaaaataaggaaaaatagtaaccctcacatcatagtctcctggaaactgtttgagctaattgaggttctccttttcttctttttttgaagtttattgtgtcgagagttaacagtagtaatttaatgccttgtatgtatttatttctcaacaacatatgttcttttgttgttaggttattaatttgggaaga

SEQ ID NO: 87600 - DNA, 659 bp, Citrus clementina
  Intron number 1 from transcript clementine0.9_011192m (loc us clementine0.9_011192m.g) derived from phytozome v7.0 (c hr-ID scaffold_34; pos 995672 to 996330 reverse strand)
ggacattggtggacacggacaaagctttttgaaatgtaagttgtctaattttttgagctgtgtttttcatcattaatatgtggcatatttacctaaaactaagctatgttatggttttttttttttttggttctgttttttagtagccttcttaagattttgatattgagcatgctttattctactttattttcatcactgaactttacttttttgttctctatggaacccttaatgtctatatttattaacctcttctacattttactccactttggatattgacaaatgcattaacaaattcatgagatatagacacttaaatggtattatgaatattgagctatattagaaagttctggagaatggagaaatatcctcaactttggctagctgaactgtgtgcatatctataagtactcatgcatatattaggcatcacagaatattttgcagtcttttggtgtctccctttctgtgctcatgtctgcatatggaaagaatttgtctcattcaatagtgctttaataatcttcccatgaggttgtaactgcaaattttcagatttaccatttgctatttaggttatgcttccagattgctactaacatgattttcggacaggggttgctattttcaggtaggtggatctctgaagc

SEQ ID NO: 87601 - DNA, 1050 bp, Citrus clementina
  Intron number 3 from transcript clementine0.9_022525m (loc us clementine0.9_021870m.g) derived from phytozome v7.0 (c hr-ID scaffold_9; pos 1668718 to 1669767)
ttaaacgtcttcctggtggaaaaataaagaagaaagtaagactagttttttttattagtaaatctcttgttttcagcggatatccttgaagagcttgctcattaccagtatttaaagtttcaaatgaatgtctaactctaaacatgattgtttaaagttttgatggatttatagatgtaaaatgctgtttaagacttgaaatatcattcttgttttcttatttctacaatctcactggtaggggatcagcgttgtatgaatcatcaaatgtcattgtttggtactgctggttagtctctattttatgggattggaataccatgtctcatcttaagccaactattcaagcttacaaagatctagccttaatgttactacccgtgaaagttggattcatttttgaagtttctgacgggaacttcacttattgaatgatttaagaggtggaatctgttttcttttttcacactacgagcttttttcctatcctgccctcatgctacgcaaaggaaactattaagcgaaaaagatgttaatcctgcacgcaggtgcgaatcactaatgttgaatcgagtatagctttgcttttagtatgtttgctacttgcaatgtaaatgacgtttgcctgcagcttagatgcgcaaccaatcactcacaccttcaacttaattgaaagcttctagactcatcagtgggaatcgctttgttgaaagtgtgaatttgtgatcaaacttatacaaaggcccacatatgattgctagatctcattgaggttgtgaagtgagttgaaccagagttaggatttttattttatttttaatgacaatatggacgtgagcgtgaagaagttaataagaggccacatgtttggtcacattggagtagtcttgttgccattcttgatacagattatttcctgtagaccttttatctttgtaattggttttcaatgttctgttgcatagctcaaatcttctgatgtgatgacaattcaaaattttttattcactaataggaaagacaagaagttgttattgaaaaagttgtacg

SEQ ID NO: 87602 - DNA, 310 bp, Citrus clementina
  Intron number 4 from transcript clementine0.9_028767m (loc us clementine0.9_028767m.g) derived from phytozome v7.0 (c hr-ID scaffold_32; pos 2106093 to 2106402 reverse strand)
cgaagcaaaattgaatctggtaccttttctataaacccatctattttccttctttttctttctttgagagatttctatatacatgctcggttgttatggtttcttccaatattaatgcttttgatgaaataacaaaactcactaggtaggatgaagtttacattttcttgtgtttacccataagatctgaacaaattttgatatgttgggttgacaaagagttgcttgatatacgttgtgtaatttttaaacttgaaaacaccattttttgtgtggtttaattactttttcttcttctttcttatgaagg

SEQ ID NO: 87603 - DNA, 598 bp, Citrus clementina
  Intron number 2 from transcript clementine0.9_021277m (loc us clementine0.9_021277m.g) derived from phytozome v7.0 (c hr-ID scaffold_46; pos 227130 to 227727)
gaggtgcgtctgtcttactctctatagattttttttttaaaattaaattctaaaaatagaagtatggaaacagagaacgcttaattgaatctaatttcagcttatattttattttctcttattcctttatttatttgtttgttggtgcgcaaaaattaatagcttagcatagtgagaagaattgagaataagttttcttctcaaatcaaaatcagatttttgctctgttttccattcttcgaaaaaattataaatttgaatttgagcagtggattataaacacttagatttagatttttcacaaaactttactctgaaatacaataataatatttcatgtattcaatttcatttagaaagcacgtctttgcatataagtgtttcaaaattatccaattagttgtatgtttgtttgacagatcacaaattaagagtttaattaaaatcttacgtgcggatttgatcttttgttttagctctgtattagataattaaatttggtaagcttaattgattagttaaagctaagttgaaggggctgagcatgtaatcaatccttatcttatttgagaatcgttaataatgtagggagatccaa

SEQ ID NO: 87604 - DNA, 853 bp, Citrus clementina
  Intron number 1 from transcript clementine0.9_023998m (loc us clementine0.9_023972m.g) derived from phytozome v7.0 (c hr-ID scaffold_19; pos 233090 to 233942 reverse strand)
aggaaggagaaaatacccacactcttctgttagtgagcctgctttatgatattttggtttaggtactggttatgttgtgtttgttttcataaaaaccagacacgactagtagtgatcggttgctttcttccggtttttgtctgtaaatagaaccagttagttttgtcggtagttcaataacgcagtcacggaggataagttcggtgagataagtggtttcgaatcagtgtcactgagttatttctcccaaccgatatagttatatcttattattaactagtaaatattgctgctcattcatctttacctttcacagttgcttgcttgcttcttttttctccttattctccaaatccacacggcagtaacaaggttttctctctctcgcaatgtgaaaattatattttattatatgtttgagctgatgtgtttgcggtgttctcgaaatttgagaatacatcttgcttgtaaattctgtgggtatgctggatgcctgatgcgttattgttcttcatttctttcctttctgtggtaaaacaattcgttataaaaattcttcctttataaagaaatgcttcattttgcatactcgattgcttcaattaacacgttctttcgccaattggctaatttttccccttttttttttttaacaaaaaattatttattttgaacgtggacaaactttcatgatactagttttttcctaatttctaatgtctttgtttcttagtccctttttttttttttgcccaattaaaaacttgagattgatttctgatatattccctttgaatgttttgttcttttctttgcagtgagtgccaagttcttaaggggatccatcttagaa

SEQ ID NO: 87605 - DNA, 635 bp, Citrus clementina; identical to SEQ ID NO: 78547
  Intron number 3 from transcript clementine0.9_025055m (loc us clementine0.9_025055m.g) derived from phytozome v7.0 (c hr-ID scaffold_22; pos 3250336 to 3250970 reverse strand)

SEQ ID NO: 87606 - DNA, 642 bp, Citrus clementina
  Intron number 1 from transcript clementine0.9_025055m (loc us clementine0.9_025055m.g) derived from phytozome v7.0 (c hr-ID scaffold_22; pos 3251291 to 3251932 reverse strand)
ccagccgccggccagctatttttctttacgcccaggtcaagtttctacatctttatcttttatcttcttttttttttttttgggttccttcattgtgtgatgggaattgtaaatcatgtagctgctgacctttttggtctttgatagcctgatgcttattaattgaattatcttataatgatttgtttctcccgtttatagttgtgttttttgtttttttaacacttatggagtttcttttattaactgaatcgtgttttagctaattgatttaagcaatatgggttgagatggaaatcaaccataaaaggaaataataaaaagaaaggagaataatctctctttttttgtctcaaaatgaaaatagtttttgaaaaaacaatttgagaaaatgaaacgattccagttaagagggactgtaaatcattattttgcaagagctagttaagattttacactcattagcagttagattcctgactggtcggtcatatattttcctttgttatacctggattctggatcgagtagctgcttagggttgacatataatctgaaaattgaagactgaaatggtcgttaactttgaagcatgatatttttgcaggttggaatttagctgaggtcatcgggacagacaca

SEQ ID NO: 87607 - DNA, 999 bp, Citrus clementina
  Intron number 1 from transcript clementine0.9_022685m (loc us clementine0.9_021829m.g) derived from phytozome v7.0 (c hr-ID scaffold_9; pos 178784 to 179782 reverse strand)
tcgatcatcatcagcctttcgcatattcagatttggtaaactattttataattttgttttatttccactattgcgatcatacttatcgcgttataatcgtttgatgtaatagtattgtcgtgattgattgtttgtgtctgaaataagtttcgatttaatagtttctttcttcttcttttttttttaatttgatcaagtgtgtttttttaattgaattattcgtagattcatatcgatattttaatttgataatttatctttttaatgttttgattatgttgatatgttggaattaaccgctaatacatgaaaacgagtgaagtaaagttgaaacaaccataaaaacatgcttgaaaatagtcctgaaattaggttaatctggttatattcattgttagggttgcttttgggggcaattcgctgcgaaagcacttgatgtggcagtaagtgcttctccagaaagcacatcgcggttgtgtttgatcctgagttgcctttgtctatttcatccaaacattgtcaattagactagaaaagtacttgtcgatgcacctgaagatagtctcattgtcattatgttattagagaagcatatgatatagattagagtatgaatttgatttgagctttactagttccttgctatgactaggcttgttccagatcatgccacggatatgaaaacatccttttcctctttctggagaaaagcatgatgagtggcagaagttttttgcggttatttgtttttagtcatgacttgacatatttgactaattgattcagagaatctttgtgttgtggctgcttgcttaggttctatttctgagtgggatatatattctaacaattaacaggctgcaaggttttttatttatgaaatgaggttcatgtatttagttggtggcaagtggcaggttatatgcttggaatttgtgccacgtgcataagtatttttaaattgaaactgattctttgtccttgtttctgagtgaagca

SEQ ID NO: 87608 - DNA, 433 bp, Citrus clementina
  Intron number 1 from transcript clementine0.9_019520m (loc us clementine0.9_019520m.g) derived from phytozome v7.0 (c hr-ID scaffold_19; pos 3049444 to 3049876 reverse strand)
aaagtccattgcatccgaggtattaaatttcttttttttttctttaggtgtcatgacttcttttctgttgattagacttattatgagccctttccgtacttatggctgtggctttttaactaaactgaagttatgttataattgtttgatgaaaaatttataatgcctttatcattttttaaaaaaatattagttacaaatcatatttatatttttatatcacactaacactctttaaagctacgggacctccggccttatgcaaattcacttcacagcacttaatctcacgaattaaaaagttaaaggaatcattcaattgtcctaatcaagatctagtattgatcagcaagcatgctcgatcaattgaaacaaacacaagtgaaatacttgaaattggtttgatttgaaatgtatcaggtctctagttgta

SEQ ID NO: 87609 - DNA, 749 bp, Citrus clementina
  Intron number 4 from transcript clementine0.9_024867m (loc us clementine0.9_024867m.g) derived from phytozome v7.0 (c hr-ID scaffold_6; pos 4114045 to 4114793 reverse strand)
tggttgagttggagggggagaccgacccacttgaggtatgactcttcacattccttgtcggatggtatatctttttcccttcctggttgtgtgtgtctgcagaccttgtttttatagtcaggatactagtcatacccactcaatacatggatcaaatgatcaaccttgtttttgttgcggccatgtgcatttcatacacgtgtaaattaaaattggactgacaaatgtatacgatatttatgtaccagaaaaaagctttgactgccagtattttggtccttttggttttttcataaattttggattcctcttcataaatacttgttgttgcaaatcctaattggtctgtctatttctattgccatgatgaatgccttttggagtttcttgcatattcagaccaaaagtagactggtaatcatgggaataaaaatagtttccctgtagcatagctcagacaaaagaaaattgtggccgagagaagctacgacaaaacaggagcaactttgctattctggctgccatttttgttgtttaggctatatgtgctttttaaccaatattttagatgtaaaagcatacctttcagtaaaattgtcatgattttggtcttctatgtcattgatgctagtttgcaagtcgattacatgaagagctaagcacatgatttattgttctactattatcataatctgtctttcatgctatactatttttctgatattgcatatgccattgtctagattgct

SEQ ID NO: 87610 - DNA, 988 bp, Citrus clementina
  Intron number 1 from transcript clementine0.9_023535m (loc us clementine0.9_023535m.g) derived from phytozome v7.0 (c hr-ID scaffold_19; pos 2670311 to 2671298)
gccactgaggtaggtacttaatttcctctgcattattattattattattatttttgttctattttgattatcctgtgtatatgcttttttgtttcgattattttgtcactgagtgactacagcaaattcatgaaaagaatatcctttatgaattgttcatgaatgtggagtcgaagctctgttctttacattgtctgactaatgactattgccactatttgattgttgtgtatgttacagtaagtcgaattgctttcctcgattttttgctcatgacaagctgtagatattatctgctctggtctgttctgttatgttctgttcgcttatggatttttctttttaacctacatataatttctctgggaactgtatgtataatcaaagaatggtgtctatatatggcaatttttgaactggtctagcgtgctctgaagttgggttctccatcttcctatatttctatgactgggctgcaaaaacatttgtcggtgctttctccaactacccccgataagtacttcgatcatttaatttggatgcacatatatatagatttgattgtctgtgattatgtttaattatagcgtaatacaaagatcatgttgcattctactgaacgagagatactagtcagaggtcatttagattttgtaaaatacattgaagtacctagatcatctaggttcaagtttggaagaagcgaggcagagaaacagcatcatgaaatagccaaaatcttactcattccaacttctgtatattcatttgatgatactatttcccttgtcaattagcctttccgtaccactaaccgtctgtaaaatcattgcaattgtctcattcatgtcaactccggttcttttgaagttatttgcttggcttttggtttacatgattcaaaactatggaaacagtcatgaaaacatgtgcaaatgttatcatctgcataccggtatgagttaattgatgagaaatttccaggaac

SEQ ID NO: 87611 - DNA, 638 bp, Citrus clementina
  Intron number 1 from transcript clementine0.9_026934m (loc us clementine0.9_026934m.g) derived from phytozome v7.0 (c hr-ID scaffold_130; pos 306850 to 307487)
agcagggaagggatcttggtaagtgacatatgatgtaactcgcaacaaatttaaaattcataacttttcacatgttaccattcttttcggctgttgtaaattacatataatatactaatatatatgacttagcaactgccatgaggataatacttgaggagcattaccccattaaaaatctcctattttattcacagttttttttttttttttttacccagaaagcttatcggaaaatgctcaaatatccaaataacactattaatctcacgtaaagtttcaattttcttattattctttttttaataattaaaattggaatttgggaaaacatagaagtaaatccaaattggattatccaatatagattataaaaattaaaaaaaaaaggtgatgcaaatgttaattttcaaatattttaagaggtacctattgttttactttgaacttaactttgtcatctttaattaaaatattaaaaaggcattgttgttcaattggtctacatgggccaggccaagaagaccgaaataaaactttaaatacccgacccgcctcgccactaactttgttattttttcttctcttcctttggttttccagtctcaaacgtaagcctttcttcagccacagctgct

SEQ ID NO: 87612 - DNA, 747 bp, Citrus clementina
  Intron number 3 from transcript clementine0.9_020256m (loc us clementine0.9_020256m.g) derived from phytozome v7.0 (c hr-ID scaffold_54; pos 495076 to 495822 reverse strand)
aagtgagtaacaccgtttatcttaatagtaatattatttttattttttttaccgtccgagttactgctgttcaaatagtatacgtatgcattcgcacgcacactctgcttattgggaaaagttgaatcagcttctgaaacgacaacaccatgtgctggtaagataagaaagcgcggtgctgactgcttaaataagccatttgcccctgttgtttatctgctgctgtttatttatttatttgttataataccacgcaatacggcaaccgctgcttagttagtttgctagctttgcttcttcttatccaacttgggaactagagatttgtctttatgacacaaaactggatgcttatcttggacacttcctcattgaacctcgatttattcaaagcactgatgatagcacttcagatttctataaacggagggataagtcataagaggatatccttcttcaatttaaaaacaacaatattattagtagtcttgctgattaatttgatattagagaagtaaagtctgaatgctttaagcgatagtgttttattggttattctaaaaaaaaagaaaacaagtcatattggcgattgagcttcagcccactcttacaaacttggttctgtctataatttcagtatttcttcgacctagtagcattgagtgcttgggaaacagtaacgaaagatattggctgcgatttgtgaatgtaggtttgaattgggattggagaagccagatccaagaa

SEQ ID NO: 87613 - DNA, 455 bp, Citrus clementina
  Intron number 1 from transcript clementine0.9_002611m (loc us clementine0.9_002611m.g) derived from phytozome v7.0 (c hr-ID scaffold_62; pos 550448 to 550902 reverse strand)
ctgcgtctccttcgacactccggtattcctttctctctccctcttttgattttctatttgtttgtcgagaaaaaaaattagaaaggggaaaaacatactgttgaaagaagttagtggttagtattattgttctgttctggcttttggtttgtttgactgatgaggaaaagtgcggaaagtaatgaacttgctaaaatttaagagaattttcttttgcattgctattcggaggtggagtgatgcaagctttgcttgtcttgagaagagcattagatttatattattattgctcttgaaaaaagttgttggtgttgttattataatcagaggttacctcgttttacttggaattgatcggcaaatgattgtgctctttcgtttgtgctttatgatggttatggttctcgttatggatttcagagatctgaaggtgggttgtttgtcgacctgaattc

SEQ ID NO: 87614 - DNA, 255 bp, Citrus clementina
  Intron number 3 from transcript clementine0.9_015018m (loc us clementine0.9_015018m.g) derived from phytozome v7.0 (c hr-ID scaffold_80; pos 467438 to 467692)
caactcattttccaatttcaggtactaaagttcatttttgtattttgcttaattaattattcttcatgtattagtattaggatcttttctcttgatttgacctctctgaactttagaattataacgtatcattatcttataactaccaattaccaccttgtattttgctcggcagaggatcctgttccaatttttaatgcatttaaagagctaggtggtttgagtcggtttatttaatttagatgcagaaatttc

SEQ ID NO: 87615 - DNA, 281 bp, Citrus clementina
  Intron number 1 from transcript clementine0.9_016496m (loc us clementine0.9_016496m.g) derived from phytozome v7.0 (c hr-ID scaffold_34; pos 397735 to 398015)
cttgtgaagtgtggggattttttcaggtactctattttttcttccctttttttcccccaatgattagcacttttgttttttggggattaaatgtaaaaagggtagtttaataattctcggttgcaaacgtttgtacgtaacaaattaatcctagattctatcttgtgcactactctatatatatagccaaatgtggattttataatatgcaatattcacatgggagaaagactctcagtttaagaatgtaatgttattttgacacatgcagctggtgaatc

SEQ ID NO: 87616 - DNA, 759 bp, Citrus clementina
  Intron number 1 from transcript clementine0.9_030890m (loc us clementine0.9_030890m.g) derived from phytozome v7.0 (c hr-ID scaffold_6; pos 5810747 to 5811505)
tcatagatattctgatcattcttcctgtcccacaggtaaattaagcagagtcttaccgttaaattttctttctatgatacgtgtatagatgttctcaaattgccaggatgatatatttatatttctgcaaattaaccatccaggtgctactgatattggctatgattcaaagaatgcgaggcacccaattttctttgtcatgaaattttttcttttccaacatgtgctaagggttatacaaatattcaaagtctacatgaaagcacaggttccgaccaaacctgctgaatggggtcttttgttcggtttctctttcgtgcaaaatagtaaagtaagttatgttaccatttaacgctttgcatcgtccaaaagtgttatgtatctggtttctaaatgctttagtacctttcctaagattgtttgaaaggtatgtgcggactctttattgacataaaactgagtgtgctgccactgaaagttttaatccatctctttcctcagagttctgtctaggcttcaaaaagcatgatctgattggatacatatttagcatattatagtagtatccctgtcaactatattgataaacatatccgattgaatgatagtctgatctgaactaacaatatgtttttttttttctggccgactaaagaagacaaagactcgtatcaaattgccagtagtgagaaaattttaggcgcggtaccaaaatttagtaagatatgattggctggacccacagataacgcagcacca

SEQ ID NO: 87617 - DNA, 896 bp, Citrus clementina
  Intron number 1 from transcript clementine0.9_015984m (loc us clementine0.9_015984m.g) derived from phytozome v7.0 (c hr-ID scaffold_22; pos 2485221 to 2486116)
gattaagaggtgtgattggatcacacccaactctggtaagtgactcctttttaaaaaaaaaaaaaaaaaattattgcgcctcatggctcataccaagtttttgagcgtccatttctgattatatcaaatgtggaaacttaaacaatggcctgaaggtcattcctgacatatccgacaattggaggttgttatttgttaattaagaattttttatgtttctgatttgctaccattttgaaaagtaacaaggttttggtacttggagccatgcaaggcttttgctgatgttataaataaaactgctgctgataggttgctgcacaaaatgcgatttttctagtttcgttaatgctaccttaatagtggagtcaagcatgatagtttagatttcatttaacagaatgaagcgttaatcatgtatggcactgcagagtagttgttgaataatttagggccaattgtgttaccgaagtttaaggttcatgttgatcattaatggtggcgaaactatcatggccagacttttcaatactgcagcttgggttgacatcgcattgctgatgaagaccttaaataagatgatagcctttttcttgacgaagccagtacatcttcagacatcgataatttgtggatttcaacagcaatcagtaaccattgattctacttagtgttctagcatttgaattatccaaactgcctttttctttgaatccgctaagatacgagtcgtttactcatttagacatttaggatgtgattcatatatacataatatcatcacttctattcatagatggcttatttatttgcttgtcttttttgaaaccaattatctactcactgtagaacatctgttttatacttaacagatccactttatatttctttccacg

SEQ ID NO: 87618 - DNA, 725 bp, Citrus clementina
  Intron number 4 from transcript clementine0.9_024303m (loc us clementine0.9_024303m.g) derived from phytozome v7.0 (c hr-ID scaffold_9; pos 547725 to 548449)
tgcattttaaggtgtgagtccctttttatgataccataacactttgatctgctgtttgacaaaattaaggaagagaaattgctactagtgtcaaaaaatttagtgattttgcctctatgatgttttcaaaatcgatttggaactttaatatttttggtttggttactttctcaacttagataaccttaatatgatttatcaaaaatgtaaattcacaatgaagaacagtgttctttgaaccattgcactgtaatgttctgatattgttgttcacttgattaaatttctgtgtcatcaactagagagctgtataatttagttgccaatattcatatgattagttgagactagagagaagatttgagacatttatgagaatattgaacagcaattgagtggggaaatggaaattgaaaagattggaagaaattaaaaagttgcaatatgtgaatgagaaggacgtgcaacattatgaaatgaaactaatcatcatacataaaaatattcgaaatcctttaataattgggggtgaaaacatattgaggggtggtccagggattagaggttagaatgtgctaaatcctcaatttgaagaaacgttcggtcctatctacagtatgaagttatgaacgattggtaaattaaacaacctacctttactctggaaggtggttactggttaattaagtgttagctttgttatttctcttacagacaggagagat

SEQ ID NO: 87619 - DNA, 505 bp, Citrus clementina
  Intron number 1 from transcript clementine0.9_017817m (loc us clementine0.9_017817m.g) derived from phytozome v7.0 (c hr-ID scaffold_46; pos 1613233 to 1613737 reverse strand)
attacctgactcttaaggtaacttcgatgtaaaatcggatctactatttttttcttcacattctttacactgtataattaatgcacaattatgagttcattttagttcacgatcaatattcagtcatcaatttgatccgctgtgagtttatttccacttccatggttctgctttgcttcgtaattttgaagtgattcgccacgcccaagctctttgaactgatcttatgatatgtacaaaacataaagctcttttgagctgaacttatgcacaattattcgctttgttttgatttggttaatctcttcctgttcatttaaatttcgttttgagtttcctctgaaaaacattttatgtatagggatttagaatctgaatggctgtttgcttttgtctatcagggatctagtttgtctctttcttgtccttatgtttgactgaataaattatgtttttggtgattgtatcaggtaggaagcttgaaaaccaaatacactgcagaaag

SEQ ID NO: 87620 - DNA, 728 bp, Citrus clementina; identical to SEQ ID NO: 81756
  Intron number 2 from transcript clementine0.9_015412m (loc us clementine0.9_015430m.g) derived from phytozome v7.0 (c hr-ID scaffold_26; pos 1211638 to 1212365 reverse strand)

SEQ ID NO: 87621 - DNA, 489 bp, Citrus clementina; identical to SEQ ID NO: 79402
  Intron number 1 from transcript clementine0.9_005507m (loc us clementine0.9_005507m.g) derived from phytozome v7.0 (c hr-ID scaffold_26; pos 778095 to 778583 reverse strand)

SEQ ID NO: 87622 - DNA, 774 bp, Citrus clementina
  Intron number 1 from transcript clementine0.9_025898m (loc us clementine0.9_025913m.g) derived from phytozome v7.0 (c hr-ID scaffold_32; pos 769207 to 769980 reverse strand)
gttcatccttagttttcgttaagattttggttctggtcagttcaatgcattggtcgtgtttgtttatgtaatttatttatttttatttttttggaaaatcgttgatgctttttcactttgagagatgacacggatctccttcattgatatatcgattcagaactcattgtttttctgttgaaactcattgttttctgcaacagaaaaacattttcttagtttctggtcacccttaatatacttttgttgtttcccaaaaatcccaactgtgaatttaattttcaagcattaaaaaggaaaaagatttcttttctgggaaaagagtctgcttatacgagacagaacaattccgtgtttgtgttcttctgcttctttgttgtttcttatgcaattctgccaattctctgtttggttcctgaggaaatataggaaaagcataggaaatagggactcatgacttcattgaagtcaaattcttggtttacactcaattggtggagggacttaatcactatttttgcataataatgttgtataaagatctgaaagtattttttttttaatttctttttcagcaacaaaatgcatgctgaatgatgtgtggcttgtgaagttttcattttgagttttattataagaagtgtaactacagataagataaagtcatgggaaccgaccaatttactttccccctcaattggctttgcttatactaactttgagtctttggtgcaggaataagtctgctgtttattgagaagaagtaaacttgaa

SEQ ID NO: 87623 - DNA, 567 bp, Citrus clementina
  Intron number 2 from transcript clementine0.9_033262m (loc us clementine0.9_033262m.g) derived from phytozome v7.0 (c hr-ID scaffold_54; pos 820789 to 821355 reverse strand)
taggtacgtgattggcaaaaacaatagatccctttttacttctcattttgcggaagtttgcttaaaaaaaatatagcgttttcattttttgataaatttggtaaaatatcatctaccagttgatttatgttttgtgtaaacatcaaatcttggttttatttattttctttactgacataatttactccccccccaaaaaaaagttaaattgtcaattatttgtacttctttttaatgatttttgactaaataaatataagtttgatttgaaggacaattgtataaacaaacactaaaatatagacggaatggagatgaaactttcttctagcaagagttaacggtaaaatagagtatgtgagtaatgacattttgtcgaatatttcaacttttatatttgattactattcaatttcatgtaaaattatgcatatacgtgaatagttttagagttataaagaaggtggtgaagaaagaagattttagataagaataaactgatactcataataaattcaactataattttcaggattagggtgtgacagtggtacaattatcaatatt

SEQ ID NO: 87624 - DNA, 1010 bp, Citrus clementina
  Intron number 2 from transcript clementine0.9_008656m (loc us clementine0.9_008656m.g) derived from phytozome v7.0 (c hr-ID scaffold_2; pos 5707913 to 5708922)
tccggcaagttttcccatagaattcgctatcgttggtaggtgagataatttatttgtgtaagaaactgtagatattgttaggaataagcacagccataaaaaataggcatgcataaaaaaaaacaaaaaaagacagtatttcttcatatgctggtaaatttaatgtgtcccatttgggtatttgtttaattatggcaaattatgaaataaattgatacgtgaatgaataaaagtgagtttcagttacttgagaaattttagaatacctttgatgtattacaactaattaatacatgcatgacatgtgtaattgaatttaatataatcactacttgcatgattgttttttaaaataaatgcacacatgtcataatattatttgtttattgtatgactgacataatacttcagatgtattctataatttctccaattacgttgatagaggatgttggagtttgcaagatgacaacaattaaaatagacttgcttttctggagttaggtgattttgatgctaataaaacatgcttttgctttaatttttaggtttgtgacggtcttttttggttagtgcttcgagaataagcaagaacaccaaaatggaaaagttagaagagtgtacacttcttactattatcacataaaatctgtgttgttcagttggttaaaaatttataatatttttctaggatatatcctaatttcacctaactgtcattaattcttagtaaagacaaagaatactttagtccttattttttatttatttaaatacctatttaatttttatattataaaaagtatcccaaaacatccttatagcttttaaaatttacagatttctttgaatattttacgtgttaacctccttaagtttatagtttttttttttttttttctcattttgatccgtgttgatgaaattttcatgaaaatctaagatgtagctccttcagctagctagacatgagaagcttttgtgtctacaggagaccttggacaaacgga

SEQ ID NO: 87625 - DNA, 346 bp, Citrus clementina
  Intron number 1 from transcript clementine0.9_006265m (loc us clementine0.9_006265m.g) derived from phytozome v7.0 (c hr-ID scaffold_32; pos 101275 to 101620 reverse strand)
aataggtattttatcatcctcatccatattggttctgtgttaacgtgtctctgtttcttttcttttcttttcctttcttttcttttataaataattcagttctgttttaggctgatttttctttttccggtgaaagtgaaagtttcagtgtctcttctcgtacaaaaaagaaattaaacatgttcaattcaaaatagtttttgttaggattatttattttctttattacattgaattaaattgatagaatccagccaatattcttattattattagtactccgttgtctcaatttaattagcatacttagaaggaagatgttgctactgattcagggaatctggtg

SEQ ID NO: 87626 - DNA, 697 bp, Citrus clementina; identical to SEQ ID NO: 87056
  Intron number 3 from transcript clementine0.9_011167m (loc us clementine0.9_011167m.g) derived from phytozome v7.0 (c hr-ID scaffold_22; pos 2180172 to 2180868)

SEQ ID NO: 87627 - DNA, 954 bp, Citrus clementina
  Intron number 1 from transcript clementine0.9_025361m (loc us clementine0.9_025361m.g) derived from phytozome v7.0 (c hr-ID scaffold_94; pos 123935 to 124888 reverse strand)
tttccatcttcagcaactcaacatctttggtttctgtaagtttcattacactcaaaacatttctcttttcgttcgaaagctagtattatttgcctctgcttgtttcctcttcctttttctaggcaaccaaacagaatcttaggttatgaatttcaactttagcgtgatatatatatatttaatttaatttaatttaaatcgcacgttgtcgtcgatctgttgccataaaaagaaaaccccagcattgcgttttgcgggtttacaaattaattatgtgtaagacaatttaacactttctgtgctcaagttgttcgataaaatgcctgagagggttttaagtcgtcatcatgaagtctttctgaaactttgtgagctactattgattcggttacatatatatatatatattttactgcttatagtcatatctgttgattccctatatgagtaatagtgctggccattatatattatgtagctgatttatcccgaacattgaacccacttgttcgtattctggcaactttgtttgcatgcctgtttgatttctcaatgtccttccttggtagggaaatggatttcaactctaaaattgcactaatgatttgataaaatggacaaagttttgtagaaacttgaaggtaaaatttggtttggtttgacccatgagtattgaccaaattaaatcggtctttattgaatgccctcaaggaatagttgtcttttttaagcatccacaaacatggatgagacttattgtattgttgcggacattttgatatggagtcaaatatgtgtgttttaaaagtctcctcaaactttttctgtcctcttgagcaggtttattagtcgtttcgtaaatttaatattttggtttataataatgattatgtcaaactgattagcacggtgtttttgttttctctcttatagacgtaacctggaagtaagtta

SEQ ID NO: 87628 - DNA, 999 bp, Citrus clementina
  Intron number 1 from transcript clementine0.9_007876m (loc us clementine0.9_007876m.g) derived from phytozome v7.0 (c hr-ID scaffold_9; pos 795067 to 796065)
gctggtacgtgtaacttataaatttcctttatttctagcttttctgtaaataagggtaaagaatagtccaacactagctgaagaaaattttgatttatggccttctatactggtctgttctaccttaagattataggatgctttgacttgactactaataacgattaggggacggtaattttttttaaaaattgaatatatataaattgaaacgtacaacatctctcccaaagttcttgaaagtgcatcttctttcttttgtgccctaacaaatatattgttatagatctgcaagatatagtcattcttaggtgcagacgcctatatttttttaatgcggatacgctgttaaaccgtatggtttaaaaaagttagttttttaatcattcttaaccgtaagtacgcacacctatatttttttaatgcagacacgcagttaaactgtacggtttaaaaaagatagttttttaatgaactataaaaccgtacaataaatctcttaaaccccataatttaaaaagtgtatctacataaaaaaaatgaaggcatctacactaaagaaagactactgtaggataatcataaattaaattacttaatcaactaaattttagaaaaaaaaaggtaagttgtgtgagtttagtacttgcaattaataactattaagagcatgtctacaagaactcgagaattatattattatgtttgcttgaagcccgaaggacacggttcaattgattagatgttttagtaatttacaatggatatgtaaaaggttttagtattttaaggataaattctctttccaaataacattaattactattaacttgagataagagcatcctgatcccataataacattaattactgagtaccagatgtagatgcgacgcggtccctatgccacaataataataataataataaaaagaacaaagcattatattttcagcgtacagagtattaaccacttgcacggttgcacctgcatgcaga

SEQ ID NO: 87629 - DNA, 1014 bp, Citrus clementina
  Intron number 2 from transcript clementine0.9_024375m (loc us clementine0.9_024375m.g) derived from phytozome v7.0 (c hr-ID scaffold_19; pos 1304421 to 1305434)
ggctggttcttgtaagttccccattcattatttgtttattttatgttttccgtaccactggccataaaattggtatggtttttgtatgttttattaatttcttcacaagaacttgaatatgttgtcactctccaaagatgcagcattactctaagaaaatagtaaaagaaacttcacatggttatttggttacatgttttcttttggtgtctcatggaaaagtctagatacatgtttatgtttgcattatcactgtcagtttagcagattggaggcagaagttgggtgaccattattagttggttcttcttctttgtgatggaagatattggaaagctttatatgagtactgcttttcccattgctgtaactctaattcagcttctagtccgtgttagaattgtgcatttttttatttttatttttttgttgatactgcataattgtggccatttccctttggcaacaagtcaagttttatcgaaatttaggatctagttagatcatcagatcaatggcactggaatatgatagatttatgcagatttctgttacacaagctatatagaactcatttcaaggattgtattttcttggatgtctgtttatctttgctttcttacttttctctcttctcttttatgtatcttttcaagtatattttaggcattgtttagctttcttccttgtttgtttcctctagcttctctgctccaatcaacccacacaagtagaaactttagaaaaggggaaagcaacatagaaaagaaaagaccaaagggaatgacttgaacagttgaacttaaggttgtctcgaacaattaatgtatgaaagaagataaaggagaactgtactcttatcaaccgtgtcataatcaaagatgttgtcccagaaccaattttacattgctcaatttgaattgcagtcttgcccatgcttaatgaataaaaaatttgaaatttgaaatttgaaatccaggtttataattggattcttccttggtggcattccct

SEQ ID NO: 87630 - DNA, 708 bp, Citrus clementina
  Intron number 1 from transcript clementine0.9_002198m (loc us clementine0.9_002198m.g) derived from phytozome v7.0 (c hr-ID scaffold_32; pos 2577178 to 2577885 reverse strand)
gcagtaagcttcgatttgctgccgttattttcgaggttagctcagttagcttttcgtttttactcttatgccacatttagggttttgtgctgtttttacttgaaattatagttttaaatttattttctttttaaatggaaaaggtaatcgaattttgcaatttcttttagtgactgttcaagtctgggcaatttccagattcaggtttttcttttaatatggaaccgagcttattagcagagttctgttctggtgaccgagttctatttcttcttcctactttgttttctttttaaattacttaatttttctcccttaaagtgctttacgggttatctgcgggagcaattgtgtaatactttttttttggttcaactgtgcttggtgtttagctttagctgggttagctatataacatggtgtttgcccaagagggtagtatctggtgctagtgtgtttttgggtcaatcgtgcaactattattagtgttattcagcttgtttggttaattaagcggatacacttgaaaaatccgatctttttgctggtaattgttagttttgagttgatttttttagatctgcttattttgcatggcaaattggtttagggtttctgtttgtgcactcaaaaacctttttgaatttgtttcatattggcataacatgtcttcttttatcttttgtttcagatattattgattttttt

SEQ ID NO: 87631 - DNA, 816 bp, Citrus clementina
  Intron number 4 from transcript clementine0.9_015256m (loc us clementine0.9_015256m.g) derived from phytozome v7.0 (c hr-ID scaffold_94; pos 800199 to 801014 reverse strand)
cggatacagagcatcgagtatcttgcatcgaacaggtatgcttgtatgctggaatagatttagaaaaattgtaatcgtattgattccactgagaatataaagaaattatggtctacacttagaaaaaagaaaatgggtaataatagctacacttaattttcaattgacttgaatgtggctggaatcattggttaagaaatttgaaggacgagtacgtgtcaatctttttggattggttgcactgttgtatgtttctctaatatgcaatattttccttgcataagctaaactgccctggtaaaagggcaattgcttatgagggctatccctggaaattttacgttcatcgcattagttaggaactattaggtgatcaggccatatttttaataacgtaaatcgtagaatctgaagacataaaaatgaaactcacatggatcaaatgaacacatttaatatactgacattcacatttaaaagctctgccgtttgatcttggtgtacgtgagggagaacatgctttcaattcactgatgtggagtgtgatgataagtgataacccttttaatagggttaaagcaaatctggatccttaaattttgaacttcagttgtgaccatgacctcattattgcattttaattaaaaatggcagagtaacagtctttctactaaatattcaattttctaatatagataggtatctctctgattttgtcattcacggaaagcaaaattaacattgaacattgtcattttattttttaacttattgtgatacgttagagactacggacttgccaagagtatattgatc

SEQ ID NO: 87632 - DNA, 488 bp, Citrus clementina
  Intron number 2 from transcript clementine0.9_015256m (loc us clementine0.9_015256m.g) derived from phytozome v7.0 (c hr-ID scaffold_94; pos 801251 to 801738 reverse strand)
tgcagcagagcttgctgttctctgatagtctcaaggtactactgtttctctacttagtttttatgttggattgtatgtctataccagtttccctatatagagcatacagtatttgtttcatgctactaatagctattactaaaagttccacccaccttatcattgttggaatttgaagccaaatcacttttaagaaaaggaaaatgaaaaaaataattttgacaaattggggcatatgtcttcaaagccaattcttgtttaatcatgctacacttgtttatttgatttaaacggtggatagtgtgtcattttcaaaattttactcagttttcaacaagccttgtagtagatagccgtttatggaagtacaaaagcaccaatttgtgatagatttgagttgttttgggaatatttagtatggtcttttttaactcaagcaactttgcttttcaggatttgaaaaacctgcgaacgcagttgtactcagc

SEQ ID NO: 87633 - DNA, 730 bp, Citrus clementina
  Intron number 1 from transcript clementine0.9_015256m (loc us clementine0.9_015256m.g) derived from phytozome v7.0 (c hr-ID scaffold_94; pos 801809 to 802538 reverse strand)
ttttgcttctagtcccagcagcagagcgaagccaggttggttggttccttttattttttgttctaacccatttttttattcttttttctcagcttatcgaatatttttcagctttttgatgattttaaggattaggtttcatttcttgcctttactttgatgtcttattctgctgcaattggagggttgttgaagattgtgacaaaaatgggctttttttttttttttcttttcccgtttcctgtgccacttgcagttgtatcaaatattcaaatttcagttttttagtttggtatattaatcttctgttgttgttactttctgtttagtggttggcggcagaagcgtgacaaccgttcatgtactgtttggcttgttcatattgattcttcagattttaagtcttcttatgcttaattggaataagtgcttttggtatcttatagttgtaacttgttgttaaagtgtgtctctttctgtctttctctgtatatcttgcttcgtgcttgctgttatgttggcgcatcgttgttgattttttaagtatttttgttttataagtcataagcactaaactaggaagtcatataaagtcttagctcccacttatctgacatacttctgctctgataaactaatgttgttggttacttttagttcaatagcatttggctgaagatcattcttagttcttgcagaatacggcttgctgagtgcaattttttcctcc

SEQ ID NO: 87634 - DNA, 987 bp, Citrus clementina
  Intron number 1 from transcript clementine0.9_001186m (loc us clementine0.9_001186m.g) derived from phytozome v7.0 (c hr-ID scaffold_32; pos 1775273 to 1776259 reverse strand)
aggattgtgtcgctgtcgttcccgggaagcctcaggtatggatactgcaggaaagtggaaacactacagtagtaagaacgtgaatgttcagcgtgcgtgaattcactgttaaaaatgttatgaagatctggatcttaaggggctgaacagtcttgtgagaattttgagagtcttgcatttttgacttggatgagagaatttagtcatcactagttacttccgctgattggattagtttcataagttccaatcagaggcaatggctgcgcttgttgtttgttatgatgcaattcaggaaattccttgccatggcctttgtttgcttttatcgaaaaacgttagaataatcagactggtccatttactctcttctgcaaagcctgtccctaagctcattggtgtaaattacgagtatccagcttttccccatagtggtcctcagctaattaagtttcaggagataaggaaaaaaaattaattaaattgaacagtgccgtaagtcttcttgctatttcttttgtagcctgttcactgcgtctgctacatttcatattggcaatcggtatattattagtctgaattacatatgcatttttgttgtttactataagatcaagctaaagcttctgcaactttctggaatcacccagcttgtccccgtctctattctcatattttgaagtatttctatgtaaatatgattaatatctatggtactttgtgtatgaaagggccaaacatggtacaccattttagcacttaagctgtctcataaatattccttccgtttcatactgagtaacagaatttccacttgtgaattaagtttaacaggtttctagagtttcagtagttataagatatgaattgcagtgcttgcaattttgtgaatgtttgtgtctatatgtgcttgcgtgtgtgttttctgatgctggtttttactatgctgcaggtacaaattgggacacactcctttacttttgatca

SEQ ID NO: 87635 - DNA, 649 bp, Citrus clementina; identical to SEQ ID NO: 87454
  Intron number 1 from transcript clementine0.9_022652m (loc us clementine0.9_020834m.g) derived from phytozome v7.0 (c hr-ID scaffold_6; pos 3455702 to 3456350 reverse strand)

SEQ ID NO: 87636 - DNA, 495 bp, Citrus clementina
  Intron number 1 from transcript clementine0.9_026950m (loc us clementine0.9_026974m.g) derived from phytozome v7.0 (c hr-ID scaffold_32; pos 2484019 to 2484513 reverse strand)
tcaaggagtgtgggactattttatttttgggggaggttttctagcttgctttcctttttcctttcttagtttatttttactacatctacttaaatgaatccttaaaattcagtttataattatgtcttccatttttaccaaatctgtgcagcggtcagtgatggcaaaatgttataaagttttcaggctagctatccgcattacatacaaggttttgatgacttataggacattacttatgagtattctttatttctagctgcttgattatttaagtttcattacaatgtcctgccacttttgcaaatttatgttgcagtgatttggagaatttctacgttcttgcggaatagtgggactattctactctgtggtatttgatatgttttcatttccctaatttattgtttgtatcaggttgtgtctaaatatataaggtttgtgatttggttttcatttttgcatgtttgagtgatagcaacatgttccgagttt

SEQ ID NO: 87637 - DNA, 833 bp, Citrus clementina
  Intron number 1 from transcript clementine0.9_000034m (loc us clementine0.9_000034m.g) derived from phytozome v7.0 (c hr-ID scaffold_26; pos 1767011 to 1767843 reverse strand)
gcaaccctaaggtatatgatcttttccgtttgttttcctagaaaattactgaaaatgttgaattttggtccttgttagtagcggtgctgccaccggaggtttgtagaggttctcttaaaagtcagtatagttgatcacggaagaagagtgaaattagttgatttggttttgtctaagttccagtttcgtagttgaaaactgctgcactaatggtaaccctaaggtgcatgatattttctgtttgtttttggagaaaattgcggaaaatgtagaagtttggttgttttggtggtactggccctggaggctagtaggtgtatcttaaagtcagttcagttgatgtgaaaaaggagaagtcaaattagttgatttatttcttcccagttttagccaggtagttgaaaattacatacttgtaggagaattttgccatacgttttaatataaccatttaggagaaggagagagaaagaaaatgtaaaattagtttatccttttcagttttttttttcctgagaaaattccggaaatgaaagaagatgttgaattaggcttcaattttcatgtctttgtactgaaattaacttctggttagtgatactgaagctagtacttgaaaaccatttcagttaacaattgcttagaaaatgaaaagaaaaagcagtaaaatttgttgattttgctatcgttggcagattcttttgttgtcttaaactttatattttgatagtaaacaacaacattttaagcagtatatcacactctgcttatagtttgttattttctatcgttttataggagggtgcttcattagctttaaggaaacatataga

SEQ ID NO: 87638 - DNA, 610 bp, Citrus clementina
  Intron number 1 from transcript clementine0.9_005276m (loc us clementine0.9_005276m.g) derived from phytozome v7.0 (c hr-ID scaffold_32; pos 408967 to 409576 reverse strand)
cagcttgctctcttccagtcaagcagcagcttcaggtttctcttcttttcattttcctgatgcatgcatgccttcttttcttgatgatcaatctgtgcaaacagagatctgcaaataaagtttgtttcttcttttgtcttttttttttttttaatatttcatttttggtgtttctttataactgttataaaagtttcttgatattgctggctagctaagctctgtttgttttagtttttcatgcagctaattattattcacaagtatgcatcccttcgcagcttgagctctcatttcattccaacagaggccgtagtcttggtttctggaagaaaattgttaaaagaaaatgaattacacttctggagattaatttggagagaaattaagtaattttaactgattttgccatctttgcatggatggattgatgtgatcatgttttttgaaaatatgtcttgtgctttaagactcagaattttgaggaacctttattagctagtttccattaccatttttatcaataatgcgacactctccttaacatattcatttcatttaatttaatttgtcaggcgcaggagcaaagaataatttatacaaatacaga

SEQ ID NO: 87639 - DNA, 463 bp, Citrus clementina
  Intron number 3 from transcript clementine0.9_029749m (loc us clementine0.9_029749m.g) derived from phytozome v7.0 (c hr-ID scaffold_19; pos 3216567 to 3217029 reverse strand)
aggagagcatcaatccagagcaacgcggtacattccaaatcttcattcgatgtagttggcaatgctctttgcattatccctagatcctctacgaaataaagtagagctctttgattgagaattttagcatcaaagttcaaaataagaccctaatgagtaatgatacaaccacaaactcttgtacaaatttattttgtacaaactgatgtggcatgataagattggttgaattaaacatcacttggcccacatgatttgtttttattaatttatattttcattcaaccaatgaattaatgccacgtcagtttgtacaaaataaatttgtacaagagtttgtggctgtatcattactcggaccctaataggccattaaattttgaggttttaacgaaagtttctaattcttttcgctttttcttatgatgtagttgaaaatatactggcaacactagattccttg

SEQ ID NO: 87640 - DNA, 505 bp, Citrus clementina
  Intron number 1 from transcript clementine0.9_019055m (loc us clementine0.9_013611m.g) derived from phytozome v7.0 (c hr-ID scaffold_9; pos 4293660 to 4294164)
tcgttttgcgcgaagttcgcggctgttccgctgaggtctagcttaccgcttaccaatctctctcgtatttattcatatattcttaaattttaatccaatttattaaaatttcattttcgtttccactagatctgaattaactgtttgtttgtttgtttgcgtgtgttgatagttaatatcatttttaatattgcatgtagaaaatagaaattattttatatgttaaacgtaaaatatacataaatttaaaaaataatttttatcctattgaatatgaaaaaatttgtgaagaagatgagtataatgccaaatgtaacagttaccaattacactgcagtcatgtacataattagattgaacgttgattggattgaagaaagtctctaagtctgaggtagccaataatttgttttattgatccggttgatcacctctgattgttatgcttgattctttttagttttattcattttaaacattttgatttgactacagatatatctct

SEQ ID NO: 87641 - DNA, 480 bp, Citrus clementina
  Intron number 2 from transcript clementine0.9_035750m (loc us clementine0.9_035750m.g) derived from phytozome v7.0 (c hr-ID scaffold_6; pos 4599705 to 4600184)
tcgatcaatacctactcctactgagtcaagctggggtattgtttcgtctcatagttttaatcagatttgttagttttgattattgatttttatgctttattttattgatggatttagaagaatatttgcccgttgcgtgacatgctacactgttgagtgtttgatattcttactcataaagctatttgttatttgaatttctgataaacggaaggtctaaagggcatgtttgcgattgagatattgtgacttttaattcataaatgttctgagtggagtggaattgctggtgggtgtttaccaaaaacttcagttgtgttctcaatgagtagaagtttgcaacttgttaaatattggagctctttctgagagatggagtcagcaaaatagttagttgatcagataatgagatttcatttatgtgatctcattttctatttaagtaatggctttgtttctgtaggtacagggagattcggt

SEQ ID NO: 87642 - DNA, 435 bp, Citrus clementina
  Intron number 1 from transcript clementine0.9_010051m (loc us clementine0.9_010051m.g) derived from phytozome v7.0 (c hr-ID scaffold_19; pos 3067312 to 3067746)
tacgagaatcccttcatttgcgaagccattctcaggtaataaacatttattattttctaatttcattttttttttgtttttgtcaatttaattactaactaaagtaattgtttgttaaattgctactagattattcgttgaggcaacagcttgctgaactcaaacttgcaaaaagaaaaaaagagaaatgaaaattatgttttcatcaataacttgaaacagattcttttataggggaatgcaaaaactttgtgtatttcgtttgcaaattttcatcgtatttttggatgagcatacttgtaatcaaaacgtcagattgtttgtattttaagtgccgattttttctttcgagagttatgatacagtgatgttttcggtgttttttttcttttcttttttgggttctcaggtcactgccaccactagcaaagaagt

SEQ ID NO: 87643 - DNA, 428 bp, Citrus clementina
  Intron number 1 from transcript clementine0.9_030291m (loc us clementine0.9_030291m.g) derived from phytozome v7.0 (c hr-ID scaffold_9; pos 240863 to 241290)
aatccaaggtgatttcagtaacatgaacgaggaaagaaagaaagaaagaaacactttgattttaccttaagcaaccaattaaattaagtacttcatttgatgacagtgtgtttgagctagtagttaatgctaaatgtaattcacatgctcactaatgatatgtttgcttcaagagccgatttaaattacatgttgaggaagaataaattacaggataatgttgatgttcagatttcttgtagccccaattctacacaatttaatttttttaaaattcatgttaggttccaaattgcgatgtatatataatttttttcgtttttttaataatttttagagaagttggtttgtgattttcagtattttgtttgcttattatttttggttctatttgctgtatgtttttagtattggttttgaaattgcag

SEQ ID NO: 87644 - DNA, 720 bp, Citrus clementina
  Intron number 1 from transcript clementine0.9_000002m (loc us clementine0.9_000002m.g) derived from phytozome v7.0 (c hr-ID scaffold_80; pos 1034024 to 1034743)
tcacgtgatcgcctccgcctcgcgatctcttgctggttagtagtttacttcagcgtttcattaattatctctgttttcttgtccttttttttttttttggtttatagctgccgttttagttgaaatatgaataaacaagtgtatgtattagttcgctgttgctcattgattgattgttaatcaatcaattatggattctgtgtcgtttactttagtgtagtttaactttcggttttggtttttttagtgtggcttcaaatgcgaaagtgaaataagtagttcactgttatggatgattaattaaatataattattggcttttctctcgtaattttgttaaggtttggcttttttttctttttcttttttttttttatgttctaaggggacagaaagataaggtgaacaaaaatgctttcctctgcaatgagcatcaaatttgcttgacgggacgaacttaagttttattttccctgttataattccttattacgattaattctcgttctcttaaaaaaataatgctaacaaacggtactagattagtattagtaatttttatgtttattcatttgttgaattagcaacaacttgtttgccttttttttattaacaccaagatatgtagtttgaatttcctatgtatctatgtgctaattattgtgctttgttgcgattgcatgaatagtggagcaagcggggcctgtaattgttgcagtc

SEQ ID NO: 87645 - DNA, 910 bp, Citrus clementina
  Intron number 1 from transcript clementine0.9_022581m (loc us clementine0.9_022581m.g) derived from phytozome v7.0 (c hr-ID scaffold_62; pos 143152 to 144061)
tttcgccgtcaacgagggacttaagctccttcctggtttgcatgcaaccttttattttatgatactattactactcgctatttgttttcatatttttttaaaaaatatttatttgcttttgttttctttctatatgctagatgattaattgatgtctgaaaatagtttaaggataagtgatttcttttttgatattgttacgacttacgaggatgtttcgtccgtactataaggatgaatgtgaccaagttgttcacttgggatttttcaatctcacaaactgcggtatgtgatctcattatgaattggtttacatcgtaattggttggttcataatgctggatatctagcaatagttagttattcaggttgtttctaggaaagacaagacgaacctcttggctttggcataggtcttgtcacttccatttgtaaggggactttgtgcctgcctttcaccagagaagtgaaatatgcatgatagagggattagttgctactatttcagttacatttcttcgttagcaaaatatttcatgcagttctggctgttgtttttagatgattctatgttagtttgccattgcaatgcccccaaacgggccccagtgccactcgataagtctttagagatcttttggacttggattggtggggttctcatcataccctgcaccagaacgccaatggcatcagagtttataagttctgtaaattagtttgtgttttcacttgtagcaaatgctgtcttaattacttgtaacttcaaaatgccttgcgtatggcgcacacgctctctgactctctgtaaagatagaaagtgttggcatgatgtgacttgttagtttcccttctaaatggataattattttcaggtggatccgcagttgccaacattgtatatcgatcc

SEQ ID NO: 87646 - DNA, 128 bp, Citrus clementina
  Intron number 1 from transcript clementine0.9_003748m (loc us clementine0.9_003748m.g) derived from phytozome v7.0 (c hr-ID scaffold_2; pos 199402 to 199529 reverse strand)
tttggatttggagaaaaaaggctcaacacttccgggtattttcttttctacgtttctctttagactctataattaatttcttttgataatgtgtttgattatttgtgattggcattacagaggttgaa

SEQ ID NO: 87647 - DNA, 1024 bp, Citrus clementina
  Intron number 1 from transcript clementine0.9_033446m (loc us clementine0.9_033446m.g) derived from phytozome v7.0 (c hr-ID scaffold_6; pos 2166914 to 2167937 reverse strand)
atattggaatttcaggtctgtttatctacttaaattgtatttctatatctctttgttcctcagctcgaaatttattgattggttaaattctccaatttcttcttgtcgcttcattctatcaagcccatcactgatcttggattaacgtatacatagctagtggagttttttagaaaatcaagcaaacttttgaaaatctttatcctaggtgccaagtaaaagtgcatgttaattatcaaatacttcagctgtctagtgagttacaattaatatttactaaacactttagttcgcttgcttataaaattagaccgaattataacagttagaaacatatttgagtttaacatacatgttcaaaatatacagtaaactgatctatatatagtgcgtaagtccatcttgtgaaatgcaggtttcaggtaggcaaaataataaaacgttacaaacttccaagcactgtaaagacaaaaatattgtattagagttcatatatatatatatatttttaacaatcattttgtagataactagtggcaattaacttgcagaaattaatacgcatctctttgcttgagaattattaattacaatctttcaaggtatgttattaattataccataggagtcaataaatcctttggtctcacatggcgtgctttggcatgataactgatagtgacggatttgacgaaaaatgctatgattaataatagattgccaattaatttgtgtggacagatttcaatgtaacttaagaagtgttgaactacgatgtgaaactttgtaatttcaaagcacccaaaagtttgaatttttctcacgtgagtcattgtttttcgtaattaataatgaataaaccaaacgtttcgaaaatattatagtttaatcctttctaataacattttgcagtctttgagtcttgacgaagcctttctgtatggttagtaagagccgatttaaattctcaaacgaaacttaaaaatttaattgtgtatatttatgctaaggtggagtgacatca

SEQ ID NO: 87648 - DNA, 632 bp, Citrus clementina
  Intron number 1 from transcript clementine0.9_006182m (loc us clementine0.9_006182m.g) derived from phytozome v7.0 (c hr-ID scaffold_34; pos 2357934 to 2358565 reverse strand)
gcgccataatcattgcttcccttatctacgtcctggttagttagtttctacttctgcttttagcttacctcacctcactacttaattatttatgagggtatgtttgtcattgttgctgtgcttctttatttcacaatcatgctcccacagccacagcattaatccaaacgtatgcatagactgattggcatagttatgattcttttttttctttttttttaagaaatgcatcaatggaaattaataaatctcttccccccttgtactagcacaagaggttttacaaattgaactaaatagaactcactctataattgatatatacacataagtatcatgatggtattgatctcaaccccaaaccttttgtacccgttagagattttaccgactgagccaacttctctcacaacgtatctataatgtcttattattgtcccaaggccgaggtttgaattgaggttaaacggggaaaaaaaaaagagatttgcattttctagcagtttgcttcaatgatattgcattagttgctctcatttttgcgtgctgtgtgatattttaaccttgttcacttgaatttgtatgaaccattggcagggactgggcttgttgactttgtcagctgtgttgct

SEQ ID NO: 87649 - DNA, 640 bp, Citrus clementina
  Intron number 2 from transcript clementine0.9_017312m (loc us clementine0.9_017312m.g) derived from phytozome v7.0 (c hr-ID scaffold_19; pos 3430808 to 3431447)
actcttttccaggtttgtaagactatcattttctaatttctttccattcagagcctttgctttgcaactattgtttattattgcctagtttgcttcttattagttacatagttattagcaatttgtttgtcaatcatcaatcattgaaatgctgaaacagaagatgactaataatgaacttattaaataaaggagagcatttgagtctcttcaaaattaattgaaaatgactttagtacctgaaacagaagcaatagtaggattaatggtaatataaatatgtcaagaaggtgataagcaagaagatttaagtgaattccctctcatttcttggcgcgtaagtgtagacaagaacttcaatttactgtaaaggtgtataaaacaaatttgcgaggtaatatggcaaatcactcttttaatgtgtttattgttgttgttcaacatgaagtacttgttggtgtgatggaattctgatctgaatgcaaatactaattttggactgttaaaataattggcatccactagtaaaataattgtttttaatatgatctttcagctttatgtttatgtttatgaactgaacacattgttttcaaacattgcagccacgcactgtccgcctggatcaccatacattgaa

SEQ ID NO: 87650 - DNA, 780 bp, Citrus clementina
  Intron number 3 from transcript clementine0.9_018627m (loc us clementine0.9_018627m.g) derived from phytozome v7.0 (c hr-ID scaffold_6; pos 2227899 to 2228678)
cacggtaaaattgtaattaattaattttaaaacgtcgatctctttaggccaatgtaaaaaagagtagtatatactacactttctaagaggtaccttaacgttcgtaattcgagtaaagtgatagtacatagaatgaagtaataagtaaattagcaagttatgaaattgactatctataatagatgagtcctatgtatattataatattaacccttgctctgggtatattaagaaattatttgaaaaattgagtgttattataaaagaagaagaaaagagaaaacgcttgagtatgaggtcattttcttactatttattgttaaagatacaaataacaaaatatcctcgagtcattttcgagtccaacactgatttggaatattattgagtcttatgttaagtaatcttattttttaaatacaaattgagcataacctatacccattttttaaaattttataaaattaacgggggaaacagcgtattagcatcatgccaaaaacgccctgctagcaaactcaaacttttacgaaattgtttcaactagacacgaccaaaaaggcaaaagaaactaaaggtgtttgtttgaatacgcatgcatgctgaagcaattatatttggtcacggcattgttagtcctctaattaatttgacttaaatgtcaaattactgattacttaattatacaagcacattttttaatttaacatatataaatattttattttttgctttatgcgcatagggttgcttgtgattactccggaaggaacatagcct

SEQ ID NO: 87651 - DNA, 1034 bp, Citrus clementina
  Intron number 1 from transcript clementine0.9_033666m (loc us clementine0.9_033666m.g) derived from phytozome v7.0 (c hr-ID scaffold_6; pos 1333610 to 1334643)
ccgggcatccctctagtggcacgtgaaacttcctcgtatgttctccacaaaacgattcgttttgtgttacttttgttatgctctagtcatttcaatgatatttgaattaggagttgtttgaatttttcgtacttgctgataagtaatgcgattgttgtttttgctatcagactattcaatgttatattattatgtatttttgtctattaagagattctagaggttttgtaatagttgcttgcatcttgaggatgcagatgaggatttttattttattttattttgaatagtggatactaatttgagcaattcataggactatcggttcgttggttggaggacgacagtgatggttttgctgcttgattaatattgaggttttctgcggaattatttgaggctcatttggtactgttttcgaggaatgctgaaagctgtcttggttaatgaaaatgagaaactggatctcaaattaatttttctgaattgaaattttgaaaacacgtttaggacttgtattcgaacaagtttttggagaataaagcaagatttatagtttatttgattttatattatttttctaattcttgtttttcattagcataaactcttgagtcactttgagtttaacattctgttttcaaattatttttgtatttttcaagaactgtggtgaatcctttttctgtctgttttgaatttcaaaattaaatttttgaaagtggtaaagagcgcacccatatcttttgtattttcttttatgtgattgtgtgttattaaagctgaatttcaagaaactgattacttgtgtagtactttccatctgtgatgttttgggatgtgtgtatatctctagagaaatatgggaagctttcattaagcatgatgaaggcttcgagcctatgtgaagactgtgaattttccctgctaattatgtataaaattccagtggatctttatgatgggaggttatattagatgagatcaggattatgatttttttctgttgtagatactccagaagcacagatcag

SEQ ID NO: 87652 - DNA, 878 bp, Citrus clementina
  Intron number 2 from transcript clementine0.9_026759m (loc us clementine0.9_026759m.g) derived from phytozome v7.0 (c hr-ID scaffold_2; pos 3119950 to 3120827 reverse strand)
caaagataaaggagttccaggcttaccttgacttggtagagtttaaaccaggcttttccttatctttgtctgtctttatttaactttgtcacttttgggcttgatttgttgtttatagctgctgctgcattttttttcagttcttgttactattgttttaatccttaaaagagtattgaggcgatattgtagttagcaatgttaatacctaaataaccttagaagaacttgaagttttggtttagactggactaaaatggcagaaggtctccataagctggccctctgaattaggattaaggattttctctggttgactttagttcttgtgagcactgtgaccttggatctttaatgtgcaagtgctaacaaataacatgacgttcacccattaattcagcttcactgaaatttgatttgagtagaaattcagtgttttcaaacttaggaactcgatgaaattagatgatactgttttgactttcctgctattctgtggtacactctaaatcaaattcactaagtttcatctctgtcttatcggctgatgaaaccattgagactttcctcttttgttcatatctgatttttaggtctctaaaccctgtaaatctctcataaccatcccggagtgatagatttctctaaaggttgacgaaaaaattaatctgctattatactgttttgagatccgtactgattcataagaggaattatcctagttttgggttgatatcttctattgtttgctgtgtgcagcatcagtagtaggaagcattactatttaaattttatgcttcattggtttgaactctagagcttgtatttcgtgtcctctctcaggtgcagaagatcgcaaaaccgggttgttcacaaga

SEQ ID NO: 87653 - DNA, 637 bp, Citrus clementina
  Intron number 1 from transcript clementine0.9_026759m (loc us clementine0.9_026759m.g) derived from phytozome v7.0 (c hr-ID scaffold_2; pos 3120945 to 3121581 reverse strand)
ctgcaacggtaagcatgcactttctacagttagatttttcttaaacttttaatttgatttgaattctgaaaatggatgcaaagaaatttcagttggaattatatgttcttttaaattttatccttgttatgagaacaatttcttggtacaaattatgaggtcgcccagctggtatttctgatatgcttaagtcgtaaagattagttgttattttactgtaatttttcactcgagctataaggttttgaggggcaaaaaaggggaaggaatagctcccctctgaagtattattattggttttgattatatggtcaaaacttgaatatagtggattaatgggtatccagaaaggtgttaacgtgagttagtattggccctcagtacaatctgttatgaagtatttaagtggacaattaaattgaaaatttccaattcccaggttatgttgggttgttgacttgttgtatgtatctgctccctgtttgaaaaccaatgtcggtctgttgttatgaagtggtaactataatactgaagcataatgttgtggatgatgcacgcaatatgtttgtttccttccagcttatgatggtatcctttgttttctcttatttgtgtgtatgacagagaagtgacttgg

SEQ ID NO: 87654 - DNA, 500 bp, Citrus clementina
  Intron number 1 from transcript clementine0.9_007476m (loc us clementine0.9_007476m.g) derived from phytozome v7.0 (c hr-ID scaffold_9; pos 1770468 to 1770967 reverse strand)
agaggtttttgggagctcctggtgtcaaattctaggtgctccactctttttcaatcctcaatttatattgtaatgtttatatgatatgttcatttcaactgatttgcatgttcagtaatccgtttgggtatgtatttatttggtccattgtttcgttaattattcttgataggttcaactgttcatcttgtgtcatttaattattcatggatcaagtggattattgaaatgtctctttaaattatcttacttttgaatataacgtacaaaataattgagccatgagaacgaacgatatttgacttttccaaagttggttttttttttcttgcgtgtttgaaaggttagaaattgtgctgtatttgtacgtaagcgttgtcactgtctggtcctgtatccgtcattaaagaagatgaatgagcatcaaatttgtttttttatataaatttacttatcactttatttatttattgtgatgagcagggtgggttcgatactaa

SEQ ID NO: 87655 - DNA, 321 bp, Citrus clementina
  Intron number 1 from transcript clementine0.9_012345m (loc us clementine0.9_008405m.g) derived from phytozome v7.0 (c hr-ID scaffold_9; pos 1299992 to 1300312 reverse strand)
tttacaaaggagttccaaaggtctctttccctcaagagtaattctaggtttacataatcctctacaaactctactcatataacatgttgtggcaatttttcaaagaaataaaagcaaataaatagtggggaacatatgatagtgatataataatgtcacatccgttcgtatgggtagagttgtataggagcttgtattcctattctcactattgcatcaaagatcaaccatctgaatatgtgataaagttctttattactactactactattatttttttcatggtttcttctttcatgtggcaggattacacgggggaag

SEQ ID NO: 87656 - DNA, 554 bp, Citrus clementina
  Intron number 1 from transcript clementine0.9_034962m (loc us clementine0.9_034962m.g) derived from phytozome v7.0 (c hr-ID scaffold_19; pos 1625222 to 1625775 reverse strand)
gggcaacagcaacagcaacagcaacagccctttaggtatatctatttggaaaactttgtttggctttttggctttttggtacatcacgtagacccatctctaaaatctgtccctcaatcattttttttatcacttcttctaacctttattttggtttattttatctatttgggtcgatgacggggttttttgaatcatacctattcttttaactgtttaggctcgtgcaccactgtgtccctttctcagttacgaaaatacttggaaaagtcctcttgtgttttgcgggttcttgtcattttcagttcatgggtattggtttggttaagtcgttgttttttattggatctttatttatttaattctttttaattgtgtgtctgtggaattggcttgatgggcgttgatttcattagcattttgttggatctttttggttgaatctactatgtttgatatacgcttcggcaagttgttcttagtgagctcgttttaagttaacagtttaataattgtgtctgtttactgtgatttaatcgaaatgttgttaggta

SEQ ID NO: 87657 - DNA, 555 bp, Citrus clementina
  Intron number 2 from transcript clementine0.9_013480m (loc us clementine0.9_013480m.g) derived from phytozome v7.0 (c hr-ID scaffold_22; pos 1824604 to 1825158 reverse strand)
tcagtgagcaacagcttgtggactgtgatcacgaggtttgttcaattggttgttatctttttaacgttagttaaatgatgaaaattacagattttgactgattttgtttgatagctaggatgagttgtataatttctaatcacaaacagttagttatgatggtaaatctcaaagttagattgggttctcactctcagaatttatgataaagaatttatatgtcagtttccttttttcttttaatttctaatgttggttcttcattatgttaatctcttttttttgttggtttgatattgttggatcccataatttgaagttttgtggtgatatataatatcatataactatccacaatatgttgggcttgtgctttttgtattctcgatattgactgtttgcattccttttggatgtttgagttgcttggacggctccttctcaagtctgaactcacatctcacatgatcaaagtgtatgatttgacaaatataattatgtttattaatgcaaggtttgtttcatttttcagtgtgatccagaggaatctggttc

SEQ ID NO: 87658 - DNA, 410 bp, Citrus clementina; identical to SEQ ID NO: 79728
  Intron number 1 from transcript clementine0.9_003804m (loc us clementine0.9_003804m.g) derived from phytozome v7.0 (c hr-ID scaffold_86; pos 975104 to 975513 reverse strand)

SEQ ID NO: 87659 - DNA, 448 bp, Citrus clementina
  Intron number 1 from transcript clementine0.9_019587m (loc us clementine0.9_019587m.g) derived from phytozome v7.0 (c hr-ID scaffold_34; pos 1804123 to 1804570 reverse strand)
gtaggactttggcttacttgctgcctcttgttcaggtattttcatattttttgttggttcttaattttcaaaataagtctcatagggtatgcttgaggtgctgcgactttttgtattaactaacttttgattttagttgatataattatgggtgttaagttatgagatcctgccaaaactgtaatgttctgcggctgcctgctggctacccacatctttattttctgtaattcttaatgattgatttctcttcaaatttcatcgtaaatcaatacattaatttttctttaaatattttcttctgtttattgaagctataaaatgattttcatttgtcattggtcctgatcttgattggaatataggattggttattttgacgacttgttaataggtgtattctcaattagatgaagaacatcatttacagttggttggtattacgcag

SEQ ID NO: 87660 - DNA, 823 bp, Citrus clementina
  Intron number 1 from transcript clementine0.9_016422m (loc us clementine0.9_016422m.g) derived from phytozome v7.0 (c hr-ID scaffold_80; pos 679496 to 680318 reverse strand)
caagaagagaaaaaactctcagctttctgaaaccggtatgttcttttgcttagatttttctttattaagttctttgttttcttttgattataactctcgaaagtgttgatttttttttctttttttgaagctgattgaaagctatctgggtttgttttgtttcgactttttgaatataaaaatctgttcttttttgggttttagcttgctagcattcatggtatctacattatccagcttgctattttttctttttgagaaaaggaaaaaaaaagttcctttggtgcatttggatatggggctgaaaagcttagtatagacctcacaagtcaaagcaagtagctggaatgaaaggaattagaacaatttgattgggcaaaattatagcgaccaatgatgagaatgtcctagttgtgaaattgatttgatatgtatggtcattgaatatgttgaatgttagtgatcacggccagtgtcttttgatgaagaatttgtttatgcagtaaattcactaatggttgaataacaccaaaaaatcttgtcacattcactaagggattcactaatcgttgaatagcaccaatgatttatgttaatattagctagatgccattaatttttatttatttatttatttttataaatatcttcatttttcatttttactcatgaaggaatgtactcaaatggaccagagtcatacaagtatgcactatgataatttgcaataagagccatatatgttggtttattgccaaatgacagtgctttttcctttttcttttcttattttctttatttatttatttttggtcgttttcag

SEQ ID NO: 87661 - DNA, 782 bp, Citrus clementina
  Intron number 2 from transcript clementine0.9_029510m (loc us clementine0.9_029510m.g) derived from phytozome v7.0 (c hr-ID scaffold_19; pos 2445813 to 2446594)
ttctcgcaattgcagccagagattatatccatttggtcagtaaattctacttttcgcttctagctgactctttcagattcgttccaatcgcattcatatgcttaattagttgcctcttgagtaaaaaagaaaaaaaaaaatcaagtagcagataaatttctaatgggatatattaaggctcatttgatttattacaactatataatccgagttattagataaagacactttgaatgcttgctttcttccaatattttgtttgaaaggttaaaaaaaaaaaaagactctgtaaagttgctcataaaagcaaagcagactccattaatagttcctctgattcttggtaaataatagagacattcaacttctcactggctattctctcatttctctgaactagcttagtcctattttctgatattgacgatgcttccaaagaagaaagattttagagaaaaattgttgtctcattttccactaaacaaccaaacttaacaagctgttttcaacaggacaaaaacagataaatacatatttccatgtgcccaatttgtctgctaatgataaattttgtcgtaagctgatcctgactatcaatatatttatttaattttagttatccaaagacgtaattaaatcatttcatcgtaaatgccaagaccatttttgcttttgttattattgtttgaaattgatgtaacatcctatcttcataaccttagagaaatattcaaaatattgttgcaggctgggggtccttattaccaagttaagaaggggag

SEQ ID NO: 87662 - DNA, 463 bp, Citrus clementina
  Intron number 1 from transcript clementine0.9_014860m (loc us clementine0.9_014890m.g) derived from phytozome v7.0 (c hr-ID scaffold_22; pos 338229 to 338691)
ctttttttcctcccttgatttcacctatttctttggtaagtttgctctattttttcccttaattttccctttttttaatgtaatttttattttttaaacagtaaattcccacaattccttttttttttaataattaaatttgtttttatcttgatctttgcttaatttttgtcaaaatctatagttgaagttgcagtaattagggtttggtttttttttttttttttaagtttaagctaactggattagctcacttcattcaaaactctcttctttaattgaaagatctaattttcacccccccccccccccagtcactactgtgaagtaaagttagtttcttgtttttaattttgttaattagatttacaaatttttaaatatttaaaatttttcaaagtttggtaatgcatggaattttggtacagtgagagaagttcaatcaaagtagctgaagtctcga

SEQ ID NO: 87663 - DNA, 398 bp, Citrus clementina
  Intron number 1 from transcript clementine0.9_028383m (loc us clementine0.9_028383m.g) derived from phytozome v7.0 (c hr-ID scaffold_54; pos 523140 to 523537)
gttttctcgttcaagaagagaatcagccgtctacagtaagttaaattcttcatctctgtttgctttctttaattttttcttagtagcagcgtagctaaacataattaatccttcgtgttagtctcattttgttaaggttgtttttattttctcatttttatatttttaatcaatattttaatattcctattggtttctgtgtaaactgcataatcgatgaaacaaatacttttggttttattcagctaatttgactattctcttacattactgcttaatttttttgaaatttcgccgttatcaaacgtgcaaatgcctgattttcaaccgagttaattcttaattattctcatttttttactgtgaactttttaatcttcagtttgtgaggttcgaag

SEQ ID NO: 87664 - DNA, 578 bp, Citrus clementina
  Intron number 1 from transcript clementine0.9_010123m (loc us clementine0.9_010123m.g) derived from phytozome v7.0 (c hr-ID scaffold_34; pos 1543164 to 1543741)
ttcttcttcttcatcagctggtgcaataataactcgtaattttttttttaaatcaaattaacatcatttatcttcttcattttttaattaaaaattcaccattaaattcattcttctgactacaaatttattaaagtataatcaacaaacaacaaattttctcaaaaatttttaaaaattctggattgtctccatgcttgttattcttcgtcatctaattttcttgatgaactattcctcaaaatatctttttttaaaatatcttctttttttttcttggccctttcaaatacgactaaaaattaacatatgctatctaatattgcatgtatttcatttaagtcatcctcctcatattttcatttttctttttcgttaaaaactttgagttatttgtaatatttataggataattatgaatagtgaataattaattctttattactcttttttttttttaattattgttgcttggcttcaaagcaataataatttcatacaacttcatctaaagaactcttctcatcatgttaaatgtaacagaagagccaacgagcagtattgcagcgccggcaacg

SEQ ID NO: 87665 - DNA, 531 bp, Citrus clementina
  Intron number 2 from transcript clementine0.9_012698m (loc us clementine0.9_009926m.g) derived from phytozome v7.0 (c hr-ID scaffold_22; pos 1938649 to 1939179 reverse strand)
caagttactacaggttttcacttacattaaggtatgtcataacttcaaggggcaatctgctcagtggtccaataaactaatcttttacttgtcttgtgcatttccatgttttagcttgacatgatgcttgatattgtcattaatcctaaatctccttttttcttctttcctctggtgtagctttcactgatgtcttgtgcattagatatgggaaaaactgaagtatctgtcccttacatctgttaataaacaaacccttttagttgttacctgtctctgtaagtttctgtttcgatttttcatagcctttaatcttctagttcaggaactatggtttcaaaagactcacctccaaatccagcttcaaatatgctacaccaattcatcatctcagactccattacagctcagaatcttgcaaaccaacattttgatacttatggttctgcattaagaggcaataacatacttcctcattcttttggtgtgttgccaagcattcagtctcttggggaaagaatatccagatca

SEQ ID NO: 87666 - DNA, 498 bp, Citrus clementina
  Intron number 1 from transcript clementine0.9_023730m (loc us clementine0.9_023730m.g) derived from phytozome v7.0 (c hr-ID scaffold_32; pos 2008867 to 2009364 reverse strand)
cagtggcagccttaactgcccgaggtaagcgctgaccgatgaatcactctttgaactttcaagtaaccgaaacttggcctgcccgtcttttcttcatctctttttaactgtttctactctattctagtgtgcatagttttgtttctgttcatatccttcggcgccattcaagttttctgcttccttgaattgaataatgaatgccaatttgattacctcaaatctctatactgtcatcttattttgccatccgcgtaaatgcatactccgcactacaagttcagcgaaccattcaacatctcaaattagcttctacggtcaaattcttttaaaagaatgccgaataaatttaacattaactttcaatatttcaataattctgggatgccatttgagtgaaagattttgactttgaaaaaatgatgttatatgggtatcaaactatttttttctcattaattttatattttgttgatgcagattcttcagaaccattga

SEQ ID NO: 87667 - DNA, 522 bp, Citrus clementina
  Intron number 1 from transcript clementine0.9_029188m (loc us clementine0.9_029188m.g) derived from phytozome v7.0 (c hr-ID scaffold_22; pos 1240332 to 1240853)
tcaaggtgatcggtttcttttcatttttcttttctcatatttccgaatcctattatgcttttgattgcatgttctcattcttcagagactttattgaattcttgtttgcatgtttggtctttgaccagtatttgctaggttatatgcctgcgtattccatgtagtgtcttctatttataatgatagataaatcaaaattcgttctgaaatatagaaaagtgtagccttagatgagtttagtagcaaagaatttagaatgacgaaatttggtatcaatatagcgatatgctttccacattataaacatatgtggttctttaggaagtgattgagaacattgtgagttgcttgcttgacaacacgtaaaggtgatgaattacatagcttaaaaaacttttaattagatgggaaactcagaggattctcatttctgttgaatcttgtaattgatgctggttggcctaatttgcagttgtttttattccaggatccggaaattcaacctttggctgagcaagactc

SEQ ID NO: 87668 - DNA, 873 bp, Citrus clementina
  Intron number 1 from transcript clementine0.9_028229m (loc us clementine0.9_028229m.g) derived from phytozome v7.0 (c hr-ID scaffold_2; pos 5038805 to 5039677)
atcaagaagccgccgttgagttgggcaaagaactggtaatgaaattttctcaaattttttttttttccatctgtttttcatgtctctttttcagaatccggagttttgaaagacaatctcaaatatttctccattttgtttctgggttcaaccaatcctgcattgtttcattcaatggtgcaattttggcttcaaaaatttccttttttttttcctctctctttccttgtgttttttccttgtccgtcattaaaagggattttcttttatgcattgtttatgtttcttatcaactgggtcgatttttgttctggaatcaaacaatttagaaacctcgttgtttcattaagctttgaacgtgggcatatgattgttttgttgataaaataaaatgaaaaataaaatattattagcataggagatggaaggtttagggtttatgtttggcatgacagaaaaactgctagtgctagctgtaacttgcctgtcaggtgagcagcatttttgcatgatcttgttcgtatgtatttttctattttcagtttcacaaatcacaacacaaaaaagaaaccgttttttaaaaacatttttttaataaacaatttctcctagagaagctagctagctaacaaacgtgctcccttgatatcatgacactcttttgagcgtggtcttctcttgtgcatattcccacaaagaaacatccatgaccatgatttttacttatgggttggttcctttgtaataattttaatattaattttttttataaataatgtttgtttattgtgacatgtgttaatggttttttttttctttttccactttccaatgttgttttcttgaaggtggagagaaaaattgatttggttt

SEQ ID NO: 87669 - DNA, 698 bp, Citrus clementina
  Intron number 4 from transcript clementine0.9_000260m (loc us clementine0.9_000260m.g) derived from phytozome v7.0 (c hr-ID scaffold_94; pos 143497 to 144194 reverse strand)
agcggagactcattaggtatgacattgttttgattatagtactttgtgtgaaatgctctgtttttatcttacttactctattcctgttttcctaattatttttactttatttttcaatggaacttattgtttttcaaatattatgaacttttttattggcttggtttcaaaatgacctgctgacatttagattaagcactgatgggaatttgtatgattagatgtgctccgttaacttttcagtgtaccgttgtttatgatttgtcattcactctgaaggttgttagcgctggcctttgtttgctggttgtaacggaattgcttttgaagattcttcatggtttattaatttgccaaacgccatactttctatcattaaacatctggatgttactggtttagaaagaatacagcaatggactacatactacccctagaatttggccattctgttttctattgaactgagggtctctgggttgagctctagattcattggctgttatttctgctataaactagatcttctttctattttatttgttacccatggattttgatacatacatacaagtcaattgcccattagttgacattgtttgttcaactgtcctcatagatttcaatgattcgtaagggatgctttttttaatatctttacagtgtgaatattgctgaggataagatttcagtttttg

SEQ ID NO: 87670 - DNA, 505 bp, Citrus clementina
  Intron number 1 from transcript clementine0.9_006789m (loc us clementine0.9_006790m.g) derived from phytozome v7.0 (c hr-ID scaffold_32; pos 2325470 to 2325974 reverse strand)
gcgtcagtctccctcttttttctctttttcatggttttctcgatatttttattcttctttttgtttattctgcgacaaaagctacttatggttataacttcatagtaaagtgattgcttttctttttttttagcattaactgtctagccttgctgcatatctatgctagtaacaattaccttctttttgttggtcatttctttttatggcttcctttttatcccagttctgctgattccatatgtatgcttttggttctgattccattttgtatttctttagtccaagtaaacgccttttctgctttttaatatgtgtaaattatagtgctacttccagctattctaaactataagaaagaatttccctgaaatttcttatcagttaccctttgcttctctgatttgagtttctctctgaagtcttttcttctttctaactaatcgtgatgaattaatccaatttcacagctcaagcgctcttactagctttccaacactatatc

SEQ ID NO: 87671 - DNA, 624 bp, Citrus clementina
  Intron number 1 from transcript clementine0.9_020186m (loc us clementine0.9_020186m.g) derived from phytozome v7.0 (c hr-ID scaffold_19; pos 1441831 to 1442454 reverse strand)
tattaccaactagtacaagtttgtcaggtaattaacctctgtttgttttcattttcaatgttctcataacaataatgcttcacttttggaatttgtatttcaactgatgtagcatatgacatggcttcttatcttatcattctatttccacataagttggaatacaaaacccagtgtaccattattctttcataaatgattcttattgccttccagtaataagatgtctggttttaccacattggactggatgaaatgcttgttggtaactattgtgcctgtccacttgctgttacaggctgaatatttccgtcagttgcttaaacctgtcacgtagtctgctgatactaaaatctggggcattgggatttggaagatctaccctctggttgtttttgtgcataagaaggcaatgacagaaaggagccattagattgtgttaaccattgactggggatagacagcttgcttattttcagtgatggccaaaataccttgaatttactattaaacccgtagttgctgtaggaacctgaaccaattgatagttgaataactgccagcttttaaggtgaaaatcctcctttcctttgaatttttgtttttccaattaagtaggtcttg

SEQ ID NO: 87672 - DNA, 457 bp, Citrus clementina
  Intron number 1 from transcript clementine0.9_030621m (loc us clementine0.9_030621m.g) derived from phytozome v7.0 (c hr-ID scaffold_34; pos 789863 to 790319 reverse strand)
tgattgcagcgggtgctgctggttgctttcttgaggtactacttcttcactatttcgcatcaacttaggtgttcagacaaaccctgataattgaaaaatgctttgtttgttttgatcttcttactagttttatgtgaaattcctcaatttgagtgcgtttctctggtacttgagaatatgttgttcaaacttctaaaatttctacttacaaaatctcatctcatttagaatgtctagttgcaaaccggggatatacaaagcttttgtagcattacagaccaggcacatttgctccattcatgatcattcagtcattgccatgttcagaattaaatgttgtttctccctcatcatgaatattattaactcagatatcctgagaaggatatgtatcaaatgatggtgggatattttcctttcaggatcaagcttggccaaagaagtgtggtaagagtac

SEQ ID NO: 87673 - DNA, 787 bp, Citrus clementina
  Intron number 1 from transcript clementine0.9_013009m (loc us clementine0.9_010171m.g) derived from phytozome v7.0 (c hr-ID scaffold_172; pos 44697 to 45483)
tttacagtaggaaattcactagagttgctttgcaggtaacatatattagtattttattttcttcatttttttcatttttttaaaccctagtaaaatctcgggtttctaattttaaagaaatttcgttattttctttttgattttaaatatttggctttgccttttaaacaatggaagataaaggtttatttttgttagtttaaataaagaattttgaagtagctttgtttagcatgattgaattttctaggcagcaaaacagagattttcctggaaactcaatccataagaaaaagagatgagaattaaaagcttgactcgcatgccaaggataaacttttattagtttagaccacttgataagtttatttatgattctttttttttttggttgattcaactattgagattaaattcattagtatgttactaatccatgcttaatatcgcattagtaacaatcatgcagcaataagatccataaacttttatcgctgattcaataggacggctaagtatctctgaggcttggcagtcatgggagtacgcttgcaagtataaaatccaatatttagttttccgaatcaaattattgtataaataaataaaattggtgtaatcttaactcatatgtgtatatttatttaagtaatcatgcaagcatgtttaaaggtgtctggggatcctgaggattagaatttctattgatttattaattaatttccttgtttttatttaatttaagcttttagtgattttagtttccagataatttattgaaggattc

SEQ ID NO: 87674 - DNA, 739 bp, Citrus clementina; identical to SEQ ID NO: 86984
  Intron number 1 from transcript clementine0.9_004289m (loc us clementine0.9_004279m.g) derived from phytozome v7.0 (c hr-ID scaffold_17; pos 1972058 to 1972796)

SEQ ID NO: 87675 - DNA, 681 bp, Citrus clementina
  Intron number 1 from transcript clementine0.9_013202m (loc us clementine0.9_013202m.g) derived from phytozome v7.0 (c hr-ID scaffold_6; pos 955204 to 955884)
caggtaaccttttttttttttttcctgcatggttttgtacataatgatatcttttctgatcgaaactgagaccaagactagtaccttctatttatttgattgaacaacacacggggcaatatcgttccttattatgtttttgttggtactttaaagtctgtgcttccactgattctgcaggcgtgtgtgtgtgttgagtacaactgaaatttttttgcagattttttcaggagatcttaatgaagaggaacaagttttatctgtgtaatcagatttgtgaaccaccaaaagtctgtaacaaaacaattaatttaaagacatcaaaaccctataatcagctggatatacccaaagaaattaacctaaaaattattaatttttccataaattatttaagtgccttaaaaacgacatcctttctgtaatatcgcttcctcactgaagtaaatactgcataggtagttcatgttatcagatgtaaccaactaatagcttttgggaaaaattgaggccgttttcactaataaatctccttgagctcacaaagaaatcgattcttttaagtgccataacttaggccttaatatgtgtgcttgtaattaatatcccttttgctgtttctggatcttttttttttgtaatccttgtgaatctttgaatgaatgaattgtgtttttgtag

SEQ ID NO: 87676 - DNA, 895 bp, Citrus clementina
  Intron number 1 from transcript clementine0.9_033445m (loc us clementine0.9_033445m.g) derived from phytozome v7.0 (c hr-ID scaffold_17; pos 1513024 to 1513918)
atcaactggtaaagctttgtaagtaattttcggttcctaatttcaactcttcaattacttttatgtcaatcggaaagtaaccattaaggtccccattcttgctttgtgcttgtttaggattttaatcaaacactcttacagtcaattgatcaaactcaacgcccaactaaaggtctttatgatctggataatagcctctaattctcaactttgtgtcttaatctttcaagtttacaatttcacttattttataaattttctcttgaatttttattttatctactctgctttttcctttcggcttaggtgtatacaatagtaaagacaaattacaaatgacagaatctcataattagagataatggagctgggttggatctagatttttaggcatacagacgacacaaataaagacgggcaatagcctaagatgtgaaaagcatgcttaaggcttgcaataacttttattgttttcatagttcataattattttgtaatattcttttatttgttacaaattctttgtttcttccactgaccatccgagtttgaataacgagaaaaataagaagctagaaaatctatctagattttagcctcccttaaaaacaatctgccggcactagatctttgtggccttatttgagcaacatacattcatggaagcaagatttgtataaagttgaatttcaaatgagaattataattattactgttcttttggtaataaaaaaataatgtagacaagagatttctataaatatgtctttacaaccatttggacaaagaagaaaccgactgttataaaacccgttggacgctttatctaccgctcacccaggacatatttgaaaatgcaggtacaatttgttattggtggattggcccaataccc

SEQ ID NO: 87677 - DNA, 948 bp, Citrus clementina
  Intron number 1 from transcript clementine0.9_009408m (loc us clementine0.9_005603m.g) derived from phytozome v7.0 (c hr-ID scaffold_6; pos 2922815 to 2923762)
acatcactgcttctcctctaggagtccctcaacaggttcaccttttcttatctgggctgttattatttggtttaaaaagttgcaaaaatagtagtttttcgttctgttgaactcgttttctgtttggttttggttttgggtctactggggtgccactaaggagtaaaggcactgttcttttgtttttcacactcaatttttttggttaatgtttacagttttatgctttatgttgtgctagctatttttatgatgatcttgtgatctgggttttgaatttttttcctctccttttacagtatttgaatttttttttttttgtcattcttgtaaacggggaatgaagtgctagtgaatatgttcatgatacatatattgtttttttcttttttgggtttatttttgaatgttgttggatttgatagtgcagtttgaggattgttgaagtagtctaaatgtaattataggccaatcttgaatatggggttcgtgcttttgattttatctctctttattttgtggcaaaggctatttatttagccacattggatagtgtggtttcattgttagtgaagtggcttaatgatgatacgatagtggtgttttaatgtttgttgagtaatggttggttgtgtgttgctaatgtgccacctccgcaaatttgaacgagttttatttgctcattttcattcgcacgttctcccccccaggggcccaaaaaaaaaagttttcttaaatcacaatggtctttattgaatgtgtgaaaaagtttttgaattgagtagtatgtttgctttttagtgttttcagtaatctatggtttatgtttcaaattttattgtgtgagaaactatgactttgctgatggtcaattggactaattgtacttctgttaaattacttgtggatgcaggttatagcgattaacggaaagtttcccggtgcggt

SEQ ID NO: 87678 - DNA, 867 bp, Citrus clementina
  Intron number 1 from transcript clementine0.9_009166m (loc us clementine0.9_009166m.g) derived from phytozome v7.0 (c hr-ID scaffold_6; pos 788331 to 789197)
ccctcgccgccttcgctgccattcgatcaatctaggtaatttttttctttttttctgcagcattttaacacatactgtcgatataattgttttgttgcagtgtgtaaattcgccatgttgcattttaacagaggcgaaaatttgattccaataaaatttgtttcatttgtttgatggactattgactaataaaattgaatttatgatgagttgcttatacttttaaactttagcactctaaattctttatccgtaaaaatttttggaatgctctctattctctctttgtaatttgtgaggttgatggtgatgggagaatacgatgaaatcaaagaaatccgttattgggaagttgaattaaaaattttcaggaatttatgttttcgagaatctgtttgtttgtgttgaaatgttttgttgttaagtagtgggtttcttgcgtttgccttttttctttttcatttttaaatttaaatgcttctttgctgatattctacttcatgagttggctatgaagaaaatatctcatgtttcgatttttttttcccatttcagctttgattttaatatgagaaaatgtgaatattgctctaattatagtttaatgattttatattgtttacttatgtattttggtggactgttaatattagactaacaatcatgtgcaaaagaaaagactttaatttgctgtcattttttcatcttttcagagttgaagggtgaaatcaacattatgcagttattgtgcggtcaaacactgacaaggtcttaaaatgtaaacaatttaaaaacttgtgccaaaatattgagacatttggttattttgcagcaaacaaccggggctgcagtgtcaataacctgaca

SEQ ID NO: 87679 - DNA, 601 bp, Citrus clementina
  Intron number 1 from transcript clementine0.9_028371m (loc us clementine0.9_028371m.g) derived from phytozome v7.0 (c hr-ID scaffold_2; pos 3761566 to 3762166 reverse strand)
ttcacaggctctggcttttacggatccactaggtaatatcgtaataggccatttctatatggagtatttcctatgaaaatttgcgtattttattggtgattattattggtaaaaacgttcttttacatctgtttgagtcctgagaaaatgcaagaaaagtaaagaaactaaaatgtgattgttcaggctttgattactcacattttttttattggaaaaagaatggtatggtcaagatccggaatcgtttaatcaattttcttatcggccaaacagaagcaaggaatttttttttttttgttccacaagttttgggcagaaaatttggcgggaaaataagataaccgactaaggcaattattcagtgtgtacgcgcttacagtgaaccatttaaaagatttttagtaggccttcagaaagcaagtgacatattgtactctaaaataacgttgttgaaatatgtgattcttgaagtagatactctcaaatcttatgtttggctttctttaatcatgagtttagctaagttaatcatttgatttacaccaagaatctgtaacctgaacactatttctttaatcctgtgcagtcacagctcttc

SEQ ID NO: 87680 - DNA, 691 bp, Citrus clementina
  Intron number 1 from transcript clementine0.9_035256m (loc us clementine0.9_035256m.g) derived from phytozome v7.0 (c hr-ID scaffold_32; pos 2494985 to 2495675 reverse strand)
aaaatcgttcacggtgttaaggaacgtaagtgtttttttttttaaattttccttttaatttgttatatatcttagcttactaccgaagtgaagcattgtgtacaaagataataaatttcaataaacatgtttcagttatgagcaataatacacagttatggtaatttccttaattggcctggattgtactgactatgttcaagttttgaaagaaacaagctgtagtgtagtttcattattatttactagcagcgttaagtgttcttaggtagaatactatgtcaagagcatatgttgaattgtaacttcttagtatgatattttgtgtatcagtgagttcttgcttgttagatatatatatgaaataaactcagctatggcagccttaaattttgagaatgaattcaaatagtaagattgttggaagagtgggagtgtgaatcaagcggaagtatggagaacagtttctcttgttgaaaaggataatgggcttgttggattgtaggaagttaatgctttaataattgcattcttgtgttgtataggaaacgacctgtcaactatagtacttttaatttttgaggactagttaactatagtacttttaatttttgccatctatcatgtaaaagatgttacggacatttcagtgtatgacataattttgtgaattctaacagcttgcttgaag

SEQ ID NO: 87681 - DNA, 728 bp, Citrus clementina
  Intron number 2 from transcript clementine0.9_003452m (loc us clementine0.9_003452m.g) derived from phytozome v7.0 (c hr-ID scaffold_26; pos 536709 to 537436 reverse strand)
tagatatttaacttctattgttcagtcagctaaaggtaatactttgtatcatgagctttttgtgttgataactggtaattcaatattcgcaagtacattgtatgctgtttttagtgatcatatattattctatgatataattgcagtttgcaatgaaaatgttatgttctggaactttttggcgaattaatggctcacttgttgcaatatctcagtttttgtacgctgttcttaagtttcagtgtagtgagattccgatcaaactgtttgaacttttgtgctaagtgcacacaagtgtaccagtcggcgatagcaattggtcctagatgcaacaaatgctgtacttgagaataaacggtttggaatagagccccattttaatataggaatagagtgaaaagtacatggatagagagtcagtgtggtaaataaataattgtgaatctttgtgatagaactagaaacatttggaataagatttgcatggaaataatcatcttattcactggttgtggttgaagatagataacgtggaaaccttggaccaatgaccataactggatagtgcaatttttgaaattttctactaaataagttttatttattttgtctatctagtttggtggcctttttttcttcttcttcttcaatcatacagctacttgacatttcccacaattttctgtttttcagctatcatttgaatcgacggtcatcctttcatccct

SEQ ID NO: 87682 - DNA, 572 bp, Citrus clementina
  Intron number 1 from transcript clementine0.9_003452m (loc us clementine0.9_003452m.g) derived from phytozome v7.0 (c hr-ID scaffold_26; pos 537493 to 538064 reverse strand)
cttggtttcgtcgatcttctctctgtctctttcaggtgattatcttttttttttttgttaattctctatttttttaattgatctttgattgtattggatgattatgctgttgttttgatgtattttttctgggtttcttttcttgattttttatctttattctttgaagagtttgtgagggatcgagttgaccgatgttggttttttgatttcattggttctttcttcttcttcttctttaatctttctttttgtggatgtactagtttgatttggccatcgtgattatcaaatcatttgatgctgaacttctttttgtggttaatcaaaataagttggttaaattggtactttgattgtccaaggactggccttggcgatttttctgatgttttttcagacacagtttcattttttctatgttttgagtttgttttgtagatgtttcaatgttccaaagtctcatggttgacaatgtagatatctaattttgttcataatttcttattgatgtttaataatcctgtttttcactgtttgatttggggtttcaggtataatttttgagcttt

SEQ ID NO: 87683 - DNA, 1001 bp, Citrus clementina
  Intron number 2 from transcript clementine0.9_018964m (loc us clementine0.9_018964m.g) derived from phytozome v7.0 (c hr-ID scaffold_147; pos 40051 to 41051 reverse strand)
ctttaaggaagaattgggtacaaattctgctgcaggtatgcaattacttcatgtttaaagcaattggataagacgttatattcacatatatgataatatagcataaattaaaaaaattcgtattcaatttggcgatgcattgattaaagtcttacttgttatatcctccttattacatacttcgcatatgtagcagatgtagtttatagtccagtcttgatatgcaatttattgttggataaatgaacttgatggtggttgcagctcatttaacccttacgttgatgtatactgctggtagtatagagtgctgtttgcattactgttcccattgctctctttgtatatggtcactagcagttgaaaaattcatgatagtttgtataatttcaagataattttagtattttactttgtgccaacattaagctcaaagttcatcatttaacaaagcatcttttgctttaacttgttaactgaccttcctatcttttgctttaatcttttagctgcatttcaagatcatgttagtttgtataatttcatgataattttacttgccgacattaacttcactatatttaacaaagtatctttcactttgaccttttatagctgcctttcttatgtcttgcgttttttttgtggcatttgttgatatgtgcagaaatattggtttttcatttcttcaaatagtttttcttatgtatttgaaactaatgtgacagatgtcttgcttctctactcaaggattctaaatgatataatgattatacttattttcaagattgtcatggcttgagaaagttgttttctaataatttttattacccgagctgtaatattgcatttccaggggggagcaggatcaaaaaagaattaggatgcaattatgttttgatcaaatttgttctgcttcaggctgcattttaaaatccttctaacagctgcatgctaaaatggcaggtgaagaaactgccgcagcttctgactcttcgtca

SEQ ID NO: 87684 - DNA, 264 bp, Citrus clementina; identical to SEQ ID NO: 87182
  Intron number 1 from transcript clementine0.9_024138m (loc us clementine0.9_024106m.g) derived from phytozome v7.0 (c hr-ID scaffold_26; pos 2589426 to 2589689)

SEQ ID NO: 87685 - DNA, 814 bp, Citrus clementina
  Intron number 1 from transcript clementine0.9_019985m (loc us clementine0.9_019985m.g) derived from phytozome v7.0 (c hr-ID scaffold_9; pos 5047233 to 5048046)
tcttctacggccaggggacacgacacttaaactctgtgagtcgactcagatttcattagcccttaagcttccattttcattctaatcgatatatgctgccctttgtggattttcagcctttgatcttgttcaaactttctgctttgttgttatttttgtgatcatgttgcttttttgccgttttatccatctgggcattttttttcgtttgttgaaatatactgatcttttttttttcaattttgttatgtattatgcttttggttggtgagaatatgtaaagaggaaagtaaaagaaataagaaaagcctattacaattaattcatttcattgagcttgaatcaaaatctgtatcattaataattaatccgaagaaggctcaatttatgtcttttgttttttttttctgaaagaagagttttgagggcaaatttttaactatgattgagatggaagtgatgattatttccccagatgatcgacaatgattataatgtgcgatttttctctttttgagaatccaagccagtattctgatccatctccatgtcattttaactaactattccactttcattaatattggtcaaaatttttacttttaggttattatattttgtaatgtaggtttctgcatattagagaagatacaagtagcttcaatgttgttagggatgtttaatgttgctatgataataatgtctatttgggactgttataggattcgagtatgttttgattttatggcatgcacgtttattgttttactaagctagaccttattctgaatgtgggtttgttattattatagag

SEQ ID NO: 87686 - DNA, 631 bp, Citrus clementina
  Intron number 2 from transcript clementine0.9_000500m (loc us clementine0.9_000500m.g) derived from phytozome v7.0 (c hr-ID scaffold_32; pos 587499 to 588129)
gaaagaaagtaagtgctttgcattaattatgagtttgacttatatttgtactcataattaactacttgtctcaattgaaatacctgtgccgaacatccatgatggattaaagacttgagattataaaagtgtaattttagtattctattgaggaatgctacaaagaacatagactattttgaggtacaaattcaaatatttagcctttaacttgtgggtctgaaagtgagaatattatgtcctggaagaaagtcctgatataaatattaactctgtttgaaaattttcatttaaggaaagaaagaaagtggtaaaaggacaattcaagcaagttttctttctcaactctagatataacttctaagagttgatatttatagctcttttttcccctcatagtttgttgaaaataaatttatgagaaatgaaaattgatttctaattttttttcctaagaaaaacatagaaatcttactgctttgttagcgctgctagggacagtttaaggacaggttaaatattgatttctaaatatttttctttaaaccattgcgaatgatgatgtggttttagttacctggatggcttttgtgcaggttgtcacaagcatatccaaggtgtttccagagga

SEQ ID NO: 87687 - DNA, 890 bp, Citrus clementina
  Intron number 2 from transcript clementine0.9_027906m (loc us clementine0.9_027906m.g) derived from phytozome v7.0 (c hr-ID scaffold_30; pos 1361195 to 1362084)
ctacaggttcgtggagttcctcagcaaatagagtgagatacattaaactttatccaactctagaagcccattcaattgttttgccacatcagcatctaattgagtctaaaataaaaaatagttaacaatcgccgatatcggagtgacaaaaacaatgacactgtacagtgctccgagttggtatattataaagacgctgtctgggcaacactgtttgggccaaatatcatgattactcataatttaaaaaatcttaccacatgcccatttattttgaaaattgttgaataagattgtagttaaaataaatgaatctacatcacagatttcacattagtagcttacgaataagtcaggaacttatacgttctaaactaaactgatcaacggcatcaactacgataaaaagagaaaatatagctgatatattattattattttcgggtacaatttcaaactgattgcttcataaaagattttgtagtagtttttttcaagtaattgatttcaaaagcagaactttctttctatcataaccttaaaaattcgaagtgattataatgtaataattcatttataacagcgctagttctttcataaatattacattgcaagctttattttcatttttccatttttcatccggggaattagataacaccagttacatcaccactttaattttctgcatcaatatatcatatataaatgaattcttgacaggcaaaagacttttgtaacaaacattataaggtaggcttatttctattttaatcaaatatcaatcctacaatctctctttgaagtataattgagagatagatcccatgcatgcattcctatcttcaatatcaggcaaaagaaaacacaaagccgcaggagttcacact

SEQ ID NO: 87688 - DNA, 817 bp, Citrus clementina
  Intron number 2 from transcript clementine0.9_022678m (loc us clementine0.9_022678m.g) derived from phytozome v7.0 (c hr-ID scaffold_76; pos 1070336 to 1071152)
ttcgaaaagatagtaagaaaacttgttaatcttttattcatcctttctctcactaatattatttttagcacatacttgagaatctcttatgaacaatcatcttttcaaattgaaatgggttgacttcagttgcatttttcaagtcccagtgcaaactcattgaaatgatgttgaaaccataataagccagttggctttactagtcaaaaaggcgttgaacttgctgtactaggactgatgagtatttttcattctttggtttgacagggctacataatttaacatgtatgtcttgcataagcagaagacatgtctaaatcatgatcacgccaagctctgactgtgtgtgatagattattggggaacagtattttgtttaatctcgtgattaaattaataaggaatgaaacccaaatttcaacggtgctggatatgttcgtgaggttgtttcgggatcacttttgatttaaataaataaatagttttagagcttgataattttgcagacagaagattgttgcaaagtgttgcaaaaactagataaccaacatggagtgtttctattggatccagctgatgggcaaatagaacttcagcagatatatcatgcactgcaaatatattaacttcagataaattttatttaatctggaacttaaaacagttccacacacttttctccgctctggatatcagatatacacctttttgagaattacttgggtagttgattgtttattactttgtgtgagaaaatcgaaaccaatggcttcatctaatgttgagtccatatatttcatcccacaggtcaaatttc

SEQ ID NO: 87689 - DNA, 680 bp, Citrus clementina
  Intron number 2 from transcript clementine0.9_010893m (loc us clementine0.9_010893m.g) derived from phytozome v7.0 (c hr-ID scaffold_54; pos 949312 to 949991)
ggccattcttgtgactgtggccgagtgttttccaggtccttctctttctcctaaatttatccccttttttattctttcaatcaaaccctaagatcctaacgaaatcgtgccaaaatctcgattcaccagggctcttagttaagttaaagcttctgttttgttatctttaaaggagctagagtaattaattgttctaaatccaagaaagattttcgttagtacactggacctcatgttttcttgcctcttgtgtggtgtgatctacatatgccagccaatccaagttcaaggggcagtactagctgcatgactatttctaaataattctaacagtttccatataaaagccagttccacagagaacaaattaaacagtcgcatttgcacaaacagaccccatttcataatctcttttactttattttaatatttatagtaaacgtagtcgcataatctattctacagatctttaatcatttttatattgtttgtttcttggtaaccctacatgtgctagcctgaaaaatctttattgcttccattccattacttggtcatttgattattaaaagcaataagaaaattccatcatcactttcaatcaaccttttcttttcttttctttcttcttttttttttttttgtcttttatagggttgaaagtttcattgaacaccaag

SEQ ID NO: 87690 - DNA, 573 bp, Citrus clementina
  Intron number 1 from transcript clementine0.9_013183m (loc us clementine0.9_013183m.g) derived from phytozome v7.0 (c hr-ID scaffold_19; pos 4108762 to 4109334 reverse strand)
tatctcagctctcaacccaacttttcccttgtgagtatccttttacgcttgtttcagttttgtgcatatttcctctgcaagttctatctttgcgactcttaatttataggtatttgatgttctataaaacgcaagttatagattgtatatgcatgtcttaatcttccatttggtctcatggtttttgttttctttgaacagttgttttcaataagcatacgaatgtgctacacatatcagaattattaaaattcatattaaaaacatattcttgcttgactgataactacttgtagacgtagacattcccgtgcattgtcatgcaagtaactctatatctttctccttgcttatcttttatcttttatcatttcaatgtttgaattcgtggccttaattatcgattactgtagagtaaagaaataaatgaaaagattattgagttgagctctttttttctttttttttgttggtgtgggggggagtcatgagtgatattaggttgtcattttcagtttccctacagctagactgcagaattggttcttaccagcagaagtcttgcaggaagtg

SEQ ID NO: 87691 - DNA, 521 bp, Citrus clementina; identical to SEQ ID NO: 86693
  Intron number 1 from transcript clementine0.9_000786m (loc us clementine0.9_000792m.g) derived from phytozome v7.0 (c hr-ID scaffold_34; pos 1639710 to 1640230)

SEQ ID NO: 87692 - DNA, 1016 bp, Citrus clementina
  Intron number 1 from transcript clementine0.9_010420m (loc us clementine0.9_010420m.g) derived from phytozome v7.0 (c hr-ID scaffold_106; pos 540199 to 541214 reverse strand)
ggtgtaataatctactgaatatttttcctccattggtaagattgctatattcattttgaatttttatttcaagtaacattcaacaattattttaatcatttttgtgtttacaaataattttcattcacaaattatttattgcaagtattttacttcaaacatcaggagggcaaaaaagtagtgtacttcaaatcaccattctgaactctgcattgtcaatctaatttataggttcacccgcattaaagtcaacgatataattgttttaaacacgatttaacagcataatataattcaatttaattgtttttttccttaaatcctaataaataagatttttagaaattaaaagatacttagttactcagcttttaagctcacaaattcatatatatttctcttttccttgggtcttcaaatttcgatttaaaaaaaaataaagaaaagtgttcaaatgtagttaatatctctagtttagttatgaattgattacgccattgattaagcacaaattcatgatggtcattttgaatcgaccgttgattaaaaaattcctcaaatattcactctataacagtcccatgttgatggcgttgggaagtgttttccagaaatgttttccatttttaaaagcatgaatatcgggaaaaaaaaaaaaagggaaatacagcgttttagtttagttattttaaaaataggcatgtttgaaaattaaaaattttaaaaaactagcatcgagatgaaaaatgaatttagaatatttaaaaattacctgaaattctttctccgttcctaatactaaatagtgtaaatgcattttcattatctttgtttttctggacttctatttatttatttttattttttcttttttttctttaacaaaaaatatctagtagacattcatggtttgttatttttcataaaacaattgtatgattttgacatactttgaatctagttgaatgctactctttattttcaggttggaattcccaatagtctagtgaatcttg

SEQ ID NO: 87693 - DNA, 898 bp, Citrus clementina
  Intron number 1 from transcript clementine0.9_028535m (loc us clementine0.9_028535m.g) derived from phytozome v7.0 (c hr-ID scaffold_32; pos 1846446 to 1847343)
ctttgcttcctcatcttcctcccaaggtattcgatttacaaactcatgctctttctcgctaacttcaatttttatcaaaattttgcccccatcaagatatgttacatcctaactataatatagtgctactatacatatgggttagggttactaaactatagatacgatcaatgggcagctttttcaatttgaaatattgaaattttcttagtataaccttttcatatgggatttcgtattggaaaaacatgatgatgataataattttccaagtttattatgtatatttcacttcatctatatatccaaaattgcttggataagcggccctcctgttatgcctggggacaattttatgtgagaagttctaactgctagcaaggcaaagttgatctcggccgaaggcaaatgtaataagactataaaatataatacgccaaaaagccttgttctctctcctttatatatttatgtatgttgcatatgaatgaaccatgcataacttgagccagcctcagtcgtcaaattgtgattgtaacttcgagtctactaatttgaaatttctaattgaattaatttatcagacggcatacttgacgacagcgtttcaaactttcagtcgctttggatgatgcattttgcattatcgatagcttaattggagcataaattcaatgcctaacatagccgaatgtttattataaggtttcaaattaaaatttgcaattaaacaatttcatacattaatttctcaacgtcagacaaatatagctgaatgatgctttggatggtcattatattgtgctagtaaaatgccgactgatcttaatttttctgtctcttcaaatttcaatgatctgcaggcagacaaatccaccattgtcgacgaagcagtaaa

SEQ ID NO: 87694 - DNA, 318 bp, Citrus clementina
  Intron number 1 from transcript clementine0.9_000194m (loc us clementine0.9_000194m.g) derived from phytozome v7.0 (c hr-ID scaffold_6; pos 912980 to 913297)
aatcaaacgacagaggtctctccctttctcgcattgctttggttttcgttttttttttctttttggcgcttcgcattctttatcttcacatgaaatttataaaattaatgcttatgtttttatgaagctcaagttgctgagtagtaaatgttgaaattcgtttgttttaagttaatttaattgattttgaaatttatttatttatttattttctttttagccagttgaattttgaattcagtttttagtgtattatttgtcttgaatacgagctttgttacaggttacgaccgagtctgtgaaggcggtttggttcag

SEQ ID NO: 87695 - DNA, 663 bp, Citrus clementina
  Intron number 2 from transcript clementine0.9_023010m (loc us clementine0.9_023010m.g) derived from phytozome v7.0 (c hr-ID scaffold_19; pos 1547872 to 1548534 reverse strand)
gacggtaatttacggccttaccctttttgcactcttgcttttcctttgctgggtttctattttcattcacttttgatcacaaacgtatcattcatttttcgtttttgatgggtttggattctatctgaaagcaacccagttcatgttgctttttggttttgtgttccgagcatcttcacttgtctgattgcatttttagtataagattgatgctgtgaaacattacagtagcgcacttcttgacataacagtctcaggtgaatatacgtacacaatgtttttattatattcatcacaaaataagttcatttgatcttgttctatcacgaatgagatattatgaacttgttctgttataaaataagatcttttggcttgttatattactaaataagatctttcagtattgttcttagtatcaacccactctgtatttgcctcataccatttaccatgcccttcaattctgatgctgaactactcttgtttttggaagatgacatttcacttttaactttttcttcaattgtttttgtccttttaaaaaaatttagtctttatagttttccccttttcttttcctctagaattctatcatatgaaggtaaatattcgtatgtacatacagctccaatattcgagtgactgagatatttcagaatc

SEQ ID NO: 87696 - DNA, 550 bp, Citrus clementina
  Intron number 1 from transcript clementine0.9_017592m (loc us clementine0.9_017592m.g) derived from phytozome v7.0 (c hr-ID scaffold_6; pos 398721 to 399270 reverse strand)
atttcttgcctttcacttgtgattgctgccacaaggtatcatttcgtaaaattgaattatgtttgattctcattcgataaattgttgttgtctttgatcaatcaaatgcttgatgggcaattgggtactccttaattttttggtactattatgtgggtacaattcaattatggtgttcttatgtgattgctgaagaataggctgaaaggaaatttggcttgtgattaaaattttttaaaaaattaatgtgtaattttgtgtgttctgtttggtcaatctttgtgttgactaacgatgaactctgcccgttttaggaatttttagttggtgttgaaattaagctggattgttaaaatgaaaacacaagaatttgatttttttttttttttttggagtttactattgcttattgtcactgcatttttgtgttcttctgatagaataataatatgttgagtgctcttgttggtaggtttctttggtttgtgttaatagtaatgctgaaacttggataggtattttgtttggaccatcgaagctacaatcaaca

SEQ ID NO: 87697 - DNA, 649 bp, Citrus clementina
  Intron number 3 from transcript clementine0.9_015616m (loc us clementine0.9_015616m.g) derived from phytozome v7.0 (c hr-ID scaffold_34; pos 84892 to 85540 reverse strand)
agctgcttttcgaggtattactgttacatgttatacaagtttattgaaatttagttatggaattattttttcaaagagataaaatgagctattttgattgaatttattttgatatgtagttgtagcagaattttttttttttttttagtttcattgatgagaagttgtatgctcggatgaatagaaaccgaggctgaagtatctgttccatatatttgatttgtagtgtccgaaactgaatatttttggcattgtaatgcaaattgagtgcttttggcatcccccttagtgctttcaaaccgtgaaaagctcttttggagatatgtagaagcacttggagagctttttgaagaagcatatgataggtgcttttctagcagacacatcacacattttggacgaggaaagaatatctggtgaagcgcttgataggtgttttctgatggagttctgatggagttcttaaagtgattttaccgaaaactcatttactcaaaaggaattttcatagaagtccttccatgcttaatctgacttgcttcttttactcctattatgttttctttatttgatggctagggtgaaatttttttggttatcttaagttaatatataacaataatatattcatgtgcaggtctttgcgcga

SEQ ID NO: 87698 - DNA, 843 bp, Citrus clementina; identical to SEQ ID NO: 87506
  Intron number 1 from transcript clementine0.9_004799m (loc us clementine0.9_004794m.g) derived from phytozome v7.0 (c hr-ID scaffold_80; pos 1082942 to 1083784)

SEQ ID NO: 87699 - DNA, 618 bp, Citrus clementina; identical to SEQ ID NO: 78883
  Intron number 1 from transcript clementine0.9_016791m (loc us clementine0.9_016781m.g) derived from phytozome v7.0 (c hr-ID scaffold_6; pos 4262520 to 4263137)

SEQ ID NO: 87700 - DNA, 533 bp, Citrus clementina
  Intron number 2 from transcript clementine0.9_008654m (loc us clementine0.9_008595m.g) derived from phytozome v7.0 (c hr-ID scaffold_9; pos 2092722 to 2093254 reverse strand)
gaggaggcttgcgtgctactgcttggaaggtagggcttaatttttctgtcactattatgttgtgatcatgtaaactgctaacaatttcgaagtataagaattattcgagcagggaaatctaacttgatttgtgactttacacctttgtcagtgttgaagcttactgcattccaccagaagcagtaggaatttgatataatctgataacactttttaatggatattgatcatggtcgcggaagaagaagacctcaaaaataaaagattaatagtggcacttgaatccccctcccttcttttttcatcagtgcttgttgattacgtatatatgattaattatgctaacgcttataattttgaaatgtgaaaacttgtaaaacaatagctatgctaccaccaataatgcagacatttcagtgacaaaattatatgaactttaactgattgctgtttgttttgaattgtgtatcatttcccttgcacgttttattacagcagctgctcttaggttatttgccttcttgtcgtgactt

SEQ ID NO: 87701 - DNA, 964 bp, Citrus clementina
  Intron number 4 from transcript clementine0.9_011990m (loc us clementine0.9_011990m.g) derived from phytozome v7.0 (c hr-ID scaffold_26; pos 495378 to 496341)
tcagcaggactccattaccagccagctcaacgtacgtcgttcttcatttcactcttcttctctgctctgattcataaatatttgatactgaaaattgaaaaattgaggcggtctggcgatgagtactgttggtatttgttaagacacattaatcgtgttttggtatctcatcttaatgtttaggttgccttgttaaatcttatccgtatgggggataagaccggtatgcccatggtgcttttagtctttttgagtacaataattccacctcgtagctgaaagtataatagcacccagaagcatttcttgactctttgagtcaagtgaaataatatttgttaactactcctatctgctagaatattatttttggccatggcgtttggaaacacttttcacccactcttggttgatcaaaatggaatgtgttagaggtgcattgagacttttatactacctggtctgcacatattttctaattggaaatctgttctttagcaaatgtggtgaatggtaatagtggagttctgatgcaagcctctgccaattcatgtagaaaagtctcctcttagtggaaataatttaataaaatttggcattgcagattaaaatattaatcttggcttataaagcactgccagcatgctttgtttataatataagcatcacattcttgttcatttctttaccaataatgataattctataggagctttctaacaatgcaaccccattctgttttgctttcagcaaatactctctgagaaaaaaaaattataataaaaagagaaataagattttctaacatcaaacaagtgaaacaatcgagcagtacttttatcgcattggttaggcaatggcagaatggacagacatcataacaaattttggttgattaatttgttctttgatcctctgttattttataataaactcagttcaaaatttttttctctcttgcaga

SEQ ID NO: 87702 - DNA, 808 bp, Citrus clementina
  Intron number 1 from transcript clementine0.9_000032m (loc us clementine0.9_000032m.g) derived from phytozome v7.0 (c hr-ID scaffold_9; pos 307383 to 308190 reverse strand)
gagtcgaggaggctgagtatcggtatgtctatctgctattttacggttctgtatgattttgcttattatggtcttttcaaatagtgaagaagatgagcctactatgatatgcgtatgtttgagttttcagtgtgttgtttatgttttgctgtatctgaaagttgagagtaggaagcgagttgcattagggtaataaatgctgtgaatgttttatgtatgtatatcccgaacgctttcccattttcagtttggtttactaacctgcatttgtatggtattttagaggttgcaatttgaaaattgtgaacgatatccattggcatgataatgaaagaatactctcgagtaccggggtttaggagaaagtagttctgtcttttgttctaaggataaacaataacgcagattggttcataaattttgtcgctctgtggtcgtcctatttttttttgggaagatgtcctttctgagctgtttttgcatagtttgattaggaggctttattaacagatctcgttaatattctgggtttacttgccatattgagaaaattatgttattgtgtctatatatttttactccttgaagtttacaaatgatgtggacagtttttgcatccttcattttttttctacacctgctatatcgagaaaattatattctctgctccatatagcttaatccatgtggtttaaaaatgatgtggacagttttttcatcctttaatttttcctctatttatttattgctgttccctttgatgtttattatagtacggttttagaggatctccttaaaagggttttct

SEQ ID NO: 87703 - DNA, 498 bp, Citrus clementina; identical to SEQ ID NO: 77945
  Intron number 2 from transcript clementine0.9_008943m (loc us clementine0.9_008943m.g) derived from phytozome v7.0 (c hr-ID scaffold_2; pos 2348558 to 2349055 reverse strand)

SEQ ID NO: 87704 - DNA, 827 bp, Citrus clementina
  Intron number 1 from transcript clementine0.9_018461m (loc us clementine0.9_018461m.g) derived from phytozome v7.0 (c hr-ID scaffold_6; pos 451994 to 452820 reverse strand)
gtgggtcgaccaagactcttggaaactttgtcaaggtttcgatctcactaaactctttaattggttatttaattgggtttaatttatctaattttctttgcaatatttgttctttttttttaaactttgtttttatattggttagatgctctattgtatccaacgatctatataggtgactgttgaattgtattatattcttcgttattgaaatttaactgttgtgttatttcttgttgtgggcattgggaattaaaagttattgattattttggtactgttcgtgagatgcttttctttggggttcagatgattagtcgatgcccaattggtttctcatgaggaatgtaattgcggtataatatgagtgattatccctctttattgttgtttggattttgtccaatgattgattatcttacttgaatttctcagtgtaaatttgtgagtgtatgcacaaaattttctgtgtgtaaactatgtgtcctgattgacttgaatgttctaaaaattgtctgaattttgattttatctttatgcatttgtactttttgttgttcacagatgttcttggaaactattaaagcagtttgtggagttatcttgttttagcttgatgttgttatgcttcctttagagtgcttttttgttgtgaaacagtgtgaagtgattgtcgtactttcaatttcttctaaagtttcataatgagtggttgcaattcaactttcagttaacaactttcatgaactgaatattattttggttagcatatgatggtcctttttctttgaatccacaggcaacctttgagtgtttgttgaagacat

SEQ ID NO: 87705 - DNA, 770 bp, Citrus clementina
  Intron number 1 from transcript clementine0.9_019182m (loc us clementine0.9_019182m.g) derived from phytozome v7.0 (c hr-ID scaffold_19; pos 2390785 to 2391554 reverse strand)
cacaaagagggcttcaaggttgtctactcactcgggttagtattgttttggataaagaagatgtttaatttgttaaaaattgatatttcgtccttgttgattatgaaatgaaaatgatgaaggttgtagaaatatcatactcagtttatcatttctttattttttgctgtgtgtgatttatatatgttttgtggaaaatttatggaacgcaaaagaagaagaaagttaagttttggacttttgaatcaatcagttactttgattgctattgtaggaacaattgaattttatattgacctggaatcgtggatatcataattatagtcttctcgaggtttgctttaaatttgggaatggaagaaaaagtgaactaaatcctcactctttttctatggatttctagggaggtagtggcaaacttgactcacttgagcaatatccttttgttgaggttcctttgtaaagcagaacattttaaatctttgtattattttcatgataaaagcgtggtagcttcattgcagtttgagttggtggtgctaaaaggcttatttgagtggacttattaattgcattagttatggggtaaatttgagactttaaattcttttgctcgttcctttttctttccatgaacaaacggaaacttaatagatcatgatgttgattgtggaaggaactatggaaatattggttatttattggtcgtttaagtgattggattcttggttacaggagaagtttcattgccaggtgggaaggcagaggag

SEQ ID NO: 87706 - DNA, 775 bp, Citrus clementina
  Intron number 1 from transcript clementine0.9_035374m (loc us clementine0.9_035374m.g) derived from phytozome v7.0 (c hr-ID scaffold_36; pos 35209 to 35983 reverse strand)
tttgtaaagaaagaagtggccatattttaaaagacgtgagatgagtattctagctgatttgattttatgcatccttatgggcctttgtaactaaggaatttcaagatactttgttcttcttcactgttcttaattgtaaaggatctttgggttaattgtgtatgcgttgttgcctttcattttttaatagaggcttttggtataggcctttggagtggacttatttgtgcttttggggaatcttctgttttttggggctgttatagggtctgtcagctgtaggcagtcatactagattagatttagcttatgtgtattgactgtccacttcttattaattattttcttacaatttttttcccgtacgaaaaggggaaaaaagaaaggaaaagaaaataaaagaactgctagtgtacatctaatgatcatgactcgtgagcagtacctaatgctcctttggacttccgttctggtccatacccagctttaccttctggtgctctgctgcaatttgcaacttgggaagctttttccaatcgactttagttgctgtttatggcaacaggaggtctaagtgccatttaccaattagttagcctatggttgcatgtgatcttctgctcaggctatctgtgtttaccaattgcttacaaatttgaattgttaccagtatgttaaacttggaaatgaaagctgacaggcctttttttattctcttccccaccccccaccaaaaacagggtgactttctactcattgttttgaaggatctgct

SEQ ID NO: 87707 - DNA, 531 bp, Citrus clementina
  Intron number 2 from transcript clementine0.9_033073m (loc us clementine0.9_033073m.g) derived from phytozome v7.0 (c hr-ID scaffold_9; pos 1033118 to 1033648)
ccgactgctccggtcgcttcttcaagctctgttaagtaagcttcgcttcttcacaaataaacagataagcacgaataatttctcataattttgttttctacttgtttgtatatcgatatatttaaagattatatacttgaaaagcaataacgattgaatgatatgctagggatggctttcattatttgctatcattagttgtcactcacttttctatttttatcaaatcaatagtttcatgtcacatcagtttgtatacttcgcattactgacaatgcaatggattagtgtgtatcacaatgataatctacattaggattacttagaaatatagtatctttattgatgaattttgagcttgttttggtattaattgctacctaattgaattgtgaaaaaaaacagaatgttcactgacaatttcaacatgttttccttctcattattctcctattttcagatgatttttcatttaagttgaccgatttgtttgcagaaagaggatagtctccggagtgcagccaacaggat

SEQ ID NO: 87708 - DNA, 584 bp, Citrus clementina
  Intron number 3 from transcript clementine0.9_033073m (loc us clementine0.9_033073m.g) derived from phytozome v7.0 (c hr-ID scaffold_9; pos 1033667 to 1034250)
atcttggtgccataaaaaattggatagcacttcaggtagtctgactatctcttgtgtattctcagatgaggcaccataacttaacttgaaaatgactctgttgttgaatagacataatgccataattttttcatgtaaatctgatatccaattattttgcttacgacctttttggaatgctttgatagtggtctcgtattgctgctgacactattctcttccagtattttgcatagcaccttttttctcaaataaatccttggcaccttttgtgcatgaataataggttggcatacttgtttttcatactttatacttttagtagatgttgcatgtcagtttcaaaaaccaaatatgctagctggttgaggaagtgaaattgttgtcaacttcctgaatttatatttttcaatctgtgtaatgatttgggcttctaacaggactggttaagattatctcatttgaagtaattgtcacctttattagtttacatcttttaccctcttttttttttggcagtttttcatcattttttggttttgtgatttcgtagcccttttgtgatttgatgttgcagaattcat

SEQ ID NO: 87709 - DNA, 1023 bp, Citrus clementina
  Intron number 2 from transcript clementine0.9_026478m (loc us clementine0.9_026478m.g) derived from phytozome v7.0 (c hr-ID scaffold_32; pos 817614 to 818636)
gtggtgctcctatactcaagcaagcaaagttcaaggtgcccctttgatcactatgttaatttgtgttttcgtaaaattgtcaactttttaacatattataggtgaaaatccttaagggttttgtttatgacgagtttttgcatgtgggtagttcaaataagagtaaaattcatagtcttctgttgtttttctctctcttttttcttttaatctatgattttgatataatgtatgtgtttgtattagaagatcaagattttgaaatcctttttgggttttgcatttgtgtgatttttatgtgtaggctcttgggcaaagagtaaattttgatggcctgaaagaatttcaatctttgtagttgttattgctgttgtcaaactctgggattgccactgtattggtttgttaactattgacaatattccttatagtgaggtttgtgagatattggggagttgtggattgaatttattgacagtaaacttgatgcgaagtttaattggaaggagattttgcaggagctaagtgctaatatatgttagtacactgtaactttttttttttttcagctttgctactaaaatataaaataattgtttgtttcagtttgttaaatggaaaatatcgacttcttttgctaactttataccatggagaattagagatgcctcaatgtaaggcctttttcttttctgtttctgaagatatttaaccgtgacactgagataaggttaggacttaatagcaaaattgaatcataacaaatggaacatgattgaaggtaattaatatataagccatttctgaaggtaaaaaaatagtgtactttaaagttcaacatcttctggtttttaatgattttgtctggcttgaactatttccccccctttatcaagaaaccttgtttttttcatttaaggagaagggcgatcttggttttcatataattgctgtatgttaatatttatatgctgtacactttgggcagatatctggatctgataagtttgcaaaagtgattga

SEQ ID NO: 87710 - DNA, 521 bp, Citrus clementina; identical to SEQ ID NO: 81782
  Intron number 2 from transcript clementine0.9_022221m (loc us clementine0.9_022221m.g) derived from phytozome v7.0 (c hr-ID scaffold_50; pos 1316464 to 1316984)

SEQ ID NO: 87711 - DNA, 367 bp, Citrus clementina; identical to SEQ ID NO: 79061
  Intron number 3 from transcript clementine0.9_018498m (loc us clementine0.9_018498m.g) derived from phytozome v7.0 (c hr-ID scaffold_9; pos 1647873 to 1648239)

SEQ ID NO: 87712 - DNA, 435 bp, Citrus clementina
  Intron number 1 from transcript clementine0.9_026685m (loc us clementine0.9_026444m.g) derived from phytozome v7.0 (c hr-ID scaffold_55; pos 731784 to 732218 reverse strand)
gtaacaaaaaagtccactccaacttttttacggatgtaagattctttgctttcttcaatgaccccctttttcttttttgttaaaagtgcttttgatgagaaccagaatcatcaacgcagataaaaagccagcaggtctgaagccaaaaaccaaacagtgcctttcatccaccacataacaagttaacaacgacaaatcaaacataatataataaactcttttgagtctctctggccatacgcttagatctccataacttgaacttgaatcatcgtacgcctctaattttctaattattttttccgaccccacaagtactttccacgtggcatcaatcatttatgaagtaattatttaaccaacaactatatatgcttatagtatattaaattttaaaatttacccacccttttttttttcaattttttgtgcagg

SEQ ID NO: 87713 - DNA, 1017 bp, Citrus clementina
  Intron number 1 from transcript clementine0.9_022774m (loc us clementine0.9_022774m.g) derived from phytozome v7.0 (c hr-ID scaffold_2; pos 8260432 to 8261448)
atcaaaagaccttctttcaactttgaaggagcttggtatgtccatttctctcattctctctttctttctcagtccttttcttttaatttcattttcttattcttttctttcatcttcttcgaatttccatgaacaccggtcttgggatcctaaagaattattcctgaaacaacatcaatgtatatgatgtttgagctaaaaatcgtcaagggtgggttaattaaaaggcatgccattaatgaggcctggccttgttttgtttttgttgttttttttaagattaaataaatgatgatttctatatgaaagtctttgataaattttactggacttgagagattttttgacagataaaaattgttggaagtttaattatgatgattttctaaattttaataaaaattttttgtggcttcattgttctagagattatctatgtaatttttacctcaaacctttaaaatagactatgatacttattaaaataattgtgataaaactaaagagtttcaaaaactatgggctgttaaatttataacctaaaaacactaaatttaaaattgtattttgataacttattgtataaatagtagtcaaacccataaacctgttcaggaatgcatgcttcatacttctatgtagtatttaatgatagtgtagacaattagataagaaaaaaaaaagttgcatcaccagaaaatgcttgatgcttctctgaatttttcaaagtatttggtgaaaaatgtgaaattgaaaaaagaaaaaagaacaacagcaacacatagtctcattccttttctcattctttattgttgtatcatttttcaaggattttaaattttttatagtattttcagaaaaggaaaagtattttataaatagtttggaatcacttttctggggtcaaatttaatgtactaataattaatgtgctaattaacattaattatgacacattcttttgagcctctataatcacattattttatttctttttatttttcaggttatttaatc

SEQ ID NO: 87714 - DNA, 686 bp, Citrus clementina; identical to SEQ ID NO: 78319
  Intron number 2 from transcript clementine0.9_002956m (loc us clementine0.9_002956m.g) derived from phytozome v7.0 (c hr-ID scaffold_6; pos 487657 to 488342 reverse strand)

SEQ ID NO: 87715 - DNA, 565 bp, Citrus clementina
  Intron number 1 from transcript clementine0.9_002317m (loc us clementine0.9_002317m.g) derived from phytozome v7.0 (c hr-ID scaffold_48; pos 310919 to 311483 reverse strand)
acatttgcagtctctctcgctcgccgcctttgaaagttcgtatattctatctctttcttgatctgtatttgtcctccgtttacgttcgctgtttcttcatttttctgtcagattcgtttttccttcactgccaaacaagcctctatattttgtcatcgttttcttactggataacgaaatgatttagcgttgacctttattttatttttttccaattacttgttgtttgtcagtgtttatttttagtaacagcttacttctaagttacttacgactgatgctttgagttgtatcctggatcattattctttttttttaatttaattttatagtgaatccgctgctgaatcttaaaaaaatgttgttgttattattattattatttgaagttaaaaaatgcatgtatctgatgtcaaattgcagtataatttgttaatatctcaatcacatgacattttatgttgatgatattaaattaatgtctgatttattgcttctttatttatttatgtatgcttttttgtggacaggaaatactgttgttgttggtaatatttgagaatca

SEQ ID NO: 87716 - DNA, 681 bp, Citrus clementina
  Intron number 1 from transcript clementine0.9_008443m (loc us clementine0.9_008443m.g) derived from phytozome v7.0 (c hr-ID scaffold_26; pos 1522052 to 1522732 reverse strand)
ggattttgtgtcactatcaagccactaaagctcaggttttttttttcgatagaagtttttttttccttttttttttcaagtacccagttcattttttatactgaggataaacggtcgtgttggattatttgtgatgataacaattagtaattgaggtcgtaaatttggaatttattatatgaggaggcatcagaattgcttgttggaggtgatgttaatttcttatatagaagtttaattagagttaagtattctatagccaattttggattctatattgtgatgtggtttgattattttaataaggaagttgattagaaaagaaattgttagacttttagttgaacttcataatggggaaattgacaaaatgggcatggtagttgacattctgtaatgggaataaacgtaattctattgagccaaatgatgatgctcgttgatgtctactccgtttaatgggaatacagtagtgtgaggtcagcctttttgatctttaacctttttggtcttttcatgagcagttggccattctttaatcatgcagataatcaaagttggtagttttaatgcaggcctccaacttaaactctctcaaatcaatttatgtataatattttcttttttaacttttattcgtctgcttcctcttcttatctgtgttttttgtgtaggagatca

SEQ ID NO: 87717 - DNA, 509 bp, Citrus clementina
  Intron number 1 from transcript clementine0.9_014171m (loc us clementine0.9_014171m.g) derived from phytozome v7.0 (c hr-ID scaffold_17; pos 1797777 to 1798285 reverse strand)
gggatttttccaggtaaattcctttaccaaattacatgcttttccattgatcaagaatcaagattagacttcatcttgtgaccaactctgcatcaataggtttggtaacttttgagaaatatacttattgcttccttttgttcttctggtcttcttacattttaagttgccataagaaaagccgcataaaaattttgaattggggattcgtaatcatcttaaagaaagaggttcaggaattcttcaatctcagcatggaagaaaagaaaaagtattggcagcgtccaggagatgtagacttataaacaaatttataaaccataatggtgttttaatgcaactgcaatattcttagttaatttaatgaaaagtaacaaatgcttttattagtatctaaatcagccaaataacttgcactgtgtctcaataaaataccttgcccagtacgaacttagaggcactgccgactattgtcatctttgctatttttcttttatgaattgtttcag

SEQ ID NO: 87718 - DNA, 872 bp, Citrus clementina
  Intron number 2 from transcript clementine0.9_003437m (loc us clementine0.9_003437m.g) derived from phytozome v7.0 (c hr-ID scaffold_54; pos 1069800 to 1070671 reverse strand)
atcaaggcgaaggtaatcttagttatttttgctgtttatggttctaattgccattgctgttgccagaatggcacacttcatttagctttccttttgaggttagagtaactcaaacttctttttggttcacaaactatccgtgactctgttacattactgcttgacctcaaggtttaagctagttggtaatcggatcaatagtattatgctttaccaagtaccgaataaacaagcttcaccaatttactccaattcttgtcataatacactgggactgagtgccattacatctataagtgtgtaaatgagacactgcttcagagtttgtcagtttggcaaatgaatagggagaggtgtcaattggctttaacctgtaactgtaattggattttattttacctgaatcttaaacaaaaatattctttttggtttagagttaacttcggaaacaattgtttgaaattgtagaagcctatggattgctggaaagtaagcttggtttttctagactttgacactttttcatatgattcaaagaaacaaaggcaataatattcttggtcttcgagtattttttctattctaaatattcttgtaattccacagaggatttacttcatatactccagttttcctattaattggaagttatttgatagagatgatatattcttattgtttttacctacatttgcaacttatttcttttctccaaaatataaatttaacttcttcagcaggcatataaagcatttcaggagccaccatgtataatttttcattcaacaccagtagttcataaacgtctcacttccaaagaaaactgattggttgcaggaggaacatttgccttgtattccttacttagtcgg

SEQ ID NO: 87719 - DNA, 565 bp, Citrus clementina
  Intron number 1 from transcript clementine0.9_002347m (loc us clementine0.9_002347m.g) derived from phytozome v7.0 (c hr-ID scaffold_32; pos 1126996 to 1127560)
attccgacaagtatgtatctgcttctttccttcttttttcttgataacactgcaagaaaactatggaatctacaagagtgagtcaacgggaaaagaatcggttgataatttcaatatgattgccattatttctgttggtgcaattcgcgttgtgtacctcgttatttggtcattgatttggcttctctggtctaatcttgtaagttagaagaaactgttttgcagttatctactcattgaggtgttgggttagcaaaattgtttaacatgacataacattacaagaaaattttgaattgaatccttacatctcttatctaacatgaaatgtttgaatgctttcttgtctttctttccatatctccaatgttcgactgcaacattggcatctttctattcataaagtgttttcagcactactttgagattttccctttttctttttaaattttatttttgggtgcctagccatccaaaccccttgtttttcaattctaatgtgtacgtttacatatcaaattgatcagtagttagcggtttgatatattccaagtatcagagggca

SEQ ID NO: 87720 - DNA, 912 bp, Citrus clementina
  Intron number 1 from transcript clementine0.9_000726m (loc us clementine0.9_000726m.g) derived from phytozome v7.0 (c hr-ID scaffold_46; pos 1587361 to 1588272)
ctgtttgatactacccactaatagaaaagctcaacgtaagtttctgtttccatttatttatttatttttgggatttttgacttttgggttttgttgttttaagaattttgtttactgttaacctacattggtatgagtttgtacattggcatgagtttgtttataattgattgaaagtgaaatgtatttcatgcattaagagacctagaaactggaaatttgctaatgaaatggttgattttgaaggtttgctgacttgaaacagacattggtaaatcatctgtcgctatctttttcccattgaaaagcagcatttctaatttttgtcagagaaaatttttgtcttgtattgactccccgtattaacttaatgaatgatggaaatgatgaagtatttggtttaatgtaaatatggactatttatatattcttgttgacaaatgtgtacatgacgaggtcaaaatctttttaagttttttaactacagattttggaatttctgcatttttggaacattgtttcttcttttgttggagactaaagtatgcagtgaatattatatactaagaaatgttgaaaagatattaggatacacaatttattttacttaaaatgtctgatgctagaatagaaactgttatattttggcttacaaccataaagacgttttcaactggagataggatctctttctctcatttccccagaaaattgttaactgatctggctggacactcaattatcctacagttcaggagggttaagctaggatttcatctttttttggttttcttcgcagaaaatttgggcgttgggctttaatgttcgttgcatgattacttctatgtttatgcatttgtttatttaatctttttttttttccttttttcatctttgcagactttgagtcca

SEQ ID NO: 87721 - DNA, 1042 bp, Citrus clementina
  Intron number 3 from transcript clementine0.9_032300m (loc us clementine0.9_032300m.g) derived from phytozome v7.0 (c hr-ID scaffold_17; pos 2666743 to 2667784)
gaagtattgatattaaaggtaagtaagcttcatcccttctcccgtgtcccatcttttgtggatcttatttcattgagcagctggaggtactgatgttagatctagctagactcttgctagtgtaagcttcaaggcttttagtataataaaaataggtctaagaaattatcaatatatgcaatttccaatgcttctcataatcaaacacaattcaatctaagcattttgtatgttttgtcttcaaaagtaaagaattgtacaccgattggaaatcgacatttgctttttattttctgtaatgctctttcttcggtaacaagtttatatcttaagagagattggattccaaaaaagttttaatattcaagggaagccataataacctgcatcttatttgtctgcctatatctaaaattgtgcactgaacttgttattttggttattgtgaagggatcagatattggcttccataaaccaacttgtatttacttgattaattaattaacgccatttagcatttaacaaactaaaatgtcgtgtttaatttgtttacgtttttttttttaaaaaagaataaggtatagcagtaggtaaagtcgaaataaatttttcttccttacaaattcaaattcgccgttgtgagtcaaatatacctaattaaaaccactcaatcaggcccttggcaactattttttaggtttttctggttagccgtattttttgcttattaataaaattcttttgcgccgagatttaaaaataaagaaggagaaaataagttatttaattaaccctattagaagtgttggcataaatacaggactggattccttgagcaaattggaggagttggacatgagcttcaatgcaatcgacaatcttgtggttcctaaaggtatacaacatgttcaaatattaaatttggaggacagtttaattgatttggtaagggaatgctcattgacacttacccacaataatttaatccgaaattgtatcccaaacagattacagaggtttgaggaagttgaataccctttat

SEQ ID NO: 87722 - DNA, 842 bp, Citrus clementina
  Intron number 1 from transcript clementine0.9_029653m (loc us clementine0.9_029653m.g) derived from phytozome v7.0 (c hr-ID scaffold_17; pos 1837236 to 1838077 reverse strand)
gggttttttccaggtataatgctttagcaaagttagaaaattgtttcgccagaacatgcttgtttgtgaacaagaatcgagaaatatgcaaattctcaatccaataggcaaaattaaaattcatatttatttcttaaacccacgtatcattgatgttagcagatcatggtttcacttttcggtgttgtcagtggcttaggactgcagcttgtgaaaagaagaacttgtctctggtttatttattattgactttctatactgctttacctttccccctccagacatgggttaattagctatttcattcctaaatgtcaaacacgcaatatgtatgaaaaatacggtcttgagaaatttcccctcctctgcctcaatggcttttggtaccttatgagaaatatgcttctgtcaaaattttaaaagatatactatcgtaaattgtgtaagacctcttagaaaatgtactcatttctgtagtcaatgttgcaaattactctaatttaaagacaattcgaagtaacattgagattatttgctgttgtatgatttttcaaattctaggtgtgaacaaaccacaagaacttcatgctcgttatagttattctagaataaccgaaatttctccgatagaatgaataaaaaacacctgtggaaactaattgttgagaagatttaaatgtaacaaatgcttttagctatctttgatggtaaatcttatctctaaatcagtcagataagttgcaatctgtcttcataaaacacctggactattgtgagcttagtggcacgattattaaatctttgctgcatttcgttcctgtatttttttcagctggtaaatc

SEQ ID NO: 87723 - DNA, 974 bp, Citrus clementina
  Intron number 1 from transcript clementine0.9_000653m (loc us clementine0.9_000653m.g) derived from phytozome v7.0 (c hr-ID scaffold_9; pos 574100 to 575073)
tgagtttgatttgactcctagtcaactcagtaaaggtaacttttttactccaattaatcggttttgtttccatttacgcgtttctgatttgtttcgaggtgactcggattagtttcgtccgagctccagctcgtttgtttgagatattttggtcatttcactgtgtttcgtacgtcaagttcagccattgctttgtattttcttatctgggttttggtttttgttagtgaatctattcacttctgctatattttatgttttgtttcgattgttttatcgtattacaacatgttagtgactgttcactgtttgtgaattttgaaactaaaataaaccctaattatttctttaggaattgatgctaatgattttaccatgtaatgaattttttagaggtggtattgaagtgggtttgttttatatcatttatgttgagagtattaacactactttttgttttaaggcacagtctatggattcatcttagaaaccctaagttgggtttgtcttagctgtgttattttattgatttactttccatctataatgacttggtttagctacataggttatagtaatgtaattaaagcatgcaattagtgactgcaaacatgttcacgtttgatttcattgaaaactagggtttcaaatcttgttccttttgagtattaagtgctttgtttatactagatgctattttatgtgtcgaatcactttacatactggcgtttcaacctgtttcccttattgttggtttgtggtagactcaaaactttgttgtttgataccttgccttagatctttttgtgtacttgatcactcaagatgtttactattgctttccatgtgtactgatatcatcaaactgtagcctactaacctatattagcatatggtaatgttgtaactaaataatattcggatttgtgtgcgtagcagattgaataggttcaggttgcgcattagttgctaat

SEQ ID NO: 87724 - DNA, 646 bp, Citrus clementina
  Intron number 1 from transcript clementine0.9_032868m (loc us clementine0.9_032868m.g) derived from phytozome v7.0 (c hr-ID scaffold_26; pos 87655 to 88300 reverse strand)
ggttgcttcccattgttgaaaagtcagaagccaatgccaactttgcaacagctagcatgcaaactttggagaagcaaaatcaaattgaatttgtaagccgaaaagaaagaatggaaaaaggggatggattgaaaataataataataatttattatattttcaattattttattctttgcatagtaattcatttctcctataaatagctaaggatttcattcatttgaaatcatcccaaaattgttaagcttataagtttctaagctttggagagaagtatagagaagtgtgtctggggaatttatctttcctgcagagtgtgagagtactgggaatatttgggtttctaggaagtgagattcgttactcaaatattgtactctattaattgttaaatcaacaattattcttcttgcctccgtggatgtaggtttaattaccgaaccacgtaattcttgtgtcttttatttttctataattatttggtgcgattgattccgcattccgcgcacaacacccatgttgatggggatggcccggaagaatggcgtgaggcaatgtggcaatttgtttatcctagcatgattgactgcgatgatccattgattaatccaccggttggttcgaacctagcgagccaacaggg

SEQ ID NO: 87725 - DNA, 684 bp, Citrus clementina
  Intron number 1 from transcript clementine0.9_012097m (loc us clementine0.9_012097m.g) derived from phytozome v7.0 (c hr-ID scaffold_9; pos 267838 to 268521 reverse strand)
tcccagagctgattttgagagtatacctcactgaggtgggctttttgaatcttcatttttgttcttgtttaatgttccaaagatttgtttttgggactgtccattttgcatttttgtgccaagactgtgcttttattgtttttcttttgcgttttgatgtgtttgattttttttttcctcctttctgcatgtatgggatattctgaactgggtattttcttatttgaatcatttctaggtcaattttttttttcattttctttatatgttttctctttgagtatgaagatgaatgtactgtattttacttagcagaggtttaatgctcatcagatttttgtcatagctgccttactttgtaattgatttgacatttctccgtcatttcaggcctctttaatgctataaaaaatctaattttaaagtgggttttagggattttggggattacaaaattacaatcacatcatcagagacttttgtttaatctacaatttcttgttggttcatcatgtatgtgtgaggatagattgatcgtgttcgttattcttctgtccaatgcagcttattgattcttgtttgtttctgagcttagtaagtaactgtatatttgaatctgtttgattttttttgttttttttgggttcagacttccgacaaggagcagcttcaggtgtttctaag

SEQ ID NO: 87726 - DNA, 1029 bp, Citrus clementina
  Intron number 2 from transcript clementine0.9_006117m (loc us clementine0.9_006117m.g) derived from phytozome v7.0 (c hr-ID scaffold_9; pos 614654 to 615682 reverse strand)
atcggcttcggttgcttcacttgccttttggttggtaatccgtagtccgatatctatcactttccctacttacttgcacgttagcattactatccgtatttgatggccccatcttgccttgtgttgtgtgtaactgtgtgtctgcaagtggaccttcctttttcaatctctttctttgagtttcttttgttgctttctttctcttcccattggtccaaggcctacgttttcttcccatcaattaatacagaagttgtcatagttagatatttatgctcctgtgcgccataatatttatgcttatatcatttattaattatcgcacttattggatttttgcatcaggtagctatcaactaagaggattaaaagaatagtagctatcaaaattttattataatccttttttattgacaggtgcaattacaccaaaaaataaaaaagaaaattaattgaaaatggtatcaaaaccacttctaactgaaagtgtgcaagtagtcacacctagcgaggacccctagctcaaaatcgtgccatctacttaagaggattgaccttcttagactcccaagactcacttaattggattagattactgatgtacgttagattaacatttagataaaggaataagtgatttttttttatataacttatctaataatcataagtacttatttaattttataaattcttatcaaaatttaaagattaaataaattattttgccactattaataaaagtttaaattttaaatttttgtgagtttttattggttgaaagtttttcttaaatgttataatgtttagaatatcttttactcatttaataattttatttcattattttcataacataattttaaaaaatttatctattaaaataattttataatatttaataaaagttttcattaacaactaaataattaatttttttttttttggttataagttctatttataaaagctctatttgaaaaactatactaaagaaagcctaaatgtctaattaacacttaacagggg

SEQ ID NO: 87727 - DNA, 541 bp, Citrus clementina
  Intron number 2 from transcript clementine0.9_006787m (loc us clementine0.9_006787m.g) derived from phytozome v7.0 (c hr-ID scaffold_19; pos 1514682 to 1515222 reverse strand)
gtggttttcgggccaatcacgcctggacaggtgcggtgccgtttcaattcctcagcattattcgattcctgctaattataattagtttcttcctaatcttattgtttcttgtgttgtgtttgattaacttttttttttctttttttttttcagtaaaatatggttgttagctttagatcttttagatgcaacaacttctgataattctgcagattttgcttcatttttaaattgataatgcttggtgattagcggaatctgtgagtgagagcaatttgagcacactagcaaaatgagactgtacacattacaaataaaaaagaaaaggagagagaaaaatgctaatgtctagttttaatagaagttctgaagctgatggcaatcagtttctgctgctgtttctgcatattttgtttcatttggattgttattggtgtcttcatttttggtgttctgaataaactttgcccgacgtatgtaatggagtcttttgctgcacatctcaggtgtcttttctactcggaattatcccagtattcgt

SEQ ID NO: 87728 - DNA, 455 bp, Citrus clementina
  Intron number 2 from transcript clementine0.9_014307m (loc us clementine0.9_014307m.g) derived from phytozome v7.0 (c hr-ID scaffold_73; pos 251781 to 252235)
aatcgacgtaatacaggttggtttatcgttgcttctatttcagttttgattatttgtacgtgaactagttttaatttcagtgatgaatcactttatcacagttctagctaattattgaggttttagaacgaagaaaataatgtacctaaccgaaaatatttatatgccaatattacagaggctaaagtatttgcaatgttgttgtctagcgttaaatattggtcgttttatgaccatcaggagagggggttggtacaattatttagatatcgtgtgtctatcttgtttacaacttgtgttatatttcatgtcttgttgtgcttatcagttgttgatatgttttagttatatctcctaaccttcatgtctttttgcatatgtttttgcactgataagcttcaatatcttggatatgtgcagataatttagtggaaaatcttttgggagattttgag

SEQ ID NO: 87729 - DNA, 920 bp, Citrus clementina
  Intron number 3 from transcript clementine0.9_024201m (loc us clementine0.9_024201m.g) derived from phytozome v7.0 (c hr-ID scaffold_17; pos 4069786 to 4070705 reverse strand)
cttcggaaccttgaagaaggtgtctttaagaatcgtgatacaactgatgtaaccttgaccattgcggcaagactctgcctatttctgatttgacatatatcttttattgactcttaggcatgtcaatacactgaggttttgtctatgagttgagtttgttcattgattttgtatatctgtcgcaaaaagaaaagtaccttcatccaattagttattttgcttacttatcataagtatgtgcagatggtttgctggcaatgaagttcctggtggtctgtatgtgacccatcataatgcatttgatctgtcatttagatgacatcaaatggaaatccaattttcgtttagcatactttcctgaagatagtttatcattaactttgattgtcggaacagattttttatggttaccatttgcttcattaaactggatctataaaatcatatgttacaatgtacccaaaataaatcaagagattggcttaatgatgttatctgtaaagagtaagaggcagtttagttgaccaaattggttagagatcagtgtaaaattttgctggatgcagactaactcactctatttttcatagccaaaaaattggtaggttgaatactaataatctagaactagactaatcattgcacatacagctgaacttagtaaagatatagctgatgataagagaataaaagaaagttgcttgatgaaactcaaaaaactagtctttaacttgcaagcggaggaacttacactatctgcagcagggaaagcaaaattgagttttatatactatgcttgcataaacatcaaagcgttattactaatatgtaatctagaaagcctacttgcttttggatttactgaaggaaaatgtacatctctctggttgcaggtgggtgtgataaactcctgagggaga

SEQ ID NO: 87730 - DNA, 454 bp, Citrus clementina; identical to SEQ ID NO: 79015
  Intron number 1 from transcript clementine0.9_015223m (loc us clementine0.9_015223m.g) derived from phytozome v7.0 (c hr-ID scaffold_9; pos 1227728 to 1228181 reverse strand)

SEQ ID NO: 87731 - DNA, 1064 bp, Citrus clementina
  Intron number 1 from transcript clementine0.9_027144m (loc us clementine0.9_027144m.g) derived from phytozome v7.0 (c hr-ID scaffold_2; pos 3233903 to 3234966 reverse strand)
tcctcgtcatcacttttattgtcttcaaagatctcgtacgtcactctcgattctttatttttttatattgtaaagaaagggaaaaaaaaaacagatttagaattttcatgtaaaaggtattgataactgagatgggtgacttatgtgttgaaaaaaaaaagagaattaacacggttgacttgtgtatcattgggagataatacagaaacatttattgaataagattgtagcagatacagtaacatatattgaatcagattacagtgtgtgtttgtaatcctgtcctgaattttttgcaagtgattgtgatttgattctgactccataaagtgttgataccgctgggattattatgtagtagttatcgtttgaatgtcttgggcttgatgtattgaggaattactttgaacttttcgaagatgggtaaactttattgcttgtgccggttgagaagaattttgatatttgtgaatggcgtctgatcttgtgtgagatgcaaaattgttatttgttagttaaaatgtgttccattatcagataacataaaactatgcatagacattctgtacaatttttgcttcattattctcttggaatgcatcaattatccacttattctctgtacatggtaattaggaaatgtagaagagcatccaattcattggcttgtttgttttatgctctttagcagctatagtttgaacccaagagcattaaattgctgagaaacatggcacacgtgcacaatatgattcttatcaatgatttggaggtgtaattccattttgtttgtattaacctggcaggccaaaatctgacttccattcttaattccttcatgttgttttctcacagtctaggaagtacgcttctagcgtttgatttgcttgcgtcttgaattccagtcatcattagcttctatagagcattttaatagctcttgtgactctgattacaacatgaattgcttggatttctcagtatttgtgtaagctacgaattactactgatttgacaaattctgtgcagatttcaaggcctgaatacaatcagatccttgtcaa

SEQ ID NO: 87732 - DNA, 778 bp, Citrus clementina
  Intron number 1 from transcript clementine0.9_008753m (loc us clementine0.9_008753m.g) derived from phytozome v7.0 (c hr-ID scaffold_19; pos 3268137 to 3268914)
acgttacgttcacctcttttcggaaagtggtaatcccctatcctattaacccaattaacaatattacagcgtcaaagtaaaaatgtgtataagaaatattaaatagttagttgaattgataaaatctcgtatattgaaaaaaaatgtttaagtttgaattccgctcacaacgatgaagagataaatctgcatttctcaagtacgagttattagaatgttttatccaaagtgatatgtcattattcaattggattgattcagtccaatagaaatgtctataaatgaaatgtctatagttcataaaattatctataaatgaaatgtctcatgtcattttcctaattatgaaatttcctaactaaggagaagtaatttattttgactttttcttaaatttcacaacttattaaattgtttatttacccatcttatcatctaaatatctgatggataaatgaattgaaaatatttgaaatataggtaggacaaatttgcttttaatttgaactgaatttcatgaatcacgtggtcctaaagtcaggcccaagtaaaagctgataaaggggcagtctacataggcctgtgaaatttcctatccaactgtgacggaccaccggtcgctatatatatatgaagtatctgtaaaaattgaaatgaaataaaagaattcctatattgaaatgagccttcatgtttgcgccaaaattgaaatgcagtcactaataattttcgcaagaaaattgaaagagagatgattaatcaattctgcagattgagc

SEQ ID NO: 87733 - DNA, 693 bp, Citrus clementina
  Intron number 1 from transcript clementine0.9_023145m (loc us clementine0.9_023132m.g) derived from phytozome v7.0 (c hr-ID scaffold_55; pos 1326070 to 1326762 reverse strand)
aagaacaaatcccctgcagcttaactcttaagcaggtaaagggcttcaatctgatcttcatagtttgcttcttcttttggtttttattttttgtttaattcaatttgttttgtaatttacttgttatgtgacaagctaacctgatccagctgttaaggtactatgttggtttacgctattttgggttgatggggttttggtttgatgataatattgatctgggttttggtttgttttgactcttgttgttgaaagtttgtttctttttgtgtcgatatgggttttggtttatttgctttcttgagtttgttttggtccataggaggtatgatcacattaatgggaggctctggcctcaaattgaatgactttgaggggttttctgctcttaagtaatttgggtcttttgggtctaatttttagagattgtgttattgttgtttgatcattttcctttgtatggggaaattttgtttactttgattgtttggtgctttcacttggagatttggcaaggacctttgatctgaactggatatttgattggttggtgtttattagctttgatccttgctaccaaattgtgcgtatgcatgttgtggaagtgtctgcatgcttatgcatatacttggaagtgcttacgatagatacctcttgaatgcttcctgattttgatgtttttctgaaggaaaa

SEQ ID NO: 87734 - DNA, 550 bp, Citrus clementina
  Intron number 3 from transcript clementine0.9_009792m (loc us clementine0.9_009792m.g) derived from phytozome v7.0 (c hr-ID scaffold_59; pos 130347 to 130896 reverse strand)
acaagcattttaaggacgatcttttggtgaatcctgtgagtttcttctttttttgatgttgcttttggtttttggatatggagcctttacttctaattataaggatcattttaaatataatggagtagtagctagagcgaaagcattgcagtataactggagtgatttcttgaggttttcttttatccagctgcaagtgatgttttgttcaaatgttttctttagtaatcgcccttgatatttgggttgtttaactcatcttgaatttgcaattgtcaacctttttgtctagggatgaaatttcgtaggagaatgttgatataaattttattgttgttcatattaggaataagattattcgagtctggtgctttgcatcaataggtcggatcgtagaaacacagtcactttgacatcttaagtttatggccatctaatatatactccgtgttgcattaatcttgcgaatgtttggcaaatgcttcggatttctaaatgtttctgtggctagtcagtcagaaatcacgaggaggctggataaatccacaat

SEQ ID NO: 87735 - DNA, 678 bp, Citrus clementina; identical to SEQ ID NO: 81189
  Intron number 2 from transcript clementine0.9_033806m (loc us clementine0.9_033806m.g) derived from phytozome v7.0 (c hr-ID scaffold_9; pos 5377529 to 5378206 reverse strand)

SEQ ID NO: 87736 - DNA, 728 bp, Citrus clementina
  Intron number 1 from transcript clementine0.9_017310m (loc us clementine0.9_017310m.g) derived from phytozome v7.0 (c hr-ID scaffold_9; pos 1210333 to 1211060)
tggcggtaactggattgctttgcctcaaaaagctggtatattctaattttcctctctttctctcacacagtacccaatatcaccaccaaaaaaaaaaaaaaaatttcttttcttacaagttataatcaagtttactcaatatccatttcaagtttctttatctttgttagtttagttcaagcaaaattatccatctgatcatgaaatgtaatgtaaccaaaggagagtgttttctttctttttcttttttttaaatttttaaaaaaatttcctctaaatttattattattatcctattatttttcctttaaacaatttgacagattccttcacttcagcccatttcatctattctctgaagggtttgttttcgtctttgcttttcagttttgtatttagtacacacgttagaaacagtacaagaaaaaagtagacttgccagagggatttgtttgtcttcttgttagagataacattttcttctggccttggggaccatcataaaagaacctatacggctatacgattgaaaccctcatgtgaaatcatattattgatcactaatcaataattaatactgtataaatgggtcggctttaagcacatcacatctatacatcttataagcaacaatttctttgtcttatgttacgttattttcaatgctgtaacttatgtatttggttcatttgaatctctttggctgttaaattttcaggcctcaagag

SEQ ID NO: 87737 - DNA, 741 bp, Citrus clementina
  Intron number 4 from transcript clementine0.9_003579m (loc us clementine0.9_003579m.g) derived from phytozome v7.0 (c hr-ID scaffold_6; pos 3147101 to 3147841)
agaatcagtgaatatctacatgtgaggtgaccagtgatccatttagtttctggtttttgatcagttgatgcacacatttgtctcttttatgcacagaataatttaacatagttattattatttttatactgcattgtacgttaggatatattcccatgatctaaaatgatagatgttgcccatcgaggggggttagaatgtgaaccaatactcaaaactaactgctggggagattgataaccggcattctatcccatgagtagaaggttatcctgacacaatatcgttagacaaagcatcatggactatggttccttggtttggtagaaaatatcagtgaagtagaataatatgaaattaatagtctgtgcctagaattggaaggaagatcttgcatcacattgctttttttggctgacaacttatgatcaagaaaggccaagcaaagcccgatttgttatagttttgttaaactgaaagcaaggcagattaaattttggtgcattgctgaaatgaatttctttcaatactttatagcatgtaagttaaatctgtgtgattggagctgcatgaaagtttttcaactctaatgcaatcagctgtggatttgattttaagtatggtccttaaagttgttctttacctttttcagacaaacctctttgagttcattgactgttggatttaaatttattggcgtgttttctggcttacagtatctgaatacaaatcatactctgt

SEQ ID NO: 87738 - DNA, 543 bp, Citrus clementina; identical to SEQ ID NO: 78957
  Intron number 2 from transcript clementine0.9_024246m (loc us clementine0.9_021344m.g) derived from phytozome v7.0 (c hr-ID scaffold_66; pos 607069 to 607611)

SEQ ID NO: 87739 - DNA, 862 bp, Citrus clementina
  Intron number 1 from transcript clementine0.9_011318m (loc us clementine0.9_011318m.g) derived from phytozome v7.0 (c hr-ID scaffold_9; pos 2819078 to 2819939 reverse strand)
attttcttcgctattttgttactcgtaaaattaaggtacggagctgaacagctggttccatcttctggtctgatctatctgttttgattggctttgtttgttttccgggaaacgaggtcgctttccactttgttgtttgtgtctttgcttctagaagcttttagagatctggaaacgtccgttgcgttatcataacaacataatgcagctctaatttctttcttaatttttatttttttgtttgttgtaattgtgttggcgatggacttctttaagaggatcgttagtgttggcgatttctcagttagatctgttttgattagtaatttttttttctgagttttaattgtttgttatagatttattggtaattgttgatttcatcgttttatatcgcatcattttacgtgaggttaattaatgtctctagaaaggttgctcattctttgttactgtgttttcgtgataaggaaattttaactactttgctgcaattttgttttttctaactgaattgaggaatggaatttttttttaaaattttattattatggaatgaaatcgtttttaaaataatttgtaaatgaagatttgcaaaattgggaatttccatcattatttctttatagtgaaattttcgtctgtgcaatgttaaacagaaaaaaaattcatgaaggaaattagtacttagttttgctgtgaatgtgttcatggtcttctcttaatgtttctaatgtttgatgtatgattatttatcaatacatattatctatgtaacatgtttgcatgccttgtgttctaataatttttctctatgtggtacacaggattactagggccctgatctgtggtttactctacg

SEQ ID NO: 87740 - DNA, 551 bp, Citrus clementina
  Intron number 1 from transcript clementine0.9_031600m (loc us clementine0.9_031600m.g) derived from phytozome v7.0 (c hr-ID scaffold_19; pos 1235131 to 1235681)
ccgctcctcttgctcctctcctgtttacttctcaggttttcgtttcttttgttatttcacgtaaatgggattatattttatgattcatgtattgaattactgttggccattgattgttagataatggggcttcgattttcctttttttcaattatgagtagtttgcatgttatacatgtataattatggctcgtttttggtctctgtgatcacacacttgaatttggctttttcttttctctttgttttttcaaaatacgtttgcatgtgttgtgtacagggcgacccacttccctctgtgtgaattaatataatatttatttagccaataaagttagtattgggggatttgacataaggatcaaactggaccgtgatattacttcacctaaaaacttaaggttgaaattaaggcttgaaataccttcccagtgcgtattctatgtgcttgaactacaagtgcttttgattgcttcataatggatcggttgtttaattattattttttgtgattagattattggccagtgttggaggagatccaaaatttg

SEQ ID NO: 87741 - DNA, 504 bp, Citrus clementina
  Intron number 2 from transcript clementine0.9_016147m (loc us clementine0.9_016185m.g) derived from phytozome v7.0 (c hr-ID scaffold_34; pos 428989 to 429492)
ccgcagaaggtacccgctgttgtaattcttgttgcttttacagtagttatctcttttgtgatgttgtttggtttattcctttatatgttgctttaaaataattgtgtacaatctcctaccgtttagtcttctgcaaagtgtttaatcacatgcatactggcatgttgaattggcagttcatatttataatcatacaggtattgttgcaaaagttgatgaaaatcttgataaattaattagatgcttcaggtgaaacttttagggttcctaaggtaatgctactgccacctccttcttagaggattttgcacatattctgttgtgttattcattaaagtgttacatcactgttgcatagatacattggtagtttttgagacttgtatttttctccttttgttcatttgcattatgtgaagtaatttattaatcatatgagtaatttcttaaattttttgatagtaatgggtactttttcgttgttgtcaaaatgtagtatattcg

SEQ ID NO: 87742 - DNA, 882 bp, Citrus clementina
  Intron number 1 from transcript clementine0.9_016081m (loc us clementine0.9_013346m.g) derived from phytozome v7.0 (c hr-ID scaffold_80; pos 52755 to 53636 reverse strand)
cgaaaaccccaccggaattagcttccggtaattttacagaatctgttttcctgtatctttgtttttctttttttctttttttttttcagtttatgtaaatgctttaggacgtgtttggacgtgagacttcttgaaagcttgtcttaggtttaaaaaaaaaagtttaaatttttatactttattgtctggaaacatacactccaagtcaatttcaaatctataacataactgcttctccaggaagcgcttttctgaaaacgacttttcgcaaaagcgcttccaaaatgccacatttgtctctttgtcgataaagaaatttaaacttccgcagtacaacttgtttggattcaactcttttttaaattaatatggtgtgaagccaaacaacaagaaacttcctatcagcattcagcaactttctgggatttattttgatgtcaataagcttggatattgcttgcataattgttattatttattgtttttttgattgattcatacaatgccttggtgggatttgcgttctctttcttgtgttagaaatttgcctggcatctttcaggtcagcggttctccattttcaggtttttcagatgttattttgttggaatttgtatcatattagagaaaatatgaaagatagatatttttgttgtgggtattgtttttttcttcttgtgagtaccttttctggttttgagtatcgattttgccactgagagtgcatttgagatgaattagatatcagatgttgatgattgttatttccaatttagttaaaaagattatatatctaaattcatccaaagggttatgaacacattgctttatattgaaaatgaattgtgatgttaacctcatctttgtgggtgattttctagg

SEQ ID NO: 87743 - DNA, 712 bp, Citrus clementina
  Intron number 1 from transcript clementine0.9_011443m (loc us clementine0.9_011443m.g) derived from phytozome v7.0 (c hr-ID scaffold_48; pos 1458685 to 1459396)
catacggtgtcgtttacaaagccattgatactaaggtaaaaccctagctctttttcgcaattgatttattttttaattttttgataagaaatttttagttaatattaattgatttccatttaatctgtgaacagaaacaggatgataattgttaaattatttttgtttatgagatattattttattttgttgttgagaatgttattttttttaaccaatttatagaatatacaatgtactgcctaggaatagtgaagtgactggtatttaggctttttgaattaattaatatccatctaagtattttaattgtcactttaattcttttaatcttttgtgaatgtttcaatatgttaaacttgtttttattcttactatttcgaatattaaatgatgattggtaactgggagattttgctgtagtttgggtcgaaacttaaattggaaatctagaattgcatttttttttcctgttgttttcatttgaattttaaggtactgaaccacattaatgtgttaggtctggctctggcaaaagaattggttaatgcttgtctaacttgaactaacaatatctataattttattttttcattttacttttagttttactattttttatttatttttatgaaggtgtgaatggttattgaaaactgggtgtttgatttgttcagacaggacagactgttgctataaaaaaaattcgtct

SEQ ID NO: 87744 - DNA, 752 bp, Citrus clementina; identical to SEQ ID NO: 82236
  Intron number 3 from transcript clementine0.9_034057m (loc us clementine0.9_034057m.g) derived from phytozome v7.0 (c hr-ID scaffold_9; pos 3230539 to 3231290)

SEQ ID NO: 87745 - DNA, 466 bp, Citrus clementina
  Intron number 2 from transcript clementine0.9_024590m (loc us clementine0.9_024590m.g) derived from phytozome v7.0 (c hr-ID scaffold_54; pos 1423003 to 1423468 reverse strand)
attgttgttcctcgcagaagggtaagccataattaaccatagactgttctgtactcatttttgtttttagctttaagacactcttaggaagagaggagcaaataaagatttacgaaaagaaggtccctttccatttaattaagcaacagcttttcttttattttattttcttttttttttctcccgcttcccctttttgagagaagcaacgctttgatgagtattggataaaccatgcatgctacagctaatgcaccttaacttttgtttaaaattgcttggtttctttctctccaccaaaatttaagtaaaaggattaaagatgtagcaatatgaacagtgatttctttttaagcatggattaagcctggtggctactaactagctgtaaaaatgtataatacggtgctgatgatgttgaatggtttgtaaaatttctagacaaaagctcgggagcagcggcaga

SEQ ID NO: 87746 - DNA, 1024 bp, Citrus clementina
  Intron number 1 from transcript clementine0.9_023849m (loc us clementine0.9_019804m.g) derived from phytozome v7.0 (c hr-ID scaffold_19; pos 3080189 to 3081212 reverse strand)
ccaacactctgtaagtgtgtattttcttttttttttcttttaaatttggtgcttgctatgaaattttgttttcttagattacgatttttttggtgaaaaaaaaaagattatgattttggtttcaattttgaattttattgtgaaattcagcttcgtttcttcatgagctgctctcagtcgtttgcatttgattgttattcctgcaagtttgaaattttgtcttgaaataatttgtttttagtgaaaagttgctgtttttgtgtgtttgtcttagcatttactcattgtttcctcgattggtatatgatttttttttttctttagtaatcgagatacacacatgtatatgttttccataggggataaggtagggagttgtttgtaattttgcggttggatttctgggtgttaccgctctgggtcttcacagttatctttacttgagaagtgatgtgcgtgtgtgtatctaaatataaaactcaaatgtgaaaggggttgttctactgcacagcttcacttttgctgtagctttgtctgagtgtgtagggtggtggggaatcttttttgatatctagataaattgtgttcaccattgttcacatggccaaatgggttccacttgattatggcgctgctgtcacattgtatttgtatttatattgtgataagggcatagtgagggtcagatgattatgcttttctggtcccagctcctaaaatatccaattcatagtatttttttagtactatttactttgtttttggaagttaaattttagctgtaagtttggtatttggttttgccaacttagaagagcttatcatccttgaaatatttaaaattattttttgataggtgggtttttatccaaaacctgcagtgctggatactgtaattattctttgaatgtctgagttgtagcttgttcacttagtgaattgtttgctatatttgatgtgattctgtttaatttctaatcccaccactatatggttttcagggcatcggattttccaagggagt

SEQ ID NO: 87747 - DNA, 714 bp, Citrus clementina
  Intron number 1 from transcript clementine0.9_013723m (loc us clementine0.9_013723m.g) derived from phytozome v7.0 (c hr-ID scaffold_32; pos 1404745 to 1405458 reverse strand)
tcgaccttcatcagttgaaatttttagtcattcgggttcatttctttacaaaattctattgtttaagtttgattaatagttattcgaatcggtatctttattctctctctttcaggaagtttttttttctgatgtcgtgattcgtaagcatgttttgatcatgatgaacttgcctgtgagcttaagtacgtgaaatgctatattggatcatggtgatcttactgattttgatagatgtgaagcattatttagctgttatcatgtgctagtgtgtatgtatgtctgtatgtatcttagaaattacatgtataatggatcattgacagataagaaagcgcttaaatgttactttattgtatacggtatatttcttgacggtatgacgagaacaccgtacactgaaaatttacagaaagaaaacaatatttccgttataatttaaaacaagtgttgtgtgttatagaatgatcctgagaaccgtttttctttttctttttttgttttttttttggggggggggggggctatgcaatgttggcatatgatttgttcacttccgaagagaagtgtcacctattacaggattttcttgctatatccaaatgctgctttaagtttcttgaaatgaattattctgatttatgcatgcagtatgtagcatctgggattgatttacttgaaaagttgattaatgtccacgtttgcaggtttcaa

SEQ ID NO: 87748 - DNA, 441 bp, Citrus clementina
  Intron number 2 from transcript clementine0.9_034053m (loc us clementine0.9_034053m.g) derived from phytozome v7.0 (c hr-ID scaffold_2; pos 2851567 to 2852007)
actattatttcttggcaggaatcatatctgtttttgcatcttctgctgttaagatcccaattattagccacaaaaaaagaagtcaaataaagttgctaattgatttctaatgacatgctttttcaaaaataaactgagagtagttgagttgtgtgtcccttgtagctgctctttccgctttatacgaccaaccaggagagaattttagatgaatgttgtgtttgaggtatgaatgatttttatgttggacactgatactcttttaatttgattgttgacaagtggcatcttttttttttctccctgttatttgaaaatgtgtttttgtagggtatcatgatgtttgggttgagagcttctggatttgtttatgccttgttgtttagttacttggtgcttcttgcagctgctcagactacagatcctcaagaaggtatttgc

SEQ ID NO: 87749 - DNA, 403 bp, Citrus clementina
  Intron number 1 from transcript clementine0.9_027927m (loc us clementine0.9_027927m.g) derived from phytozome v7.0 (c hr-ID scaffold_19; pos 3398525 to 3398927 reverse strand)
aagtaagtgaattatcaaacacttccatgctattaacgtagataatatatacccataccgttttgtttgattattgttacatggttatgaaacataacgtcaccaattatttgcattaggaaatacagatgcccgttgttgcatgcattttgtaaatttgatatgtaattgatagtgatttctatcttgttcatcctgaatgtccaatgaagcgcttcaaaatgccttcgaaacaccaatatattgattaacacatgattagaagaataagatattctgttctgtggacgtcactttatgggatcaatgtattctcttagttatttagattcttaagtcaagaaacttaatcgtttgttttcatgtaggtttattgtgagacggtcaacagtggcaaattgtc

SEQ ID NO: 87750 - DNA, 485 bp, Citrus clementina
  Intron number 4 from transcript clementine0.9_020140m (loc us clementine0.9_020140m.g) derived from phytozome v7.0 (c hr-ID scaffold_32; pos 2097917 to 2098401 reverse strand)
ttactggcggattttggctggtaagctgcttggtgttattggctcctaatgttttcttctttctattaatgcatctttgtggttttttctctttggttcatgagtaagtggtagcaaaatcgcgctcatctttctcatggttcatttctttactaagtgtttcttatcttttgtttgatttaaattttgaatgatccgaaatgacttatggagcacaagtttagtgattttatagctcaaaacatgattgtaactacagtttcaccaaggaggatattgaatttttattaccatggtgtggtctgtaatcagaaagaaaaggtgaatccatttgtaattcaattgtaaatgactggaattgtgtatgttatctgaggtctaatttcattgtaatatatgggttgaaattgaagcaatactcctaatcattttcgaatttataaacaacagggccttccaggctacttctgccggaggaacctccc

SEQ ID NO: 87751 - DNA, 853 bp, Citrus clementina
  Intron number 1 from transcript clementine0.9_016700m (loc us clementine0.9_016422m.g) derived from phytozome v7.0 (c hr-ID scaffold_80; pos 679466 to 680318 reverse strand)
caagaagagaaaaaactctcagctttctgaaaccggtatgttcttttgcttagatttttctttattaagttctttgttttcttttgattataactctcgaaagtgttgatttttttttctttttttgaagctgattgaaagctatctgggtttgttttgtttcgactttttgaatataaaaatctgttcttttttgggttttagcttgctagcattcatggtatctacattatccagcttgctattttttctttttgagaaaaggaaaaaaaaagttcctttggtgcatttggatatggggctgaaaagcttagtatagacctcacaagtcaaagcaagtagctggaatgaaaggaattagaacaatttgattgggcaaaattatagcgaccaatgatgagaatgtcctagttgtgaaattgatttgatatgtatggtcattgaatatgttgaatgttagtgatcacggccagtgtcttttgatgaagaatttgtttatgcagtaaattcactaatggttgaataacaccaaaaaatcttgtcacattcactaagggattcactaatcgttgaatagcaccaatgatttatgttaatattagctagatgccattaatttttatttatttatttatttttataaatatcttcatttttcatttttactcatgaaggaatgtactcaaatggaccagagtcatacaagtatgcactatgataatttgcaataagagccatatatgttggtttattgccaaatgacagtgctttttcctttttcttttcttattttctttatttatttatttttggtcgttttcagatgaaaatttgattacagtaaaagaagaca

SEQ ID NO: 87752 - DNA, 452 bp, Citrus clementina
  Intron number 4 from transcript clementine0.9_024890m (loc us clementine0.9_024890m.g) derived from phytozome v7.0 (c hr-ID scaffold_26; pos 2565890 to 2566341)
tcttcacattgattcgaaaaggtattatgaagctgcaaaactcagtttgttacttttgttcggattttgatctaatttttgttcaatggtttgttatttaaattattcttgcatgactgaaacgcaaataaatggaaaaatcttcaacatgttaccctattgccctattggtttgttggcaatttatttcaagcatattaaacttatttgtaaattagtattctttttaattggcattttatcacatttctgaatgtatactgaatgctgtgttccagcatccttcaataaatttaaagttgatgtcaatgtttccttctgccaactctggtttctctttcttctattccctcttgctgtgtgcgcacacatggtgtttcatatactctagaatattttgaaaccaacctaggttgaggcttatcttgctaattaaactcatacagttgctt

SEQ ID NO: 87753 - DNA, 723 bp, Citrus clementina
  Intron number 2 from transcript clementine0.9_006420m (loc us clementine0.9_006420m.g) derived from phytozome v7.0 (c hr-ID scaffold_6; pos 4850781 to 4851503)
tacttcccacaggtatggttctagattctctgtatggtagctgagaaagtgtgaaaaaggattttgaagtggttattacatgcgtgagaagctactctatgctcataatgttaattggttttactgtatgagttactttcagtgctaaaatatacgagatgtaaagaagatagatggggtttgatgttctgtaaacaaagttgtgagtattgagttcattttgtttaggaaagatagcctagcctctgctgagtcctttgcctcatttttcagttattgaacaaattttgagtgttgatccttggagatctgttgtctaaagtctgttaatgatggtgaattaagaaatattgcttcatgttttggttgcgtcatttgtatcacacagtttatgtcactagggaaaggggaacatctgatgacccaccatgcatgaaaaataaagaatcacaaagaatcttccaacaactggatctccagagactggagaagatttatttgattttttttttggtaccaatttcatttttctttttgtggtgataataagaggtgaggtttctgattatttttatctgcattatgatgtttcttgtgtcccttaaaagtgtttaatttgtcaaattcctgttacatattaatattttaggctgatttgtgaaatttggctatttactcatcgctgcagtttataccatactccttcatcgagaaagaagccag

SEQ ID NO: 87754 - DNA, 747 bp, Citrus clementina
  Intron number 1 from transcript clementine0.9_013136m (loc us clementine0.9_013136m.g) derived from phytozome v7.0 (c hr-ID scaffold_17; pos 4180227 to 4180973)
gtggcaaaattaccttcccttcttgccttaaacaggtcattttgtaaattaacatatttttgttgttttatcaaatgattgatgaattttgcttggatcttgttaattagagtttgattgatgtccattttttgtattttatctgtttaatttgttgatttattgttattagctaacggggtatctctaaaattctgggcttttttccccccaattatttgttaattttggtttcggtgtgaatggttgttgcaaaagttgaatgactgggaactgattttgatgtgggtttggttacacgagactaagagagtgtaatgtagatactgagaaagaaagagcgagcaaatttgttctgggaatattcaatttatgggttttactaaatttaatcatgagtttgtgttcttatgaaaaattttaggaattttcttttttccttttacttgtgatcatatttgattttttcattgtaggaaaattaaagatgcttttagagtgaaataaagttagaaaagtttttgtccttgttatattaaagggttatttcaaaagtctttttaaaaaagtttgaactagtgtatgtaacagatagttattgcttgcccttgactcttgtatgttttgttgaactggcttttggcttgttgatttggtggttgccaatgaaattgttacagttctgggattgatgttcttgtcatttatcttttaaatgcagccgggtccacgcgagttccctcatca

SEQ ID NO: 87755 - DNA, 778 bp, Citrus clementina
  Intron number 1 from transcript clementine0.9_028359m (loc us clementine0.9_028359m.g) derived from phytozome v7.0 (c hr-ID scaffold_94; pos 475046 to 475823)
ttccacctactacctactgaaaggatactgcgcaggtacatattggattatgagttaaagagtaattttatttttttcaaagaaaatatccgaacgagaagaagaaaagggaaaattcttggtgctccacgagcgttatgaaattattgatttcataagtgtgaatgagaaacagaaaatgctattggagcaccctagactttactagcaagagttaaatgtcaaatgatgtaacattcctctattggatggtaagatgatcagaaaagagttgtaaaatttatcatcaaatagatgattgaaattattgatttttaaaatatccaccggattacttgtaaatgagtaaagttttccaattactgtaactatctatgtaaacagagaatcagagactaaaaatggtggagttttatttagttgtagccatgatttagtttgatcttctctttgatttatttttttatttattatttcctgggcaggcgacttgatctgtaatatctcaagcggctacaattgctccaactgtcctgacggttataatcgtctctcatatggttgcggataaagttttcaacaaaatctcgggttaaattcattattataggtatgcatgtcgatccgttaatttacatcataacaaattaataatgttttttaacatatatttcaaatgaaaatactaagtgttcatacgttcatttgatgatatctttcattattgtcctcgagagccgcaggctgcggtggtgggcttgcgttattctttctgctc

SEQ ID NO: 87756 - DNA, 694 bp, Citrus clementina
  Intron number 3 from transcript clementine0.9_015641m (loc us clementine0.9_015641m.g) derived from phytozome v7.0 (c hr-ID scaffold_17; pos 663352 to 664045 reverse strand)
gaggtatgtcatggtcaatccctccctcccccccccccccctcccccgggcctctctcttctgattcatgtatgctatctgcagtcaaaatgcatggattttaaatagattgatggtaaccaacctagaggaaacaggtttataaatgtgtcatcacccatggtcagcattctgctggcactgtttataccttgacgaagtatgtcccgcccctccgacgaacagagtttttggtttctaaaagaatgataatggaaataaattttttaactgtgatgttgatataatgctgtagtgttgagataatatacccaattgaatgatattttgtgctgattgttttgttagtttatgcttaaaaatctaccatcctgtctgattattcttgtaagtatttttgtagtggtataggcattttctgttattaaatcgagaatattttgctgtttaccctttaaagcatgaaagtaaatatggacaaaacagtaggtcagtagctgttagtgttttggtattggtgtattcacacacagcatcttgtgcctgtgtgattttgtatggattatttcaatcaatgaattgtgtattgcatcattatggaatttgagcttgtgcctaaagcatactgacagatttcatgtttgttttgttgtcaacagaaaatccaacagtttcaaaaactgaaagtgatacc

SEQ ID NO: 87757 - DNA, 691 bp, Citrus clementina
  Intron number 1 from transcript clementine0.9_015641m (loc us clementine0.9_015641m.g) derived from phytozome v7.0 (c hr-ID scaffold_17; pos 664953 to 665643 reverse strand)
gaagagccttttctgtgttcgttctctctgttcaggtacttaatttactgatgttacagttgattatgggtttgatttatttttatttaataatatcatgggtattaatacttaactggtttagatgaatacttctaatttgtgtttatttagggttttctctgaattgggtttacgttaatttctagggttcttttggttcttatatagacttgatgcagtttatgactactaaccctagaaattactattattgtaatgcctgcgaatcaaaacccttgtgagggagtatgtggaagaacattacttttatttctcatgttgtctggtaacgtaaaataagaactaatacaaaggattgacggtacccgttagtctggttagtatgttgttttaactaaaggagctattacagctgcaatgtgttccttgagatacgtttgcgtagaattaccaccactggtcaaaaaataaatatataaataaacttgatcatacccattggtcttgaattgtgcctattgctgcatttctcttttgctaatgcgaatagatctagttttctataatattgtgtactactattagatcttgtaggaagttgatgtgtttggaacaatggcagtacaaactgatttatatgttttctgtaacagttctggatattgcattctgactttttattaagtta

SEQ ID NO: 87758 - DNA, 517 bp, Citrus clementina
  Intron number 1 from transcript clementine0.9_021854m (loc us clementine0.9_021846m.g) derived from phytozome v7.0 (c hr-ID scaffold_19; pos 3459704 to 3460220)
ttcacgacaatcaaagccgcgtttcaactactctcgtaagtcttttctttctttcaagtctttcttctctcctttcctctctggggccttttcttttcatcgatttagccatgatctgaggtgaaagattagtcgctgcatttgatattttgatttgtaattctgggttactttacttttagttttatgtatttttatgacctgtttctttgctagtctcgtcattttatcttttcatgtaccgcaatttaacagaagcatctgctacgtttttgtctttgcttattatctatcgtaatatatttgcattttaatttctggctgtaatctaagaattacttttattgtgtttaattgaatttatgcatttgttatcctagaatactccgtataattttgtatattgagaagattaaggggatttgattgattttatctcattttcttgcctttattctgttgcattttttcttgcagtgaagaagattagttctctttgcgcgtgtcccgttctctt

SEQ ID NO: 87759 - DNA, 489 bp, Citrus clementina
  Intron number 1 from transcript clementine0.9_014822m (loc us clementine0.9_014822m.g) derived from phytozome v7.0 (c hr-ID scaffold_55; pos 1382804 to 1383292 reverse strand)
ctcattttcagacactcaaccgcaattattgaaaggcgactatttctttttcctttctctattcattttcacttaagaccttccaacctctgtttggttcccgagaaaatgctagaaaataaaaaagaacgtaaagacttttttaatctttcggaagatcgaattcatacactttagctgcattatcagttccatatataagaaacatttgtttgctttttcttccttatcccttttctggcattgatttagttagtcgaccacgatacctggattcggatcccgtagctaagtgtataatgcttttgtttggttggtcgttttaagaataatcataagatcaaagctaactgctactcttttatcttcgctaatttattagtttgcttacatatgtgtattctgatattttcgtcgcatttgttagctttcgtttagtattatttctctgagtgtctcttcttgactctcattctgcagggtgaatat

SEQ ID NO: 87760 - DNA, 872 bp, Citrus clementina
  Intron number 4 from transcript clementine0.9_024880m (loc us clementine0.9_024880m.g) derived from phytozome v7.0 (c hr-ID scaffold_26; pos 2547834 to 2548705)
ctgacgtgagaaatgtgagtgttactatctcattcaaatgttaggccaaatacttgttgggatgtataggtattactgctaaggggaatggtgcatcatgtctaccaactgtggattttgattcatttctagatttgtttgacaagtttgattcaatacatagatacttaaagttatatgtcgtttgagttttgtgggattggttttattaataaacatcaactaagatccaaattcttaaaggaatagctgtctgaagcattcatatgatgcttggtaacaattttcttaaaagcaatggggttttatcaattcaacgcattaggtgcatcgactgccaggagatgttacctgctatctgatttgctgatctgtcttgagatgttattttctccttgatgtgaaatattcttattagcttgagtttcatatcattgtggattttccttcagattattatatcaacatgctgggggcttgttccttctacacagttatgaatcacacactgatgatattatgtgtactatcaaatcatgatataacttgctttaaacttttgtctcttcaactacagatttaagtgccctacctttttgaaaagttaggcagtcacaacttccctttaagtttctagcaaatgagattaactagtttccttgtgagtaataataagaaatataatgaaatgagaccttgaaaaatgaaaaagaagagttttcagtgtatgagcttgcccctgattggattgtcttgttttgatttacttattagtctatattttccattgtttggggaccagtgtatgggggtctgacttaatcctggcttcattttattcccaacaattgtctagttcttcaggaggttcc

SEQ ID NO: 87761 - DNA, 650 bp, Citrus clementina
  Intron number 2 from transcript clementine0.9_009953m (loc us clementine0.9_009953m.g) derived from phytozome v7.0 (c hr-ID scaffold_22; pos 1980865 to 1981514 reverse strand)
ccttcaggtagattttgtatttgtgtctggttataatgtttaccatattttaagtgtttcatgctagttcatttagaaatgctcatttcatatatttgtaactgtcccctgcgttgcaattatgctttcatgtgaataaatgttgtattaagagattaactatataaggatttaatattgttccctttaggacatgttcatattctcttcacaagtctagtttgcttaaattaattttgttgttgggctacaaactttcatactattgtattatagttcgtacattgagaacttctcatttccctgctttcaactgcttgtagcgtgttggttgtcgttgctggacaattgggttagttttgattaatgttgattgaggatgtatgtactattggacactgttttagttcgatggtgcttaaaatagaactgtgaaattagaacattatctcagtccataaattttgggatgtgattatgtgaaacatggttctttacctgcttctgttccctttttctgtatgcagccataagtaatatgtttcattgaacatatcctctgtgtgtgtgtgtgtgtgtgtgtgtgtgtgtgtaaagcatttttcatgttatatttgatgtttttctgcattattgcttcagacttatcc

SEQ ID NO: 87762 - DNA, 865 bp, Citrus clementina
  Intron number 1 from transcript clementine0.9_021537m (loc us clementine0.9_021537m.g) derived from phytozome v7.0 (c hr-ID scaffold_22; pos 1871159 to 1872023 reverse strand)
gacgttgatcctcgtcagtacgaacatattgtaagtcgttacttttactctttttttttcagcaataatttaataaaataatgaagatttttgggtttatgatggtctaattattactttgtattaattttagtaatgtttgttcaaatcgcatgtgatggtaaatttgctgacttcttgttctggttaatgattgaaagttagaatccctactttcgtgtttattgctttgcttcaatttgaaatactgtttacatttttattttgttctatcatctgtgaatgtagagctagggtcatgttgctggtcgatgaaaatggtttatgtggattgctatgttattttggcaagtattcgaagcttttgagagtaatttgtcgatatttttgaaacttagataagagaagtatgtattttgtgtaaattctgatagtggtttatgtggcttacggtagatgagctttgatgtcagatacttagattgaacatgggacttaagaattaccaattgtgtaattgaatcaatgtgtaacaagacttctcaaaaaaaaaaaaaaaatacttcagattatttctatcgatcagtatttggttgtgatttactgctgcatttgtgccagcgtaaggcttggccaattattggaaaatgccttcttggtttggcaaggggagtgtgcatagggaaactcagtggaaatgttcttggtacagtcactgacttttgctcatgtctatgtgctgttaccatgaaaaattcccataaagacacagctaaaatgcttgttaatgtatccttataaccagttaatgtggcatactttatctctttggggtttatctgtacttgtcacttgcaggccatta

SEQ ID NO: 87763 - DNA, 1023 bp, Citrus clementina
  Intron number 1 from transcript clementine0.9_002354m (loc us clementine0.9_002354m.g) derived from phytozome v7.0 (c hr-ID scaffold_2; pos 5957264 to 5958286)
tctctccttcttgttgaagaaggactcattttcacgtacttattctcatatttatttactactgattgaagcttttgctttcatttttcttttctggttgcttaatgagttcattttcactctgtttttttccccctctttgcctgacaacatgaatctggtgatattgagttatggatgaaacagtgtttgctatgagtgtaatgaactgcgaaagcaggatatgcacagtgcgagtaacggtttggtaatttggtttaccagctgaacttgattatgctgttaagtgtcattagctaatcgtattataactatcaaattgcttttagctgaataagtaaatatgattgcttaattttctgaacgaaagcaagattaatatgtttgtaacttcgtgaaacttgacgtgattggttctaaaaatagcgagaacagagagcaaagttcatttcgaagttaatgtagaaattgtatgcttgatcaagaatttgagctcttttttctcaaaattgtggcgacaatgtgaagatacctttatcgattttggaattgattagtagagtaagtttggaggaatttttggttgcttaatgcttgaagtgcaacaggtttaggaaattgagttgttgttggatcagcggtaaattataattggttgttgttatgcagttggtttgaagtgtttcatagacaacagtagaattgtaatccattggatgattttaagacatcaatgtcatcagagattcctatctattgttttcttagattctaatgtaatatggttattgcatttgcctcctcttttgtggttagaagagtaatgtgatcgtaagtgatcacgattgtcctttgtgggaggcacaatgctttataatttctttttttttggtgatatgggggcgttcctatttctgtttgtaatagttgtgtacttatcttagttgtcttgttatatgtgttaagctaatttgatgctcgtttgtagggaagatctttgctggaaagtcttcaaaagagttt

SEQ ID NO: 87764 - DNA, 814 bp, Citrus clementina
  Intron number 3 from transcript clementine0.9_013830m (loc us clementine0.9_013830m.g) derived from phytozome v7.0 (c hr-ID scaffold_19; pos 2326137 to 2326950 reverse strand)
ccacccgtgtatgttacgataatcttcaatctcttttggaaccttttctaaacacacaagagatttcgaaataaaaaaaaggtcatttttgtcatactataagccactgaattaaaggatctaagagcatagaccaactatgttggttttccttgtccaccaacgttttaactttactaatcatccaatctattagagataattttgagaataaaattcacaacgttcattgaatgtctttgaagtaagataaatcaacttgctatgcgagtaacaacatttaaatcctcatattaattacgtttagaatactgatatagtttatgtatttacagtgaatgaattcctatgaagtatgaataaatgaaataccccttttggatctacttatgatgtgagatttctaattttaaatatcattgtcattttcacatgtttattatgaatgatcaacatttaactagagtttatatttttatctgttaacaatcacctatgaattttattatgaagaatggctttgattatatgagaatcttaagtactttcatatatacctgctcaaaattacatataatggtaattttgattattccgatcagagttgggttaagggcttatatgatataattattttttttcttttttaattaaaaaaaagcgcctgattactcgagcttgcgcagtttcatgtagataattgacatggttaattgattactctaatattagtttggttaattcttaattatcattttggtctcaatattatgtggtagttgttgatagaggaaggtgcggtggagctggtggt

SEQ ID NO: 87765 - DNA, 833 bp, Citrus clementina
  Intron number 1 from transcript clementine0.9_018233m (loc us clementine0.9_018257m.g) derived from phytozome v7.0 (c hr-ID scaffold_32; pos 175777 to 176609 reverse strand)
atacccctaatttataatctaacccctcttgttaggtccggtttcttctttttctataatttgtgggaggaaataattaattcagaaatcaattttttagtcatcgcctttgtttaggtatgcacgtgaaattagcgtttttgttattatatacttgattattggaatgtttttgagttgatgagaggattgttatctaaattttgttcaattgagtgtaaagtttggtacttgttgggtttctattgtttctgtgtagtggaaacaggatatttgggtttatgtaagtttgttttgtgaattttttgggtgggtttgagttgacttttgaaaaaatagaaagttaaataaaaatgatgggttcgtgattttgtttgattatctgatagaacaatattttatgtatgttttatttttgttgctactagttgaaacaagaattgaaggtatggaattttgtaggtgatgctctctgggcatgtgatggaagttgaggcttttgttactctagatggaaattttttctaatagatacccagtggaatgggaaggttgcaaattttgtattgggtgcaataactttaacttaccttgatcgatgggaccctgtgattcccagtgatcatgataatttatttctagaaaacttcattcaatgttaaaatattttgtgtattcttggtattagttgtttctggtttgagttttgtctcgtaagttttgataggattcttaattttttaaagctgtaataaaattccttggaaaatattattatagtagtatctatatcatattgtttcttgtgctttatttatgcagggtaactcaat

SEQ ID NO: 87766 - DNA, 913 bp, Citrus clementina
  Intron number 1 from transcript clementine0.9_014211m (loc us clementine0.9_014211m.g) derived from phytozome v7.0 (c hr-ID scaffold_17; pos 1904925 to 1905837 reverse strand)
gggttttttccaggtaaaatgatttagcaaagtttgaaaatttttttaactagaacatgcttgtctgtgattaagaataaaaaaaaaatcctcgcaaaactctcaatcacagtatttattttagaaatccagtctccattgatgttagcatatcatgagttttcagtttttcccatcttgttctttcgctgttttcagtacttttaggactgcagcagcttgtgagatgtgaaggaagttgtctctgtgtttgtttgtacaaattatgaggagatatgagaagaaaacacccatcatttatttttgaaacccagattccattgatttatttgtttttgactttctttattgctttacctttccaccagagatggattgggctaggattaatttgtgattttctcattcctaaaagtaactgggcagtaagtatgaaaagattctcttgacaaatttcacctactctgtctcaataacttttggtagctaatgagaaatatgcttctgtcaaaatgtgataaaagatatactaattttataagattcctggagattatttgctgttacatggttttgcaaattcaatttgtgaaccaaactagaagaacttcatgcttattattgttattcaagaatattgaactttctgcaaaacaatgagtgaaaaacacttgtagaaactaatcattgggaagatatataagcaaattaagattggtggttcatgcaacagcaatgttctaggttgaaatgcaacaaatgctttcagccatctttgacggtaaatcttctctaaatcagtcaaataagttgcaatctgtctcagtaaaacacctggaccactgtgaacttagtggcatgagtattaaatcttagatgctgttcattcctgcatcatttcagctggtaaacc

SEQ ID NO: 87767 - DNA, 543 bp, Citrus clementina
  Intron number 1 from transcript clementine0.9_012145m (loc us clementine0.9_012145m.g) derived from phytozome v7.0 (c hr-ID scaffold_22; pos 1968006 to 1968548)
ccagcacaaagaaatcgaatctagagttcgatctggttagtcgcatactaccattagcaagccctaaatctggtatttctgagagaacggttactatatcgtcgaatgctttgtttgttaggatttccttctactattatctccgaattagtattttcttatactttaggatattatttctagggtttttgattaattgccgacatgcctaaagccagagcactttattgggatctaattttattagagtagcttcagttttaaatttcttgttattagcttagcattagaaaatcggccataagtcagattctcatagtgaaagaagacagtacttgtgaattaaacctggcgggaagtctcgtagttgttgtttgttaatggatgtcatggccccattaatttttttttttagttaactagttatgagatcgagcaattttgtgcttaatagtactgattttcttaaggcggtagatgatgttgacctctagtcatgaatgtgcagttaaggagaatttgagagctgcaaagaaggagttc

SEQ ID NO: 87768 - DNA, 528 bp, Citrus clementina
  Intron number 1 from transcript clementine0.9_011516m (loc us clementine0.9_011516m.g) derived from phytozome v7.0 (c hr-ID scaffold_54; pos 277052 to 277579 reverse strand)
tattttgctttttgggcttagcatttccagaggaggtaaccaaagtttcttcgttggctttggatttgtttctgttttgctttctaatatttatgtgaattgtggaggtttttcgagtttgttttgaaattgtaataatgggatctgaagtctggagaaacagctagtgggatattattggttttgaattcttgttcatgtttttgttaaattttgaaattgttagttcagggctccagttgaccttcactcttgaggcttgttgttatgttgaagatgggtgcttttaatgcctttttttttttatgttcttgttgaatttagggttccatgaaatgagtcgatttgatttgatattgaaatacaggacattggcattagtcattttctttaaaattattatgcttgagatttcaggatttaagattactaataaataacagttcgaagtcattttaaattttaaatttgtgaatttatttagcaactgttttgtgttggtttcctttgctgcagatttatcaaagg

SEQ ID NO: 87769 - DNA, 528 bp, Citrus clementina
  Intron number 1 from transcript clementine0.9_020925m (loc us clementine0.9_020925m.g) derived from phytozome v7.0 (c hr-ID scaffold_2; pos 3384114 to 3384641 reverse strand)
acacgtaagcattttagattgtctttcttctcaaagcagttgcgtatgaataaacgctgtagcatttagcttctgcgcgtcggtttcgtcgttctttgtcagataaattcattgcgtttagtttagtccaagttttactcaatttcaaagccttatcttttcttcttctttctctcggcttctccgtttaaattatttccaagtttcgttttgctctgcgcaaaagcaaaagccatcacaattgtctttatcagctacgaaactgcctaaattccttctgttcatctcgtttcctatcgatattggcttcaaggtatcggttaattccttatctgtttatgaattccggttgttgctgttgctgctgcttttgtacgatctgttaaataattgaatctattttgtttcctttgctctattattctgttttggttttgtgggtattgattctactttggtggtgttaaaagtaactaattaataaaaaaaattgagcaggttgattatatatattattgttgagatagc

SEQ ID NO: 87770 - DNA, 522 bp, Citrus clementina
  Intron number 3 from transcript clementine0.9_027038m (loc us clementine0.9_027030m.g) derived from phytozome v7.0 (c hr-ID scaffold_62; pos 148823 to 149344 reverse strand)
ggactgtccctgtgaactagcttctccttttagtggtaaacttcactcatgtttattgttggaagggttgtgggatggtgatggtctgtatgtctgtccagtttgcatttgttatttggttggtatggtttccctgttcttcaggattggttgctcaaggcgtttggttttccgttcaatgattatttaatatgcccatttgcatatcattgtccattatgtatttcttgagcacatagtcacatagacaccaacgttcaatgattattagtatgcccatttgcagatcatcttccattatgtattttttgagcagatagacacatagacaccaaatgttcttgctgcataaaagtcttaacatccttagtctttttgtctttaacttagctgtttaagggtggactagagtcgcaatgggttttaggtgcaaatctttgcctagcaaaagattagcagctctacattcttgttgtcaatatgttttcatttatttccaggtctatcgtatttatctaaagg

SEQ ID NO: 87771 - DNA, 881 bp, Citrus clementina
  Intron number 4 from transcript clementine0.9_024530m (loc us clementine0.9_024530m.g) derived from phytozome v7.0 (c hr-ID scaffold_6; pos 3259244 to 3260124 reverse strand)
aagaaaaccaagaagcttcctcctgtctggaaatagtaagccaaatattctgttgctgcgacactgcatttttcaaaattttttaaattgatattttagaattgtgtggttttgcttgctctcaacagtattatatattgtttctaattggttttgcttgtgagtatctatctgaatgttgcttgtttgtttagtttgttggaattgatgctttgattagaagatgcaattaagctgttattaataatctaattatgtatttggtttctgaagcttgttacctgttgttatgttgttatttctttttctgtgcattggaacatgttgatacgtgtgcagagcaatgatgctaaaatctatgacacacttaccttacatgagcattggtatcctattgtctccgagcttggtgcaaaaggatttctcataacctaactgcattttgagcttctttatgtatattgttttggcctatgttttctttcaaaatgtgtcatgtgtagggaagaagtgatgtagtggttgagttattactgtatggaattttcatgtatggctgagtgcacatgcatatgcctgtacgcaaatgctcatgttatccctcttattgaagggtggttccttgtccacatggttgtaacaaacatggcatacatgttttgataatttcatgtctgtatgtaacaatgtttctttttcaaaaattgacctttggctttcaattaagctatgaagcctgcagggttcctcgtgatcggttcactttgtgataagtaaatatgctgacctaactattctgattttaacttttatcatcaactcactggatctacctttgtcttgcagtgagtctactaccgccagcacacttgtggcttagg

SEQ ID NO: 87772 - DNA, 1037 bp, Citrus clementina
  Intron number 2 from transcript clementine0.9_015673m (loc us clementine0.9_015673m.g) derived from phytozome v7.0 (c hr-ID scaffold_34; pos 70503 to 71539 reverse strand)
tggcggcgtcaatcggagactttatatctctcaaggtttcaaattctcattctctggctttaatgttaattcaaatgtgtatgttgttatagtgtatttacataactgactgacttgtgacagcgcatgttagtttgtatttaatgatttgaaaaagaaatcaacttattatgagaatacataacttgaccaggtatttatgttttctttttttaatcttttttgtaacaataaattatgtgttgggaaccacaacatttggctaactgtttgttttcttgatttttcgtagccatcaaaacagatggtgatgaggcatagggtggtatagtatggccatgaatattgagcctggaatgttaatgttactgctaatttaagaaataaatggaagtaaagcatgtccttcaggaacaaattgagttcaattcaatataggctcaccctcttgattgttggtggatgtccttatctagttttatgaaaagatcatagtaaattttcttttctcctagattaggtcacttgtgtattgaacctattttaatcttctaaaaactactgaaagatagcaagtttatgctgtttcctcttaaattttactttaatagacagttctcaaattttttgtaatcatagaataggtttcatgtggtttcccaccacacaagttcctttttctccatgtttacttcatctgaattaggtgatgcagatagttggcacttactgcagttcaagctgtggaaactgtgaaatgatcatccgtgctattgatccaaatatattcataatgatgtaataagcgatttacttttgttctattggacctaagctgatgagtgtacaatctgacacgatgtcagcacttattttattaaccacttgtcattttttttcccgaaaggcttattattattttttaattttatcctgctcacttccatagttaacaagggtgtatttgtgatgtatattgtgtcttcaaactattagtaatagataattataacattgtacacttcatcctgcagtta

SEQ ID NO: 87773 - DNA, 454 bp, Citrus clementina
  Intron number 2 from transcript clementine0.9_000038m (loc us clementine0.9_000038m.g) derived from phytozome v7.0 (c hr-ID scaffold_26; pos 2710951 to 2711404 reverse strand)
cgaattttacccttctttgcagaacctgcatttcggttagttatattattattttgttttttgaattttcctgatagtatttgttctagataataataatgccatgtggtcacatgaatagaaaggaaaaagaagaaatgaatactatgttctgacaacttagatggtttcgaattctgaaataaataccagtggaaatgctaatgttgagagcttttgcataatttgggttttagagcttgttcgacttttgactttttctaggtatttatttctacatcttcacttcccttctgacgaatatgagaggatttcaatctcaacatgggagttggattcagagggtgcaggcagtcatgatgaccgttaaattcctgccttgtttagttttctgtttgatgttgaagtttctattttaactgctatacatttgtgctatttttcagttctcgac

SEQ ID NO: 87774 - DNA, 888 bp, Citrus clementina
  Intron number 2 from transcript clementine0.9_021245m (loc us clementine0.9_019371m.g) derived from phytozome v7.0 (c hr-ID scaffold_19; pos 1361727 to 1362614)
gacaacagtgaacacaagcgttttgtgaggtaaagcttaattcttttcttctttttttctcctctatctttctctctgtttgtatgacatttggtattgggcatactgtgaaggttaaataaacatgatgtgggagttttgactcgcaattttaatagtctatatggcacacgttgtgactgttaaatttgtgggtaggggtctaatatatggattgtcacttgtattttatctaaagataccattcagtgggcttagaattgcttgtgatccttggtggaacggctgcgagttcatgcaacagaaattatgtagtaatatatttctatattgcgcaattaagctactatatattgtcaattgaagaaacaagggtacattccggctttaggctttcttaggtcgatgtacggggtataccttgtagaaggaataaaaagaattaactggaggggtgacaggagaatatggccataattgacaagcttgaggactgtcatttttgtaagtaggtaacaatagaaagaatgtaaataagtatttgtgataggaaaactggaaaaaaattgggaaagtaggacaagtagagcaattataaaatgagagaaccagagagtaatttggaaagaggatattcctttcgtattatctcctgatggtggtgtacttgactaacatcctgagacaaacaaacaatatgctaacatataatatcatgcaaaagaagaacagagccaatgaaaattgaataattgttcaaaattcgagtgtaggaacagtaaatttcataaaattattttatataacagctttcgtacataaaatttggttattattcttttattgtttgcttttattttatttttttgatctgattgcagttattac

SEQ ID NO: 87775 - DNA, 222 bp, Citrus clementina; identical to SEQ ID NO: 78956
  Intron number 1 from transcript clementine0.9_027792m (loc us clementine0.9_027792m.g) derived from phytozome v7.0 (c hr-ID scaffold_26; pos 2762022 to 2762243 reverse strand)

SEQ ID NO: 87776 - DNA, 711 bp, Citrus clementina
  Intron number 1 from transcript clementine0.9_007731m (loc us clementine0.9_007731m.g) derived from phytozome v7.0 (c hr-ID scaffold_6; pos 5483351 to 5484061)
ggtatgataatctttgctgcatttttcttttttaatgcttaagttgaaatttgtttttgtgcgtggaagctgaggattatttagagttaatgtgtaatctttggctttggcttgtaattaatttgtggtggcctggcgcatatgttatgtatgtatgttcatttgatgcatatgggatatacaaaggtgatgatgggtagcctatgtggttggttttcatcaaaattgcattttaatggtgaccaaccatcaccaattgttggatcatattagctagacgattaatggaagatgagcttgtaatagtgtccgtttgagtttcgtgatggttattgcgccacgttgattagtggccatgtgatatgattgacatagccggattttacaagtaattcgggaggaggttagcctgagtctgcctccaagctcgaatctaagctttgattaggatacctctagggagttatgcatatggataattaaggaataacttcggaattgcgtgtctccaacgattgaagactcatttgctgatgtgcatctcatttacaagtgctaccattattaagtaactctgcttcctaattttcttagcatttggaaggaaatttgagtaatttatactataattaaaggcttttgatttttgaattctatgattgtttgtgtgtgccagattgccagtgttgtaacaagcgaagaacttgaact

SEQ ID NO: 87777 - DNA, 516 bp, Citrus clementina
  Intron number 2 from transcript clementine0.9_026527m (loc us clementine0.9_026527m.g) derived from phytozome v7.0 (c hr-ID scaffold_32; pos 565802 to 566317)
taccgacatattacaactgggtgacgtgagccagggtaatcagattcttcttacgcctttattctctaacttagggatcaataattattagattcatggcaactcagcattgccccaatgaaaaattgcttgtttacaatgtgtatgactttggtattagtagttaattttgatggttatgcatagaattccaataacagtatttcgatacattattttcagatttctttgcattgccagaatagttccagctctgtgttaaaatatgcttcagcataaagttgatgtttagactcatgaaacgcagctgcattttcatgcataacaatttttaggcttgatgcttattttgtgaacaagtcgttggatattaaccttcttactaatcgttgaaaatgcctattgcaattgtcctttttttttcttttaattgggaccttaggcaatctgttttgaagtaaaaatttaagtagacaagctgctgaggatactttctaaatacaggggcctcaactg

SEQ ID NO: 87778 - DNA, 506 bp, Citrus clementina; identical to SEQ ID NO: 82555
  Intron number 1 from transcript clementine0.9_025559m (loc us clementine0.9_025559m.g) derived from phytozome v7.0 (c hr-ID scaffold_6; pos 6353126 to 6353631 reverse strand)

SEQ ID NO: 87779 - DNA, 656 bp, Citrus clementina
  Intron number 3 from transcript clementine0.9_031963m (loc us clementine0.9_031963m.g) derived from phytozome v7.0 (c hr-ID scaffold_62; pos 1022605 to 1023260 reverse strand)
agccttataattcaagtaactaaggaaattatctttgaaatttaagatttcttgctaatcacaatgaagatataaaaaagttactttgaaaaatgctcctggaaatgacatgtattgcgcttttaattcaaaaagatattgtaagggcttgctctactgaaactacgaatgctattattagagacgtatgtgatgcattgtttttttgttttgattgatgaaccaataatgcatctatgaaggagcagatggctattgtattgtgatatagtagataggaatggatatgttattgagcgttttataggtcttaagcatgttactagtaccactattatctcgctcaaggaagctattgaccaattattttctaagcatggattaagtatgctaggttgtgcaagtaaggttatgatggggctaccaacatgtaaggtgagttcgatggtcttaaaacacttattgttaatgagaatgggtgcaattattgtatacattgtttttcttatcaattatagttagctattgtgtctgtggcaaagaaatacgatccaattaattggttcttcaatgtagttgctaatgttgtcgatgttgttggggcttcatgtaaacgttgagatattcttcaagagaagcaattacttttacttggt

SEQ ID NO: 87780 - DNA, 616 bp, Citrus clementina
  Intron number 1 from transcript clementine0.9_033392m (loc us clementine0.9_033392m.g) derived from phytozome v7.0 (c hr-ID scaffold_6; pos 290163 to 290778)
cactcgagttattcatcctcctcgatatcttgacagtaagcatttgtcggatccttaacttttgcttgtttattttcattttgtagcacataaaaaaccctgtaacaaatttgattatgtcttaatttgctaattaagctaccgtttgtacatggaagtaaaaataatatgacatgtgtgccgctattgaaaaataaaaaagaaaaaacagccagatgggttgcttatttggctcccttactttgaggatattatgttacatcagtttgaaaatagttatttagctaactattatatttaagtgtggggtaaccctcaactcttaaactaattttttaatataagttaatgggaattcaataatcttatactgagtttttttaattgttcgtgcgctcgatgtgtcttgccatgcaattttagccattttagtcagattaatgttgttcttctaattcaagaaagaaacatccattatttatgtggtacaatcttaatttttaaataaaaacacacataatatcagtgacttattattccaccgaagatatgtctctgatgtacataaaattttggtctaattaatgtgtatttttatctgcagcacttctgccaa

SEQ ID NO: 87781 - DNA, 487 bp, Citrus clementina
  Intron number 2 from transcript clementine0.9_006714m (loc us clementine0.9_005726m.g) derived from phytozome v7.0 (c hr-ID scaffold_19; pos 2335340 to 2335826 reverse strand)
gctagggaccccgtccccttctttcttgctcctaagtatgaaccaacactctcgcctttgcatatccttttgctctctattactcatacacatattttagttaatcagcatctgtagaaaatgaaagttatttgacattctactctgtttcatgttttgattttgtttacccatctttccctgtggtgccggtggattaagttgtcgttattatatatccaatctaccacaaaatgaaatttcttctagtgaatcatagaacacaaactcttcttataacatgtttattgaattgattttcagttagctcttcttaatcatattagtgggagcatttatctgtggtgtagggtgtgtacacttttcaagtagaatttcttttctaacatagtattcgtttttttttttttaatactgatttgtagagatttcattctttacatctgatgtagggtaagcaatcaattaggattagaagcagccgtgg

SEQ ID NO: 87782 - DNA, 960 bp, Citrus clementina
  Intron number 1 from transcript clementine0.9_025103m (loc us clementine0.9_025132m.g) derived from phytozome v7.0 (c hr-ID scaffold_9; pos 6028720 to 6029679)
tccgtaatcgtaagcgaagcttttcgctgtttctggtacaaagcaaaaatttttatgttcattaatatatgcattcgcttgtctgttttaacttttagggttttggctcttttacccggaagcaaaaccctccaaaattttgttaattggctattgtattttgctttgtttgcttaattatgagtatttaaatctgggttgttttagttatttcaaaatatattatattgaagctcaagacgtttgtattttaggccctgttaagtattgtaaatcttataattctatgaaaaacgaaaatttgactttcttttagtacttaggtttgaagatgtaagggtgtgttggggattgagttgctgtggcatttaatccacataggctgttgaatggaatcattaattttatgggtacatgtgtgtgcaacattagctattattgaatccttttagttaatatgctttcgaggttaagttgcagcattgtctcagaagctgagggaaagcagcctggtactctctgtggtggtttattctgtcccttgcacgcactgagtagcactacttgcccggaagtcagactatggtttggttcaccgcctaatctaatcatacgaaaactatgaacatacctgaagggttagaaataaaattgggaggtttactgaaaatttggttcccgataggaaaatggattttgaaaagctaggatactgttgtagtctttgctatgatttgggtataatcagataggaatgtaggagaatcagccttttcatttcttgtttttaaaacggtcttaaaattgtatcccttttttcttttcttttttttttttgggtgaaaattactgactgaaagcatttgtatatatattttgttttcaaaattgaataattggatctggattgcttgtcaaataggccctgaagtattcctatgtttgttcttcataggcaag

SEQ ID NO: 87783 - DNA, 927 bp, Citrus clementina
  Intron number 1 from transcript clementine0.9_012120m (loc us clementine0.9_012120m.g) derived from phytozome v7.0 (c hr-ID scaffold_9; pos 3825298 to 3826224 reverse strand)
attgataggtgaagtgcagctcttcttttgcttggtttaaatttgatttagttatttttggtatttttagggcaatttatgggtcttttcaatatgcttctggctagagaattaacctagttatcagaaaactaatgccacttgataaatgattcttctttatgtttaatggttgtggagaatcaaattattgtccaaaattgttgcttggggccattgctactaagttataagaaaattagtgctgctaatttttggttaaagacttgtaacacaatgtggttcatgggactgtataattcttcaatctttgcttgtttcctgaattttcttttggaatatgaatagactgatgattctgtttcaaattccaaaagtttgcatggtataaggcgatattcaatgaaatccttaagagagacttttgtttaaatcaatgtaaacatggatttatatccgtgtttcaggaaatgaagcaacaaacaagatagaaaataaaaaaaattggagtgatttgattttcacttgggtgtcatatcaccttataatattgcagtttcaccttgtaatctatataacctcaatctttcttttctgttctttcgctttgttatacttatcttttcttctttgctttcattttttttttatttttgttttcatattcataccgtggttataaaatctgaagttcttccatctatttgctgtactttgtctttggctgttgccattatcacttttgctgtgagttgcgataaaattagttcttatttttatttatttctatattttgcattgctgatttgcgtaatgatgtaatagaaaaagtgagtttcgacaagcacttattatagtttcataacgtgtacttctaaacgttgtttttcccctaactttattcattaaaatactctgctatcagat

SEQ ID NO: 87784 - DNA, 1015 bp, Citrus clementina
  Intron number 1 from transcript clementine0.9_008027m (loc us clementine0.9_008044m.g) derived from phytozome v7.0 (c hr-ID scaffold_42; pos 997568 to 998582)
agcctctccccgtcgttgctgttgcgccggtgaaggtgagaactgagttgagttcaatttttgtgttttgtattttgtattttttaatagcaaaatacacgcttcttgattggatttagccaaattttctgcactcattgatttaacaaaaacagaatttgatgatacgtcgtcactattattgtgagaagacggaggactaccgttggttggaacttcaagtgactttgaattattaatttgatatctgcttgtcccgaatttgtggtattggtctcttcattttcggttagcaaaagtggagtttgcatgacacaagttttttttgggctcatttgaggttctctactagtaatgcaattttcattagagatgcaacaagaccgtcaggaatgtttatttgatcatttaatgcaccaactctggcttgtctttctttaacacttataggtactgtttcaaaatgagacctactcataagcaacattgttaccttttttaacaaaagaaaagcacgcttcatcaaaaattacatgtctcgtaatgaatatactgaacagaatcagatcagctgatgtatttgcttaatttaattgagaagattgcttgtgtgttatggtggagtttgtcaattgtcaatgcaatattgcaaacttgtggtttttttttttttgttttgatggatttgtaatttgtgatagattttaaaattatgtgcaagttttttgtgtagttagtagttcatacatgtcaaaactgtaaaatccagtaaaagcaggtgaaaattgtaaaattgctgtaaccgaaccaaaatgaaccaaaataaacaacttgtggcatcaagacacatcatttgctatttacatttgacgaagcacagcaaattgtctctcattctctgccatttttgttttgctttctcatattgaaactaatatttgcagaaagttatagagatttttttttttttttttgagcagtgtgttcattcaattcattgctttttattctgaac

SEQ ID NO: 87785 - DNA, 968 bp, Citrus clementina
  Intron number 2 from transcript clementine0.9_024131m (loc us clementine0.9_023086m.g) derived from phytozome v7.0 (c hr-ID scaffold_80; pos 777465 to 778432)
ccgagcaaaactctctccaccgtctatttgtccaggtctgctctctataagcttatcttctttacacactactgtagtgttttttttttttttttgaattaaaaatttgagctttgaactgatacatatcttggatgtatggtttggtgcgaaaattttcaggtcattacttcattgcatgaaaacattgaggtatatatatttcctgcgcctttttgtttttttttaattttaaagatattttagatgcggcaattagaatgttcggtttttttttttaatgagtcgtaggttgctagtgtgacttaataagcacattgctaaacttctgtttgattgtgttaattttccatataattttttttctctccatgtatcctgttcttatgagaactattacactgtgataatgctttaaatagaaatgtataacaaacttatcacacacactcacacacatatatttattatctacttacgtgtaattcatggtaacatataagctacttgggaaccaatggggtcatcttatttttaacctgggttccccgttcaacctattggaattgaaatgaaagtttaaaccatcaggtagtttgaccaaatctagtatatcaacaaattgcaaaactaattcccaattggatagattattataatatctgattatttgaattctaatggtgcctctttgcatattgcagaatgaatttgaatctttgtgccttgaaacacaggtagcttcttaagttattgcttctctgttgtttttccttctttgcatccagggtgcccctaactgtgagatcatcctgtctcatttagcaggatgttggcattctgaaagagcatgataaatgttctgcctctctcattgcatggtagttgctgctgtgtagtaatgaccaatagaagttacattcacttttgcaggtgggagccgctcttgatactgtagagcaattcat

SEQ ID NO: 87786 - DNA, 873 bp, Citrus clementina
  Intron number 5 from transcript clementine0.9_021863m (loc us clementine0.9_021792m.g) derived from phytozome v7.0 (c hr-ID scaffold_22; pos 1086098 to 1086970)
gattaatcaaacagccaggattgcttaattcatcggtgaggattactgaattgttaatgtcctgaatgctaattgttggattgcataatatggaaatcgcgcacatgggcattgtttcgattattgtatgtgatattatcatgtttttgactttacaacctcttgcttgttatcttcatattggtcattatcttttcattatttgtttaaccatcattttgttttctttctcttttttgtacaatgtggactaaaatcccaaactgaacactcaccacgacgggagaatcaaaagttatcagttggctttcgtgataaatctttaggtttcagttcataagccatcattaaaatgttggtcacacagagtaaccttgaccctgccttttcttattcacatgcttgtacgggttgcttgttgcttctatgatgccgtcaagcataacagaataagcatgtgaatttcatgaggtgaagaaaacagtcttctgtttggcttcatgactagttctgttattgagctaaaacgagtcttgactggaaattttggagtttggaagagtaaagtttttccatttggtgatgccacaaatccttttgccactgatggaagatagctacaactaatatttaattgatgtgtatgttgtcagctggacatgtcattattgagtttgttatttttgaagtgtttaattagctatttgaatagcttcaactccctgctggactttgttcttggaatcaactagctctttatagacgaattatgtaaacacgtaaaattccacttatttatcacaccttaagtactgtaatgcgaatctgttgactaaattgcaggcagatagagaaggatacattgcgatcatc

SEQ ID NO: 87787 - DNA, 768 bp, Citrus clementina
  Intron number 2 from transcript clementine0.9_023615m (loc us clementine0.9_023615m.g) derived from phytozome v7.0 (c hr-ID scaffold_1248; pos 443 to 1210)
agatcgcaaaagctaaaggaaagactgttgctcaggtaattcataattcattttccctttttgaatttgagaattaaaaaacaacaacgaaacccatcaatcactttcatctgcagtgttaaattgaatgctaactgtatttattttgtttcaaaaatgtttttatgttcgagaaataattatttttataggcttaattagaagttgaagaaatgtaaaagatttttcagttcattgctgcttagtaaattcaataaaaacgaaagtaggcaaaattgtattattatatgaacccatatatctatctgtaaaatctcataagcttaaacaagagaattaggatttgaatcccactcacatgagtgggaaaagagtttaattatcaatataccattcataaataatagtaataatgagaagccatgttttaaggtcgtatgacataactaattgcaagttatgaaattttattattgaatagatgaatgaacatcatacattaattgagatgatttattgtaatagaagcaacagagcaatacaaacatcctatatatatagacagagagtcattctctagtgtgagtgcttatttgttttggaatgcagatttgaaatttcacaatagtgtcaacttgccggagaataattatatattttctcataaatggttgactgccttttcttttcttttctttttttccactttttatttttcctggtgcatgtaaaggttgctattaggtgggtttaccagcaaggggtgag

SEQ ID NO: 87788 - DNA, 877 bp, Citrus clementina
  Intron number 1 from transcript clementine0.9_010372m (loc us clementine0.9_010372m.g) derived from phytozome v7.0 (c hr-ID scaffold_22; pos 1877005 to 1877881)
agcagtgactgaggtcaaagatcaagcgagctgcggtatgtttattgaactttctttcatcgattaccttgtcttgtgttttcattataggtatttgactgattgagttttggtttgacgtgcaatatattagtttgacttctaaccataagacggcatctgatccatttttggtttttgacataataagaccctattattgtttcacttttgatcattttagattgaaaaaaagcttgagagatgagtaataatatggtacctagacatttttacctttatacaagtttctttctttcccctgggtttatgtccctctggctggcttatttattgtttttttgtctgcaataatagtgctttataagtattctctgatgttcttgaaaactggacatgcttgaatctttcagctctaagaatattcacccatttcctatgcgttaatttggctttatgagcaaaacagtggcatgaaaacttgcatatatagcttgataactttcacttgtcttgcttttttattcttcatgggcttcagtcctaggatttatacttccgtatgttttcccctcacttggttatatatgttctgtttctcgtttctaattatcaaactggttagcaagttagtatccaatgaagaagaagatacaaagatgtggctcagtttattgaagattttttgcttacatatatataaggtttgtgcccttgcatcagtttaatgcctccaaattatgtattggaagatcttgctctgctttcttttacggggcacaagttgcagatgatacttcttatacaatttagaaataaatcaagttgtttgtatttgctaggtgcttgttgggcattttcagccacaggtgctatt

SEQ ID NO: 87789 - DNA, 584 bp, Citrus clementina
  Intron number 1 from transcript clementine0.9_007451m (loc us clementine0.9_007451m.g) derived from phytozome v7.0 (c hr-ID scaffold_36; pos 649018 to 649601 reverse strand)
cacttaacaggaccgagcttattgctttgctcttggtatgcctagcctcaaatcgatatatgaaattaatatattcctgtacatacttttgctaagaactaatgttaagccctggcctattagtttaaccttttaaatcaagtggtttctctaatatagtatcaaattaagatctcgggttcgaatcctcttagttacaaacccttggattaattttttctttatttcgtgactcactttcgaactctaatcttaaggcttatctacgaatcttgtcttaaggtccacgtttcactttaggatctgctaaaactctaatttttttattgaagtcttagttcacgtgaaagcgttgtaaagatttgtactgaaactcttggccattactaaggtttgtctaaaatgtttatttcttcaattttttgagtcgttttcgggctcttgtcttttgggttagtttaagcttttggttcaaacacagttcctgtgacataactaataaaataactaattcggattgctgtttatttgttattttgaaacttacaggatataattttgggtggcacagacaccaccacaac

SEQ ID NO: 87790 - DNA, 707 bp, Citrus clementina
  Intron number 1 from transcript clementine0.9_031202m (loc us clementine0.9_031202m.g) derived from phytozome v7.0 (c hr-ID scaffold_129; pos 492108 to 492814 reverse strand)
ggagcttcacttcacaattttcaatgtgagtctttttttcttttctttggttctattgtattcgttgaatttgatttggttgactttttgttttaggtataaatattcagtgttcatactcaaagcctttacacttttgtttttttcctcctcagattctgtttggttcaatagaatatggatattttgatgaattaaaatctgttgagaattttcttatttttcatcacaagttgttgggattcattgtcacgtctatggtcgatgactctgcttctttcatgatgatataataatatttttttggctgattggccttatgcagcttacttttatttgtataagtgatgcttgtgaatcattttacagctgcaaattaaacagcataaatgttccttttagaatcttgtgaaattatttcatttttggctatttcttatccgattaagggctaaatcttgattgctatgttgtcattttaatattatgtaatttcctgattgtgaggtaaacccagaattctttaatggtctaatttattgaattcaaacagtacagtttttttatgccatgcgttttgtgtttagtgtttaatactgagttcatcattgaagctttgcaaaaatgtaatacaaaacttcctctttcacatttttatgatggataatttagggcttaaaccaagggcagagacaaaaggttcctgc

SEQ ID NO: 87791 - DNA, 653 bp, Citrus clementina; identical to SEQ ID NO: 86876
  Intron number 2 from transcript clementine0.9_018538m (loc us clementine0.9_018538m.g) derived from phytozome v7.0 (c hr-ID scaffold_46; pos 475224 to 475876)

SEQ ID NO: 87792 - DNA, 433 bp, Citrus clementina
  Intron number 1 from transcript clementine0.9_032243m (loc us clementine0.9_032243m.g) derived from phytozome v7.0 (c hr-ID scaffold_17; pos 3931729 to 3932161)
aaacggattgagcggatcggattgtgaacacccccgtacgaaggacccctgatattgatgtccatacatccgaataaattttctttatgaggagtctacgtcatgatttctacgtcacgaattctccaaaatatgatgtctctcactcttatctctcactcttatttaaggcaaacctcatagagtcaatcacaaaacatgaagaaaattgattttgttcctagtcctcactttctaaaaagaattttcgttgaagctatatatatatatatattgaatcttttgaaaaaaattgcttcctgagcatatgatttcttgctgggtttcttcaattgctcttcttgttcagttgttaaagctttccagtttcctctctgtcgttcaaagaatatttgatcattgaagtgtcaccttcgtagtgttaatttcggtg

SEQ ID NO: 87793 - DNA, 1034 bp, Citrus clementina
  Intron number 1 from transcript clementine0.9_016424m (loc us clementine0.9_016250m.g) derived from phytozome v7.0 (c hr-ID scaffold_17; pos 2084340 to 2085373)
aatcaaacggcatttctcacatcaccaatcctctggtatttatttatttattcaaacacctttcttacgtcatgttctttgtatgccataggacgtgccattggatcttacgttttcgtcaaagcattcgagctgtttgataaaatgccaaagttgataatgcgtttgctgttaatgctttacattttacgcaacagtttggttgccggggacgatgcatgaatgagagactatgagaataaacattttgagaacttttttagcatatgaattcgaaaatgtcgttcactaaaagcaaaattttatgcgtagacattttgatttgcactaatctttctgccggttcactggaaaaaaaaaaatagtacttgggattttcctttaatagggcgtcaaagaaatcgcaatttggttccatcttcaattttggtagagttaatactaaggctccctttggttatttgatgtccagcacggttctaaaatgttacttgcaacttagtttggaagttaaagatgatttttaccgcaccatcttacctaattttttgtcaaaattattattaaaaattcaaaactactattaccttttatttcatagttagagcttccattttgcagcggcaccgcaactctgcagcaccaaatgcagccttgagataaaataagctttctgaagtcagaaaattaccctttttgacatgcccttagcttagagcacctttacatttccattattatctgtatcctgacagcttcccaatcaattattggaacttcctcatgtatgtactgttcattgtatatgactttattagcaataactatgaaatgttttctgttgtaaggtaatatttttgaaactgcaattgaaatctttttgtgatagccttgtattggtcaaggcatacagttctgttctaatgaacaaatccatctcccttcatcctactgtatgattaaaactgttgatttgtttctctgactccgttttccttggagatggcacagattttgcagcatctggagaatag

SEQ ID NO: 87794 - DNA, 542 bp, Citrus clementina
  Intron number 3 from transcript clementine0.9_008880m (loc us clementine0.9_008880m.g) derived from phytozome v7.0 (c hr-ID scaffold_6; pos 2243336 to 2243877 reverse strand)
cttggcggatttaaagaagaaggaggtatagctttacttagcttatgttctttataattgtttttattttttatttttttaatgacttgcgcttgcttattataaataaaatacccattttggccacaatgtactggattagaacaacacaaaattgcatgtagagggtgaacatgacatgttgaagtgaaagaaataaattaagtcatacatttttcatctactatggactatgtttcttctagcattccttttatatcatttgttaaaaaatgaaaatgaacataaaaaattgatgaccctacttgttaactggctcattttcctttttattatcttatataatcaaatctattgtccagataattgattaaaaatttagatcaatgaaaattttgttggagataaattatgtgttctgcattgggttcatttgactataaactctatgttgtgtgactaaattagtacagtcatctaacattcttgttgcaatttgtactctaggattgtcttctctgtcccacaggctttgcagccaa

SEQ ID NO: 87795 - DNA, 658 bp, Citrus clementina; identical to SEQ ID NO: 78006
  Intron number 1 from transcript clementine0.9_008401m (loc us clementine0.9_005092m.g) derived from phytozome v7.0 (c hr-ID scaffold_22; pos 245131 to 245788)

SEQ ID NO: 87796 - DNA, 873 bp, Citrus clementina
  Intron number 1 from transcript clementine0.9_028986m (loc us clementine0.9_028986m.g) derived from phytozome v7.0 (c hr-ID scaffold_110; pos 48133 to 49005)
ggtgatgttcatgtgatattattcacaaatttgttgaggcatgcggaatgcactgtccttaaaaccaatttccattcttttagaaagattttttgatgcaatagggacacaaataatgcggattgatctctagaattcaatgacattattattgtgaggttgcactccaaccagtagtgtaaaataacaaaagaaaaattatgaaggaaacacgagatagaaagagaggtcatagaggttgttgtcccttgaaggctttttatgtgtactttatatagagaaactctctataatcctttcgtaattcaatttaaattagtcacccactttttttatttattttgaattagccattcatatgtctcataatttatttttactaatataatccaaatcatatttaaattgatttattcaactttaatttgcgattaaatcaaatacattactaatttcaaattaaatataaaagtgattgctctttaatgtaggatattagtattatggaatacccaaaaaattcctgcagcctcaactcgatattcgcatcaccagtaagcaaacaatatgtcatcttcctcagcaatattaatcttcttcttattcactctttttcttcatagctaatgtccaagttcctgccaataaaacatttaagtttgtgaacgaaggagaatttggtccatacattaatgaatacgacgcaaattacagaatgttgggcatcttaatgctccattccaggttggcttttacaacgcaataccaaatgcttacaccctcgctttccgctcgggccttcaatgattcgtgccaaattaccgttgggtctgggaagcaaaaacaggcaaacaggtttgtggaaaacccacc

SEQ ID NO: 87797 - DNA, 591 bp, Citrus clementina
  Intron number 1 from transcript clementine0.9_016057m (loc us clementine0.9_016057m.g) derived from phytozome v7.0 (c hr-ID scaffold_9; pos 1568884 to 1569474)
atcaaaaggcaagaacaataaattcaattactcgaagcaatttatttttcttgtttaattcttttgttatctatgctttcattattttttttaaaattttttacttaaacaattatcttaattttcatgatcgtgtgcctttatctatagtgattcttcatcagcaatgttagtaaatataatccatctgtttaattaacttttctcggtatcgttcatgccccgatcatagctgacatatatttatatatagcacaaaatcgaagtatctatattcacatatataaattgatgcgtatgctagatgatatgtttattaatttgatatattaatctgtttgatcagccttcatttatttgatctttttcattctaataagtacgtacatatgtgtacttaggcatttagcttttgatttacgtattttatttttattttttgaaaatatatatattccttcatctcgaaccgattcttgtaagccgattcttgtttttatttccttgtaattaatatacgtgatctcttaaatataaataattaacttgatctcagattgatcagcgcatagctggcggtggatcaagcga

SEQ ID NO: 87798 - DNA, 1017 bp, Citrus clementina
  Intron number 1 from transcript clementine0.9_005666m (loc us clementine0.9_005666m.g) derived from phytozome v7.0 (c hr-ID scaffold_9; pos 700388 to 701404)
ttgcagcttcagctgggcatttaggtacttttgctaacttcgtggtggtaactgttaggtttaataatttgtatttttataccaaagtttgaccaaataaatctaacggtgggcctctatgtcttctcacgtgttactcttcttcaatctccccccccccccccccccaaaaaaagagtcctaagggagacataatcgcaatagaaataatggtaaaatcgtataatgttgttagtgttaaatgaaaaagaatgctgatttctaacttaatcctataaccctatatgattttatagttgtttgttgttagcgtgttagaatcttcgatttaaatatcaatactctttttcctttggatgtgttttaaagagtacatagttttaattcaacattatttgatataagacctcttcaattcatatttttgtttttcattacacaaagaaaatttttcttaccacagtataagttttacacaatattatacataatatttcttgtattggagtgaggaatgaaaatttaggtttcaatattgaaaagacttaaaaaatggaggagattttttatggggaggggaagccgctgtactaaacaacattatactatgatcatttaccatttcagaagtcgttgtccacaacaattttaagaaaatatacttactacaaagatacgtgaaaagtcttctatacaggcatccataaacttctcttttaacttccaagtatgttacatgatagtgatctaaaatatgaaacgatcctttaatcaaacaccatataaagctaaattaagtaaaaattgaacacgattaaaacatagaaagagtcattccctttgttaaacagttatcaatttaggcatcaccgacgttatttagctgttgttgtaccgtattgatatccgcatcgccgtcaaaatttggcatcttggcttttctagtagccatgaccgagttcctatcatgcataccttgtagaaattgtgaacgaacttctagaggcgcggccagaa

SEQ ID NO: 87799 - DNA, 763 bp, Citrus clementina
  Intron number 1 from transcript clementine0.9_032387m (loc us clementine0.9_032387m.g) derived from phytozome v7.0 (c hr-ID scaffold_30; pos 28875 to 29637 reverse strand)
cactctaaggaattgcttaaatttgccccttccgagtgacttgtttggtgactaactggccaacgctggcgacggtgctgtagttaaattatctgagagtttttgtttttgcttgaaattttgcttttatgggtgtatctctcgatgcatgtttttggtgtttataaacgtgtaatccttgcgaataaagagatcaataaatttaactaatctttgttttaccaattgattatttattgcctttgatttcattttttactcaaatgataagaactcgatcagaccatgccaaaggaatgcaaggggaataataaagaggaagtcgggagagagatttcacaagtgcattcactatcatacgatacgtgaaaattgttacgagataggtacatccattcctatcacgtgttttatattaatgaatttgaaaaatgtatcgtaaaagtagtcatgtaatttgtaatatgctcattaaatatttttgtaacacactatgagttatatatcatagtaattaatttataagatgtaatgcacacaacaccttatgattcaaagaatgtgttattaaatgtacgattaaagaatttgttgttaaatacaataatcatcattatttgtaatcaaatatatttgtagagaaaaaagtgtgttgttaaatattgatgatcatcatgtaaacaaacatatttataaaaataaataaaatagaaaatgcagtggcgtttgtttctttatttgaaatttgaatagacctaattag

SEQ ID NO: 87800 - DNA, 727 bp, Citrus clementina
  Intron number 1 from transcript clementine0.9_004880m (loc us clementine0.9_004880m.g) derived from phytozome v7.0 (c hr-ID scaffold_2; pos 432681 to 433407 reverse strand)
cccatcagagttttggagaagatttctgtaagtttactttctttttcggtgcttctctagtcaattgaaaggaaacttaagaatgttgcattctgtgtaaaaaggtttttttttttttcaacatttactgcagtttactacaagtgggttgttatttacaacttaagtaaatcaagaaattgggtaattatttgaatctgtttacaaatttttccttctgcttactttccgtttggatgccgagaaaatgaaggaaaaactctgcatcctgagtaattgcgtaaaagagttttttttttaaaaacccttttaattttttaatttaagattatttggaaatggggatgagataataatttctaatttttatattgcttaaaattattctgtgttcatattttgactcacaagaggaggtgggtggcaactggtgcattgatttttatttggggtggctacggaattcgctgtttatggctgctttcttatgattagttggccgttgtgttgctttctttctttttccgtgttgattcttcgagtgtgaactttcaaataaagttgtctttgacttttcttattggaattttctgtcactgtttcacaaaattttataatagaaaagattttgatcttttactgattgtgctttttactgttggtgatgcaatgtgatggtaactagttatgtttttattttattgttttgtagactccagaaatttgg

SEQ ID NO: 87801 - DNA, 478 bp, Citrus clementina
  Intron number 1 from transcript clementine0.9_005431m (loc us clementine0.9_005431m.g) derived from phytozome v7.0 (c hr-ID scaffold_94; pos 10996 to 11473)
gatcgtcggacgattatttacgtgagggcaggaaggtaaactcactagaaaactggtaataaaatcgatgtcgatttagtcagtcagttaattaataaaccaagtaattcggtaccaatcaatttctatctgtctccgtcgacgctctcttcggtacggcgtctctttaatttaatttaattttttataattttaattacggaaactttttttcgggttctaataatgtttgtgattgcttttattgactaaattatagcaaatcatgattactataatcatatggttttcataaattatttacgtgaaccagtttgcttgttacatgtcagatagatatctaatttttctttgaagcatttgattttttttttttaataataaaaattctagaaagcgtaaaaaacaaattatacttattataaagcttgaatttttttcaggtacgaagagagtaatttgaaggtggggaggaaga

SEQ ID NO: 87802 - DNA, 855 bp, Citrus clementina
  Intron number 1 from transcript clementine0.9_002341m (loc us clementine0.9_002341m.g) derived from phytozome v7.0 (c hr-ID scaffold_94; pos 781422 to 782276)
accctacttcgaggagtattttgggttataaagtaagcaacacatcttatttttccattggagttctgcatagcttatgggattatggttactatgtagacagtatactgtatgtatgattcacttgctttactctcagttaaattttaacatttcaagtatgattttacagttctgaattacaaaatttcttgtgaagggaaagataatagctgccaatggtgtaaagttttttacaagtatgtttggtgtcttgttggattgatgtttgtggtgacgatggtaaaagaactaaaaggaagcctagtattcatggctttgtgaggggattatacctgggctgatgagcaatgaaatgaaatgtcaatcatcctagtttgtttgatttaatatgtaaggggtccttttcagaaaatgataatttgattaatgcaatttagattacacttacgtgccattttgaagtgtgtgtcgtaaaagtgacattttgaagtctgtcgtaaaattgtactgtatcaagtgtggacataggatttatttttacaaaaaaagaatatgtccctaagcctggtcggaaatagatgtttaatatactaaagtaaacagtgatgcatacttttttttttttaagtgtgtgtgtgagtgtgtaagttaggtgcttgtacggttagtccagctgatgctcaattagctttatatgttcaactttatccatgattgctgagatttcggtgccgtgctcctctaagcatttcttgaatttttcttacatattacatgccatgatcattattttctatagatcttccttggagatggctttcaagcacaccccttttcgttatctcatgcagg

SEQ ID NO: 87803 - DNA, 640 bp, Citrus clementina
  Intron number 1 from transcript clementine0.9_023900m (loc us clementine0.9_023900m.g) derived from phytozome v7.0 (c hr-ID scaffold_9; pos 1260681 to 1261320)
gctgcgacgatcctaacttctcttacttcttcaaggtcccctctctttctctccctcagtattacctccgtttcgccgctcttgattcttctttacttcgtatttacttcttgcactgctcgctttgcttcacataatggatgaatttcggtatggatttttcttttctgttttcattgctctctctcgtacaccaaatgaatgcgagtacttatttttaggtttctggttttaggttactcattttacttgattttcaaatacagatgattattgtgactatgatctctagtaatgctcttcaccttgttttgctttggattttttgttttgattctttttctaagtgttcaaatttgttgtctcctgttatgtatgtttgtgtttttatgtataatgattatattcagttcaatctctgtcactcatcatattattttcagatctgatttatatatgcttatggatgttcatataagttgattttcagtaacattgtatatcactcttatcaaattatattatatgtttgttttgttgattctagttagttaatgttggaattgaattttaatcttgcaatgctctctgaattagatgtttatctgtttattttttgtgaggtgtagttgaagtgtgg

SEQ ID NO: 87804 - DNA, 754 bp, Citrus clementina
  Intron number 4 from transcript clementine0.9_020400m (loc us clementine0.9_020400m.g) derived from phytozome v7.0 (c hr-ID scaffold_54; pos 1401312 to 1402065)
aaggacaaaggtatcttcagtctggctgaaagatttctctactttgtgaattatcattttgttttttatttcatgttgtcatttttaaaagcataatactttcaatatccagtgaaaattttaagcatattttaagtattggttgttggaccagttaggaggtccaagcagacgagtgagttttataagctgacttgctagacaagctgagctacagagtctctttccaagacccctagtctagatcagggggtttgtgaacatatgttccttttccactacttgaggtgattttagacgggtgattttaactatagacctccatgttggcctcagatgatatataaccaatgtgcagagagtagctttgtctgatacatattcaaatgctagatgtgctcaattttggttttgtttcatgctttttggtatgagttttaatgctatatgtcttcatggttcaaagatagacttgtttttaggagaattgaaattcaaaggaaactgttcaaaccattattcatttgaatgctgtgatttccttcctcgcgaagttgtgtatcagagatacggtcagcttatgcgtttggacaatgtgatgcctacttcatattgtttatagagcacactaaactgttcttattgctaactaagtgtacctgcactatttcaaagcttcattaatcagatattgaggttcttcttggtgcaattctcatttattttgcatgttctgattgcagcatttgcacct

SEQ ID NO: 87805 - DNA, 356 bp, Citrus clementina
  Intron number 1 from transcript clementine0.9_024106m (loc us clementine0.9_024106m.g) derived from phytozome v7.0 (c hr-ID scaffold_26; pos 2589334 to 2589689)
ggccatctccaacgacttcgtcagtgagttaaacggtgcgtttttgtttgatgttttcccataattgaatataacgaaaaacactttgctttatccaaggttgaagttttgggtatgctctgatttcataaagcaaaattgtaaataaaccaaaaaaaaaaacgtttttgcctatctgggcatctctactcctgcaaacctagttgaaaaagttatttttatcattgaattgagctttcttcttgcaaaattggttaaaaaatgaacatcttttttcattcccttttaagtgagtcatgtacgagaaatagttaatgagagatgctgaagtttatattttgattatgttgcagtag

SEQ ID NO: 87806 - DNA, 760 bp, Citrus clementina
  Intron number 1 from transcript clementine0.9_034895m (loc us clementine0.9_034895m.g) derived from phytozome v7.0 (c hr-ID scaffold_80; pos 12623 to 13382)
tcatcggctccattccacttgtaatattttcttcattcccttttctttttaccattagaaaactgctttacttcttcttcttctttgtttcacatcaaagcatgcttcgtttatttaatctaatgacactgctttgtatgccttttgttttgtagcaagttaacaatttgcttgtgctcgctagaaaattgtttaaatgactcaatataatccacacagcaataatataacaatagctatttttaaatccagatcaacgacaagcaaccacaactatatggttaaacaagttaaatcaagctcgtttagctataataagcaatcaactttagaactttagcttgactttcataggtgagaataccaagcaggtctattttgactaggctaagatcaacaaattaataaactttgattaattattggcgaagaattaatcaatattacttggaagatattaagaaactttgttcaccttttctgtcactggtccaaataatttatgaagtacttttttgagccttttttttttggaaaggtagtactttttgagcttgaacaagcattattataactgatcttagtttactccatattttccatgctaccgctgtttacataaaacggattttgggagaatagcatatatttcatcaataatcaattgagacatataagattagccaacaaaatgatatctaatgtggacaatgccattaaattttgagcagtttggttttgcctctgcattagagactct

SEQ ID NO: 87807 - DNA, 966 bp, Citrus clementina
  Intron number 1 from transcript clementine0.9_030408m (loc us clementine0.9_030408m.g) derived from phytozome v7.0 (c hr-ID scaffold_6; pos 4635057 to 4636022)
ccactggcctcactgctattgtcacaggtttttgaagttcctttttcttaaagaaaaaaaaaattattgtaataaactgatatctgggttcttttctttttcttgaatgctcgagtaaattgttgttcggactggttatttatttggtagcttgagctctggataattttggggaaacaactatggcctgtggggcctgtgtatggtctcatatgatcattgaaagtgggggatacatgcttcagtacctaacatttatctacacgttagatgagaacatttaattcagtactggaaaatataacaattttttcacttgttactagcgtattgaaacctactttgattaacatatgtgatcacttgttagttgggtaaaagttatgctctcaaaattaattttaaagcaaatcaaccttcctgaaatttagagttcatcatgtatttttggtatcaggggatgcttaaagcggcttccctgttctagagaatatttaatatatatttccatgtttatgtgatatacggtctatatgcaacatgttgctgtctcgagagaacagtgtgatttgagggattttcttggtgggcttttgaacctttgtccgactccaaaattgaacccagccacacgcaagctgcttttatagtttttctcttgcaagctacttttatagtttttctccttttcactgcacgaaaaatgatgaattgcaatttatcttatccctcgtgcttcattgatgaattggaatttatcctatccctcgtgcatggttccacatttcttgcttttgacttgggtaagaagttcttaataggacctgcaaaacggacatattctagagatatgttgatcatgaagagcaactgtttaggcacgagtatttttctctgtgtactaattaggaattttcctctgtggttacaggagcgtctagtggcatcggcgctgaaaccacacgt

SEQ ID NO: 87808 - DNA, 638 bp, Citrus clementina
  Intron number 1 from transcript clementine0.9_019284m (loc us clementine0.9_019284m.g) derived from phytozome v7.0 (c hr-ID scaffold_34; pos 1864004 to 1864641 reverse strand)
cattctctgccatttcaaggtcattttgcgtatctgtaagttagtcaacgttttttttatagtatttcattttcagatttttgaatattaggttttaatttgattatttttaagtaacaaactacaatgttttttttccctttttttatcttcagtgcttgatttcttaattttagctcacacattgggttttaatttttgaattaatttaaactaagtgacgtttaggattttaaatatcttctgttgttgattttatttttttttagtcaatgcgtcgcttttttttttccgcttgagtttgtttttatttagaaatttgatgtatgatttggagttttataattaaaatattaggtttcacgtttaattattttaaactacattaggttttaaattttaggttttagttttaattagtttaaactaagtaacgcagtatgacatttgaaatttcaaatctatttcattgatttttttttgttagtcaatgcttcgcgattttaattctttcttttgaatttaatttatattgcatgacttcttactattaggtgttaatttgaattagtttaaatcaatctttttggtttttatcatcaggctgaggtgaacgcaaagcattcagcgttagctct

SEQ ID NO: 87809 - DNA, 852 bp, Citrus clementina
  Intron number 1 from transcript clementine0.9_013388m (loc us clementine0.9_013372m.g) derived from phytozome v7.0 (c hr-ID scaffold_6; pos 4546273 to 4547124)
acatctcccaacttgcaaactcttcagagtccaaggttagtccttttttcagttttgacttttcccaataagaatctctcaaagccctaattgcatcccctttaaggtctttgttgtttcagatcttccgtcatctgcgtatttatctctatctgcagctgaaaaatagggtgacgttttttaatttctgatttttcatttataaacccttgaatttaggcttttttctggggttgacctcctatttggtttctgggaaattgaggaataaatattgaaattataaatcttgtatttggctcgatttctgaagaaatttgaagtgctcaactgacctgaactcagctgggcagcttaggctccgtctaactgaagattcggatttagggtgaatgcgtgcttaaatttgaattgatgatgaatttttccattttggtcgattagtttctgtgagcttttgtttggctgctgtacttagggagggaatataaaaaggactgaaatattggaaagtttaaatcaattttcctattcaggggtagataaaagatattgatttcttaggtttcggttacaaatgtggaattccatcaaatcatctatgaaataattcctttccaaatattaaaaggcaagtgcttgcagaactttatagaatgcgaaatttttggggagaaaccaaaacctctttttctttttttttctctctttttatttttactttgcagcaatgcatgtctgtttagtcaatgtagctgatgagttatcatagcaattgcatgcaataatgtatattttcggcttgattttcttgcaggttgcatcccttcattggtcaagtgttcatcagag

SEQ ID NO: 87810 - DNA, 844 bp, Citrus clementina
  Intron number 1 from transcript clementine0.9_017363m (loc us clementine0.9_017363m.g) derived from phytozome v7.0 (c hr-ID scaffold_19; pos 635343 to 636186 reverse strand)
cagctcagctcagagtatgtacttcttcttcccctctttatttatttatttgaatttactaaagccaattgtgtgttagcttctgtgtttaagcttttatgtgggataagtaacctgttgattggatttgcatatgcttttgtcagaaacttttttttttttggtggagatcatactctatctttataataacaactttgagacgaaagatttgcaatttgaatttgtaatagatgaagaaagatattgttgtaatgttgttccacaatttccctttatttcgtaatccaagctctccttttatactatgatgaattacatgattattactatgatgaaccctttggagtatattccacagaatacagttgaagaggtgtaatatgctggattgttatgttaaagctgttagaatttacacaacacattacaattgaagaggtttaatacgctataaagaatagccatgtggaatgaattggagtatatggttttgcttttgtcctgagatcagtttgcacatttaaattcagatagtgatagtgtaatagaaactttaaatctttgactgttctgctttgtttacctaagaggctgttaattttatatttaaattacatgtcaatagatttaattggatgacttggtgacttcttattatgtaaatggtttaggtgactgcttatatttattacactacagttatgttgctcctactgttgcattatttcctgttcatttccaagaatgtcatgtgcatgcaagaaaatttgatcttggtgattgaaaatgcacttttaatgtagtaatatgaatgttaattttccaacttttgcagaggtca
